United States Patent Application Publication US 2026/0103690 A1 - sequence listing, part 102

SEQ ID NO: 507141 - protein, 405 aa, unidentified
MVVCGVDPSREGFAVSYVEGLEEIDYREYRNTMSGYETFMRDLNERGELAKVCIEGYGDFVRQLVLYLKSNGVSVYEVNPRMSRQLKDSISIHKTDHIDAYTCAVSYMIRRQEELEVDGRMEGLKNLTRLYSKLSGEVVSFKNQMKSALNQGFGCMYKELFEDLNKLSLGFYMTYGSIKEIQDSSEGSIYETLCLAGSCRYKGSYGKKKAAKVKELVKDIDTSSTSSFTEIQSSVIKGYASTLLIMLEQKEKIKEQIEKYIKQEYPDYKEFFEDVKGITPLNMAVLISEGGLTRIFKDEGHFASYCGQAPRQYQSASMNKFISSPNYNRYMANTMHFLACQNVLKSGIFYDDYIEAKKHYSRKLRALKKIKRHLCRILFFKLMTYRLHLISVNNIKSNKGKSCVA

SEQ ID NO: 507142 - protein, 476 aa, unidentified
MPDSIFKTTGTNLRDVLASHDLGEILYTSIDVAKYYHSAMVVNFFGDVIIPKFDFPYNNHGIDFLKKKIQTAQKKTQARKLFLGLESTGHYHENLVASLTASGYDVQVIRPIDSKNERDNMHAKTDAIDLAAIAKVIISNKGTRSHMPDPIYYNLQRASRTHRQLTYQETRTKNIITFIVDKTFTGLWNPEDSIFSDKWGKASLLFIENYPTPQQAIKLGVKRLAAFFRKHDTKLGMDTAKKIIQLAKITPARSLEEMESDIKALKAHIQVLRTLMSTISEQKKQMVKFLIQTPGIYLLSVSGIGVVYASDFTAEVGDIHRFAYAGQVISLAGTAPRKHQSGEVDKPNLPTSRKGKNLLRVTVNQMALSLNSHCPEYHSYYSKKHYQYKDTPGKARTATANKFIKLAFALMRNETLYYPRTGNPLIPEKEYYQSIWNKMKQKLTPYLCDEVSDNIPQDNYLTKIQRELEEKYGINT

SEQ ID NO: 507143 - protein, 416 aa, unidentified
MSKPKKQMIVNTESLIIGMDIGKYHHMVVALRPDGIFKKPVKITNDLKGYRELLGLIAAWKNECKTEKVLVGMESTGHYWEIPARWLIGQGITVVQVNAAHTKRAKELEDNTPGKTDQKDARIIAGLIRYGKYFSCMLPEGVYAELRELTKIRQRLIGELTEKRNYLRRLLDTVFPEIFILFKKSDSKTLLHLLTEYPLPDDVMSAGAQKIKTTLQQKYKNLVTKRFDTLWCLARDTVGVSVGHLSYRVAIRTTVERILSLKDSLTKIEGDLAALLSRIPEAPYILSLKGLGIVSAAIIIGETGGLSRYTHAEELLKLAGLNLYEISSGTHKGKVRISKRGRPLLRQGLFLLATVMVKKGMPFHEEYSRLRNRGMETIKALTAISRKVCRLVFALARDKRFFSQEAPQRMQQQKAA

SEQ ID NO: 507144 - protein, 345 aa, unidentified
MRKVVGLDISLTKTSVCVLELDGTIIWQGKVDSEPGPIIAKLAAWQNDIDKVGLEACPLSEWLHGHLTNAGFTAVCVETNHAQRFLSTRPVKTDRNDARGLAEMMRIGHYRAVHVKSVEAQMVRTAIQARGQIVSALLQMQGTIRGLLRMHGLKMGTTHRCRFSDRVRELIAQKPALEVAIEPLLRSSEQLATERKEMDNMLQRAARRDDVCLRLMTIPGVGPITSLAYRATVDDPFRISSSKSVGALFGLTPRIYQSGEIDRTGRISRAGDSMMRHLLYEAAAALMNRIGKQSRLRSWGMAIARRRGFKRATVAVARKLAVIMHRIWISGSRFEPGNEVQLPAA

SEQ ID NO: 507145 - protein, 391 aa, unidentified
MSQYFVGIDISKYKHDCCIINAADQSIVAKFTIQNDKDGFNELLTSLQSLSTPDDIKIGFESTAHYALNLELFLEKAHHSFMEVNPVLISEYKKSTSLRRTKTDSIDCESIARWLMTIEYKPHSKGFYHAYSLKSLTRLRDRLIRQRSFYLVKITNVLDHTFPEFKPFFQERFSKTALYLLENYGSAEKMARMNSASYDNLRRISRGKFTPQKFIQLKSIAANTVGVNNSIFDTELNCLLTLFNEAAKQVSVLEAQITELIKEVHPHYMSIPGIGPLSAAVIYAEYGDISNFSSPAQMLAFAGLEPGISESGTESHKGRMVKRGSSQLRYTLMNCALPLIRFDVTFAAYYAKKRSEGKPHRVAISHVTKKLVRVIFALERQNTDFAAIHLR

SEQ ID NO: 507146 - protein, 418 aa, unidentified
MKHSKTKKIAMINKKTLIAALDIGKKVHHGYFRAPSGKDVQPFAFHNTRKGFDKFWQKLCNFKQKQMLEQIIIGFESTGPYAEPICHYLREKSVKLVQVNPMHTKRIKELTGNSPNKTDKKDPRVIADVISLGHCLTVIVPEGAAAHLRRLTQARERAIERRTAMSNQLQHLVFLIFPELVHIIKPSTKTGMYLIKHYSDPNKLLFAGIDKVNAIIKKVSRGRLGTDRGEQLYDAAKKSVGITEGKESIVFEIAHLVCKIESENLYVEELEKQMGDYLKKIPYSHSILSITGIGNITAAGLIGEVGDFRKFKSISEVLKLAGLDLYEISSGAHQGYRRISKRGRALMRKLLYFAAINTTRKNGILHGPYQQHLAKGMPRIKALIAIARKLIGIIFALVRDHSHYRADYSSQLELKKAA

SEQ ID NO: 507147 - protein, 419 aa, unidentified
MTTNYQVAAGLDVHKKFIQATILWINETKKQRQFPRTHTGLLGLKDWILEHKCDAVACESTSDYWVNIYDLLISYVLVIVGNAHDIKVLAHKKTDKIDSEMIALLALKGMIAPSRVMPRYHRDFRKLVRLRHFLVGKRTDIKNRIHSILDSELFHLSTILTDIFGISGQRVMQGICEGSSVDTILRSIPHRVRTKKETELRELIEQNLSPGALMQLGHCLRVIKQLDEEIDMLTDEARAYTLRKHPREYRILKTVPGVGDIAAITLIAEIGNFKDFISGDKLASWLGIVPKVYQSANHIVKCSITKRGSRIARWIMTQVAHGAVKTRKNVFREWYEVKKAVIGTGKAIIALARKMITIIWHLIVNDEEYSDKYSEPEQPESKKVHTIRIPTSTNYTLEQVIVLVSDAINYLNKRDPDPA

SEQ ID NO: 507148 - protein, 342 aa, unidentified
MDHFAGLDVSVKETSVCIVDDTGKIVREVKVASEPEALLAVLKNPAYHFKRIGLEAGPLSQWLFSALAEAELPVVCVETRHMQAVLKAQINKTDRNDARGIAQMMRVGLYRPVHVKTLRSQKLRMLLTHRKLLQSKAIAIENDLRGTLRNFGLKVGIVGTVKFEARIKELVENLPDLAVLVEPLLVVRRVLREQFVILHRRLLAIVRDDEVCRRLITTPGVGPVVALTYRATVDVPARFRKSKSVGAVFGLTCSKYQSGEIDRSGRISRCGDEMMRVMLYEAAQSMLYSKKWSWLKAWAMQIARRRGMKKAIVALARRLAVILHRIWVDGTEFRWTREAITA

SEQ ID NO: 507149 - protein, 338 aa, unidentified
MTIYAGLDVSDKTTHICVVDDAGAIVRRDVVASDPEVLAKWLAKHCADLTRVVLETGPLSTFLYHGLTERAVPVVCICARHAKKALSARVNKSDVNDAESLAQLCRTGWYKRVHMKAGATHIDRAALKIRAQLIGSRGSFANQLRGMLKLFGLRMGRVTTPGKRGERLDALFTQRPDLRPVFMPLIESIEALDAQLALSSKLLDARAASDLVATRLMSVPGVGPITALTFKSAIEDPGRFRRSADAGAYAGLAPRRSQSGERDYNGRISKAGDPMLRSALYEAANNLLVRVKRPVALQTWGKKLAETKGHKRARVAVARKLAALLHTLWQSETDFCWN

SEQ ID NO: 507150 - protein, 337 aa, unidentified
MQHLAIDLGGKESQICVRDSKEKILEERKYPTKRLGEYLAKQPHSRVILETSAEAFAVADLARHAGHDVRVVPATLAPSLGVGARGIKTDRRDAQVLSEVSCRVELRSVHIPSEQARSWRTLCNSRDALVSSRTKLTNTVKSQLRCRLILTHRRRSGATPEQIRSLWTELAGSVPPHVERQLLVIEMLDAQIAEADKEIRQLVKPNETCRRLMTAPGVGPLTSMRFVATLDDVKRFATAHDVQAYLGLTPGEHSSSTRTRRTHLTKAGSPQMRWLLVQAAWTALRCAPTHPMCTWATQVAERRGKRVAAVALARKLAGILFAMWRDGTTYSQKQGAD

SEQ ID NO: 507151 - protein, 314 aa, unidentified
MAEAKLYAGIDVSKKWLDVAIEPTNRTWRVLNDMEGITTLSQQLKEIGPQRIVVEATGGYETRLVRELCMANLPTSHVNPLRVRRYAEGMNWFAKTDKIDSKVLANFGEKAHPRLTVLPGEVEKHLAALLKRRKQVLDMLTTERNRLENVDPDIREYIESIISTLKEQLAELDREIDQLTKNTPAIKQKKALLTSVPGVGRITAAMMIAKLPELGICNRKQIAALVGTAPFNNDSGNKRGRRRTKGGREDVRCVLYMATLTATCHNPLIKAHYKSLIEAGKLPKVAIVACMRKLLVILNAMLRTQTSWKAAPAS

SEQ ID NO: 507152 - protein, 356 aa, unidentified
MRYLGIDVHVQSSVWCLLDSSGTLVERGKTPTTSLELTGLVRRLSAEEELLVGQEVGKLCHFVHDALTAAGVKILSFNAHHLRMIASSRKKTDRRDAFWIAKALQTGMMPHPVYIPTGEVREMRALLSRRSALVEEHKRWLSRARSYLQSTGHKTLKSRSVPRMMQTALSCPEGMDEQLAQALDLCSRMAENAKLEQRSIEVQLYQRAKRIEAIERLKTIPAVGDRVAAEIYATVGDVTRFPNASELGSYAGLVPSVNQSGASPSTGRVTKEGSHSLRRVLVQAGHVLLFRCRSEQAAPLKAIAARIHTARARRKIAVVAAARHILRLAYYVLRDGTNYNPKLLHSVSSKPTTQAA

SEQ ID NO: 507153 - protein, 357 aa, unidentified
MQKTYRLQEYVVRGKEIFVGLEDSKRTWKLAVRSEKMIIHQVSMEAKYPVLIGYLQNKFPECMIHLIYEAGFKGFNLYDQLTEDGIDCVVIPPHVVTEPKVSRIKTDKRDARRLAKVLEDHDFQDSCHVPDKERREDRQVSRTLIALQKDIVRTRNRIRKLLQFHGVEIPFPDRWGRGEFRALKKLELREPLRISLDIFLTQLEELWAHQVSCRAALRKLCRKERYNKAFTIARSLPGIGWFTAIRLVLELGEDLSRFTSGKKIASFVGLTCSEDSTGETEHKGRITGMGSGFIRSTLVENSWMSISKDPVLLAKFTRVWHASGSRKKAIVAVARMLIVRYRACLMSGTPYVIGVAA

SEQ ID NO: 507154 - protein, 311 aa, unidentified
MPTNAVYVGVDIAKATFAVRLLTKDLTYPNTPAGHAAFIAALAPLTPPTHVVCEATGGYERALVLALHAAKLVVSVLNPRMVRDYARARGQLSKTDRVDAAILADYGATLRPAADPEPTAQQLELAALVGARQDLVELIGIENGRAEHLTLPLLRRQHAARLRLLGKQLAVLDRQIDTLIAADAVLAAKSARVQSVAGVGRVMALTALALMPELGRITAGQAAALAGVAPFARDSGEHRGQRHIAGGRAAVRRVLYMAALSASRHNRILRAHYDGLVARGKPAKLALTALMRKLIVLLNRLLADPNFVLAP

SEQ ID NO: 507155 - protein, 414 aa, unidentified
MLKIVYRICCGMDVHKSFVVACVASTNEQGVTTYKSKRFSTFTGDLHRCAAWLAENNCKDVCMESTGKYWIPVYNILEQTCHIVLAHPKYVKAIRGKKTDKRDAKWIADIFKHDLVAGSFIPPADIRQLRDLVRYRWKLTNFTTGEKNRAQNCLTVSNFKLDDVFSDVFGKAASAITARILENPTAKITDASSFRTKHMKATDEEILAAVDGEMCAEQAEKLRIIRSHMDSLELCKSNLESLILSTAENYFPQLELVMTVPGIQSFAAIGIISEIGVDMSVFPTSKRLCSWAGLTPQNNESAGKKKTTRISRAGAYIKPLLVQCALCAVRAKQFPEVRNRYLALKKRRGHKKAIIAVARMLLTAIYNMLKKNEPYNPELYRKGDRPPAHREVSVDEAIFILQRQGYLVTAPSTT

SEQ ID NO: 507156 - protein, 358 aa, unidentified
MAASSMAHRSASGIVVGVDTHKDLHVARAKDELGRGLGEITIPASAKGYRALLAWSRGLGEVRAFGVEGTGCYGAGLARHLRAHGQVVIEVIRPNRQARRLRGKSDPADAEAAAAAVLSGEASGTPKASDATVEMIRALRVARSTANRARTQAINALHALVVTAPEELRADLRGLPGPRLVRTCARLRPGPLTDPVGATKAALRSLARRHQALSVEVRELDGELCRLTAKACPALLGIFGAGSDTAGALLLAAGDNPERLRSEAAFAKLTGVSPVQASSGKTTRHRLNRGGDRHANAALHRIVLVRLRWRHPPTIDYVARRTAEGRSKREIIRCLKRYVAREVYRALTDVPADASSPA

SEQ ID NO: 507157 - protein, 413 aa, unidentified
MLLLIGDDWAEDHHDIEIEDETGRRLAKARLPEGLEGITRFHALVAEHAPAAWAELPAEDVAGRVFVGIETDRGPWVSALRAAGYQVFAINPLSSARYRERHSTSGAKSDAGDAHVLAEIVRLDRDHHRQVAGDTDLVDAVKLVARAHQTAIWERTRQTLRLRSALLEYFPAAVEAFEDLAAADTLILLGRAPSPARAAKLTRSQVVSALRAARRHHAEVKADALLAVLRTPGLRQPPTTEAAYAAVVVGQVGVITALNAQIAQLQEVVAEHFGRHPAADIYLSQPGLGVVLAARTLGEFGDDKKRFVDARARKNYSGQSPITRASGKKTIVLARYATNRRLGDALHQQAFSALRASPGARAYYDALRARKIGHHAALRQLANRLVGILHGCLKTGTNYDENTAWQHHTAAVA

SEQ ID NO: 507158 - protein, 359 aa, unidentified
MKKLSKVARKTAGLDLGDRYSQVLVLDEQGETVEESRLATREEALRRRFGGYPRMRIALETGTHSPWVSRVLEECGHEVIVANSRKLRLIYENPSKDDKVDAMYLARLARVEPALLSPVRHRSVSSQKDLALLRSRDVLVAARTQLINHVRGHVKSFGGRLPACATSAFGQKISQHVPDSLRPALGPVLEEIVSLNDRIRALNRQIEVLAEQSYPQTKLLRQVRGVGAITSLAFVLTLEDPDRFNKSRTLGPYLGLVPGRKQSGDSDPQRRITRHGDRDLRRLLVNAAHYILGPFGEDCDLRRFGQRIASRGGKIARKKAIIAVARKLAILLHHLWLHKEVYDPLYNQTHKTSRREKTA

SEQ ID NO: 507159 - protein, 322 aa, unidentified
MEMLSFGGIDVSKDRLDITVLPDEQCSSVSNDAAGWAELIEQLRGSSITAIGVEASGGYERGVVRALLAAGMSVRQINPYKLRQFAKASGILAKNDRLDARMIASFVAIMPTRPAQRQTPMIEQLAAMLTVRRQLSDHKVATENASRLLEDAMLQRLSRRRVARLTADIDLLDQRLVEIVTADPALAHRFRLLTSMPGVGAVLACTLIALLPELGQMSRKQVAALVGLAPYDFDSGKLKGRRCIWGGRARVRHVLYMAALSASNWNPALKAFHDRLEATGKKPKVVIVAVMRKMITTLNAMLRDGTAWVDRYSGRRSASTAR

SEQ ID NO: 507160 - protein, 316 aa, unidentified
MNTKDQNEINIGIDTSQSMLDIYVRPQGDYQSFENNPEGIRSAIRFIKLFKPNRVLIEATGRLEMAFFCAAHKAGLPVCVCNPIRVRNFAQSTGRMAKTDKLDAEDIAYFGELIKPRFTDLKPEKLLLLSDLLTVRSQCLDMSTMQKNRLQRMPKTVHKSMRNILKSITKEIASIDQQLDKLIAEIPQWQERVDQLTSAKAVGKVVAYTLLSELPELGRLNRKQIAALVGVAPMNRDSGRHKGKRYIRGGRHKVRTVLFVSMMSAIQCHPKLKPMYQRLVAAGKPKKVAMVACMRKQLTILNTMVKNGTYWDENIV

SEQ ID NO: 507161 - protein, 367 aa, unidentified
MKKISTVAVKQNRNFSAQKLTIGFDLGDRSSWYCVLDEAGRVLLEQRVSTTPKAMKEVFGAMPRCRIALETGMHSPWVSRLLSELGHEVIVAHARNVRLIGESRKKDDRLDAQTLARLARIDPQLLCPVRHRSAKAQADLTVIRARAGLVRARTALVNTARGLAKSYGERLLGCNVRNMNPEKAEGLSPELQRALEPLLAGIESLSERIGECNEGIEKLAQESYPQVARLKQVKGVGTLIALTFLLTLEDAHRFRKSRDVGSYLGLQPGRRNSGQSEPRMHISKEGDPYLRTLLVQGAHHILGPFGIDSDLRRWGLKLAERGGKNGKKRAVIATARKLAVLLHRLWVSGEAYEPLRNSNQRTMPAAA

SEQ ID NO: 507162 - protein, 343 aa, unidentified
MSEISMIGLDLAKNVFQVHGVDASGSVVLRRQLRRGAVEKFFAQLPPCTVGIEACGSAHHWARVIGRYGHQVRLMPPSYVKPYVKRNKNDGRDAEAIYEAVGRPTMRFVPVKSVEQQATLAVHTTRALLVRQRTMVANSLRAALSEIGIVAAQGLEGLRALMTRLEAPNEEVPEIMRGALLMLAKHWQALDADERALERQIAKAARADREARRLMEVPGVGPIIASTVLAKVPDAKVFRSGRDFAAWIGLTGRDHGTGGKHRPGRISKQGDRMLRALLISGASAYLRHQKTRGVSDPWLRDLLARRPYKVAMVALAAKTARILWAMLVKGEPYRDRASASAAA

SEQ ID NO: 507163 - protein, 439 aa, unidentified
MKVMYERVAGIDVHKDMVKVAIRSPGDKPWTRKTEILEFRTFYGVLQHMAAELRKRGVTHVVMEASGVYTEPVYYALCEQDFEQIAVINPAHARALKGHKTDAKDCARLAELFECGLLRGSYIPAPELKEVRDLTRYRMKTVQARTSEIQRLAKALESAGIKLGSVASDITGKSATAMIEALTGGERRGQVLADLAIGRMRTAGKLADLSQALAGRFTEHHALLCRLHRDRITGLGAAVADLDQRIGGKAAAWQREADLLKTIPGFGDVVAWAWLGEIGPAPHLYFPDHEKLASWVTLCPGNNISARKRKYGRTGDAGTYIKPMLVQAAWSAIRVRGRLQARYSRLVRRFGGDKNPGAKKKAITAIAHTLLKIAYQVLRSGQPYQEPGADFYARRESPQQRQAYLQRQLQKLHPGCVITITISPPEPPDRPALTGTAIA

SEQ ID NO: 507164 - protein, 343 aa, unidentified
MTKDTMIGVDLAKAVFQLHAASMTGELRFCKKLSRQSFLKFMAEQPPAVVVMEACGSAYYWAREMTSLGHEVKLIAPQYVKPFVKRQKNDAADAEAITIAAQRPEMRFVEPKSAEQQGRAMLFRARTRLVQQRTELVNMLRAFLYELGHAVPQGINNVPRIAAIITERNSDLPEIARIECRDLLEQIEAMTVRIATSDRRIKDLAGQADMARRLQTMPGVGPMTALAVEAFAPPMESFKCGRDFAAWLGLVPKQHSSGGKTRHGRVSKAGQSDIRQLLIMGAMSRLNWMGRKSIPETSWLARMLARKPRMLVAIALANKMARMIWAMLTKQEDYRTPATAIAA

SEQ ID NO: 507165 - protein, 337 aa, unidentified
MKFCGIDLHSNNSVVVVTDETDRVLVSRRCPNQLTPILSLLEPHRAELVGVVVESTYNWYWLVDGLKAAGFEVKLAHPVAMKRYDGLKHSDDKDDATFLAHLLRLGILPTGYIHPPQERALRDLARKRIQLVRSRTQHILSVENIMARQFGQRLSCNEVKGLSATSVDRLGLPTDVALAMKANVAIVQALQIQIDFLEERLLHEAYLRPEFSLLKTMPGIGEVLATVIMLETGNIERFADVGHFASYARCVKSAHYSNGKKKGEGNAKNGNAYLIWAYIEAANFARRFSEDAKRFFEKKKAKTDAVVATKALAHKLARASYHILKEKQPFDARRCFA

SEQ ID NO: 507166 - protein, 341 aa, unidentified
MMEHIAAVDLHSDNGYYGIIDPSGKRIYQKKLPNALPIVLRELEPFRETLRCIVIESTYNWYWLADGLMENGYRVRLANPAKFDKYNDLKYTDDKTDTFFLTEMERLSILPTGYIYPKEEREVRDLLRRRMLLVQQRTSHILSFQALLSRQTGSSLGSNAIKAFDLEDIEEVLPQQGPYVQLSGQTNLAIIGFLTGRIKLLEKMVLKNAKLRPEYEKLQTIAGIGIILALTIMYETGDIGRFAGVGNYVSYCRCVKSKHMSNGKKKGEGNRKNGNKYLSWAYVEAANFSRRHCEEAKKYYQRKLAKTKNVVATKALGAKLCRGAYFVMRDQVDFDVKKMFG

SEQ ID NO: 507167 - protein, 335 aa, unidentified
MEQKYFIGIDVSKEKLDLAMINSNLELVTEKIIPNSLTKINSFFTALFRKLKISKEQVLVCCENTGIYGRPLEICCVKLGINLWVEHPLKIKKASTDMRGKSDQKDAYRIAEYVFRYSDKVVLFKESTDLIKELRTLLHVREDMIEKRAMFKNQLGEAKSHNKEQYNVLQACYAPLIKALNKQLIVVEKRIDVLTDQETSVKKNIQLITSIKGIGKQNALQFIIHTDNFQKFTSANQLACYSGVVPFPNQSGTIFKRERISKQANKKLKKLLHMAAMAAIRFNQELKEYYIRKVKEGKNKMCVINAVRNKLVHRIFSVIKRQTKFVASREEFLSI

SEQ ID NO: 507168 - protein, 361 aa, unidentified
MSKDKYVGLDVDQATIVAYVTNDKGEFLMETFLETKADGIRQFLRGLEGRVHVAFEEGCLAAWLYEIVRPLVAETVVCDPRANKLIQSGSKGDRVDAKKLARLLRLGELRHVHHGEESVRGLKELVHGYDRLVRDVTRTKNRLKGLFRGQAIGCRGQAVYSQETREQWKQKLDSSALRARADLLYKQMASLKELRDDAEKAMLKEARTHGAYKLLVKLPGVGPIRAATIIAAVGTPHRFRTKRQYWAYCGFAVVTHMSSEYEIIEGRIQRRRKPLQTRGLNENFNRMLKTAYKGATLTAIASEPFNKYYQRLIDNKMRPEMAQLTVARKIAAISLAVWKKGERFDPARVNQAEQSAGDEKR

SEQ ID NO: 507169 - protein, 373 aa, unidentified
MNDYSTYVAMDTHKKEHRVAVVYSGTGELQEFAVKNTVGDITKMVKRIQKHSPGQVRFCYEAGVCGFSLKRRIESLGVTCSVIAPSLVPTKPGERIKTDRRDARKLLGHLVAGQLTEVYAPDQEQEAARELTRARQTAQENLKRIRHQLVKLLTRHGYLYSQGRHWTARHLEWLRSLEFDLADLQEVFDIYFTELQHCMQRLATLDKQVAQLAQREAYREIVAVLRCFRGIDTLTAITLLTELFEWGRFASPRALMAYLGLVPSQYSSGARRCPGAITKTGNERVRRLLVEAGWHYRHRPWVSRELKGRRKDQPQWAIDLADRAMLRLYQRYWRLLERGKVPNQAVVAVARELAGFLWAVLREYELRRMPQVA

SEQ ID NO: 507170 - protein, 359 aa, unidentified
MGFQNCYMKRLLKQVVGIDVAQKELVVSMGRMHDDLVPEIYGHHVFANTAKGFEALTTWVSKRSEASAVVQYVLEATGVYHEKLAYFLHERGHGISVVLPNRISSYQRTLDVKTVTDKTASEAIARFGLERKLQNWEKPKPIFKKLQQLTRERDQLIQTRTLVKNQLHAEQAEAEPNTGSVKRLKQQVTLLNKQEKEIQAEILAVLDSDEPVKKAVKNLCSLPGVGVLTAVVVLAETNGFELIRNKRQLASYAGFDVKEKQSGTSVKGKPRISKRGNRYLRKSMHFPALVAIRRDDRFKAIFARLVSRHGIKMKAVVAVQRRLLEMIYVLHKTGTPYDEHYLQNLQPNASQSVESDQMA

SEQ ID NO: 507171 - protein, 343 aa, unidentified
MQVTTVGLDLAKRVFQIHAVDAAGQVVVRRKLQRTQVVNFFAGLPPCLVGIEACATAHHWARLIAASGHQVRLIPPSYVKPYVRRGKTDAADAEAICEAVGRPSMRFVAVKSTDQQAVLLHHRARDLLVRQRTMLINALRGHLGEFGIIAPVGRHRVIDLIGALHAASDADVPALAREALQSLIAALRALEVRIEAVEGVIMREHKSNAVSRRLATIPGIGPITASAIAATIVDPSAFKSGRELAAWMGLVPREHSSGGKQKLGRVSKQGDRYLRRLLTIGATAVMRRLPGKTDRLSAWVRALLDRRPFRLVSLALANKIARIAWAVMVRLEPYRVSAMVAAA

SEQ ID NO: 507172 - protein, 348 aa, unidentified
MIVIGVDSHKRTHTVVAADGTGRKLAEKTVAATSAGHLELVRWAARFSGHRWALEDCRHLSRRLSTDLPRAGEAVVRVPPKLMAGARRSAREYGKSDPIDALAVARAALREDLPVATLDGPEREIRLLVDHRDDLVAERTRAENRLRWHLHELDPGNEPGLRTLNRAVVLAALETSLAEAPGTVGRIARELVIRIRELTATINDLEHEIGRLVADLAPSLLALTGCGPLTAAKLIGETAGIGRFRSAAAFARHNGSAPLPVWSSNTERHRLSRTGNRQLNVALHRIAITQLQREGRGKTYLEHRRAMGDTKTEAIRALRRRISDEVFRRMRDDEAARAALPPGLAAAA

SEQ ID NO: 507173 - protein, 363 aa, unidentified
MSNLTPVTVGLDVHARSVRLAALRAEELLEERTLPYDHTAIEQALARWPGARACYEAGPTGYGLQRHLAAAGVECAVVAPALVPQRPGDRVKTDSRDARALARLHQGGLLEAIWVPDPETEAARDLIRAREDARIDRMRDRHRLSKFCLRNDLALPGGSWGARRRKWLSQQSFEHPARQRAFETYCHAVDLIDARIESLEAEIREVAVEGPWSGLVARLRCLRGIETLSALGLAVEIGDFHRFGCAERFMGFIGLVPSEHSSGERRARGSITKVGNTHARRLLVEAAWHSRLRPKVGYELARRQRGADPAVIERSWRAQQRLHRRWRRMAARGKPQQKIVVACARELAGFVWAIATEQPLRSA

SEQ ID NO: 507174 - protein, 409 aa, unidentified
MRIIGLDIHRAFAEAVAWDDGKLKRLGRVDMRRPLLEAFAKKLSKDDIVVVEATGNASSVAAVIAPHVKRVVIANPKQVRIIAYAKIKTDTIDASVLAQLYASGFLPEVWVPDEPTQALRRQVTRRNQIVRQRSRLKNIIQSILHSHLIPSCPHADLCGASGRTWLFHQVLPEDERLAVERHLREFDRLGDDLKVIERDLARSALGDEGVKRLMTIPGVDMVVALAIVAAIGDVGRFEQSQKLVSYLGLNPSVRQSGPGPAYHGRITKQGRGHARGMLVEAAWAAARAPGPLRAFFLRVRARRGLHVAAVATARKLAVLIWHLLSKAESYVWARPALHARKLRDLELKAGYKAERGQRGAAHAYNIKSHRDQERRWVEQAETAYARCVSGWNPRGLKRVRTGAATEVRR

SEQ ID NO: 507175 - protein, 411 aa, unidentified
MLFVGDDWSEEHHDVEIQDETGGKLAARRLPEGAAGIARLHELIAAHLDKDDDPGQVVVAIETDRGLWVQALAAAGYQVFGLNPKQVARFKERYNLSGAKSDAADAHALADMVRAERHQLRAVAADTAGGQAIKVAARAHQTLIWERTRHTLRLRSALREFFPAALVAYGDLGLTAADTLELLVRAPAPAGAAKLTAAQISAALKRARRRDVAARTGAIKDALGAPQLAQPAAVTAAYAAAVQTAAAVLITLNEQIKQLEAQVEAHFLQHPDAEIYLSQPGIGTINGARVLAEFGDAPGRYASAKARKNYAGSSPITRASGRSKIVLARFIRNDRLADALQSQAFSALTASPGARAYYDKQRARGLGHNAALRQVSNRLVGILHGCLKTSTRYNEKTAWPSTAAHTEPLAA

SEQ ID NO: 507176 - protein, 348 aa, unidentified
MAHFVGLDVSVKETSVCVVDDAGRVVLEQKVPTEPADIIALLTSLGVIYGRIGIEAGPLSQWLVSALIAAELPVICVETRHMKALLTAQQINKTDRNDARGIAQMMRVGLFKPVHVKTLVAQEQRMLLTSRKLLQRKLLDLECDLRGTLRNFGLKVGVVSSSRYEARIRELVGGFPRLGAIAEPLLNVRRVMRQQFAVLHKMLLDTVRSDRVCRRLMTAPGVGAVVALTYRATIDQPQRFVHSRAVGAHVGLTPKRYQSGETDYDRRVSKCGDVLLRTMLYEAAQVLLIHSGKWSWLKAWGMRVAQRRGLRRAIVAVARRLAVVLHRMWVDGSEFRWSKDSAAGLTVA

SEQ ID NO: 507177 - protein, 457 aa, unidentified
MPLKVKSVEVLDVDDDERVLTIAAAVDVAKASGMVCVRHPHPSVEGRRVSKVWEVESTTASLIELGSQLAALGVERVVLESTSDYWRPFFYLLEAAGLSVWLVNARDVKQVTGRPKTDKLDAVWLAKLNERGMLRPSFVPPREIRALRDYTRLRIELVQERSRHKQRLEKLMEDALIKLSSVVSDLLGQASRAMIEALIGGERDPQVLVELAHPRMAPKRAALIEALNGRFDDHHADLAQLLLDQIDACTANIDRLTTTIERLVEELPGPTPPDDPARAVTPTDVPVDNDDTDHGLTTVERLDEIPGIGARAAQIIIAEVGLDMTRFLTPGHLVSWAKVCPLTIQSGPRTKAGHTGKGNRYLKGVLGEVATAAAKTDTFLGARYKRLIRRRGKQRSLVALERSILVIVWHILNDPDARYRDLGSDYYQRRLDPDRQARDLVRQLKALGHDVTLEPAA

SEQ ID NO: 507178 - protein, 343 aa, unidentified
MQTIKTIGFDIAKSVFQVHGVDAAGEVVICRQLKRRSVLAFFQKLPPCLVGIEACASSHYWSRELQALGHTVRLMPPAYVKPYVKRQKNDAADAEAICEAVTRANMRFVPTKTPEQQSCLMLHRTRHLFIRQQTAVINSIRAHLAEFGIVAPVGRKGVTELLHVVADPSDKRVPEVARACLAALGNQLLSLKKQIVEFDRMIMAWHRSNQTSKRLHYIPGVGPMLATALVASVADPTTFRSGRNFSAWIGLVPKQHSSGGKDRLGGISKQGDRYLRSLFVAGALAVIRYAKIHGTKHRPWLTALLGRRPTKVAAIALANKIARMAWAMMAKGERYKQPVALAA

SEQ ID NO: 507179 - protein, 359 aa, unidentified
MRIIGCDLHSRQQTLAMLDTATGEIEKTTLKHEENIVREFYSKLPRPVRVGIEATGSMQWFLNLMEELGIECLVGHPAEIRAAEPRKQKHDRRDADLLLSLLVEERFPSIWLPTKELLDIRALLRHRHQWVGLRVKIQNALQAIALANGLRRGSSLWTQAGQKAIASLPLSPHAAYRRNELQAMYVKFEAEIETLNQRVEQQARERSGARLLMSHPGVGPITALATDVFLGDPARFADSKALASYVGIIPGEYSSGRRQRLGGLTKQGNPLLRFLWSEAVVHAVRRDPQLKQFYRRKLVQKGLGKARAAVARKLGIRMWIMLRDRIEYNEFCRRGQKQQTSGDARAGMPVPRYGAKVTG

SEQ ID NO: 507180 - protein, 429 aa, unidentified
MTSQDPTPPHAVLVAIDVAKTRNEVLIEPPDVRRRRLTVLNTRVEHDRLVETLSGYSAPVIVGFEATGDYHRALAWRLADAGFQLRLISSVALARTREALHNGWDKNDPKDAQVILHMLRIGATQTYCDPLIHGINDIQELSKTHDAVARMKTETLHRILTHYLPLYFPEIERFRHNSRSDWFFAFLEQFPTAASITALSKEAFIAAAWEVVGRKVSKARLLSDIYDTASSSIGLPVSLDSPAIAMFRMVLAEIRSLIRQREEIEAYANQLLWAHPDYRRLQQIPGIGPVNALTILAEAGDLRRFGHHRQFLKFCGLDLATYQSGQFRGQTKLSKYGNARLRRALWMAAQVAIRQKENSFRDKFQRYVAKDRNNPDLRRKALTAVSAKMARVVHALIKTEAEYRPFFEGGGARRENPSQQCREGAVATL

SEQ ID NO: 507181 - protein, 341 aa, unidentified
MKQFIRIGVDLAKNYFQIHALANEGGAAVTRKLTRVKMREFFAQIEPTRVGMEACGSAHYWARELKAMGHEVLLMPPAYTKPYVKRGKNDAVDADAICEAMSRPGMRFVPIKSAEQQATLMLHKTRELLVKQRTMSVNALRGHLSEFGIIAAKGIGRVDELLDFAESDATLPAAAKACVKVLAQALEGLDKAIDDLEKEITSAAAQNEMVRLLDKVPGIGKLIASVIAASVPDPSVFKSGRDFAAWLGLTPRQNSSGGKQTLGGITKQGNRYIRKMLVLGATSLLNVLGKRKGALRDWIVGLLAKKPARLVTVALANKLARILWAMMKTGECFRTEMFAKA

SEQ ID NO: 507182 - protein, 534 aa, unidentified
MKISTYHSYDELPLFLNAELVAKVLGVSISSAYELMHEEVFPSVILSNRDTSQQNTSKTGINALKSDDIISSCGQRISCFYLCSQVYCAQTGTSALWDVTYEPDVGAMNRFLLISQQVVTFSSTRNVRNLNTRGAYTMYIVGIDIAKRKHEAAVIDGEGAVIIKPFSFTNNCSGYNRLLAMLTKAKLPLDEVSFAMEATGHYWLALFTRLQKEGFRVQVINPVQTNSIRSFYIRQAKTDPRDALLIAEVIRFGHFSESTLHPENIYELRELCRGRHAIVSMQADVKRKVVALLDQVFPEYETAFTNMFSDTSMAILQTCPTPKELSEMPLEELCHLIEVSSHKRFRMAKAQELQELARNSFGFAMAGDVFSTMIRLYAKHLDFLKQQVQEMDRKIAEIMDTLDTPITTITGIGPTLGAYILSEIGDINRFSSAAKLAAYAGIDPTMRQSGEYNGVRNRMSKRGSPYLRHAIWLAASSAVLHDPALKLYFQKKRDEGKPYMASVGHACRKMVSIIYAVMRDNKAYTPCIPNEISA

SEQ ID NO: 507183 - protein, 363 aa, unidentified
MLYTGIDQHGKQITVSVRNEAGDLIVRRQVSTRWAKIDAFVEEMKQHLAAHGGVLAVVEVCGFNHWLLVRLHAAGWQVIVVQPEESAAHKTDRRDASALSEVLWVNRERVRQGLPVRGLRQVQVPGPDEQADRRITSLRRNVGRELTRTINRIKAVLRRHNLEQECPTKGLETKAGLKWLWQLGLPAIERVELDQQLWRLKLLREQARQLQFEIEQRYERNAAAQRLSTIPGAGAYAALGLASRVGDVRRFRGPRSLANYWGLTPGSRNSGEATQRLGSITKQGSPLARFLLGQLVLHVLRKDAAMRLWFRQIKRRRGAKIARVAVMRRLSMIIWHMLTKNEDYVLGGPPRRRLRNERNNNNN

SEQ ID NO: 507184 - protein, 401 aa, unidentified
MKVYIGIDWSENKHDVCFLKELGEVLLVLQIEHTIAGFQKLDQARQSLGVERQEVVIGLETAHNLLVDFLWERGYEQIYVLPPKAVQSTQTRYRQSGAKDDAWDARLIADLLRTDHNRYSAWKPDQPLTRQIRAEVRFALQLGQELVRDGNRLRAILLRYYPAALDAFSQLDSVVFLAFVQAYPTPSQAQALSFEQLKTFLRAHHHTHSRSWPTIYARLHGDHPQPNPGLEAAYSPLALAQARILETLVRSRNECLARLEKLFLQHPDHEIYDSLPKAGALLAPALLAKLGDDRARYPNPAILQAVAGTCPLTTLALAGSARESSGKHRYALFRKACDREFRHIVQQWARLTLDASAWAATYYRTVRPHCKTDSDAISRIAGWRSCGDCGWIENPMTKLCT

SEQ ID NO: 507185 - protein, 338 aa, unidentified
MDHFIGIDLHSNNSYIAVIDTDNNRIFKKKARNNLKEVLKILSPFEQQIKGIAVESTYNWYWLVDGLIDNGYKLHLANPSAIKQYEGLKHSDDITDAFHLANLLRLGILPEGYIYPKHERPVRDLLRKRIHLVHQRTALILSFQNLVSRNLGINMHVSSVNKLNEEDLEELFEDEHLLLSAKASISTIHFLKSRIVPLEKVLAKAAKLKNEYKLLKTVPGIWNILAQMIMFETGSIERFKKVGNYASYCRCVQSNRLSNSKSKGKGNRRNGNKYLSWAYVEAANHALWNYEYVRRYYQRKTVRTNNIVAIKAVAHKLARACYYIIRDQKEFDPAKAFA

SEQ ID NO: 507186 - protein, 419 aa, unidentified
MESGRSCIAGIDVHKKMLAVVVRTEGEGQTEYEKRKFGTTQNEIQHLVAWLQRHQTTEVVMESTAQYWRPVWYGLEPHFPLHLVHPLKVRAPRGRKSDYRDAMRLADRWRSGDLEDSFIPGAEQRQWRWLTRSRVQLKRMIGIIRNHIEGLLEEGGIKLTAVATDPLGVSGWAMLQLIAKGETDVKALAQEARGKMRKKKAQLEEALAGKLHAGYRFLLKQRLEEVELLRRQICEINTELARVTKDHVAVLKRLGKMPGIDLFAAQELLAEIGPQAAAFATAGQFASWVGLCPGMQESAGVCYSRRSAKGNRYLRRLLCQIAWAAIHAKQSFFAGLFARLQPRIEKKGAAWAVAHRIGKVIWMVMHEEVEYKEMGSAALHPKTLQRKLRRLLKEFAKAGIDAQAAIAQVVTSDGQALHA

SEQ ID NO: 507187 - protein, 340 aa, unidentified
MRKYIRIGVDIAKNSFQVHALESEDCSATKRKLSRSGIVKFLAEVEPCAIGMEACGSAHYWARRFRAMGHEVKLTPPIYVKPYVKRGKNDAADAAAICEAMSRPNMRFVAVKSEDQQATLMAHKTRELLIKQRTMSVNALRGHLAEFGVVAAKGISHIEELVERAAAADLPAMVQATLGVLLAQLRSLDAAIDELERAIVADHRRDPVSRLAASVPGVGALAASAILASAPDPHAFKSGRDFAAWLGATPKQNSTGGKEKLGSITKAGNRYIRRLLVLGAISILRAAPKRKGALCDWLAALRARKPAKVVAVALANKLARIVWAIITTGEAFRSSIYAKA

SEQ ID NO: 507188 - protein, 356 aa, unidentified
MEIIAMDCHKHYSLANVQSPDGQRIAEQRIEHRRGCIQAFLADYTPGSPVAVETIGNWYWIVDEIEAAGMVPRLVHARKAKLMIGSINKTDKLDVRGLNTLQRIGTLPTVWIPPAPLRDQRELPRTRMVFGAARTRLKNRLHSVLDKYGLQDQFDGISDIFGKKGRAILEDVISQLPSETLYTTEKMLEQLDQLDQTVKQIEKRMAKIFKPTPQMMLLQSLPGVADVLSVVIGLEVGDIRRFKGAAGLASYAGTVPRVHASGGTIRYGRTRPDVNHYLKWAYAEAGNSVALNHKRFPFRHVSQLYKRVQTRRDHAKAIGAVGRHLAEATYWMLTKNQPYQERGLNEVQGTVSAMLS

SEQ ID NO: 507189 - protein, 414 aa, unidentified
MELLHPRCAGIDISKRDAKVCVRIAGSGRRRAAETVTTWSSMTNQVLALRDHLIQERVTCVVLEATSDYWKPFYYLLEDASFEVMLVNPRHVKNLPGRKTDVSDAAWLAQLGAHGLVRASFVPPEPIRHLRDLTRTRSAITRERAREVQRLEKLLEDSGIKLSSVASEILGVSGRAMLEALIDGQRDPAQLAELAKRRLRSKIPALTEALTGRFNAHHAFLARMHLDLIDKHTEAIEHLTTRIEVVIEPFRGFRDLICTIPGISTGVADVITAETGTDMSRFPTPGHLASWAGTCPGSNESAGRVKSTKTRPGNPYLKAALGTAALSASQSKGTYLAARYRRIASRRAPIKAVVAIEHTMLTTIWHMATTGALYDDPGGDFYTRRHPEKAKRRAIQQLRAMGYQVTLEPLQEPA

SEQ ID NO: 507190 - protein, 363 aa, unidentified
MSDEACIHKAGPEQECETRRLDPEVDPEAKPEGVIMFLGIDVSKSTLDAALLKDGSKPRHKVFSNDAAGHAALIAWLGEHACHPVHASQPVHACLEATGTWAQEAALALHQAGHIVSLINPARTHAFGKSQLKRTKTDKADAILIAEFCRMHNPPIWAPQSPQVQQLQGLVRRLEHLEEMRVMEENRLSSGGLSSQVQESLEEHIAYLRQQIEKTRRQIKDHIDQNPDLKSQSQLLESIPGIGATTAALLMAELGDISQFDNARQVAAFAGLVPRIRESGTSVRGRSRLSKVGSSRLRKSLYFPAITALRFNPLIKAFGLRLSVQGKSKMLIIGAAMRKLLHLAYGVLKSKKPFDPAFCHQNA

SEQ ID NO: 507191 - protein, 342 aa, unidentified
MSFYCGIDLSARESQICVIDKGVKKVLEVKVPNKLEHIKQLLAPYKADLQIVVESTFNWYWLVDGLQAAGYNVVLAHTLGLHMITAAKVKTDRRDAFALAKLLLAGMIPTAYIYPAETRPVRDLLRRRGWLVQVRAGEYGSLRRLLLRQGILSHKQQEIKQATEEDLEKWFTHELVRLHASQELERIHLYSQQIETLEETILERAKKARAFEKLQQLPGIGPIIALSIYYEMGELGRFVSVKDFSSYCRVVPGVAQSGQMTRRGRGSKQGNPYLKWALSQAAVHAVRCYPGVRRYYERQLQRHRGRARQMVVYNIIAHKLAQAIYHVLKEDSEYREELLFGK

SEQ ID NO: 507192 - protein, 413 aa, unidentified
MQVVYERCCGIDVHKRTVVACAIVPGADGQVVKETRTFDTLTAHLEALAGWLQGLEVTHVALESTGVYWKPVYNLLDGRFAILVVNAEHIKALAGRKTDVQDAERIADLLRHGLLRGSFIPSAELRALRDLTRYRTRLGDERVSEINRVQKVLEDANIKLASVATDVMGVSGRAILAELVKGQTDAGILAELAKGRLREKQDLLQQALSGRVQAHHRFMLAQHLSHIDFLEEAIARLDQEIAEQMRPFAAALEAWDSLPGINQRIAEIVVAEIGADLVPFEDAEHLASWTGMCPGNNESAGKRYSGKTRKGSPWLRRALVEAAHGAARTKNKYFQALYRRLAARRGKQRALIAVGHSLLVTGYYLITRQTKYEDLGGNYFDERDREAVKRRAVKRLEKLGYQVQLAPAAIPTG

SEQ ID NO: 507193 - protein, 343 aa, unidentified
MSIVTRIGLDLAKDVFQVHAVDAQDEKVTNKQLKRKDLLQWFAKLERSDDCLVAMEACGSSHHWRRELEKLGYRTMAIPPAYVKPYVRTNKNDANDARAICEAASRPGMPTVRLKTVAEQDAMMLIKQRDGLVRERTRQVNRIRGQLSEYGIFIGQGINTLRRKLPEILEDADNGLETLGRSLVQLSYDYIVGIDAQIELYENKIKELARSSAQAQRLQTAPGIGPITAMTLIAQLGDMKQFAHARSASEYLGVVPRQFSSGGKTMLGGISKRGNSQLRSLLIHGARSVIRVAKNKDDKFSRWAVSVAERRGNNVAAVAVANKLLRIVWAMQTKEQEYRAMAA

SEQ ID NO: 507194 - protein, 347 aa, unidentified
MKEQSNGSEFTVGLDLGERRHRFCVLNGKGEVVEEAILSNDRASLARLSARYRRALAVMEAGAHSPWVSRYLEGLGWEVIVSNPRKVRAIYQHERKSDRRDALMLARIGRMDRALLYPVRHGSEEAQQDLLRIKLRDSLVRARVALINSVRFSLKSLGYAVSNPSSERFHKVAMETLPEVVRAMIAPSVQALAELSGRIAVLEREISVLARTKYPQTLWLQQVPGVGAITALYFVLKIEDPKRFKNVRDVGAYTGLCPRRDQSGASDPQLRISKRGDVYLRRLLVSAAQYILGPFGPQSALREYGLRLAADGTTRAKKRAVVAVARKLCVLLLSLWKNQTPYQPYPA

SEQ ID NO: 507195 - protein, 339 aa, unidentified
MMYGAIDLHLRYSEIRVVEAEGRVVRERRVVTSRETLTAAFAGLGVLRVLLETGTESEWVAQALEQAGHAVVVADPNYAPMYGEVRRRVKTDRRDVAALAEANRRGWYRATHRRSRAQRTLQQILRSRRQLVAMRTGSISVVRALLRQEGYRLPSGSAAQVPARLARVPLPDELAATLAPLRQVIDTVTRELAAIDTRLRTTAAADPVVTRLQTVPGVGPVVALTFRATLDEVTRFQAAGQVSAFLGLVPREDSSAERRHRGHITKAGSGELRSLLIQAAWACWKSRGSGTLRAWAERLAGRRGRRIAVVALARRLSRILYAVWRDGTTFDGARVAAGA

SEQ ID NO: 507196 - protein, 461 aa, unidentified
MKIRLGVDIACRAPHQASCADEHGVMLFTGHRFRTDPDQLETLWARLPDDVDEVMVIMEPTRNAWVALAAWFRRRGATVVMVPPEQSADLRAYYSKHAKTDRLDSKILARLPLLHPEGLHREDTLGPGDALKRAVKIRSGLVHRRTSSMARLDALLEILGPAWAAAIGSDMTLTALRLLARYAHPEKVKTLGKARLAAFLRRSSRQQWGEQRAAAIVDAAAATLRLWGTDGMDFDALAADIAVEARLALTLSEEIKALDRRIADLYEQVDPDGIVRSAPGVGTVGAPQIAGRLGDATRFANLAAIRCFAGLVPHQDSSGQAARAGGPTKAGDACLREALYMAADHARKIDPTLAARYHRLITEDGKHHNSAVCTIAAVLLTRIAACLRNGTPYQLRDTDGTVITEQQGREIIARRYTIPPAVRAARRQLTGTTRQPRRNERAEKGVAKRSEAPPVHEPACT

SEQ ID NO: 507197 - protein, 418 aa, unidentified
MKVVFPTCCGVDVHKSFLVATIIKTPENSLQPSYQKKRFSTFNSDLNRFADWLHENDCLDVCMESTGKYWVPVFNILEKRDIRVVIANPKWVKAVKGNKDDTKDSKWIGDLFRIGLVKSSFIPEKDVRVLRELTRYRYKLTSMKSSEKNRFQNAFTVCNVALDSVVSDMFGKSAAAITDYLTSDEDFDAGHCLSLLQRSLKKKADDVLKSIEGYEMTAEQKTRIGIVRDHLHYIDALIDRVDACINTMIDKYEGYIVLLCTIPGVDRNSAITILSEIGVDMAQFGSSKRLCCWAGLTPGNNESAGKKKSVRISRAGVYLKPALVQVAHAAVKDKRSSYYALKYERIARRRGKKRAIIAIARMILTAVFVILSNLEEWNPVDLYRVDMPEHLKEKQLGKAVKQAVRFLETQGITVLDSA

SEQ ID NO: 507198 - protein, 337 aa, unidentified
MKYCGIDLHGNNSWVVIIDEQDRVLYSRRHANDLPRLLAMLEVHRSELSGIVVESTFNWYWLVDGLQEVGYRVLLANTAAIKQYDGLKHRGDESDARQLAHLLRLGLLPQGHIMPKAARAVRDLARKRMQLVQQRTAQILSIESSLSRHSGWKLSSNRIKCLRQADLDEMRLGEMPMLGLKANVAVMQALQTQIDGLEKVLADYCRAEPGYQLLRSVTGIGEVLATVILLETGGIERFAEAGNYASYCRCVGSAHLSNGKKKGEGNTKNGNRYLAWAFVEAANFAVRHCEAARRFYQRKKAARNSIVAIKAVAHKLARACYHMLKTQTPFCVERCFA

SEQ ID NO: 507199 - protein, 368 aa, unidentified
MKKNSIGKQSPKQSQKVCVEPITIGMDLGDKGSCYCVLDGRGEVKKEATVATTKKGMNQRFGAMRRCRIAIEVGAHSPWVSRMLAQMGHEVIVANARQVKLISASSRKDDRLDAQTLARLARVDPQLLRPIQHRSEQAQWDLMTIRVRAELVEVRTALVNSARGLAKAIGERLPTCGTDQLSMERLEDLPEGIRETLRPLIEQVEALTKSIHECDGKIEQIARERYPENKLLQQVFGVGTLIALTFILTVDDPQRFQKSRDVGCYLGLRPKRSDSGKRQPELRITKEGDSYLRTMLVQGAHVILGPKGPDTDLRRWGLKLAARGGKNAKKRAIVAVARKLGILLHRLWVTAEVYEPLRQARSAQPVAA

SEQ ID NO: 507200 - protein, 360 aa, unidentified
MWFQRTSVGLDVHARSVVAAALDGVTGEVRRARLTPAHEDLERWLKELDGPVAVAYEAGPTGFGLARFLRGRGIECRVLAPSKLQRPPGDRVKTDARDALHLARLLHLGEIVEVRVPSVGQEAARDLVRAREDCRADLMSARHRVSKLLLRQGIVYSGGKAWTRAHGAWLRTQRFEQHALQLAFDCAYETMELTVARRDRLDAAIAEMATDSEFTPVVDRLGCLRGVSTLTAFGLAVEIGAWQRLTGRSIGSYLGLVPTESSSGARRVQGGLTKTGNGHARRLLVEAAWHHRARYRGPGLELRRRWDRAPAAAAARGHAANQRLAGRWAAYDQRKKPAVVANAAIARELAGWCWSLATLE

SEQ ID NO: 507201 - protein, 346 aa, unidentified
MKLSRVGIDLAKNVYQLHGVDCFGETMLKRRVKRHQWLRVLLDKTETDCVIGMEACGGAHHWARELQARGYTVRLIPPQFVKPYVKSNKNDANDAEAICEAMSRPNMRFVAVKSVAQQDIQATHRVRAECMAHRTAKGNQIRGLVSEYGLVAPQQSAALRAAIPCWLEDAENGLTSRFRTLLHGLWEDLIRLDERVATLDADIALIAKTDPVAKRLQQLRGGGPLIATALVASVASVGSGEQYAKGRQMAAALGLTPRQHSSGGKERLLGISKRGDAYLRSLLIHGARSTLWHAKHKEDRLSRWMNDLSARRHPNVAAVALANKTVRMAWAMMRNESDYDPKFATA

SEQ ID NO: 507202 - protein, 317 aa, unidentified
MEHFLERTWVGIDVSKAYWDVAIAGQKSVCRFATDAEGRQQLLTMLSTLQVECVCLEATGGWERALVAGLHEHGLSVSVVNPRQVRDFARAQGQLAKTDRIDARVIAQFGALMQPTPHEKPSENQEKLRSLRARRQQVVDMLTQEKNRLATQPDRDARRSVQEAIDFYQQQLKTLDEQIRQVVELDPQFRERLSLLVSVPGVGQTTAAVLMADLPELGQLNRRQAARLAGLAPLNRDSGTLRGKRMIGGGRSTVRKGLYMATLVATKHNPVIRDFYQQLLKRGKAKMIALTACMRKLLLILNAILKENKPWNLDRST

SEQ ID NO: 507203 - protein, 421 aa, unidentified
MGKRRYSTVNCKRVDWAASAEAMAGQRAVLAVDVAKTNFVAALQVEAGKTLLRVSWQHPLETPELLAGLEVLAAAGSVEVVMESSGVYGDALRWQLHQRAIGVYRVSAKRVHDSAEVYDGVPSLHDAKATELIAKLHWEGCSARWEMLGAGRRDQLAQLRRLRQAKARAQAERSRLEALLARHWPELPQRLGLGSASLLRLVASYGGPAPLALSAHPARELLRDVGGRLLAEEAIDAVLASARTTLGMPCTPQESAQLQWQAEQVIEAQRDQRQAERALARAIPADDTLAPMRALLGKVTSNVLLATQGDPKGYPSAASYCKSIGLNLKEHSSGQHQGQLSITKRGPALARFYLYFAALRLIRRDPVIKRWYEIKTARPGAVKQKQVIELMRKLAKAFWHQANGHAFDVNRLVNLKAVAGV

SEQ ID NO: 507204 - protein, 353 aa, unidentified
MHTHQKSSDPVATIGLDIGKNTFHLVGLDKRGSIAMRIKVSRNQLARRLANLSPCLVGLEAGSGSHHIARQIQALGHDVRLLPAQYVKPFLKGHKNDYRDAEAIAEAVQRPTMNFVAIKTPEQSDLLSLHRVRSRLVRQRTAVINQIRGLLIERGITVRQAPGPLRKVLPEVLSSPPEALSPRILRLIAELDQDWRRLDQRLEALSAEIASLSEDDCACQRLMSVPGIGPIISSAVVAAIGTGSGFKQGRDFAAWLGLVPKQESTGDRTKLGRISKRGNKYLRTLFVQAAHVVLQRRPAAATRALLPWLDQAARRLAHRNLLAVALANKLARIAWAVLARGRDYEPRITSNAA

SEQ ID NO: 507205 - protein, 326 aa, unidentified
MTHKLGIDVSKAKLDAALLKVDGKYRSKVFSNDAAGFKSLLLWIEANVPAGIADVHACMEATGAYHEGLALFLSDQGIAVSVVNPLLVKRFIEVDRVRNKTDEGDAKCLARFCQMTQPELWEAPSVGVRTLQALVLRLDSLQEMRQGELNRLDVAHASVQQSMRDVIADLEHAIEAVRKQIKRTIDDDPDLKQRQSLLASIPGLGDKTIPQLLAYIGRPERFKSVKALTAYAALAPLIRQSGTSLNKHHGTHPQGHRALRSALYFPAMVAGKYNPLVAAFWQRLKAQNKPGKVIVVACMHKLLAIAYGVLKSGKPFTPEHHKSISA

SEQ ID NO: 507206 - protein, 347 aa, unidentified
MDVHKEAMVIAVLNGSGQLVMESIIETKASSIVQFIHGLRGELHVTWEEGTWAAWLYDLLKPQVHVVLVCNPRRNALLKEGSKSDKVDARMLAELLRTGMLRPVYHGEHGLRTLRELARSYQTISKDLNRVMNRLKALYRGWGIACSGTQVYAPRYREEWMNKIEHAGVRRRAELLYEQLDGLQGLRRTLRPELLAESRKHKAAKLLRQIPCIGPIRAARLLALMQTPHRFRSKRQLWTYSGLGIETRDSAEYGFVQGQLQRSKKPQQLRGLNQNHNHEMKEIFKGAATRASCGVGPLRDFYVALLDKGMKPEMARLTLARKIAAIALTLWKKEERFDAEQLKPQAA

SEQ ID NO: 507207 - protein, 358 aa, unidentified
MTIVCGIDAHDKELVCRIWRSDRVEETKRTRNTDVGRKGLWEYLARMRANLGGAEKVIVGYEACGLGYTIYDEASEAGFTCYVLATIKMPKSPMDGKRKTDEYDAQKISEVLRSHELAGLSLPTVWIPSKAVRDDRELIRRRFDVKSDSTRIKNQIHALLKRQGIKRPEDIGNPWTKPFIAWLKALELAPGARAHLTSLIHQHESLAENVKALDSAVEKLSKVDRYSQQVQALLDLNGVGTLTAMLFLTELGDLDRFPNRGAIKSYVGLAPSSHESGEIKDRKGHITRNGPSRLRAILNQAVWVRLACDTDERTWFERYLATHSGGKRKAVVVCMARLVQLMWHRGLEAQHEYERRVA

SEQ ID NO: 507208 - protein, 397 aa, unidentified
MNPLFVGIDVSSKNNVAYLMKPDGSKHSSFSVQNNLGGAKLLSERIVSALGSMQLERVVIGLEATSIYGDSLVYALREDGRLGRFQRKIHVLNPKQVRKFKEAYSDLPKNDWVDAFVIADHLRFGRINREVYMDDYRYKALQTLTRARFDVIQNLTREKQRFANYLFLKCSGMAQDKDIQNTSATTIALMEHFETVDDLANADLEELTAFITETGRGKFADPDATAKAVRAAAKGSYRLPKTVNDTVNQAMAVSIASMRALKGQVKVLDKAIEQQFEIIPNTLTSIPGIGKVYSAGIIAEIGDIHRFDSQASVAKYAGLVWNRSQSGDFEAEHSRMIKSGNRYLRYYLLEAANSVRRCDSEFRRYYDLKFKEVNKCKARNEIQELIQAQKNVERFIV

SEQ ID NO: 507209 - protein, 362 aa, unidentified
MKRYLGVDLHRNCFTVCTLGEDGNRELQKWSIHSLGEFAQQVQASDAVAVEATGNARHFCQALKERGCRLVVVNPHQFQVISRSVKKTDAHDARTLAEFLAKDMLPEVRLKEDLPAEMASLLQTRDKLVKLRTVLKNKINNLLAARAILLPKESLSTEKGLEQVLQAEVGELARVELVVLVEQIRHLNQGIAKLEAAIKKQGPKLPGYENLKSIKGIGDVGGSTLLSTIGDIKDFAHEGKLAAYFGIVPRVANSNETERSGRITKRGNKLGRTALVQCALIAMRYSPYLANYYARIKAARGTGKAIIALARKFLGIIYKTLKNGWVFEDFPRFVLTPAGTQGGGLAPTPPGFIALGATSGAG

SEQ ID NO: 507210 - protein, 408 aa, unidentified
MRIIGLDIHRVFAEAVAWEDGKLRRIGRVDIRRDLLEKFASSLSPEDIVVVEATGNASAVSAVIAPHVKRVAIANPKQVKIIAHAKIKTDTIDAGVLAQLYASGFLPEVWVPDEATQALRRQVSRRQQIVKQRSRLKNIVQSILHAHLIPPCPAADLCGTKGRAWLSGQRLPEDERLAINRHLREFDRLGDDLKVIERDLAQSALEDGRAKRIMTPPGIDMIVALAIVAAIGDAGRFETAEKLVSYLGLNPSVRQSGSGPAHHGRITKQGRGHARGMLVEAAWAAARAPGPLRAFFLRVRSRRGQHVAAVATARKMAVLIWHLLRKGESYAWARPALYAKKLRDLELRAGCKPNRGQKGAASAYNIKSHRDEERRWAEQAETAYARFVAGWNARGPKARTAAAKEERR

SEQ ID NO: 507211 - protein, 420 aa, unidentified
MSDMNTENEIVCGADIHRDFLVATMISRNGLKLQERFSMNQDGLLEFKSWILNHKCQRVAVESTGSYWYPIFYTLEGYVEFILANAFQIRNIEGKKTDKLDSERIAVYCLNDLIKPSRIYPKDYRDLRSITRSREALVNARSKLKNQIHQLLATCCIKLSSVISDSFGKSGRYILDRLLEGRSIDQIISGIPSKRVRKKEDELRNAIRNGLDPVQLLLIKTNLDAIDDLSEKIKILDAEISIKVKPFEEDLNILLSVPGIGLTSAATILAEMGDYRDFASADKMAMYFGIVPSVYQSAGKLRTGKITKRGSKHMRRILVEVAKAISKTKKNSNLKRFFMRVYKRSGKKNVAAIALARKVLCIIYHLLMNREDYQEPEIKKIKPKISICGSPINTMDIDEMISTLSRAGYLVEKGFKEGFG

SEQ ID NO: 507212 - protein, 334 aa, unidentified
MNDTTIGLDLAKNIFHLVELNARGKLVRKKTLRRKALLPYLAQSPICCIALEACSSSHYWAREFQALGHTVIMLPPQHVKAYLRGQKNDYNDAAAIAEASHHGAIRGVPIKSISQQEEQLVHRVRARLVRDRTALSNQLRGMLREHGIAVPQGLAPLRRAVPAQLSDHSLSSLYRDLLQRQYERLCGLDDEITYYDRQLKQLSGQAMQKRLQQLPGFGPVVSSAFSCWLGDGHQFKRGRDAAAALGVVPRQHSSGGKPLLLGITKRGDTYVRSLLIHGARSVVRCSDNKTDQLSLWIQSIKSRRGTNKAAVALANKLARIAWAMVVKNSDYQPA

SEQ ID NO: 507213 - protein, 347 aa, unidentified
MGTVLKQILGIDVAQNELVVTFGRLMDDLAVDLVAHKVFKNTENGFCTLLLWVKKYRCPEVPLRFVMEATGVYHQKFVYFLDEKGYEVSVVLPNKISNYQRTLDVKTITDKSMSECIARFGLERKLDNWKRPKTAFRNLQQLTRERNQIVDERSVVKNQLHAHQVEAFPHEGSVNRLKARIVFLNEQEAQIKKEIENEVVNDPEVSTSMRLICSIPGVGKLTAASILGETNGFELIRNKRQLVSYAGFDVIEKTSGTSVKGKTRMSKKGNVHIRKAMFYPALSAIKNNEHFKEFYKRIVERSGVKMKGVMAVSRKILELIFVLFKSGEEYRMDYEKNRVEAQLILTL

SEQ ID NO: 507214 - protein, 401 aa, unidentified
MVSDFMKGRYNLMKIFVGIDIAKLNHFAAAISSDGEILLEPFKFTNDADGFQLLVSKLESFDKNSIIIGLESTAHYGDNLVRYLVAEFYQVCVLNPIKTCQMRKNNVRKTKTDKVDTFVIAKTLMMQDDLRFITFFDLDMMDLKALGRFRQKTIKQRTRLKIQLTTYVDQVFPEIQYFFKSGLHQHAVYALLKEAPSPKEIASMHMTHLANLLKVNSHGHFTKELAKELRVLAQKSVGANDSAISIQITQTIQQIELLDSQLEKIEAEMTDIMKFNDSVIMTIPGIGYINGGMILGEIGDIHRFSNPNKLLAFAGLDPSVYQSGNFQAKTTRMSKRGSRVLRYALVNAAWNVVRNNATFKAYYDAKRAEGRSHYNALGHCAGKLVRVIWKMLTDEVEFNLE

SEQ ID NO: 507215 - protein, 460 aa, unidentified
MARRKRSGKGNRSARPQQVHPNAAGLDVGATEVYAAVRAERDEQPIRSFATFTRDLHALADWLSACEVDTVAMESTGVYWIPVHQILEARGFEVVLVNARHVRSVPGRKSDVSDCEWLRYLHSVGLLRGSFRPADEVCALRSLLRHRDGLVKTASRSVQHMQKAYDQMNVHLHHAISDLSGHTGLAITDAILDGERDPARLAALAHPRIRASRETLVKALEGDWRSEHLFTLRHARQTYAHYQQLISECEREIEARIHASEQTHEPPAATSTDPQSPQAPQMSPEGPEATPQSFNLPAHLTRLLGTDLTLIPGVGPTTALVLFSELGPDLSRFPNASQFASWLNLCPQTKITGGKVISSHTGPGVNRAAQALRMATQTLYRSHSALGEFFRRKRARVGTPQAITDTAHKMARIIYHLVTRHELYDDRILFGQQHQDRKRHERRLRNQARSLGFNLVPETA

SEQ ID NO: 507216 - protein, 318 aa, unidentified
MKTKRVWAGIDVSKDELSVALWPAARTWTCPRTEEALQRLAEELCGLRVRLVVLEATGGLELPVVLAFLRQGLPVHRCEPARARHYAKAIGARAKTDRMDALTLARFAASGELLAQTFASADVRALDALVTRRRQVVDLITVESNRLHACADKVCRASIRKMLRDLLREKSKLEARIAEALERVPELKAKAELLRSAPGVGEVTAATLTGALPELGTLNRWQVAALTGTAPYRNESGRFKGHARIGAGRADVRCALYMAVLAGKRHDPWLREIYEHHLAKGKKKKVALTACMRRLVIVLNAMVRDQTPWRQTASAAAG

SEQ ID NO: 507217 - protein, 411 aa, unidentified
MLKIVYPICCGIDVHKTFVVACIASTNEKGVTTYQSKRFSTYTKHLNELSDWLAANNCKDVCMESTGKYWHPVWNVLELTCNPVLAHPKYLKAIRGKKTDKKDAKWIADVFKHDLVSGSFIPPTAIRELRDLLRYRSKLTNYTTGEKNRAQNCLTTSNIQLDHAFSDVFGKSATKILNYLLEHPEEKNFDVTSFVDGRCKTPIEEIQLAVDGNISYEQAEKLKIIRSHMDSLELCKANIESAILTLAEPFLPQVNLISSVPGIRDFSAIAVIAEIGVDMSVFPTAKHLCSWAGLAPQCNESGGKKKSSRVSHAGAYIKPLLIQCSNAVVTSNKHPEIRNRYLAIKKRRGHKKAIVAIARMLLNAIFHILKKNEPYNPELYRQSDIAPVDREQQAILLLEKRGFAVSKNSVE

SEQ ID NO: 507218 - protein, 365 aa, unidentified
MLYLGIDQHKRQLTVNLRSEDGTVILKRQVSTQWEKVRAFFADLAEKAQPEGGFLAILEVCGMNPWLLDMLKQYGCRETVVIQPTERSRQKTDRRDAGMLSHLLWVHRQQFLDGRHPVGLRRVQPPTPQEADDRQLTALRARLTKKRTAVLNGIHKILRKHNLEQGQPTKLFQTQKVRRWLAEMELPALDRLEIDLLLPQWEMLDGQLEIVEAKLAERAEADEQVKLLESVPGIGHYSAVAISSRIGNIERFKHADSLPNFFGLTPGCRNSGEATQRLGSITKQGSKMVRHLLNQAVIKVLRFDGAMRTWFKRIKKRRGSKIARVAVMRRLATILWHMLKKKQKYRYASPIKKHREFEGFEGAEA

SEQ ID NO: 507219 - protein, 378 aa, unidentified
MAGTEPHAWGTGRMDDITYVGLDVDKATVCVAVAESGRGGEVRQVGVFQNRPEILCKMAAKLGRGGRRLSFSYEAGPCGYGLHRLLTACGHSCVVVAPSLIPMKSGDRVKTDRRDAMMLAKLHRAGELTAIWIPDATHEAIRDLVRARATAGRVLSKARQHLQGFLLRHDRIYRGARAWTQAYWRWLTTVRFEHPAQQIVLQDYIHAVEDAEARRDRLTRQIEEMLPSWSMAPVVAALQAMRGVALVVAVTVVAEVGDFRRFANARQLMAYLGLVPSEHSSGSTIRRSGITKAGNTLVRRVLIEGAWTYRMTARVSRKLHDRLEPLSPVIRGIAWKAQVRLCARYRRLAASGKPKVVVTTAIAREMVGFIWAIACIAS

SEQ ID NO: 507220 - protein, 342 aa, unidentified
MERVATVGFDIAKSVFQAHGIDATGTVVVRRKLSRGRVLTFFEALPRCLIGMEACNTSHYWARQLIALGHDVRLMPAQYVKPYVKRGKNDAADAEAICEAVTRPTMRFVPVKTPDQQSVMMLHRVRLMLNRQRTQLSNAMRAHMAEFGVVAPVGRMGLERLLAIVDDHEDQRIPADARVCLAMLAAQLAVVKTQVLENDRRIRESARETEVGRRLMAIPGVGPLLASAFVASVADPTVFKTGRDLAAWIGLVPKQNSSGGKERLGGISRAGNRYLRQMLVVGAMAVIRHAQRHGTKRAWLLQLLARRATKVAAVALANKTARMVWALMTSGERYREPAVTLA

SEQ ID NO: 507221 - protein, 311 aa, unidentified
MQYTIGIDISKGTLDCFELSSSKHYQYPNDDLGQKDLIKWIKKQDTVLVVFEATGAYHRSLETTLARHKHPFAKVNPRQARRFAEATGRLVKTDRVDAAMLAKMGSILDLPTQEPKSENINILRELLTARRALTKDNAAAKTRAQTIVHTVLKIQIRARQKQITLQIKQIDKIIAEMIDVNERLSRKFEILISIPGIGQATAFSMLIEMPELGTMTGKQAASLAGLAPISRQSGKWQGKERIQGGRAFFRRAMYMPALCIIRHNLSSKQKYDQMIKCGKPAKVAITALMRKLVVLANVLLRDDRIWTEKLT

SEQ ID NO: 507222 - protein, 400 aa, unidentified
MRSIGMDVHRSFAQVAIYDDGQITESFRVDMEHDAVVAFGRSLRSEDEVILEATGNTSAIVRLLAPFVNRMVIANPLQVKAIAHARVKTDKVDAKILAQLHAAGFLPEVWAADDETLHLRRLVSERDATVRSIRRVKSRVQAILHANLVPKYAGHLFGKGGRKWLGKVPLPKSERDLLGRHLDELDWLSRKLEELEKDLIGISLDDTRARKLMTIAGISSVIATAVIASIGDISRFQTPEKLASYFGLTPRVRQSGDRGAIHGRISKQGNATARTMLIEAAWGASSVPGPLRAFFLRIKDRKGANVAAVATARKIANLIWHLLTKDAPYQWARPAFVAMKMRRLELRAGAPKAHGKAGPGRDYWIKELRHREMELVANAEASYAKMVEAWREKPPKPQEN

SEQ ID NO: 507223 - protein, 347 aa, unidentified
MLIIGCDFHPSFQMVSIFDKKTGEVRQMQLGHREEAERFYRALPPPVRVGMEACGQWIWFERLLAELGHELWLGDAGQIRAMVVRQQKTDRRDADHILTLLLQERFPRIWVPSLEERDVRQLLVHRHKQVQARTRVKNQLQALALGQGVQRKRKLWTAKGRAELEQLPLLPYAAQRRQLLLESLDRLEQEIQQLNLRVEQEVGQRPAALKLRTHPGVGPVTALATVLTLGPVERFGSARQVASYLGLIPREHSSGGRQQFGRLSKQGNPFLRFLLVEAGQSAVRGDAELRRLYQRLAARKHRALAKVAVARRLAQRLYWMLRQDQTYAQLLQGRHAGEPESFCGRGS

SEQ ID NO: 507224 - protein, 415 aa, unidentified
MDLLYPRCAGLDVHKDSVVAGTRLADGGPARTEARTFDTTTPGLLALSAWLAEQGCTHVAMEATGVYWKPVWHVLSDGEFTLILANAAHVRNVPGRKTDVADALWLADLLAHGLIRPSFVPEAPTQELRALLRTRKQLVREQASHVQRIQKTLEDANLKLGSVLTQIMGVSGRAILQALIGGEVDPDKLLTLVQRGVKASPEKLRAALQGRITERHRFLLRLHLRQVDALDAAIAEIDAEVDHDLDPFRDAVRLLRGIPGVSDLTAQVIVSEIGTDMARFPTAGHLISWAGLCPRNDESAGKRRSTRLRKGAPWLKTTLVQCAWAAARKKESYLQAQFRRLRHRRGPKKAICAVAASILTAAYHMLRDGTLYHELGADHFRRASPQDQAIRLARQIAKLGFTCTLAPLEETAVSV

SEQ ID NO: 507225 - protein, 288 aa, unidentified
MDVSRDEPHTTAGLDIGDKYSYLCLIDQQSGEVIEEGRLRTSPEAFKRRFASERPPMRIAIEAGTHSPWASRMLEECGHEVLVANARKTRLIYANKRKTDEVDAENLARLARLDPKLLYPLKHRGEDSQAHMAIVRSRQVMIGCRTQLVNHVRGAVKSFGARLPKCPARSFHKRAAAHIPEALRPALEPILQQIASLTERIRDFDRRLVAVSEEHYPHETELLRQVEGIGPLTALSFVLTLEDPYRFERSRSVGAYLGLVPARDQSGDRDPQKRISKEGDEMPSVGFW

SEQ ID NO: 507226 - protein, 343 aa, unidentified
MQTITTIGLDIAKSVFQVHGVDAGGQVIVRRQLKRRYVLTYFQKLSPCLVGIEACASSHHWSRELQALGHTVRLMPPAYVKPYVKRQKNDATDAEAICEAVTRANMRFVPTKTPEQQSGLLLHRTRHLFIRQQTAVINAIRGHLAEFGIVAPVGRHGVEELLNVVADPSDRRVPEMARACLLAFGAQLRRIKEQILEFDRLIRAWHRSNETSMRLDEAPGVGPVLATAVVATVADPKAFRSGRNFSAWIGLVPKQHSSGGKNRLGGISKQGDRYLRGLFVAGALAVIRYAKIHGTKHRPWLTALLARRPTKVAAIALANKIARMVWAMMVKGERYKEPVALAA

SEQ ID NO: 507227 - protein, 312 aa, unidentified
MDNEIIIDKGCGLDVHKETVVACVMGSGIKKEIRTFSTKTNDLLRLKVWLSGLGITHVAMESTGPYWKPVFNVLEDGFTLILANARHIKNVPGRKTDVKDSEWICRLLRSGLLSASFVPPQAIRELRDLTRYRQKLTQALAAEKNRIQKVLEDANVKISSVLSDTFGASGSQMIEALMEGKLNEAEIADLAKGKLKSKKEEIREALVGYFQAHHRFMIKASLEHIKYLEKLISNLDQETKKKLARYQKEYELLQTIPGVKEQGATAIIAEIGADMDIFPSEGHLATWAGMSPGNNESAGKKKVERQPTATRI

SEQ ID NO: 507228 - protein, 331 aa, unidentified
MNAVSTLGIDLAKNTFSVHGVDADGVVTVRRTVSRGKLAELVARLPPSLIGMEACSGAHEWARRFGAAGHTVKLMAPKFVAPYRKSGKNDGNDAEAICEAVCRPNMRFVPIKSVQQQADLSLHRVRQGFVEERTATLNRLRGLIAEFGYVLPLGAEQLRRQVLDLIDRLPARVAHCVRDLLEHAERLRGKALEYEREIRMSVRANELARRAHTRPGIGPITASALVATVGNGHDFKNGRQFSAWLGLVPRQYSTGGKTRLGHITKRGDPYLRTLLVMGARSVLQRAYREGDPLSRWALALQQRRGYHRACVAIAAKNARVAWALLAKGAAA

SEQ ID NO: 507229 - protein, 426 aa, unidentified
MWDAKRRVLKIKSLKHGIIQDKRGNVMRAVFGIDVSKTSSEVAILVNGEKVHGYTILNDAIGFNRLLGDLKTVHNPEIIFEATGVYSRRLQAFLEECGYAYTRLNPLEAKKQLDSLRVRKTDKIDAEKLAKSQLVHNRKPTYVQEEVYQHLRDLSRFYQNMTEDLVRTKNRLYKVLQVTFPELENLLSTPTGEQYWNLVMAFPCKEFVLSLSQSDLCEIIRQSTSKRISEKRIAYLTDKLIKLAKQSFCAVKKTSPMLEEVRYYAQELLRLSERRQVVLNDMVALAQPLPEYDILRSIPGIAETTATSIIGELGDIRRFQSTNQINAFIGIDLRHYESGNFLAKEHITKRGNPYARKILFKCIHNIASASHTNPCHIADFYEKRKRQSTIASTKPHTIASIHRLIRTMYYLITHNKLYDYSLTQNR

SEQ ID NO: 507230 - protein, 375 aa, unidentified
MAKVRSWAGLDVHAAKVVACVVDAESGEMTVHRLPGVTSAVLSFCCGLPGPTRVAYEAGPTGFGLARALVAAGIECVVAAPGKIERAAQDRMKTDQRDAERLVRLLMIDALRPVRVPTSEEEALRDLVRAREDLRGDLMRARQRLSKLLLRHDVRYDDTTSRWGQRHRSWLANVDLGERGAQLTLSEYVGAIDALQIRRETLEAAIVELIPCSPWAQDVARLRCLRGIDTLSAVGLAVEIGDFDRFEHPKLLMSYLGLVPSEHSTGESRRRGPITKSGSQHARRLLVEAAWHYRRSPRLGATLERRQDGQQQAVLAIAWRAQQRLHRIWRRLELQRGKRRTIVAVAVARQLAGFCWAIVTYNHEHRPLHQLEAHK

SEQ ID NO: 507231 - protein, 352 aa, unidentified
MAVYIGVDLHVRTQTLCWVDESDGEQHEITLDHERDDVRAFYSHFPAPALIGVEATGYSLWFHRIVEALGHQLRVGDALAIRQFARRRQKNDRRDAELLLDLLRHDEFPAIHIPSPASREVLALLRYRHRLVRIRTMLRNGLQAVALSHRLRLGPKLFTTRGQQQFAALPLTGAFAVQRQHSLLLLASLAEQILAVEAALEHRAQGDPRVIRLRTHPGVGLLTSLALVHALDPVSRFDRARGIAAYCGLDPKERSSGDTQRFGHISKQGNRLLRFLLIEAAHNAIRGDDHLRRFYFHLQARKNSSVAIVAVARKLVLRLYRMLRDEIDYDQFRRRGRDARRARENASLAVPG

SEQ ID NO: 507232 - protein, 458 aa, unidentified
MNRNRSKAKIDRKMPMVHPNAAAIDVGATMHMAAVRADRTPEPVRSFGTFTADLHRLVDWFTECGVETVVMESTSVYWIPIFELLDARGFTVFLVNARDAKHVPGRKTDVSDAQWLQQLHSFGLLRASFRPKGQIAELRAYVRQRERLLEYAASHIQHMQKALTEMNLQLHHVVVDITGATGLRIIRAILAGEHDPKMLAQLRDYRCHASAETIEKALTGSYRAEHLFALEQALALYDAYHEKVSACDARIEGVLKELSIGRGRRSASLLSPRRPRTDQVNGLAFDVRAALFTLLGKDLTQIDGLGPYLSLKLVAECGDDLSAWASAKHFTSWLGLAPSNKISGGKVLSSRTRRCGSRAAALLRLAAVTVGRTDTALGAFYRRLSARIGKAKAVTATARKIAVLFYNAIRHGMDYVDPGASYYETRYRTRVIDNLHRRAKVFGFVLQPVEPTPGVAVS

SEQ ID NO: 507233 - protein, 384 aa, unidentified
MDEVTDEPLYRDRVCGIDIGKAGMVATIRVPSERDPARRAAETRSFGTTKREVLALADWLRCWQVPAVVMEATGDYWKGPFYRLEAEGLECVLADAKQVKNLPGRPKRDPSDSRWLAACFERGAVTPCFVATEEFRVIRLHTRYRRELTEERTREKQRAEKLLESAAVKLSSVVSDLHGVTGRAVMDQLIAGERDPKALAQLARARARRKIAELEEALDGAEFFTPAHAALLATMLARIDHLNTEIDQLTGVIERLLAPYEEQLQQAESMPGWGRRSAQDAVAETGADMTRFPTGGHLASWAGRTPLDNQSGKRQGRAKSKKGNRYLGGLLGETAVAAGRTQTREGARYRRIARRRGKPKAQVAVPPRRQARRPRLRRHPLPPP

SEQ ID NO: 507234 - protein, 366 aa, unidentified
MQVSKSALRGATPCKLPQSALIHWPAGDCAAITERLAKNVFQVHGITATEEVVFNKPLRRAQFLPFFAKLEPCLVGMESCSSAHHWARELTALGHEVRLIPPMYVKPYVKRGKSDAIDAEAICEAVTRPTMRFVAIKTVEQQSLLSLHRARDLLVRQRTQLVNNLRGLVAEFGIFIPRGLARVIGFAEDITLGEILDLPDIANEVIHNLCEHLMALHKRVRWYEDRVKQVAKEDARVRLLRTIPGVGAVTASAIIASIGDGHQFRNGREFAAWLGLTPANKSSGGKEKLGRITKMGDQYLRSLLVVGMTSLVRQTRSHPERASKWLTSLLERKPARVATVAMANKTARIVWAVLTRNEPYSPRTAA

SEQ ID NO: 507235 - protein, 355 aa, unidentified
MTSTKYIGMDVHKESISIAVRDDAGKIVMECVIETKASMILQFINGLRGVVHVTFEEGTWAAWLYDLLKPHVTKVMVCDPRRNALLQEGNQNDRVDARKLAELLHNNQLRSVYHGDHGLRTLKELVRSYLTITQDLSRVMTRVKAIYRSWAIPCTGKQVYAPRHRAEWLAKINETGVRRRAEFYYQQLDALRCLRQEVRRELLAESKKHQAWKRLCGIPSIGPIRAAVLLGILQTPHRFRTKRQLWTYGGVGIETSSSADHHVVKGQLERKKKKVEIRGLNRNYNHDLKNLLKGAAIVAATKPGPFAEFYAELLAKGMRQEMARLTLARKIATIVLIVWKRGVSFDAQHLKPQTV

SEQ ID NO: 507236 - protein, 338 aa, unidentified
MTIVMGLDQHRAQITAEWLDTETGEVMRTRVTPAHRAGVRRFCERFAGQEVEVALEATTGWRFVADEFQRVGASVHLAEPAETAAMRGNKKRAKSDRADARHIRELLTGGRLPESWIPPAHILDLRARVRLRHTLSHQRGEWQQRIQAVLYHHGCPQHGNVITVEGRAWLAAQPLSTAAREQITIALSVIDALDAQLGPLDKELRAFARRQPGCRALLTQFGVGELIAVTILAELGDARRFSSSRDAVRFAGLDITVHQSDQRRAPGHLSRQGPPALRWALFEATMCAARSSSPDYEYYSQAAERLGSNRARLSVARKILKRSFHLLRELGDEALLPA

SEQ ID NO: 507237 - protein, 321 aa, unidentified
MNKYKEIHGVDISKDVFDVVDIKGIHHQYNNSLSGFKSYLKCIAPGTLVVMEATGYYHYLLAQFLFDQDITVSVVNPLSVKRFVQMKLSKVKTDKTDAKAICGYAQVNDVPLYDGKGAEQAESLQLLALMDIYLKQRTQIKNKLHGEKVLGIPSKTVYTSLKRTLVQLDGQLTSLQERLMALVKKNQREQLGNLKSIPGLGDKTAALLIVLTEGFTKFENAGQLCNYAGITPTIRRSGSSVRGKSRISKVGNRKLRNLLFLCAFSACKHNKGCREIYERIVAKGKSKKLALIAVSNKLLKQAFAIAKSGLPYDENYVSRLN

SEQ ID NO: 507238 - protein, 348 aa, unidentified
MWLENLGGFMNLYVGIDLHSTNSYIGIINDDFKNVMEKRVPNNKDKILNILAQYSDKIIGVVVESTYNWYWLVDALMAAGYKVHLANPAAMKQYEGIKYLNDKHDANWLAKMLKLGILPEGYIFPKNTRAIRDLLRRRGSLVQKRTAFKLMLQQIYSNQKGESLSNNAMEKMKYAEAEKLFEEEAWQMNGLCLYETSQHLKKQITEIEKYVLKQCKDEWSYKGLQTVPGVGVVLGLTIALETGPIERFLTAGDYASYARCVPTAYWSNKKKKGTGNQKNGNKYLAWAYAEAASFCMRHCEEAKMFYQRKTAKTNKPKAYRALANKLSKACYFIMRDGMAFDVNKLFQN

SEQ ID NO: 507239 - protein, 338 aa, unidentified
MAIVTLGIDLAKNVFALHGVGPTGKPELLRPEVRRSKLLEVVASLPPCLIGMEACSGAHHWAREFQKLGHTVRIMAPKFVAPYRMSGKRGKNDANDAAAICEAVTRPNMRFVPVKTVDQQADLFIHRARQGYIEERTALINRLRGLLSELGVVLPLKASAMRREANVVLEDLPGWCNTVVGDMLNHLGRLDERIDEYDKHLRQIAKQNDKACQLMKLAGIGPTTATAIVASVGNAHDFQNSRQFCAWLGLTPGQHSSGGKARLGRITKTGDSYLRTLLVMGARSLLMKAAAHSDPVSRWALKLKERRGFGRAVVAIAAKNARMCWAALRLGDAFRIPA

SEQ ID NO: 507240 - protein, 404 aa, unidentified
MDIHKRFSIATILSRSGEKKQQRFSRDEDGILNLKNWVISEQCDVVACESTSDFWVPIYDSLIIHLPVIVGNARDMKAFTHKKTDKIDSEVIAQLALNKMIQPSRVFAKNQREFRSYVRLRVTLVEKRTDIKNEAHAILASEMLHLKGVLTDIFGKNGRIILSGISSGKSVDQIMGNLTPTVRKKRDQIREILDKEISQSAAFRLQICLKLIKHLDNEIEALEKEIFNYAYSNHNHEMEILMSVPGIGELSAAILIAEIGNFKDFSSGDKLASWLGIVPNVYQSADKFYNGRITKRGSKVARWILTQIANAAARKKNSRLKEFFNRKKKSIGHAKAIIALARKIATIIWHLVTNDEMYEDKSGYQKGETQKRKIVETAIFSVDERIKIISGIIAIMGKENEEST

SEQ ID NO: 507241 - protein, 334 aa, unidentified
MKTRYFLGIDIGKNSFHAALTVEGQNFYDQEVSNNTTAIKKYFQELKTKFGFKSDQLIVCMEHTGIYCYPLIDHLTKQRVKVCIEPALRIKQSQGMQRGKNDKIDSIRIAKYGYKNADELRFWQPKREVLQKLRALLVVRERLIRAKTQFEVPIKESREFIEESIRFLAIKNCKATISAIKKDIKKVDAEISKVIKEDNQLQAQVKIATSVTGIGTIIAANMILTTNEFNDISDHKKFACYAGIAPFDNTSGTSPRRSHVSHMANKRIKTLLHMGARSAIQYSPELKQYYQRKLAEGKKPFSVLNAVCNKLISRVFVCIKNQRMYQKNYQLALA

SEQ ID NO: 507242 - protein, 446 aa, unidentified
MTPTLPVLDPLAGFVDVGSEQMHVSIAGGPPEVFGTFTAELHRLRDWVKERGVASVAMEATGVYWLPLYGVLEAAGLKVTMVNGRQTRNLPGRKTDMKDCQWGATLHAHGLLHAGFVPPAQIRRLQDYLRLRADHLSGAAASVQHQQKALERMNVKLHDVISSLVGASGIKVIGAILAGERDLDRLLALCDVQIREKKATRVKESLRGTWAEEHLFALRQAVENWQHYQGQIAACDQRIEAVLRAINGPDQPAQPQDKASPIKRSGVNAPQIDDLHGLLFKLCGEKDLTVLPAHTDYSLLQLIGEVGTDLSPWPTEKHFTAWLGVAPGSHQSGKRKGTVRRKRNRAGRLFCVMARGLARSKHIALGGFYRRMAGRRGGLVANVALARKLAVLFWRVMVKGLSYAEAGLKAYEEQVLETKRRALCRLAKQLGRVVLPSLAELQTAKS

SEQ ID NO: 507243 - protein, 360 aa, unidentified
MTGTMTWAAMDVHARSTYAASMDVVTGELSRQRFDTGAVEPVVGWLAGLPGPVRCCYEAGPTGFGLYRAAVAAGIDCQVIAPSKTPRPSGDRNKSDRRDTDLLLRQLMAGGLTAVVVPSATCEAARDLARAREQVRVDLMRCRHRLSKLLLRHGRVWDRSTWTKVHREWLSAQTFEQVNTELAFIDNLAACDGLTARKDALDERLSWVVSDPEFWPLVRRLRAFRGIDTLSALIIVLEVCDFARFSRAVQLGSWLGLVPSREQSGESDHHGSITKTGSKYARRILVEAAWHYARPPRIGRTLYERQEGLPDHVLQIARRAQSRLYRIHRRMRERNKPGNVIVVACARELACFLWAAATAP

SEQ ID NO: 507244 - protein, 347 aa, unidentified
MDHIGIDLHKKDSQMCILAEGGELIERRIRTDPHRFAEVLGERAPARILVEASTESEWVARCLEGLGHDVVVADPNFAPMYATRTRKVKTDRRDARALAEACRLGAYRPAHRLSDAQRHVRARLTVRDALVRTRTRYISVIRALLRQHGWLVPSGSAEGFPQRVLALPLPGRLRSEVAPLLAVMRHLRPPLAYSDERIAAVTATDERVRRLQSVPNIGPVTAAAFVAAIDEASRFHRAHEVEAYLGLVPRELSSGETQRRGRITKAGSTRVRWLLIQAAVSMLRLRDPRTATLREWAGRLAARRGKGIAVVALARRLAGILFALLRDGTVYEPRRRHACHVTQAVPA

SEQ ID NO: 507245 - protein, 310 aa, unidentified
MDAIVVGIDVSKDRLDVHVAPSGEAFFIANDAAGVEELAGRLAALSPAIVALEATGGFETLAVAQLAAAGMPVAVVNPAQVRSFADAMGKRAKTDPIDAAVIARFAAASDVKAKPLSDEQTQLLAALVARRRQITAMIVAEEARLKQALGKKLKQSIARLLTALRRELKSLDGDLDGQIHASPAWRLKEDLLSSVPGVGKGIARTLIAELPELGSLDRRQIASLAGLAPFTRQSGKWRGKSFIGGGRASVRAALFMGALVAARHNPVLKAFRDQLVARGKPKIVAIVATARKLLTILNAIIREQKPWQIA

SEQ ID NO: 507246 - protein, 407 aa, unidentified
MEVVYRCCCGIDVHKKVIVACLVNGGEQELREFGTTTSEIKTLANWLAESGCEMIAMESTGVFWKPLYNLFELMDLDAMIVNAAHMKALPGRKTDVKDAEWIADLLRHGLLKASYIPNREQRELREITRYRKSLTEERCREVNRLQKILEGANIKLDSVVKDITGKSARKLLQRIIDDDIPDSDEVSKLVHGRMRPKLDQIVASIEGITTPLQRKLLAQIIDHIDDLNRRIGELDKLVQEYMAEYEAAIEAIDEIPGIARRSAEVILAEIGLDMGRFPSAAHLCSWAGVCPGNYQSAGRRKHGKTTKGNKALKTILTQCAKSAKTVKSSYFFAQYQRISARRGKNRATLAVAHSMLIAIYHILKNKTAFHDLGSDYYDSFNRDRKINSYLKRLKALGWEPDAISSSA

SEQ ID NO: 507247 - protein, 337 aa, unidentified
MPHTVDTRSALDYDRSLVLAIELSSKCWVVAAQVPGLPHAKAKRTIEPTAEALMVAIDSYRSRAAAAGRVVERVIAVYEAGWSGFWLVRWLARHGVETYVIQPSSVPVDRRARRAKSDGIDAELLLRTLLAWLRGEPRVCSMVPIPSEADEDARRSIRERTELVSERVSIVNRIGAVLATLGVQGYDPLRRDRRQRLDTSRTPLGNPLPVNARAKVLRMLDRLELLLKQIAELDRQRDAVLEDGAPDKASQMIQQLATLRGIGVQSATVLVREAFVRNFADGKALGAYAGLSATPYSSGSVNREQGIGKAGNRRLRTVMVELAWLWQRYQPDAAHVR

SEQ ID NO: 507248 - protein, 370 aa, unidentified
MLDTTTFVGLDVHARSIKAVSLDVMTGEVRAATFGYDAGAVAEWVRSVDPGARCVYESGVTGFDLQKRLSGLGVDCVVGAVSKMIKPSADRRRKNDRNDAEFLARMLSVGNVVEVWVPDDECEAARDLTRALEDARDDLSRSKQRLSKFLLRHGLVFDERTPTGRRKGNWTRAHWSWIESIRFAEGADEEALAYYVDAVRRAAEEKARLEGLVEAEARKPRWRKRVDSLRCLKGVDTASAADLVFEAGEFSRFRNARSFAAWVGLTPSEHSSGESDRRGAITKAGNKHLRKALVEAAWHYLTCSGRPKDLAKGQAPDRVARRHAAKGVRRLVERREALLARGVHGNKANVATARELACWVWAVGLMAEEA

SEQ ID NO: 507249 - protein, 365 aa, unidentified
MRDENKLSVGCDMHKRYSVFVTMDNECKLGNAVRVEHDREVMREYLKSLPEGSRIAVETIGNWYWLIDEIESASHVPMLTHARKAKLMMGQINKTDKLDAQGLATLLHNGTLPSVWIPPRELRDLREICRLRMTLSNIRTRLKNRIHSMLSKYLIRIEEVSDLFGRKGRTILSGRLNELPPESKRCVEDELKLLDDVQNQIHEVDERIDELAETTPEIELLMTEPGVGKILATIIWLEIGSIDRFMSAERLASYAGTVPRVNSSGGKTFYGKTRPDVNRILKWAFVEAANLVILHKAKMPGSHAVNLYNRVKHKKGSAKAIVAVARHLAEASWYILKNREPYHDPKPVFSTHEQGRNSPATKERV

SEQ ID NO: 507250 - protein, 394 aa, unidentified
MQLVMWEEHVHKPTTTIAGSARLGEQVDAVIGVDTHTDTLSACLVNPVGAVLAQTTEPANPVGYRRLLTWSAKEQAKHGCPRLVWAVEGTRSHGAGVTRALRSAGQLVVEATRPPRAARRPGGKSDPKDAVHAARAALANTHHAEPRADGPREALRMLLGVRSAALTARTDAINELKALIMQAPDELRGRLRGLTSSAQIAACRRLRVPATPDPVAVRHDPQVVLVDAETRARLACMRRLARRIGDLTIEIDDAADEIHTLVHALDPGLLAEVGVGPITAAQILISWSHAGRLRSEAAFAALAGVSPLDASSGAQQRHRLNRHGDRALNSALHTIAVTRERCDPRTKTYIQRRVSEGKSRREARRMLKRYLARHIYRHLERAASVPTDGALLAA

SEQ ID NO: 507251 - protein, 425 aa, unidentified
MPTALAWEASMEVLHERCAGLDVHKNTVVGCVRLAQGGRVEKEVKTFKTTTGELLALAEWLDGHRVNHVVMEATGVYWKPVWHILDDGERQLVLANAAHVKNVPGRKSDVSDCDWLSDLEAHGLIRPSFVPDGPTQELRGLLRTRKQLVRERTSHTLRLQKTLEDANIKLDSVISNVVGVSGRRMIEALVAGESDPTALANLADRRIKAPPEALCEALRGRVTRHHRFLLSLHLGHIDAIDQAIDKIDQEVEASLQPFCQAVGLVKTIPGVSQLAGQGIIAEIGSDMSRFPTCGHLISWAGLCPRSDESAGKRRSTRIRKGNPWLKTLLVQCAWAATRTKATYLHAQFLSIRSRRGARKAIVAVAASILTAVYHMLKNGTSYRDLGPQHLENRNKEAQARRLLARLRRLGFVADFDTLRPVPVSC

SEQ ID NO: 507252 - protein, 341 aa, unidentified
MKVSTLGIDLAKNVFQLHGVDHEGHTILRKKLTRAKFVQFVIQLEPCLIGMEACSSSHYFARLFTRYGHEVKLIPPQYVKPYVKTNKTDAADAEAICEAVTRPNMRFVQIKTEEQQAVLALHTERGILIRERIACANSLRATLAEFGITIAAGQSHLTRELPAILEDGENGLSPFVRTSIYRQSKHIRELEEQVKQVEEALASWYRTQEACQRMAKIPGVGMLTATYVVAAVGNARQFSTAKQFASWLGLTPKEHSSGGKQQLGGISKRGDRYFRYLLVHGARALTAWVNRNGAVEENSWLQGLLERKHYNVAVVAMAAKTARIMWSMLSHNTEYQPRQLA

SEQ ID NO: 507253 - protein, 349 aa, unidentified
MQHYVGLDVSVKETSVCIIDEAGKVIREVKVATEPVAIFAVLTEEALAIERIGLEAGPLSQWLYSALAEAGLPVICVETRHMKAALSAQINKSDRNDARGIAQMIRVGLYRPVHVKTLASQKRRMLLTSRQLLQAKALDIENDLRGTLRNFGLKVGMVGTVKFEARIRELVADHPDLATIVEPLLIARRVLREQLGVLHRQLLEIVRHDEVCRRLMTTPGVGPVVALTFRATVDVPSRFTSSKAVGAAFGLTPRRQQSGEIDRMGGISKCGDALMRETLFEAALVLMTHSRKWSWLKAWGMKIARHRGMKRAIVAVARRLAVIMHRMWVDGTEFRWSRKEASGGVTVSV

SEQ ID NO: 507254 - protein, 413 aa, unidentified
MAIAEDGQIRSAGRVKTSRAELELFAHSLAPDDEIALEAGSSAVAIVRILKPHVARVVVANTKKLRQISHAKAKTDRLDARTLARLLAAGFLDEVWVPDEPTRALRRWIARRAQLVRQRTRAKNEIHAVIARTLSEGPPASDLFGKAGRVWLGEQDLPLDERVTVEGCLRQIAFLDDEIALVERALAEHSLASPAIRRLLTVPGVDMVVAATFMAYVGDISRFPSARQLVGYFGLDPRVRQSGAQGARHGRISKEGASEARHVLCEAAKVAARTPGPLRAFAQRVRARRGTNVATIAVARKLCVLFWHLLTRGEDYAYARPSLTAAKLRRLELLAGAPRRQGQRGKTTRPYRLQQVRDRERELSVQAERAYQRLVADWQQTRPNGAGAAPGRASQGPSTGQAARQAPAPTPAL

SEQ ID NO: 507255 - protein, 397 aa, unidentified
MFYLGIDIAKHKHYASIIDQTGKPITKPFPFQNHKEGGQTLLNQIYQYIESPTEILIGMEATGHYWLAVYSFLLDHGFSVIVLNPIQTNAWRKGTEIRKRKTDAIDATMIADIIRFGRFVETPLVDEKMFALKQMSRFRNALVSNMSDLKRKALVVLDQTFPEYQSIFSDVFGKTSSQILLEYASPSDYEQISIDDLTQIIEQTSRNRLGKKTANKLMELASNSFGVTFCKNAFSFQLKMLMEQISFIEDQIKECEDEMSQLLIDLDTPIMTVPGVGPILGATILSEIGDIHRFDKPSKLVAYAGIDASVSQSGQFESSGMSISKRGSSHLRRALFQAAITAHKHDPVLKAFYEKKRKQGKHYYVCIGAVARKLCYIIYAILKNNKPYEIPQYSKEV

SEQ ID NO: 507256 - protein, 378 aa, unidentified
MSANATSVGLDVHARSVVACGLDGRTGELFERRLTPDHGDIESWIRSLPGPVAVTYEAGPTGFGLARYLTGQGIECLVAAPSRLQRPSGDRVKTDLRDARHLARLLHLDQIVAVAVPGVEQEAARDLVRARDGVRGDLMRARHRLSKLLLRHGIVYCGGRPWTGSHDLWLRAQRRGALFATPGLGLAFDTAYDTVLATVARRDRLDAAITAMAAASAFTPVVCRLGCLRGVATLTAFGLAVEIGDWHRLTGSSIGAYLGLVPTESSSGDSRSRGSITKTGNGHAPPPADRGRLAPPPALPHRAGAAPPPGRGLPGRPRPRTTRQPAPARPLGRLRCPPQAARGREHRDRPRAGRLVLVVGRARGLTFFPRRPDTAPGW

SEQ ID NO: 507257 - protein, 310 aa, unidentified
MTPTPVYLGLDVAKATLAVHLDGSGFTLANDPAGHAALCARIAACGKPVQVLCEATGGYERAVGAALRAAGIPVSVLHPARARKLAQGLGFLAKTDAVDAAALAAIGPLLRPAPTPSPDPAVQRLAALVTRRDQLAELLRREKQHREHTADKVLLRDLEQNLRALQKRLAKIEVLLTAHLREHAPLQSKAARLQQAPGVGPVGAATLLALLPELGHGSRSRITSLAGLAPRNRDSGPFRGPRHVHGGRPKARRILYLCALSAARHHPQLKPFHSTLIANGKAPKVALVATARKLLLLLHAALKNPNFSLA

SEQ ID NO: 507258 - protein, 566 aa, unidentified
MRSFSQPDPCHARKSRNPLSSSRLPFSAICLRIFAAFLPPFSQLSDTVFKLNHSDPSEPGAVNKFAAAEAKTVNKSSDIDNNLRPAKAIVGRVPHRSPRSLRSYPARVYRRKPAEPRGPVQKSERTSPHEGFCISVTGDRTFGGRQKPPMKNWNEITHYLGFDWAKDHHQVVIVDRQARIVAEFQFEHSLEGWNTWRERMRDYPALAVAIETNQGAAVEQLLQSSVTIYPINPRSAKAYRQRKVPTTNKTDRLDAWSLAEALRTDGQSWRPLQPLDPLIQELRLLCRDELNLIAQRTSLINQLQQALMEYYPSALEAFDDWTVPATWKFLERFPTPDALTAAGLQKWNAFLHCHKLYRQNTHERRIAAFSKASEWHIAPALQRAKSFLVLSLVQCLIVLEKQLQQYRKRIEELFASHPDHDLFGSLPGAGPKMAPRLLSELGDDRTLFPDADSLRCYAGTAPVSYQSGQVHKVYLRRQCNKPLRCAIHLWADLSRRWCQWAQTYYQQLRKRGKSHAQALRCLGHRWLKIIWKMWQTRTTYDEALHTRNQTEHGSWVLQLMDQKPSE

SEQ ID NO: 507259 - protein, 468 aa, unidentified
MGHKRSRSRQPDRKKGKQPSLLKRINRNAAGIDCGSEAHYVAVPPERDAEPVRSFKTFTADLHHLADWLKACKIKTIAMESTGVYWIPIFEILEEHGFEVVLVNSRHIKNVPGRKTDVLDCQWIQELHSVGLLRGSFRPAAEIVSLRAYLRHREKLVQSAASHIQRMQKVLVQMNLLLHNVISDITGVTGMRILRDIVAGVTDPMALAAHRDYRCRASVEQIAASLTGNYRAEHLFVLRQNLELFDTFQRQIQTCDGEIESLLCTLAAKRRTPKAPVPPPRCKPRFCDNEPRFEIRDPLYRLAGADLTQIDSIGPYTALKLIAEVGTDMSRWPTHKHFTSWLTLAPKNKITGGRLISSKTQPSANRAATALRMCAMAVGRSSTALGAYYRRIAYRIGKPKAITATARKLAVLVYHTLKGDFDYNDPGAHAYEEQHRDRTLRNLRNRARQLGFGLVDLETGELIEGVVT

SEQ ID NO: 507260 - protein, 441 aa, unidentified
MAMRRRDEEVVFPHAAGIDVGASSHWVAVPRDATEDPVREFGPMTDDLNAMADWLVASGVDTVALESTGVYWIPVFEVLEQRGLKVWLVDARQMKYVPGRKSDIQDCQWLQKLMSLGFLRAAWRPEGDVCVVRAVARQREILLAEQASWVQRMQKSLVQMNIQLTEVLTDVMGTTGQAIIRAIVAGERDPKALAKHRNRRVKASAEEIAKALTGNWRDEHLFVLCQALAMYDDIARHLTECDSKLQALLRALGQCNVDLGKAPRTGSKLRDQFDARQILANWAGVDLTRINGLGLTAVMKILSELGPDLSRFATVKHFCSWLGLCPGTKISGGKVLCAKTKHSANRVRQALKMAAMSLSHSDSALGAFYHRLCSRMDKPRANTAAAHKLARMVYFMLTRGEDFVDQGQQRYEKQQRQRSIAALKRRAAALGFDINPTPAPA

SEQ ID NO: 507261 - protein, 327 aa, unidentified
MKDAAGCVLKEGKIGATRQELYTWLWTLPKPRTFAMEATIFTGWIYDCLLPHADKVKVAHPLMLRAIAAAKKKNDKIDASKIADCLRCDFLPECHMASREIRDRRRILRYRNLVVKQAVQMKNRVSGLLMETGVSYNKAKLHRRGYFHDLMWLHPEVSDSIRPLLNFCRERIDHSHKLDLRLVASLERDPLLRDRLTRLRTVPGVGQITALTWALEIGDYTRFASVKEAISYCGLCSAERSSADKVMRMPISKQRNKHIQRVLVEAAKLAVRQNHELAMVYDKELQRGNDNRATLAVARKLVAYMLAVDRRKQNFVPAEEFKSTAAA

SEQ ID NO: 507262 - protein, 354 aa, unidentified
MKKLFIGIDFAKEKFDAAIIDAVGLKEFGDRQFGTFSNDKKGYRQFIKWVRGNAGDSTESEWLFCGEDTGQCSPGLSKWLYGKGMDIWIESPYAIRHSSGIQRIKTDKADASMIAEYGWRHQDKASLFKPLGKALEDLREVFLYRHKLVQQRVAMEIRDKGKESEEISKGLSFIRRKAKHLIAELDRTIKECDLMIDRIIDSDEELKENYRIVTSIKGIARQNGACLLIYTNNFTRFGMDARKIACYYGVAPFGKESGTSVHSPARTSHFANKLIKSLLTQGANIAKMFNPEIRGYYDRLIKRGKHKSVALNNVKNKLLRIIVALVRDRKVYDPKTFKYYQERWKDKNQETCAV

SEQ ID NO: 507263 - protein, 348 aa, unidentified
MGVDLGDQWSNYCILDLEGETLAEGQLRTTQEDLAEFFQALNAARVVFEVGTHSPWVQEVIGGCGHEVLVANPRMMDGSKRRKRKNDRIDANKLARLGRVDPQSLHPIQHRSREVRQDLAVLRARDAVVAARTELINATRGLVKSMGTRLPNCSSPSFAEKVEGTVPAELREALLPLVRMAAALSDCIQEYDEKIEKLGHEKYGHTALLRQVKGVGPITSLAYVLTLENPDRFAKSRDVGPYLGLVPKQEDSGEIQPQLGISKTGDTMVRKLLVGSAHYILGPFGPDTDLRRYGLRLCERGGKNAKKRAAVAVARKLAVLLHCLWVSGEVYEPLRQGTSATIAPAVAA

SEQ ID NO: 507264 - protein, 337 aa, unidentified
MDYFAGLDISMDETHVCVLDREGAVVRESKAASTAEAIAGELSKAPSCRRIVFETGRMAPILFHGLNQLGLPVVCVESRQAYQALKSLATHKTDRNDARGLAHLARTGFFKPVHVKSLRAHALRSLISARKKLVGQRVTLENQIRGLAVVFGVRLPRALTTAFIDQALKASEGVAGLSAAMRGLSAARVAVMTAVAAIDADIRRMTRASAACRRLMTIPGVGQLTALAFVAAIDDPSRIRRSRDIGAYLGLVPRRYQSGEVDYTGGISKCGDRRVRTLLYEAANVMLTRYKGQLKLKDWAFAIAKRSTMRKARIALARRLAIIMHAMLRDGTEFAPA

SEQ ID NO: 507265 - protein, 343 aa, unidentified
MQSISTIGLDIAKSVFQVHGVDAAGQVVIRRQLKRRFVLSFFEKLPPCLVGIEACASSHYWSRELRALGHTVRLMPPAYVKPYVKRQKNDSTDAEAICEAVTRPNMRFVPIKTIEQQSCLMLHRVRHLFIRQQTAVINSIRAYLAEFGIVAPVGRRGVEQLLEVVADPAECRLPEVARACLAALGSQLRALKAQILEFDRRIIAWHRSNATSKRLDAIPGVGPALATALVASVADAKAFRSGRDFSAWVGLVPKQNSSGGKDRLGSISKQGDRYLRSLFTAGALAVIRYAKIRGTGHRPWLAGLLARRPTKVAAIALANKLARMAWAMMARGQCYQEPAALAA

SEQ ID NO: 507266 - protein, 348 aa, unidentified
MKKVIKQVAAIDVAQKELVVCLGKMYDDLDIELYAGKTFSNTTKGFTTLIEWVNKLTEPLVKVNYVMEATGVYHESFAYFLDDKGLQLAIVLPNKISNYVRTLSVKTITDKTASEAIARFGLERKLDSWHRPKKVFKTLRQLTRERNQLIEMRTMSKNQLHAEQAEAQPNQSSVERLKKQITLFNKQEKEIAAEIAGLIKANEDLKKSVTLMCTIPGIGMLTAATVLAETNDFELIRNKRQLTSYAGLDVKEKQSGTSVKGKPRISKKGNKYLRKAMHLPSLTAIRHDEKFKAVFTRLVSKHGIKMKAAVAVQRKLLEMTFIIYKKQTAYDKNFLLQNEAEEIILEAV

SEQ ID NO: 507267 - protein, 428 aa, unidentified
MPYKIAGIDVHKRMLAVVVSDVGVDGEYAFERRQFGSNPAQLRLLADWLLEQQVEEVVMESTAQYWQPVWAALERYWTPTCKKREGAGAMSGTQHLAQAQSNRARQGRKNDFADAERLVKRLVANELTLSFVPEPEQRLWRTVTRTKYQLTRNRVQLQNRLEALLEECHIKLSSLVSDLLGVSARRMVQALADGETDPAALAALANNHLRATQEQLRDALGACQELNPVYRRLLKLALEELQLIEKQISQLDQEIADLLRPYQGQVQRLAEVPGLGVDSAQQIIAEVGPTAATFPSAGNLSSWVGACPGDDESAGVSHSHRSPKGNRQMRRLLNQAANAAVKYKGGIFEILYRRYVPRLGHKQTIGVIAHRLCRLIWKILYQGVRYEERGPDVRKKSQRYRAARMIRELQSLGYRVEQTNSQSADVPA

SEQ ID NO: 507268 - protein, 346 aa, unidentified
MLYAGLDLSRQRLDVHVLDEEGRTVDVLAVHPDADALRTLANRVLRHGQEVSAVIESMTGSRFVHDQLELAGWDVAIADAVKAKGIAPLAAKTDKIDAHVLAELARRNLVPEIWLPDPRVRAERERARFRLHLVRHRSALKCRIHATLMTFGHNIPVSDLFGTSGRRLLAGLELPEPWAGTLATSLAMVDELEERIDECGRELARLGADHPYIPLLLTVPGVGPLLAYTIASEIGDIGRFASPKKLAGYTRLCPLVRQSGNRDFRGPLAKNGPKYLRWALVEAATHAARDVRYRERYERNKKRLGRQRGAEVARIDIARQLVEAIWHVLTKNEPFAPASPAILLVA

SEQ ID NO: 507269 - protein, 310 aa, unidentified
MERIFVGLDVSKDRLDVHVRPSDERFEVMYDEAGVATLVHRLAKLHPTLIVLEATGGYESAAAAALAHAGLPVAVVNPRQVRQFALATGHLAKTDRLDARVNARFAELVQPTARPLATEQAQVLGELVARRRQLVDMLGAEQNRHRQARARGLQQRIRVHVTWLTRAIAEVDEEIARLIRASPVWRETEDLLTSTPGIGDITAHALIADLPELGQLDRRRIAALVGLAPWSRDSGRWRGRRMIGGGRAAVRRALYMPTIVAIHHNPVIREVYRRLTAAGRPKKVAVIAAMRKLLTILNAMLRDRRPWQPA

SEQ ID NO: 507270 - protein, 341 aa, unidentified
MRLIRVGVDLATNVFQLHGVDRSEKTAWRRKLVRGDWIEELLESLEPGCEIRMEACSGAHYRATKLQAQEYTVKLIAPQFVKSYVKINKNDANDAEAICEEMSRPSMRVVAIKTDEQQDIQAAHRVRSGLMDQRKAKANQLRGLASEYGLVASKELLHLRSAIPRWLEDQENGLTERFRRLLHGLWGDLKTLDERIEELDREIEQIARQDPVAIRLQQVRGIGPLTAMALLATIGDASQFASGREMTVLFGLKPKQNSSEGKERLLGISKRCDAYLRSLLVHGARAVIRTAQAKTDRLSMWVIRIATTRHPNIAAVALANKTARIAWAMLTKRTDYRSQAA

SEQ ID NO: 507271 - protein, 366 aa, unidentified
MQKISTSQRSGSRIFKGRQLTIGLDLGDRWSWYCVLNEVGDIVLERRLTTTPEAMKQVFGRMPRSRVALETGAHSPWVSRLLTALGHEVIVAHARNVGLIGESRRKDDRIDARTLARLARVDPQLLSPVQHRSAQAQIHLMVIRARAELVKARTALVNSARGLVKSYGERLDKCGTQQVGQDLAKNLSAELREALEPLLREVESLNTQIKEYDRRIEKMARETYPEVELLKQVKGVGDLIALTYVLTIDDPHRFRKSREAGCFVGLQPGRRNSGQSEPQMHISKEGDRYLRTLLVQGAHYILGPFGEDSDLRRWGLKLAERGGKNAKKRAVVAVARKLAVLLHRLWLGGEVYEPLRNSQRAVSAVA

SEQ ID NO: 507272 - protein, 418 aa, unidentified
MKPWNELTHFAALDWANDHHDLVVVDTKGQIALELTFPHTAEGWQQAQEALAIWPGLPVAIETSAGPAVDQLLQRGFVVYPVMPKAAARYRERKRPSGSKDDRHDAWSLAEALRTDGQHWRALSPLDPLTAELRALCRDEMALIEQRTALVNQLLAALKEYYPAALQAFEDWTAPYTWAFVLAFPTPEALAQAGQRKWVKFLHTHKLWRPQTAPERLKTFAEAGAFKGSPAITAAKSLLVRSLARLLQTLEQQLAAYRARIQDLFVQHPDHNLFGSLPGAGAKLAPRLLAELAGSNWAEVNQVQARAGTAPVNYQSGKIQRARIRRACTLPLRATLHLWADLSRRYSSWAAAYYQAHRDKGQSHACALRCLAHRWLEIVAAMCRTHTPYDVEHHLREIQKHGSYVLRLLPAQATTQTL

SEQ ID NO: 507273 - protein, 335 aa, unidentified
MSSFVCGLDVHKDSVYATVMNYGGEIVDKRKLTNDEVVNYLSQYPIDKVAMESSTSIVPIYRALRGRGYEILVSHPKKTRLIAESRIKTDRVDSWAVTELARLDALPLSYMPPDDIAALREKVRRRAFLVRMRSKLKVKIKAQLVVNGHTPPSEYGLFTSKGLEWLRSLQLDAVDSYLPVISTLDIQVGKLSRELRGMASDDEDVGLLMTIPGIGYYSALLVKSEIGNIDRFPDGEKLCSYAGLVPSVSISGKYRRHGSITKEGSRWLRWIMVESIHTHLKYDTSITRAYHAIAERKGAQIAKVAAARRLLMCCYSVLRNREPYHDPAGHYQVSS

SEQ ID NO: 507274 - protein, 358 aa, unidentified
MKIVGCDLHARQQSIAILDTETGEFTEKIIRHEGNAVREFYAALEGPVVVGIEATGSMQWFLQLLEELGIQYRVGHPARIRAAETRKQKHDRRDARLILDLLVMKDRFPEIWMPSMEQRDLRTLLRDRHQWVKMRARLQHTMQSIALNHGLRQGSGLWSVAGQSALQALPLAQYTSQRRNALLSLYAQLQKRIQELDKVVEAEAESRPQARRLLTHPGVGPVTALATEVFLGDARRFRTGKQVASYIGMIPGEHSSGKRQRLGKLSKEGNALLRYLWCEATMHAVGKDPELKRFYRRKLIQKGMGKARIAAARKLGIRLWIMLRDQIDYEQFCRCGKLRQEGEAHVGMPGFNSGPALQ

SEQ ID NO: 507275 - protein, 353 aa, unidentified
MYIGVDTHKQTHVLVAIDEAGRAGGSRTIANTPGGWAAALQWAREQQQHIRWGVENSGSLGKGFAQFLLAQGETEVREVVPHRTAQYRRRGRTQDKTDMADALAMARLLRAEGEVLPRVQADDRSTELRLLSDHRDNLVVDRTRLINQLHAQMLQLDPGYAERSGPLTRAAGVRYCRDFCLPEADAIVQTRLLVVRQLAARLLALDGDIAAATAALEERVRALETPLLAVRGVGAVVAARLLGELGCSPRVHSAAALAALAGIAPLTVASGGHYAHRVNPGGNRKLNRAIHIVALRQRRCEPLAQAYYEKKRAEGKTGRAAMRCLKRRLVDVIFRQLQRAPQELPPSMTALAA

SEQ ID NO: 507276 - protein, 374 aa, unidentified
MGQHSRAFVGIDTSKLRNAVAVAEEGRGGDVRYLGEIDTAEAATRKLVVKLAAKYRQLTFCYEAGPTGYGLHRLIGKLGHDCIVAAPSLIPKKPGDRVKTNRRDAVGLAKLLRSGELTAVWVPDERHEAMRDLSRAREAARKDLKGKRQQVSSFMLRLGRHYPGKKTWGPAHMKWLMLQKLEHREQRIVLEELLGAVRQESERVERLEQAIRDAVPEWSLAEVVTALQAMRGIDLVAAVTVLAEIGDLSRFQTPRELMAYLGLVPSESSTGDTVNRGGITKAGNGRARRILVEAAWSYRYPPRVSREKQMKVAAAPRAVREIAWKAQMRLCGRFRSLTRRGKRPTVVATAIARELAAFIWAINREVVRSHAMAN

SEQ ID NO: 507277 - protein, 326 aa, unidentified
MQGKEASEQETSCKSNAGIDVSKSWLDAHVLPAGETLRAANTHEGIRKLKRWLKRFDLALVVVEATGKWHREVRRSLHASGLPVGVADPFRVRMFAKACGILAKTDRLDARVLANFAAVIAPPVRAPAAEVMEELAELVTARASAVAQETALKNQLSAASGRFLRRQLGRRIERTGKDIAALEHEILRCIKAHEGLARRYEILTSIIGFGPVVATTLIACLAELGTCSRRQIGMLAGLAPVADESAERQGARVLWGGRPNVRRVLYLAAIAAARFNAPMKAFFNHLIAAGKPAKVAIIAVARKLVVLANTLISEDRLWQPNSPKHA

SEQ ID NO: 507278 - protein, 360 aa, unidentified
MDKYIGFDIDSKKTIACVVQKGKKDEYATISADIESMRKYLRQQRAGVYRLHLTFEISGQAGFIYDSLIDSVDTITVGNPSKMTWIYRTAKKTDRIDARKQAVLLSIGEIPAVHMPNRQVRQWRNTILHRRKIVSRITAIKNRIRAVLKSVGFRKAFHRGSWWKNANRFWMRSLSEEGQISSEDLWRMNLCNLLDELELLEGQLHRVTEYLDSYLDKQAGGKLLMSIPGVGPRTAEAVLAYTDDVSRFGRGKQYCAYFGMTPRLDESGSLKRLGHISKQGPSVVRWLLCESSWKVIRKSKAMRAFYERVMCGQAGRKKIAIVAVGRKLLSIMRAMQMTGELFNEELVCRECGFIEMKRTA

SEQ ID NO: 507279 - protein, 373 aa, unidentified
MPRYSTAFGMDVHLRSTTVCALDAETGEAVARRFRGNPWGEVAEWMSGFPGPSLAAYESGYLGFAPQRELSALGVDCVVAAVSKVPRSAADLSSKNDRNDAARMAKAILSHDVTPVWVPSPEIEGLRDLAAAHDAATARLAAAKQRLLAFLARRGYVYGGTTPAGNPRKYWTYGFLRWLDGIRPADDGGIRALAALRNEVEAADETREAVLAEYRAAVAAGPLSAEVEALQSIKGCGFVLAAAFASEVGDFSRFRSGRQVTAYFGLAPKQRSSADSVRLGGISGAGNALVRRLAVEGSWRYAQAGHQPKLMPKGSGVPLEVRMHGRKGSERLLRRREEMLARGMPQAKANAATAAELVRWLWALGMMCREAGE

SEQ ID NO: 507280 - protein, 340 aa, unidentified
MNHVAIDLGSKESQVCIRQPDGTIVVEKKHPTRKLGELMQTWPTSRVVLETSSESFRVADLALAASHEVRVVPATLAKQLGVGERGVKTDLRDARKLSEVSCRIDLPSVHIPSADARELRSMLRSREMLVSTRTKLVNHVKGWMRTQLWKLRSGAPATLPDRLRAHAVTLQQAVPVHIEETLVVLEALAPQINASNNRVRKLAREHSVARLLMTIPGVGPVTALTFIAAVDRVNRFERTHHLQSYLGLTPGENSSSERERRTGITKAGSTAVRRTLVQAAWTAIRTAPNAPMVKWMAQIAERRGKFIAVVALARKMAGIMFALWRDNTTYSAFKAAASLQ

SEQ ID NO: 507281 - protein, 351 aa, unidentified
MNTQITATPKLYIGIDIHKRSWKVHCATDLFAGKSFSMSPDPEQLRTYVSKHFPDYEVTTAYETGCCGYYAHRCFENYGWRSLVVHPADIYRKGKERHTKTDKIDAQLIARELKDGRLASILIPDKKREELRSLFRRRNDLVKDFRRVKSYTKMQLLYFGIKEPEEFDNDHWSHKYRNWLDDMIFEYPTAKATLESRMRFFRFVDQELRDVSTQLRRYCKVHYKKDYLLLRSIPGIGGIVACGILCELGDLRRFNTIKHLAGYVGLAPSVHQSGDHQRTMGMTPRANRLVRSYFVEASWQAIRADPVMQAYYRKHQGKNVKRIIIKVARKLLSRTLAVIKTEVPYTIGVIE

SEQ ID NO: 507282 - protein, 354 aa, unidentified
MPRKTTSLEAVATIGIDIGKNTFHLIGLDKVGAIVLRQKLSRSQVDSRLANMPPCLIGMEACVGAHHLSRQLKALGHDARLMPAQYVRPYSKGQKNDFRDAEAIAEAVLRPTMKFVAIKTVEQLDLQGLHRVRERLVCQRTSVINQIRAFLLERGIAVRQGLRALRTAMPNVLAMTDKLSPRMIHMIEDLCTDWRYLDARIATVSNEIETLSEQDDGAKRLMTVPGIGPIISTATVAAIGSGDVFSKGRDFGAWLGLVPRQMSTGGRTVLGPISKRGNRYLRMLFVQAARAVLLRPQSWEKHGLKSWIEAAARRLNRFKLAIALANKIARIAWGVLHGGRNFEVRSMRTAPQAG

SEQ ID NO: 507283 - protein, 335 aa, unidentified
MKSWSVTVLSENSVLKRFVQDPDPEALHKFLTRNYPEADYYSVYEAGFCGFWIHERLTALGIENIVINPADVPTTAGERIQKTDAVDSAKLARSLRAKELKGIYTPDSTSLEIRSLIRLRSTITKDVTRQKNRIKSHLRFLGYEIPEDMCSRYWPKRFIIWLRELDMKTQSGKQSLDFMLDLLENLRKEKLLMTRALRALSRTEQYEKSLELVMSVPGVGQQVGMALLAEIVDIKRFKDAEHLAKFVGLVPMCHSSGENEGIGDITIRKHAYLRTLIVEAGWQAIRQDPAMTLAFEGYCKRMKPSKAIIKIARKLVNRIYFVMKWQTPYVRSVVS

SEQ ID NO: 507284 - protein, 417 aa, unidentified
MNTDLSQYTAIIGIDWADAKHDICVQTADSDAREFSRISHKVDKIDEWAQRMYQRHGGPIAVAIELSRGPIVSALQKYNFFVIYPINPTTLAKYREAFNPSGAKDDPTDAELALDILLKHPDHFAPLNPQSVEMRTLMALVEQRRTIMNDRVRITNRLRNALKQYYPQALDWFDRIDTPLFCDFMKQWPTLAQVKRARRATLQKFFHGHNMYRKPLIEKRFEAIQSAQPLTRDEAVITPYRLQTLTLVDQLVVTLNALQTYDREIGTLASQHPDIELFSCLPGAGPQLAPRLLVAFGEQRDRFASAAEVQKYSGIAPVTERSGNKHWVHWRWQCPTFLRQTFAEWAAQTINKSYWAGLFYYQQRAKGCTHQAAVRALAFKWIRILYRCWKTRTPYDETRYLKALKDRGSPLLQTQTA

SEQ ID NO: 507285 - protein, 351 aa, unidentified
MIILGVDYHPSDQYIAFLDTETGECGERRLNHGDEEAEKFYRELAARGVNIRVGMEATGYSRWFERLLAELGIELWIGDAAKIKTKRVRKQKTDRNDAHLLLQLLLDNKFPKIWVPSPENRDLRQLLWHRHRLVQMRTRIMNQLQALAMNEGQRRKKKLCSEAGRAQLEKLPLAAWASRRRKDLLERLDRMNPSIEELTAAMEREARNWPEALRLMTHPGVGPLTALAFVLIIGTVERFQCGKQIGSYVGLIPCEDSRAGHQRLGHITKQGSSLLRFLLGEAAQAAARCDADWRRRYLHLALRRQRNIAKVAMARRLGVRLYWMWRKGWEYADWVKFGSHAGQLGTGDGVQ

SEQ ID NO: 507286 - protein, 320 aa, unidentified
MSKKKSKAFIGIDVSKTLLEVAAHESDYQFRCANKAKAFGELIGELIALRPALIVLEATGGLEIPVVAALHAAGLPVVVVNPRQVRDFAKALGQLAKTDRLDARVLAHFAAAIKPPLRPIKSADELELDALVGRRGQLVEMLTAEKNRSGSAATDTVREEIKEHIDWLEERIAELNKQLKAQLKHSTLWQGKDDILQSGPGIGPVVSFSLIADLPELGTLNRQKISKLVGVAPLNNDSGQQRGTRHIYGGRTRVRSMLYMAALTAARFNPVIKEFYERLLANKKLFKVAITACMRKLLAIINVMVRDSTLWKIKDAKVLA

SEQ ID NO: 507287 - protein, 372 aa, unidentified
MKEGSVIFIGLDTSKSKISVAVADGARNGEVRFFGDISSEPASVASLVNKLSKRGAKLHFCYEAGPTGYGLYRQIVELGHDCVVVAPSLVPKRAGDRVKTNRRDAVSLARLHRAGELTAVWVPDEAHEAIRDLVRAREAASDALKQARQQLQSFLLRHGRIYTGRKPWTRAHTRWLTYQAFDHPAHHILLAEYCQAIEDAGVRLDRLTKLVVETASSWSMAPVVAAYQAMRGVAFMTAVTFVVEIGDVRRFDNPRQLMAYLGLVPSESSTGERVKRGGITKAGNTRARRVLIEGAWTYRFPARVSPKIQARLDDLPRSVREIAWKAQVRLCARYRKLLAAGKPKVVAVTAIAREMAAFLWAIGQEIAPTAKA

SEQ ID NO: 507288 - protein, 461 aa, unidentified
MRRKAKRKAKAATALPSGLESINLNAAAIDIGSTEHYVAVPPGRSAEAVRTFGSYTAALHEMALWLKECAITTIALESTGSYWIAPYQILEANGFEVVLVNSRHVKNVPGRKTDVLDCQWLQKLHTHGLLSGSFRPEDRVCVLRSYLRHRENLVRAAGTHIQHMQKALTEMNLSLHHVLSDLTGLSALAIIRAILAGERDPWKLASMKDNRVKKSKEQIARCLEGDYRKEHLFALDQALELYEFYQAKIAQCDREIEGQLHKFQTRIDVAQHPLPEKPKKKTLKAQGDFELRRHLYAICGADLTRIDGMEALSVQALLSEIGLDMTRWKSEKHFTSWLNLCPPSRISGGKALSRQPRKGHNRAADILRLCAQSALKSKSALGAFGRRLKARLDAQKAIKAVAHKLARIVYRMLKYGQEYRDAGERYYEEKYQHHLIRRLHKQAAAFGFQLTPQQSTMTTVS

SEQ ID NO: 507289 - protein, 502 aa, unidentified
MIKSVGIDLSNLGRHQVRVLDEEARVCDSFTFQTTLEGLEAFEQHVFVDGANPTIVFEPTGLAWLPLASYLRARHPESRLVRAKLQKVAALRRYLRGTAKSDRVDALTLAKMAFIDSEHLDEVYLPPAQMHALQRLTRQRDRLMESVATRKKRIGSIIDGHLPGLRDAFPDEWSPGARAFYRHKLNPFKTAREDAKAIHRFLLEADPRDKTLDQQSREALAKCRELVVIYERTLPVGTMNESFFDDLQEEIGCELRLLETEEAEARKLSVRISELYLQLDPEDHLGTIPGVGERTAPVFLGTVGEPKRFRGQSAFGNWTGVVPSAKQSSDTEGKGLRMTKAGPKVMKRSLYQAADIARRGDPQLAAVYYRQMVVHGKSHRKALGAVMSHLAARVFVVIKEGRPYELRDPDGKPISKEDALALIRSKYTVSEEVRRQRRRRNPQKKAPSGKRRERSGPSRTIEAAEAPQPESPNLPHSPVYVAEEHPSKLSADLTDAQGKPAG

SEQ ID NO: 507290 - protein, 429 aa, unidentified
MASYNHGVGSPVVFVAIDIAKARHEVLIEAPDGKRKRLAVANSKTDFDDLVAMLRRYQVPCHIAFEATGDYHRPLASVLGQQGFQLHLVSSIATNRTREALYNSWDKNDPKDAQVILHLLKTGGTQIYHDPLVSGYNDLQELANTYQQLSLRTVRLYHSILTHFLPLYFPEAEAYMGTSRAEWFIHLLLLTPCPAAVLHYSKASFVRAASRVRGRKVDKVRWLSDFYEMAKHSVGLPVPTSSEAIRMFRLVLGEYAALCERRYQLEEHVETKLGAHPDFRRLQTIPGVGPVLAMLILAEAGDLRRFSHYRKFLKYCGLDLCTDQSGKFRGTTRLSKRGNARLRYAFWMAGTGAVRARQNSFREKFDNYVRSDPKNADLKRKAYTAVAAKVARVAFGLLKTGTDYRRFPEATIPSGRIPSHRAVEALSTS

SEQ ID NO: 507291 - protein, 323 aa, unidentified
MLENSQELLMVGVDVAKDKLDIAFADQQIMTIANTEAGFKKLCKHMANRENLCFVMEATGGYEKALVSFLLTNEIKVAVVNAKRVRDFANAMGAYAKNDRLDADMIRQYAKTAYANNRLQLREPRSVVEQRIEALLKRRQQLVGQHTIELQHLESACDKESVRSIKRTLKYLAAEINSIEAKINSDIDNDEGLKQKMPRLLAVKGIGQISAYALIALLPELGKVSNKEIAALVGVAPYSKDSGKKTGKRSIFGGRELIRSILYMAILSAVRFNKPLKEFYQRLLAKGKLKKVAQTACMRKLLVTLNSMVKNQSEWNPDFADLA

SEQ ID NO: 507292 - protein, 359 aa, unidentified
MTSISPPGLPSKIIIGVDTHKHVHVAVALDEDGQRIGDLRVPVDSVGYQELDRWAQTHGRVLAYGIEGTGSYGANLTSYLRRQGRKVVEVNRGDRRARRANGKSDTLDAELAARSVIAGTSTAVPKTADGTVEMIRKIKVARDIACKNRTSAVITLKTVIVNTPQELKEQLDSLGDKALIQKCSGFRPGIVDDPISAAKHTLRALARRWEFLNAEVKDHDAVIAKLTTSLSPTLCDGFGIGPDTAAEILIVFGDNPDRVHSEAAFAKLCGVAPIPASSGMTTRHRLAWNGHRQANAAIYRTAIVRMQHHQPTKDYVAKRTAEGLSKRDIIRCLKRFIAREIYGRVMADFRARTTLPAVA

SEQ ID NO: 507293 - protein, 347 aa, unidentified
MQILSLDLGKNKTVGCDYERESGKHRFKTAFSTRAGLAQLVKEVKPDRVVIEVCSIAGWVCDLLREMGIEVQVANTSDDAWRWRKVKKKNDRCDALKAAQLSAVNQIREVHIPSVDVRQWRALIAFRQQLVQRRTRVKNHVRDLLLREGQILPRGGKCWTQLGVAELEAMAQPLSQVGMNELWRGELAIELRQLRAVQEEIEVAEEKLDAIGAADPRVRLLRTIPGVGPRLAEAIVALLDRPERFRKSSEVSAYIGMVPKELDSGETQRRGKITRHGSRLVRSLLVEVAWAGLRHNPWVRETYQRISGGKKSRKKIAIVAVGRRLLVRCWAMLRDGTSWQWPAAKVT

SEQ ID NO: 507294 - protein, 357 aa, unidentified
MTKIKALSFEGESIYCGVDIHKKNWKVNIRNSHMELEHFSQNADPDCLASHVQKRYPGATIKVAYEAGFSGFWPCRKLQAAGIDCIVINAADVPTSDKQKRQKNDTVDARKIAKQISINNLDAVYVPTLQEQNDRSLVRVREQLVADQTRCKNRIRHLLHFNGLKVANGIDKEKYWTLAFIKALEELDCSDSSLRMTLSLLLAEVKDLRKKVLEATTAVRKLAATDVYKEDIELLRSICGIGPTNAMVIRTELGNIKRFKCFDHLCSYVGFVPSTEDSGDTKATRGITHRCNNRLRTALIESSWMLISKDPAMLMKYSAYCKRMDKNKAIIRIGKHLLSRIKYVLTKREKYEQCVVQ

SEQ ID NO: 507295 - protein, 421 aa, unidentified
MSRSQRIVGFDCGEDTHSAVLLDTAGRFGKKFEVTNERGQIQELLAEVMLVIGPEAELVVAVESKRSHGRIVSDVAVELGCDLRQVNTVALNHYRDLEGQPRKDDDWDAYLAARMVFLEMGGARKAIVTTEEERTLSRLTRTHSRLVEDRKRNVARLRAVLLELVPEMLHTSWKGPKPGSKAMQYMLERWPGFEGLEKAQLRSIEKILSQCRYGSRKADVAKLIRKAARGISVAEEERRAITLELDLLVQQIRFCNDSVDRLYAKIAHRVERHPVGEKLLEMHGFGPIITGVLVSELLPVARTSTEPKCATYAGVTPLSRKSGKSLDSDRLTQGVNQRVLHALYTSSVVAIKNSAIDRAYYQKKLRDYAGHPKPHVAAFIALSRQRHKLVYKLITTDARYDKEILIASHLARLEQDRIAAA

SEQ ID NO: 507296 - protein, 364 aa, unidentified
MDKLTHIGLDVHKDSIAVAILRPDAIACDELTIDNTTEAIRRLVSRQRESQALRVCYEAGPTGYDTHRLLTSMGVACDVVAPALVPKRAGVRVKTDRIDARNLARLHRAGELTPVRIPTLAEEAVRDLVRTREDLKADRRLAQQRIRSFLLRHSRHHPTGVGSWTRPFEQWLSVQDFGEPAANAAFRHLLSAYSVRSSQLAMIDAEITEAAGTEPLAEAVGRLGCLRGIATLSAVTIAAEVCDFRRFHSAESFMAFTGLVPSEHSSGASTRHGSITKTGNCHVRRVLVEASWAYRYRPAVGRLLAARLEGQPPEVAAYTWAAQCRLHTVFRKLAAKKGSHKAVVAVARELSGFVWGLMVDRIAV

SEQ ID NO: 507297 - protein, 343 aa, unidentified
MAKMPVAFQQQSVGIDVSKSELHCRHGLMSMDRVVELTTSKVFRNNRAGLRQLANWLSQLSRKYADISLSIVLEATGVYHQYLIYFLHKRGYEVCVSFPKSAKHYARSLTKTKNDQIDASILARMGLERNLPVWEKPNDEMVILKSLIRELSQLKEEKVRLKNRREAQEHTYLAHKSIAKRTKKRIKFIDKQIEQVKELILEQAEASLTIREAVKRIEKVKGLGKLTILTVIAETNGFALFTSIKQLCSYTGMDIVENQSGKKQGVTRISKVGNAQIRSALYMPAVSASKYNPELRAFYLRLLEKGKAKKQAIIAVARKLLTLIYALWKSGKVYQVNFSQKTV

SEQ ID NO: 507298 - protein, 369 aa, unidentified
MIYIGIDVAKDKHDCFITNSDSEVLVKAFTIANNLDGFNDLYQKIESVMDDVTKVKVGLEATGHYSYNLLGYLIDKGLPTYVINPLHTNLYRKSLSLRQTKTDKVDARTIASMLMSDVNLKSYSDTFYHNEELKSLTRYRFDKVKERAKLKTSVSRLVCILFPELEKLVPTLHIASVYALLSEFPSAKHVATAHLTRLTNLLSESSKGRYGKDTAITFRDAARASIGSNMPAKSLELKHTIKLIQELDSEIDEIENEIKIIMDEINSPILSIPGINYRMGAMIIAEIGDFNRFDSPDKILAYAGFSPSTYQSGQLDGAYAHMEKRGSRYLRYALYNATKYVCHWDPTFAAYLAKNERKVSITMLPYHTL

SEQ ID NO: 507299 - protein, 482 aa, unidentified
MKKRNIYQNQSQELLSLFERAANNAKVMCVPIDYAKKDHVVMFCNGYGEILRKPFSVENSPQGVDYLTDQVMRSCRQRAISKKHVFFGGEDVGSFADNFAATLRSQGWLVAHVNAHEAKTQRENLQASTDRLDLMGIAKTLLNRRANCSPAQAGIYLNMRSLVRHRRSLVGITTQVRNRIHTVVDRLFPGFLNETKSGISPFSNSSLWLMQERFSAGQIRRRRRPTLIEALRRRGTKTPEDTADRLQQYASQVLKPAPEHVHILQLSLTEHVKHFCCLQQSIRQLEKEIAVNLAQTQGAFLTSVRGIGIVLAAGVSAEIGNPYQQKPLNNLVSYAGIIPRVKQTGGPGGKTKTGTVAKRCNRILKDYLVQSASHLGLHGPDDLMSDYKRRDASGQHADFGMGRRYLRIAMGLMRTSQIYLPAGLRKAQTQMQQRADYYLMTWPYLRDKWQKFEALQTAFKADNPLGQWRDIVQQLYAIKLAL

SEQ ID NO: 507300 - protein, 366 aa, unidentified
MKKISTVEIERIQIFKENQLTIGLDLGDRTSHYCILNEAGEVIFEHELPTTPKGIEEVFSRIPRSRIALETGTHSPWLSRQLTELGHDVIVAHARNVRLISESSRKDDRLDARTLARLARIDPGLLGPVRHRSAKAQIHLTVIRARATLVSSRTALVNAARGLTKSYGQRLRKCGTEQMNRESAKELSQELRDALDPLLAEIESLNERIAEYDRRIEQIAKEVYPQVAVLKQVKGVGPLIALTFVLTLDDPHRFRRSRDVGCFLGLRPGRRNSGMSEPQLHISKEGDRYLRTLLVQGAHYILGPFGQDSDLRRWGLKLAERGGKNAKKRAVVAVARKLAVLLHKLWVSGEVYEPLRNNHKVVAAVA

SEQ ID NO: 507301 - protein, 392 aa, unidentified
MYIVGIDIGKNHHEASIVLPEGKQIGRSLRFATTHKGADSLMSFIFKNIGNSPCVFGMEATGHYWYPIYSFLKAKGYTIYVINPIQSDSLRKMYIRQTKNDSIDSFLIAEVIRFGQFGTTSMADENILAMRQLCRYRDSVISSRTEIKLRIGTIMEQIFPEYEKQFSSLWVSTSIGILEKYLTPENIENAPIDELFEIIKDKSHNRLTRAKAISIKEAAADTFGIKIAQDAFSFQLKQLIDRMNFLDKQIEALDCQILEYYEKFDCYLHTIPGIGMIAAATILAEIGDINRFKSSSALVAFAGIDPTVRQSGEFSSTHNHMSKRGSPYLRHAIFLAATTCSFHNSPLNAYYKKKSDQGKHHLTATGAVARKLTSVIYAVLRDSKPYEPKSFC

SEQ ID NO: 507302 - protein, 392 aa, unidentified
MRYVGIDVGSDSHVVAAVTADGTVAVKPTGIAEDAAGYAKLFALLGQAPVALVVMEATGHYWRNLFAALAAHGYAVALLNPLRTRRFAGEDLERTKTDSIDALGIARFGAQKRPAATRLPDAAADELRELVRHRDRLVADFGDRVRQLHRLVDLGFPEFTRHVKSLDSMLACTLLAEYPNAQAFAGAMPRRLAKLVYDGVHKVGPELAAALIAAAKVSVGRHHGPAYRIQVRHTCQDLDLLRRRIRELDDDIARQLDDHEVGALLTSIDGIGTNTAARLIAELGDFSRFRNAAALAAYVGVVPGLKQSGKRRGQKAGLCPIGHARLRAALWMPLLVAVRRNPWLEAFYDRLIGRGKLPKVALVAALRKLLGAVFAVVRDRKPFVPRLGPAAA

SEQ ID NO: 507303 - protein, 359 aa, unidentified
MSTQNNKLNFEGQNIYVGMDVHKNSWKITIMTDVITHKTFVQSPQPEILSQYLHKHFPKGIYHSAYEAGFCGYWIHHKLTECGIKSIVVNPADVPTTNKEKVQRDDPRDSRKIARSLCNGELTPIYIPKIKTLEDRALLRTRSMLVKDLTRNKNRIKAFLFFHGIEMPEQFEKSQTHWSKRFMNWLETIEISEESGQESLNVLIAGVKNIRTVILNTNRSMRELSKTEAYSQNVALLQSIPGIGLLTAMIILVEIEDINRFSNIDKLAAFIGLIPSSNSSGEKEKIGDITSRGHNILRKTLIESAWIAARIDPALMKCYIEYCKRMAPNNAIIRIAHKLLSRIRFVLKNKKPYELSKIK

SEQ ID NO: 507304 - protein, 351 aa, unidentified
MELNAIGIDLGKTLFHLVGLDASGNVVVRKKCSRAQLLKYTANLRVQRIGMEACSGSHFLGRALREQGHDARLMPAQYVKPYVKTNKSDYIDAEAIAEAVQRPTMRFVPIKTEEQLDLQAVHRLRERWVMRRTAVVNQIRGLLLERGVTLPKGRSHVDEALPEILQDADLKLSGSFRLLLAELQLELEQLAEHIQQMDSAIQHTVKENEACQRLTTIPGVGPVTATALIAAIGNGSGFRKGRDLAAWVGMVPREYSTGGKQKLLGISKRGNNYLRTLFVQGARAVMRYRAKQAPGLEPLVDSTSGSHASECRDCCLGEQADPDRLGGALQERSVSSAGVGRLRLARRTKGS

SEQ ID NO: 507305 - protein, 296 aa, unidentified
MGNEAKRFVGIDLSKRTYEAVAITVNPQTITRWNGKLDLRGRKCLLDKLHSGDTIALEAGTASFKIAKEIQSKQGVMVVVLNAANVAIIHASLKKTDKEDALKLARLIEKYSPEELPVVPIPTDQEMERRALVAHETRFRQDRVRLINRLHAVFLRAGFPDHTKRQLGITASREKLIVSELDGFNLVEAMNLDHMIVEYEKILEDLDKQINDTVVACGEDAEILLSIPGFGIKTTMAVLAYAGDMRRFENPSQLVNYIGFSPRLYASGDIERSGSITKRGNPQVRWLLIQSAWCMV

SEQ ID NO: 507306 - protein, 341 aa, unidentified
MDDYIGLDVSMKETAVSIRRDGQRVWRGKCPSDPRLIADLIRKRAPSVKRVVFETGPLSVWFYHALCAEGLPAICIDARHAKAALDMAANKTDANDADGLAHLAEVGFYREVRVKGFDSMLTRTLVAARTRLVRITTELSNQIRGLMKTFGLIVPAGKGSTFEKNVRSLLVGQDGLATIVLPMLEAWRGLRIRAMELGRQLVAGARQNQPCRILMSIPGVGAITATSFATAIEDPANFKNSRSVGAWLGLTTRRYQSGEVDYDGHISRRGDRQVRGLLFEAATVILTRSSAESSLRRWGLKLRERVGFKRAAVAVARKLAVLMHAMLKTGTFFDRSIGAAA

SEQ ID NO: 507307 - protein, 491 aa, unidentified
MTGPSLGIDLSINGAHDCTILDATGQVTQRFTFDSFEAGMRTLDHHVRAIDTSHGAPVVVMEPTGLAWFLPCLYLRAQHPKVKIVRIKTSKVAALRRYLKQDAKSDRLDSFTLAKMPFVDPEKLYAVDLPPAVLQGLDRMTRQRARLVEDLTRRKNRLQALLRGYLPGLMDVVGKPWEPPFRAMLTVSLNPITLAGQDAAALRKALQATLSRTPRFEELIPRLRTACAQLAQLYRPIIEAGRLTQAFFDDVGNEVARELRLMDVEQQELKDLEAAIARRYQEVAPNDHLGTMKGLGNVTAPTILAAVGTPQRFHSQAAFRGWTGVVAHASQSADSDAKGLPMTKAGPKRVKLALYQAAEIARQWDPQLAKIYFDQMVHKGKPHYKAVGAVMSHLASRIHAVLTEQRDYVLQDVDGREVSAAEARTIVKTQYQVPAEIRAARRTSNRRKRNVSTDAHRGSATRSSRRPSPSSRTHSIRSQEADQIHSAATSH

SEQ ID NO: 507308 - protein, 351 aa, unidentified
MPRTSAVHAVTTIGIDMGKNTLHMIGLDARGGIVLREKVSRGRITLRLANLPPCLIGIEAGMATHYVARELAALGHDVKQVPPTYAKPFRQGHKNDFRDAHAVAEAVQRPTTRFVPAKTNEQLDLQALHRVRSRLVSERTAVINQIRGFLLERGIIVRQGLRFLRQALPDILAKRTDVLSPRMVRIVADLASDWRQLDERIEPVTDEIETLAKSDDSCRRVMTVPGIGPIISSAMVAAIGSGTAFARGRDFSAWIGLVPKQMSTGDRTILGRITKRGNGYLRTLFMQAARVILLRPASWPKHGFGVWLARAAQRLHPNVLAAALANKLARIAWTVLAQERSYEARVTKAAA

SEQ ID NO: 507309 - protein, 387 aa, unidentified
MQKPHDNSKASPAAFMQDNTLIAVIELSLSNWLVAGLIPGVSREPLKKLEPNPEDLLKLLHRWRDEAIKAGRPITRIAVAYETGRDSFWLARWLRKHGIDAHVIHATSVAVSREHRRAKTDRLDTAMLKRGFLGWLRGERGHCTMAIVPTMEEEDARRPHREREGLVHEQTRLVNRMKSALIQFGVRNFNPKLRKASVKLETVRTPEGKSLPPNTIAALRRDMERLRIIKEQIKAIERARLQQLEQKPEALANRMVDLLVRIYGLGLETADLLVHELLSRTLRDRKAVARYAGLTGSPDESGSKRREKGLSRSGNARVRKIMIQLAWRMVKFQPDSALVQWFNQRTENAKRSRKPMIVALARKLIIALWRYANDGVIPEGFRLHSAA

SEQ ID NO: 507310 - protein, 358 aa, unidentified
MPMLANVVDAVVGVDTHRDTHHVEIALPTGSPIAACSISNDTRGYAQLLAWIADHTPGPRLVVSIEGTRSYGLGVARALTAAGLAVIECEQPTRNNRRGRGKSDPIDAHLAVLTALRLDVERLPTPRADGDREALRILLSARHDLTVATTAQTNRLRALLRDGDDGDRQLARGALTDTVLAGLARRRPPRDATRAQAVRQAEIRRLALAVRDTGRALKTNRAQLQAIVDELAPGLTDRRGIGAVSAAQVIISFSHPGRCRSEAAFAALAGASPLPASSGRTMRHRLNRGGDRALNRALHTIAMTRMNTCPTTQAYVARRTAQGKTPREIRRCLKRYIARELYRALTSTMTTTGASTGA

SEQ ID NO: 507311 - protein, 342 aa, unidentified
MSEKLNSEIAVIGIDIGKNSFHLVGQDRRGRIVLRQKWSRGQVEARLANLPPCLIGMEACVGAHHLSRKLKAFGHDARLMPAKYVRPYSKGEKNDYRDADAIAEAVQRPTMKFVATKSADQLDLQALHRVRERLVGQRTGIINQIRAFLLERGIAVRILAKRTDVLSPRMLRVIEDLAGDWRRLDERIDALSDEIMTLARQDKGCERLMTVPGIGPIISSAMVAAIGSGDAFSKGRDFGAWLGLVPKQMSTGDRTILGSISKRGNRYLRTLFVQAAWVVLVKIKPEGWERYGLKSWIEAAQQRLHRNVLAIALANKLARIAWAVLHKGRAFECVKTNASQPV

SEQ ID NO: 507312 - protein, 458 aa, unidentified
MYRELQPLREALSHQLKARLSPAVAGVDPDKLLETYLDRLTMYIGVDVADQSFTALAMDAGREILGSLEDCANDPDGFASFVSWARALRDQHHLRIMAIAGETTGIYYWALWDFLGEQADVARVLYNPRTTEHMGEVLSKKVRDELVDALLLSEQLRLGSTPEVRLQEDADLLSARYYSRAARHMAQQINRNKNQLRALLRAYCPPLCQVFPGYKLHHPAVHALLQKALFPDEFVHLGVEAVATTLLEHCDTAFGLTEAQQLVEACRQALARPVGREVIRQLVHAHIQDIATFQQRKAFYLKSGYALIKDRQEAKLLRTVKGAGVSNTLALVSEIGDVQRFASGEQLASFLGLTTSKHISGTTLFQAKRITKQGSRNGRYAAVNVAQQLSHRVPRYQAMYQRIKSRKPPRKGHFIALVAIARDFVSTVLYDMWRNQRPFFLEVSDYRDYRRQHPRTDD

SEQ ID NO: 507313 - protein, 353 aa, unidentified
MISRSCPHVTGIIVGVDTHKDEHVAVVVDKLGVRIGQRNLPTTNMGYVGLERWASGLGEIDAFGVEGTGSYGAGLARFLRSQGHKVIEVNRPDRSVRHRLGKSDPTDAEMAARSVLAGVACDRPKSGIDKVEMIRMLKSTKDSAMKGRTQAINQMKAIIVTAPVELRAVLRDLTTNRLVARCAKWRCGQLETPMAAARYALRSLSRRHMQLTQEIEALATQLAQLTAAFAPALMESFGVGPDTAAALLITAGSNPERLKSEAAFAALCGVSPVPASSGKTNRHRLNRGGDRQANAALYRVVIVRLRYHDRTKAYFQRRMKEGKTKTEVIRCLKRYVAREVFNILHDIGKLPTA

SEQ ID NO: 507314 - protein, 416 aa, unidentified
MNAVGIDVSSRKSTVAVLRPLGEVVCLPFDVTHDIAGLASLVEKLKALDGETRVVMEHTGRYYEAVAKALHEAGLFVCAVNPLLIKEYGANSLRRVKTDKADAVKIARYALDNWADLRDFTPMDAIRYDLKTLNRQFQLASKQRTASANNLIALLEQSFPGIRKCFDSPVRSDGTQKWVDFAHSFWHVDCVRKQPFAAFCERYRKRCKRHAYLFKQSNAEEVYALAKRAVVLTPKSKVVKVLVQEAANQLISISRSVEVYRAEMDRLAAMLPEYPVVMAMYGVGKSYGPQLMAEIGDVRRFERKQALVAFAGIDPMPNQSGDKNVRSNKSSKRGSPYLRKTLFNVIRTYLQCAPQDEPVFQFLNRKRAEGKPFYVYMLAAANKFLRRYYAKLRDYFASLDTLQPVAPIPTILKATL

SEQ ID NO: 507315 - protein, 409 aa, unidentified
MQTLVERGCGLDVHQATVVACLLIVLKDGKVRKQMRTFGTTTRELLSLREWLLSEGCTHVAMESTGVYWKPVYAILEGALEIVVANAQHVKKVPGRKTDVKDADWIADLLCHGLLRSSFVPPQPIRELRDLMRYRRKLVESQTAERNRLLKLLETANIKLASVASDVFGVSGRLMLQALAEGKATPQEIAQLAKGLLRKKIPELEPALEGRLEEHHRFLLELQLRRLQAVEDLVVLERRIQEKLKPYAAQLALLQEIPGVDWTLAAVIIAELGVDMKVFQSVSQAASWAGVCPGNNESAGKRKSSRIPKGNVYLKTALVEAAQSAAKAKGTYLRDKFYRLKARRGYKRAVVAVAHKILVAIYHMLSQEVSYQDLGDVYLDKLNKHHLTRNLVHRLERLGYTVTLEQKAA

SEQ ID NO: 507316 - protein, 341 aa, unidentified
MSDYSYFCGIDLAKNHFSIHAVDQHGKVLLHKSVTRSKLLTTIANMPPMRIGVEACGGAHYWARTLRKFGHDARIMAVKYVTPYRSKGKNDLNDAVAICEAVQRPTTRFVPVKSPEQQAILSVHRMREHWVRERTALMNRIRALLSEFGLIIPVGRASLMRLVPDMLENPENELPNLARATLADAFEHLKSLNQNIDNTEITFDAFAKVSTNVQRIMKVRGIGPQTATAILASIGNGAQFDKSRDFSAWLGLVPKQYSTGGKPRLGRITKHGDKYLRTLLVHGARTVIANLGDKQDRLSQWCRGVLERRGMNRAVVALAAKNARIIWSLIHNQTEYENYSA

SEQ ID NO: 507317 - protein, 294 aa, unidentified
MQKISTMRTSGKNIFEGQITVGLDLGDRSSAYCVLNEAGEIVLEHNLATTPEAMKQVFASMPRCRIAMETGTHSPWVSRLLTALGHEVIVGHAQKVRLITKSRRKDDRLDARTLARLARIDPELLSPVKHRSAQAQLHLTEIRARAVLVSARTALVNAARGLVKSYGERLRKCGTQQFSRETTKGLSTGLREALDPLLQEIESLNDRIKEYDRRIEKMAKQTYPETALLKQVKGVGDIIATAYVLTIEDPQRFRKSRDAGCFVGLQPGRRNSGESEPQMRISRVENHYVDAWLG

SEQ ID NO: 507318 - protein, 389 aa, unidentified
MKIYVGIDIAKLNHFAAAISSDGEIILEPFKFTNDADGFQLLVSKLESFDKNSIIIGLESTAHYGDNLVRYLVAEFYQVCVLNPIKTCQMRKNNVRKTKTDKVDTFVIAKTLMMQDDLRFITFFDLDMMDLKALGRFRQKTIKQRTRLKIQLTTYVDQVFPEIQYFFKSGLHQNAVYALLKEAPSPKEIASMHMTHLANLLKVNSHGHFTKEQAKELRVLAQKSVGANDSAISIQITQTIQQIELLDSQLEKIEAEMTDIMKFNDSVIMTIPGIGYINGGMILGEIGDIHRFSNPNKLLAFAGLDPSVYQSGNFQAKTTRMSKRGSRVLRYALVNAAWNVVRNNATFKAYYDAKRAEGRSHYNALGHCSGKLVRVIWKMLTDNVEFNLK

SEQ ID NO: 507319 - protein, 363 aa, unidentified
MKIRVGIDLHSNNALCGLRDESGPRLVHKKPSCDLTAILQLLEPYKDRIATIAVESTFNWYWLGDGLQDHGDHVVLANPAGMQPYGGMKYTDAVSAAYFLAELLRLKLLPTGHIPDRQTRPVRDLLRRRLLLVRQRTLLILSCKSLNERTLGQRVSLARVKAMKPAEAQARFTEPADPLLSGTAIELMGHLTTAITKVERPILEVAGKWKTYQRLQELPGIGQILGLTLALETGAANRFEDAGNFARDCRCVKSLRPSHGKKQGENHRKGGNQYLAWAFVEAAHFAYRYDAPSRRCYDRKKQQANPVIATKSLACKLAKAARHMMKEAGPYDATRVFGPARKRDFGETGREPAKGSGPLSQEN

SEQ ID NO: 507320 - protein, 329 aa, unidentified
MKELLIVGVDVSKSTLDIYFKPLEKNVQISNDIAGFKEWRKLLKTGLLESTSVLVIMEHTGQYSYRFEKFLTSKGIDYCKVAALQIKRSLGVTRGKSDKIDAQRIAEYAWLRRDIIKADPVINLAINTLKSLLSLRSKMVRDRAGYISRVKEMIASGTTTPGSIESKVQKQLIKVFTTEIFKVEAEIKSLITANVELFETCKLLRSIKGVGWIIAAYMISCTANFKRFANARKFNCYAGLAPFKYQSGTSINGRSRVSHLANKEAKTFLNLAACCAIRYDPELKQYYEKRVSEGLKKMSCINIIRSKIVARMFAVVKRKTPYQTLQTAA

SEQ ID NO: 507321 - protein, 413 aa, unidentified
MYIVGIDIAKKSHQAAIMKPDGTLVGRSFRFTNTKQGFEFLMDKLAAVDSSLENFEFGMEATGHYWLNLYTWLADNHATVHVINPLQSDALRNLYIRKTKTDSVDAKIIAQVIRIGQYSETKLADNRMLMMRDLCRQRFFLVDMVANLKRKIIVMMDRIFPEYQGFFSDTFGKSSTAILKHCTTPEEITLFGEDNLAQLLQVASNGKFGLKKAQELISLARNSFAARLSSKTLSLLVKQMMDQMELLQNQIGILEKHISSHFKSFGTKITQIPGIGPVLGASILSEIGDISRFANPKKLCAYAGIDPSVKQSGQFLGNENHMSKRGSGYLRRCLWMASFVSVNHCREITIVYKSQVSKGKTHFQSMGFVCHKLLNIIYTVLKNDIDYSPMLCINPAITARTSRRIARAALKAR

SEQ ID NO: 507322 - protein, 400 aa, unidentified
MISVGIDVSKEKSTVCILKPYGEVVSRPFEVCHVEKELSELTSMLLRLNDDIRVVMEATGIYHLPVLSYLKEKGLFVAVINPFEMKEYRCQGLRRVKTDKQDAITISNYGIDHWYRLKNYEAEDSVYAELKLLGRQYRHYMRMRVESVLELTHLLDYTMPGIKTLLKGWNETNGKDKLGDFAEEYWHYDNIAKKPEEQFIESYLKWAKEKGYHQSQDKAVKIYALAKEGIPTVPSDTPSTKMLVQEAVRVLREVDNTLMTILTQMQALAKSLPEYPVVRAMGGVGNVLAPKLIAEIGDVRRFHSGKALIAHAGIDAPPYQSGQFIGTERKISKRGSSSLRKIGYEVMRCLKTHKEPEDAAVYRFILKKEKEGKSKRAAKIAGLNKFLRIYYARVMEVYQN

SEQ ID NO: 507323 - protein, 312 aa, unidentified
MTDQTFVGVDVAKDWLDIHHASHGATRINNSHAAVRSFAARCAKEGAWVVFEASGGYDHQLRDALESAQVRFSRINPRQARDFARAMGVIGKTDRVDARMLAELGARLTPAPTQPLPPERRALQAQATRRRQLVEMRKQEATRLQQTADPAARADIRGVIAMLDRRIAKIEARMTDLVTADPELAAIERRLRTAPGVGPVVAATLIAELPELGQIDRRSIAALAGLAPIARDSGRRSGPRSIGGGRPIVRTILYLAALQASRRSPQFIHFRKHLQAAGKSVKTAIIATARKLVVTLNAMLASGTDYRPTAVV

SEQ ID NO: 507324 - protein, 395 aa, unidentified
MSAEGEAIRSNDYRKDTTVKAPSTRPAAVLGLDVGKSSHWACLVDRGGEVLASAPVRNREAELDALFASAPAGTLVVVDQFRNIGSLAVRRARAAGLGVAHLPGLAASRAAGLFAGEAKTDERDAAVIARTALGVPDSLSGVPGRGEALEAARALSSQRDHVVACATRDKNRLRAVLLESCPALEAAVDLSDRRWLELLAGFGGAWGIARSGAEGPQAEAAGEAAAASTAPPPALVEAENRQVRFLAARISEALDEAGALEAETAGLLEGDETYACLLTVPGIGPRTAAQLAVSVDIARFPDHDHLASYCGIAPRVRSSGTSVRSVRASRRGDARLKSLLIFSCNSLVRSSGRYGEYYRACRARGMGHGRALKAVARKRLRAIYAVMRDRVPYRE

SEQ ID NO: 507325 - protein, 377 aa, unidentified
MHSKNIAAYVGLDVHKETLAVAIAAPERLGEVRYYGTINNEAQAVRRLFQKLQGLYGNILSCYEAGPCGFGLYHQLTAMNIKCQVIAPSRIPKSPTDRIKNDHRDAISLARLLRAGELTPVWIPDLTHEAMRDLIRARAAAKRDSRVARQRILSMLLRTDKHYAGKHWTGKHRTWLANQSFSQPSQQIAFQHYCQSLEQIEDRILQLDQEISRLLPEWSLCNLVCQLQALKGVGQLIAITLVAELGDFSRFSNPKQLMAFLGLVPGEYSSGNSIRPRGITKVGNSELRRLLYEAAWSYRTPAKVGAWLIYYRPDSVTQYSKDIAWKAQQRLCSRYRSLTAKGKKSQVAITAVARELTGFMWDIALAAQSSFSQQKQN

SEQ ID NO: 507326 - protein, 430 aa, unidentified
MSSTDSTNQKPVAAFVGIDWADQKHAIVLRAATSTASLEHRSIGAEPDALVEWVLEVRERFASAGRILVCLEQSRGALIHFLMGYECFELYPINPKQLASYRETFRPSGAKDDPIDAELLCQLVSLHHRQLRPWHPDDVLTRKLALLCQKRRQAVDARTALSNQLKSELKQYFPLALAVLDNDLTTALAADFLLQWPNFESLKKTAPHKLRKFFYGHQSRSEQKLQARLERIQAAQPLTRDAAIIEAGTLTVQMLAQQLKALVPYIARYEKEIAQLFELHPDSALFNNLPGAGPTLGPRLLAAFGTDRERFQSPLDAVTFFGVAPVTEQSGKSKWIHFRWACPKFLRQSFHEFASQSIRFCDWAAVYYQQQRARGKGHHAAVRALAYKWIRILFRCWKSRQPYDPQLYLTALLQRGSPYTSPVKNSTPKT

SEQ ID NO: 507327 - protein, 326 aa, unidentified
MEHELHYIGIDTAKEKLDVDVLRPDGRHRTKKFANTTKGHDELVSWLKGHKIDHAHICIEATGTYMEPVAECLYDAGYIVSVINPALGKAFAQSEGLRNKTDTVDARMLAEFCRQKRPAAWEAPHPLERALRALVVRHQALTDMHTQELNRTETAREVQRPSIDAHLLWLEAELKRLEKQIKDLTDDDPDMKHRRKLLESIPGTGEKTSAVLLAYIGLKDRFAHARQFAAFAGLTPRRYESGSSVRGASRMSKAGHVSLRRALYMPAMVATSKTEWGRAFRDRLAANGKKGKVILGAMMRKLAQVAYGVLKSGVPFDASRHNPVAA

SEQ ID NO: 507328 - protein, 340 aa, unidentified
MKYVGVDLHKHVIVVCVVVRRGRRTEVVCRRRFACRDTDAIREFFAGLGRFEVVVEATAAYEWFFLLIEDLADRLVLAHPKKLRVIAESTRKTDKIDAHVLAIFLALDMIPEAYRPSPRVRQYRVLVRHRCWLQRRIGAIKSKLRNILAHYNADVKELFTQRGQVYLAEVAVSAADRFVITALKEQLELFEGQLSEADRRLREFAKGGPLAEREARAVLESVPQVGPVTIDVVLSELGDWRRFRSQKAVAAFAGLDPGMRSSADKRHDLHITKEGSRLLRWALIQAAWRLVIKSPRWRRQWERLRANTGSKKKAIVAIARRLLCVMFGMLESGETYRLVA

SEQ ID NO: 507329 - protein, 399 aa, unidentified
MLAVGIDISKSKSVAAILNQDGSMHTSPFEFHHTQPELDAFIKYILNSKQSATILMENTGHYHYPVLKALQEAGLPVCMVNAYQIKKFGDMDLRKAKTDKKDAVRIARYALEKSYSLVPYTSMEQKYEDLRFLARQYNQRMLTLKTNKVFLLNLLDETMPGITNILPLTTRTPETSLSVLFINRFKSYDRIKKMGKSRFLDAFEKIARKSRNRQTKTYGLAIYEAALRNITTRGENEYTLAAQDQCLELVCESQKAADSIILKMQTLAETLPEYAVLRSMAGVGDRLGPLILAEIGDIRRFHSGKALNAYAGNDAPPYQSGTFESHNRHISKRGNAALRKYCFEVMQALKLTRPQDDPVYLFLLKKEQEGKPYNVAKMAGVNKFLRIYYARAMETLKQQ

SEQ ID NO: 507330 - protein, 396 aa, unidentified
MDRAWAGVDVGKQHHHAVVVDDQGTRVLSRRVANDQVALVELIGRVTALAGAVTWAVDLHSSEAALLVALLLAHDQTVVYVPGVMVNRAASAYRGAGKTDAKDAYVIAEQARMRRDLQVLGADDELIVELRLLVARRQDLRADRTRAVNRLHDRLVAVCPALERVLDLGNRGALVLLTGFQTPAALRAQGVAGLEAWLGSRKVRGAGKLAAAVVDAANAQTIRLPGEQVAACLIADLAEGVLALDEQIKQVDELIQGRFRRHPAAEVILSLPGMGVLLGAEFLAATGGDMAAFGTPDRLASLAGVAPVPVTPGRVVGNLHRPQRYHRGLQRVFYTSALISIRCCPESRAFYDRKRAEGKRHTQAVLALARRRVNVLWALLRDQRCYQQTPPEPKAA

SEQ ID NO: 507331 - protein, 354 aa, unidentified
MKKFFIGVDVSKDTVDVSFFDDDRMKSPEYLAQYSNSPKGFREMVKDLRMCCHGVSSGQWLFCCETTGRYDHPLCHWLVDHGMVVWRESALQIKWSCGIQRGKNDRVDSLRIAEYAWRHQDKMQKFVKPSESLSNLKAAFTHRRRLVEKRTATRCQLKSMSSEKGLSASVARMIVRDLSREIERLSASIATMDESIQKIIRSDSELDRNYRHIISVKGVGPITAVALIVCSGNFKAITSAKKMACYCGVASFRSQSGTSINRKASVSNLSNRQIKSLLSMAARSASRSNPVFAEYFNRTLSRGKPVALVYNNLRNKIITVVYKLIERDCDFDVDYMRMHSTGQRANEPAIREAV

SEQ ID NO: 507332 - protein, 367 aa, unidentified
MSVDTVVGLDVHAESITAAILRPGSEQPEVIKLSSDLMKVRRLFRRLSGHGPVRSCYEASGAGFVLQRVLAGDGFSCEVIAPSLIPRKPGDHRKTDRLDAVMLARLYRSGHLTAVHVPTEDNEALRRLLRLRTTYHEYITATMHRTSGILRNHGFVFNEGKSTWTKKHRMWLARLRLTLQGPLSTALAMELQHLEYLETELQSMDTELERYAQSPLYRSKVEALCCLRGVKILTALTILCEVDDVYRFSSPRKLMAYFGLVPSEHSSGAREYRGSITKAGNIYVRRLLVEAAWNNRHNAGAALILNRRRQGQPPEIVAIALKAQHRLTKKYLHLDQRKHRHVAITAVARELCGFVWAILMALPQTQH

SEQ ID NO: 507333 - protein, 371 aa, unidentified
MGKASTFVGLDVHKASIAIALLRLGQREPLEWAIRNEPGAVHRLIRKLERELPDGLQCCYEAGPTGYVLKRQFDRAGIPCQVIAPSLIPVKPGSAIKTDRRDARKLAELLRAGMLTEVAPPTEDEEAVRDLTRSRDDAQRDLTRARNRLSKFLLRRGCVYAVDRKPTWSQKYRAWLRAQRFERVADQVIFEDYLLAVEQVEERLQALTDRIEHFAGQAPWRERVQALRCFHGINTVTALALVAEIHDPRRFPHPRQLMSYLGLVPREMSSGQRERRGGITGAGNRHVRRLLVEAAWHYWHKPVVGRALRLRRREQDPKAIALADRALRRLTLRQRRMLYQGKHANLVNIAIARELAGFVWNVLQPGTTSQS

SEQ ID NO: 507334 - protein, 396 aa, unidentified
MAAIWAGIDAGKTHHHCVAIDESGHRLLSRRVANDEPELLELLTDVLALGDEASWGIDLADGGAALAITVLFNHDQTVHYISGRAIHRASESYRGEGKTDAKDAAVIADQVRVRRDLHPLRTGDDTVIDLKILTGRRMNLVADRTRTINRLRAQLTGVFPGLERALDLTKAGPLTLLTGYRTPADIRRIGAKRLETWLRNRHVVHSDRLAEAAVQASERQHTRLPGETLSAELVHTLAKEVLGLNQQVAELDKAIEARFREHRDFDVITSMPGLGVILGAEFLAATGGDMAVFGTADRLAGFGGAAPVPRDSGKISGNLKRPQRYSRRLQRVFYTSALFSIRKCEESRRFYDRKRAEGKRHTQAVLALARRRVNVLLALLRDGRCYEPAPPARAAA

SEQ ID NO: 507335 - protein, 411 aa, unidentified
MERTFDLFCGIDWGTEQHRVCLMDREGHLVGERWTEHSGASITELITWLRDSGGAVPSAFAIAIEVPRGAIVETLTEHGFAVFSINPKQLDRFRDRYSPAGAKDDRRDAFVLADSLRTDLHCFHAVRLDEPAVIRLRDLSRLEDDIRDELRRLSNQLREQWHRFFPQLLTLCQSTDEPWVWDLFEVAPLPAQAARLSEKKIMKILVRHRIRRIGVRDVRAVLTAPPLQLAPGTAEAASEHAMLLLPRLRLLRQQRAKIATRLRKLLDELASPETVEEETKEHRDAEVLLSLPGVGRIVAATMLSEASQAIADRDYHGLRCYAGTAPITRQSGKKTVVLMRHGCNERLRNVLYHWARVSIICDARSRSHYAQLRAKGHSHGRSLRGIADRWLRVLIAMLKHRTLYDPSLPSV

SEQ ID NO: 507336 - protein, 490 aa, unidentified
MGCDVSKGYADFVIIGCGEEVIEPTFQVDDTAEGHAVVVEFLSTFFKKHTHGKLYVGVESTGGYENNWIGLFSRMAEIWDIKATRLNPLPVKAHHEAAMRRIGTDDISALNIASYLIAYRSKVNYEQDNSFSSLRKQWNFTELLKKQKTQLSNQLGFLIYQSHPELVRYCKDGIPRWILLLLKRYPTAARLTRAKASSVAKIPFISPSRAASLIEEAMDSVAASTDETDGFVIKETVQQIMTKNIAIEAQKERMEASCAIPETKLLTTIPGVGIYSAIGLIINIVSVARFANVKKLASYFGLHPVYRQSGDGIWGFHMSKKGRVEPRAILYMTVLSALNCNPLIRELYDRCVAGGMNRMEAIGVCMHKMLRIVYGMLRNGAEFEPAVDEKNRKRRLLPGSPNRHHEKKRRMQPHDKRAPISKRQSKRRKGIKQEAEPQKDTVPKNGVIPNLLNGKNNKSSKIPSTSVTMPTVIGKVIEKEMEKLGISIYT

SEQ ID NO: 507337 - protein, 479 aa, unidentified
MNVKTSKAKKQVNIENETVNLLSKEELNKRIEVIKKELRSYTWREMETKGKFVKNDKLSFIADDMLIVGCDIGSEMHYIRAIDVRGRELSRGAFEFSNTAEGFENARAWVLELAAKNEKKQIVLGLEPTGHYWFALAAWMISNGISVVQVNPYAVKQSKEIEDNSQLKDDRKDPKLIANLVKDGNYGMPYLPEKIYADLRRLSMFRDQLTEDRIRNVNRLHRELKIYFPEYMDAFGKIDGAFTLEVLRVSAIPSDITELGAEGLRNIWHAAKLRGRGYSRAGEIVRYAEKSVGLTDGKDAGREAVKWFAEQILQLDEQLTEIESALHRKCREIPYAENILAIQGVGENILSGIVAEMGDISRFDDVKEIQKLSGMGLVACSSGKHKGQTKISHRGRKRLRYWLFQAAKSAVSHAEEFKELHVYYTTRDNNPLKKMQSLIVIACKILRVIYAILKTGTTYDPQKMLKDIKRPALQASMAA

SEQ ID NO: 507338 - protein, 375 aa, unidentified
MTKIIRIGIDTSKSVFVLHGVDAAEQPVLRKKLRRSQVLEFFAKLEPTKIGLEACGAAHYWARELTALGHEVVLLPPQYVRPYVKRGKNDAADAEAICEAMSRPTMRFVPVKTVEQQAALMLAGTRDALIRRRTQLTNAIRGYAAEFGLTAAKGLDKIEPLLARIAAAAELPRLAQELFAGYGKEYAQLKVQIQKIEAKLMAWHKDNELSRRLVEVPSIGPIGASLMAMKVTDPHAFRCGRNFSAWIGLTPKDHSTAGKTRLGVITRAGDESLRSILVVGATSVIKQVRRGKGHPSPWLVELVRRKPPKLAAVALANKTARIAWKLMVSGERYNPAAAARAGRGSPLTRGCAPRPALAARIRSRSAALPAAGTEA

SEQ ID NO: 507339 - protein, 400 aa, unidentified
MRAVFGIDVSKTSSEVAILVNGEKVHGYSILNDAIGFNRLLGDLKTVHNPEIIFEATGVYSRRLQAFLEECGYAYTRLNPLEAKKQLDSLRVRKTDKIDAEKLAKSQLVHNRKPTYVQEEVYQHLRDLSRFYQNMTEDLVRAKNRLHKVLQVTFPELENLLSTPTGEQYWNLVMAFPCKEFVLSLSQSDLYEIIRQSTSKRISEKRIAYLTDKLIKLAKQSFCAVKKTSPMLEEVRYYAQELLRLSERRQVVLNDMVALAQPLPEYDILRSIPGIAETTATSIIGELGDIRRFHSANQINAFIGIDLRHYESGNFLAKEHITKRGNPYARKILFKCIHNIASASHTNPCHIADFYEKRKRQSTIASTKPHTIASIHRLIRTMYYLITHNKLYDYSLTQNR

SEQ ID NO: 507340 - protein, 346 aa, unidentified
MMIIGCDFHPSWQQVSWVDSETGDCGEQKLVHATGDAQQFYQQLVAPVLIGMEATGNSQWFIELVEDLGHAIWIGDAAQIRASYVRKQKTDKRDAAHILKLMMENRFPRLWTPDREQRDLRQLVLHRHKLVILRARVKNELQHLSLNKGVQRKHRLWSQAGQKMLRELPLKPWAACRREDLLGLLSMLNQQIGKLDGAVQTAAEENPQAKLLMTQPGVGPNTALAYVLTIGEVSRFQRGKQVASYLGLIPREESSGGRQKLGSITKQGNRMLRSLLVEAAQVAVQHDPGLRQQYLHRCHQKPKGVAKVATARKLAVRLYWMLRTQVVYPEIVRIESSSGLPLVGAS

SEQ ID NO: 507341 - protein, 314 aa, unidentified
MQSTTIAVDLAKDVFEIAVSRFPGKVAERRRLSRTKFLRFFAERQPSRILLEACGSAHFWAGELEKLGHEVVLLPAHLVRPYRSRHKKTDRTDAKALLEADRNEEIQPVPVKSIELRSVTALHRLRSGWMSTRTARLNAVRGLLREHGHFIPQGAKNVVPRVHALIADAENALPDPLRMALAEACEEIRDLEQRCEKTRKQLEALAPTIPAVEHLLSVPGIGNLTATALVAFVAEIHRFPSGRHFASYLGLTPRVHATGKSRHLGRISKQGDGYLRMLLIHGARSSLAAGKKLQQEGSVAHDTYRILAIAGRWG

SEQ ID NO: 507342 - protein, 421 aa, unidentified
MTSMTAVLLSANPLVPPGVLVAGIDTHKHTHHVAIIDHLGRPLADEEFPATGRGYARVIEFLHARGSVDRVGVEGTGSYGAGIARELARAGFTVVEVVRQNRQARRLRGKSDPIDAHQAALAVLAGEDTVPKTADGHVESMRILIGERRSAAKAKSQTMNQIHALLITAPEPVRNTYRELTGAKLVSTLARTRPATGRLDPDLIARQTLKRLAARYLTLQNEIDTIEEQLDPLVRAVNPTLLSLSGVGVVTASTLLVAAGDNPERLTTRSSFAALAGVAPIPASSGQRTRHRLSRGGNRHANAALHRIMLLRKRHQEPRTMAYIERRRAEGLTDRDIMRCLKRHVANEIHAALLNPATDHPVGRELRAERQRIGIPISVLAATLGVPYQRLRRLEIGTRADPDLEQRATLALAQFKPSEAA

SEQ ID NO: 507343 - protein, 424 aa, unidentified
MEILYTNCAGLDVHKKTVKVCLLTRTSDGQLHKEFRTYFTTTEELLQLGDWLKERGCTHVAFEATGVYWKPVFNLLEGSFEMLVVNAQHIKAVPGRKTDVKDAEWIADLLAHGLLKASFIPSSPQRELRDLTRYRVRLTEEKAREVNRVQKTLEDTNLKWGDVVSDMMGKASRMILHAIADGETDPGQLAALAVGRVRAPQEQLEAALRGHVTDHHRFLLQEHLTQIHHLEQAIERVTAEITRRFTPPSPPEETTISQKEEEATQEISSDSAPPQEASSSSQAEIGINMQQFPTAAHLASWAGVCPGNHESAGKRLSGKTRKGNPWLRCLLVQAAHSASHQKQCYLAEQYRRIAKRRGAKRAAIAVAHSILVMIYHLLRNQTTYLEKGETFLEEQERQGAEKRLVRQLSRLGYHVELQPIALAG

SEQ ID NO: 507344 - protein, 311 aa, unidentified
MDEVYVGIDVSKNRLDVHVLPEGHAFAVARDGEGVAELCARLGANPAVKIVAVEATGGFEQTVAAGLAGAGLPVVVVNPAQVRAFAKALGQRAKTDPIDAAVIARFVAATKPVVRPLPDAATRLLADLVGRRRQIVDMLAAERQRQSRLTARHLARSLARLIAALERELDAVDREIDIAVRSSPAWRASEDLLSSVPGVGRVIARTLIAELPELGTLGRKEIAALAGLAPYTRQSGQWKGKTFIGGGRKSVRTALFMGAMTARRHNPILAAFYKRLVDAGKPKMVALIAVARKLLSILNAILKSKTPWQNA

SEQ ID NO: 507345 - protein, 368 aa, unidentified
MSVRNTPYERSTLVNSEKYIGLDVHQASIVVAVMDSTGKLVMESILETKAATILQFFAGLRGTLAVTFEEGTWSAWLYDLLHSRVEQLVVCNPRKNALLKDGNKSDRIDARKLAELLRGNQLKPAYHGETGVRMLRELSRSYLTIVKDLSRVMNRLKAVYRSWAIPCAGRDVYYRRHRTQWLAKIREAGVRRRAERLYEQLDMLQHLRQQAHRELLAESRKHAITAKLRQIPCLGPIRVALAVALIQTPHRFRTKRQLWAYSGLGLETRTSAEYRFVEGQVRRSKKLLSIRGLNKDHNHDLKGLFKGAATMASVRPGPFQDFYTAALAKGIKPTMARLTLARKIAAITLTLWKKGENFDAEKLKSQAA

SEQ ID NO: 507346 - protein, 416 aa, unidentified
MTDDARWFVGIDWASETHQVCLVDAGGKIVGERGFPHAGAGLAEMCIWLLVTTRAEPTVIAVAIEVPHGPIVETLLERGFLVYAINPKQLDRFRDRFTVAGAKDDRRDAHVLGDSLRTDRHCFRHLAAEDAVIVELREWSRMAEDLQQERNRLANRVREQLWRYYPQALKISDDLGADWFLELWAAVPTPAKAARVRESSIDRVLKTHRIRRIAAAEVAQVLRQQPLTVAGGTVEAASAHIRAVAARLKLVNRQIKEAHRRLDALCGKLAAREETTASGQEPEPRDVTILRSLPGVGRIVLATLLAEAAEPVRRRDYHALRTLSGVAPVTKRSGKRCIVIMRQACHMRLRSAVYHWARVAIQHDPLSRCRYAESRKRGPSHGRALRSVADRLLAVACAMLDQQTMFDPGRAEKQAA

SEQ ID NO: 507347 - protein, 346 aa, unidentified
MEHYAAIDVSLEWSSVCIVDTSGRIVREAKVRSEREVVVAFFQASGLTFARIGLEAGPLSQWLHAGLVEAGLPAICIETRHVKAALKAMTVKTDKNDARGMAQLMRLGWFRPVHVKTLVAQEIRALLTARRLLLAKLCDLETSLRGILRGFGLKVGTISKLRFESRIRELAAGQAMLERVVEPVLRVHAVLRGEYAVLHRTLLAAVRDDQVCRRLMTVPGVGAVVAMTFKSAIDQPERFQHSKAVGAHFGLTPRKYQSGEVDRTGRISKVGDAAVRVALYEAANILLTRAARWSSLKAWAMRVATRQGMKKAKVALARKLAVVLHRMWLDGTQFRWGSQAAPEAVA

SEQ ID NO: 507348 - protein, 355 aa, unidentified
MSQEKYIGMDVHQATISAAVMDGQGKLIMECLLETKASTILEFVEGLQGTLSLTFEEGTWAAWLHDLLKPHVSRLVVCDPRKAALLKEGNKSDRIDARKLAESLRTNQLKSVYHAEHGLRTLKELGRSYLTVTKDMTRVMNRIKSLYHSWAICCPGSSVYSPRHRAEWLGKIAEPGVRVRAEHLYQQLDSLQPVRCQARCELLRESQKHAAVKLLRQIPSIGPIRAALLVALLQTPHRFRSKRQLWAYSGFAVEVHDSGEYRWVRGKLQRNRERISVRGLNDNHNRDLKNLFKAAAISASARPGPLQEFYLARVAQGIRPTMARLTLARKIATIALTMWKKGASFDPNQLHRQAV

SEQ ID NO: 507349 - protein, 336 aa, unidentified
MGAISLGCARLQEKARARTGRTFPIIVIHEAGLDGFWIDRVLKNEGIESHVVDPASVATSRRRRRAKTDKIDGEALVRTLLAYKRGEPRVCAMVKAPTPEEEDRRRLCRERKVLITERVKHVNRLKGLLFSQGVCGYEPLRRNRRRRLDELRTGDGRPLPKHLKAQISRELDRLELWLEQIKVVETERDALLAAQQIAAPTSAAMLLAIKGIGPDFAAILWSEGLFRHFDNRRQIASYAGLAPTPWKSGSIDREQGVSKAGNPRLRTTLIQLAWLWLRHQPQSALALWFEERVVRNGGRLKKVTIVALARKLLVALWKYVTAGVVIEGAVMKGASR

SEQ ID NO: 507350 - protein, 390 aa, unidentified
MLYIGVDISKYKHDCIVIDDAGVIIRNVFSFDNSRTGFDQFMEMYRSLDPTEIKKIGFEATGHYQDNFKVYLERSGIEFMELNALLVHKFKNSQTLRGVKTDKTDARLIANYLSSIEFKPYPKISYHTLALRSLCKRHFDLINERTKYLIRITNFLDRTFPEFKEFINGNIKSKTCMYILRNYGVANKIANINIQSYENIRKCSYGKFSVAKFNQLRELAKNTVGFSYETDLFEIKSLLRVYDTLQDEISLVENEITTHLSKINSHIPSILGIGKVSAASIIAEIEDISRFNDPNKLLAFAGLDPRIYQSGTQEFKGRMNKKGSVVLRRVLMNCAESILIYNPAFYTYYRKKRDEGKSHRVAISHVARKLVRIIYKLETEHIDFDLSIVK

SEQ ID NO: 507351 - protein, 343 aa, unidentified
MQTVTTIGFDIAKSVFQVHGVDAAGQVVIRRQLKRRHVLAFFQKLPPCLVGIEACASSHHWSRELQALGHTVRLMPPAYVKPYVKRQKNDMADAEAICEAVTRANMRFVPTKTPEQQSCLMLHRTRHLFIRQQTAVINSIRAHLAEFGIVAPVGRKGVTELLHVVADSNDKRVPEVARACLAALGNQLLRLKEQILEFDRLIMAWHRSNQTSKRLHYIPGVGPILATALVASVADPRTFRSGRNFSAWIGLVPKQHSSGGKDRLGSISKQGDRYLRSLFVAGALAVIRYAKIHGTGHRPWLTALLARRPTKVAAIALANKIARMAWAMMARGERYKQPVALAA

SEQ ID NO: 507352 - protein, 362 aa, unidentified
MAKVRSWVGLDVHARSVLAVMIDGESGELRSRRLAGITSEVVEFCCSLPGPTRAAYEAGPTGYGLARALHAAGVGCVVAAPGKIERPAGDKVKTDQRDAERVLRLLMIDGLHPVRVPSGQEEALRDVVRAREAMRGDLMRARQRLSKLLLRHDVRYEDTANAWTVAHRGWLTKIDLGERGAQVTLLEYLGAIDAIVIRRDALEKTIAELIPGSPWEQTVARLRCLRGIDTLSAVGLCAEVGDFERFAKAGQLMSYVGLTPSEDTSGEKRRLGSITKTGSRHARRLLVEAAWHYRRAPAKGRTLRRRQDGQPAHITEIAWQAQRRLHNLWQRLDTQRGKRRTIVAVAVARELTGFCWALANAD

SEQ ID NO: 507353 - protein, 344 aa, unidentified
MKHYAGLDVSIKETSVCVIDGAGQVVREVKVPTEPEAILAVLADEAFAIERIGLEAGPLSQWLYSALADAGLPVICVETRHMKAALSAQVNKSDRNDARGIAHMMRVGLYRPVHVKTLASQKRRMLLTSRTLLQAKAIDIESDLRGTLRNFGLKVGMVSVAKFEPRIRELVADHPDLATITEPLLIARRVLREQLGVLHRLLLAAVRHDEVCRRLMTTPGVGPVVALTFRATVDVPARFASSKAVGAVFGLTPRRHQSGEIDRMGGISKCGDAMMRTMLFEAAQSMLTRTIKWSWLKAWGMKIARRRGMRRAIVAVARRMAVVMHRMWVDGTEFRWTNSATAAA

SEQ ID NO: 507354 - protein, 378 aa, unidentified
MPKSPVTAKPGRCHAPAVINAASAAPAAAPPLVVVGGVDTHTDTHTVVAVDGVSGMRLGTAVFPADRDGCQALWDWLNRFGLLDRVGIEGTGSYGAGLARFLHDRQVQVIEVNRPNRQQRRLKGKSDPIDAEQAARAVLAGTATAVPKSHNASVEAIRVLFNTRTSAVTARTAAINQLHSAVVTAPEPLRAQLRELSTAKLVAAAARLRPSDNLADPTQATKKALRTLAGRIHSLDAEITELTHLLDPLVADRAPRLIAEFGVGTLTAAQLLITAGDNPDRLGAAEAFVALCGASPIPVSSGHTHRHRLNRGGDRQANRALYTIAITRIRSHPETQAFVQARLNAKKTRKDILRILKRYIARRLYTLLVEPATAIPET

SEQ ID NO: 507355 - protein, 399 aa, unidentified
MPEVWAGVDGGKVDHHCVVIDAEGRRLLSRRIANDETSLLELIADVTQLAEGRAVTWAVDLNAGGVALLLALLVNHDQKVVYLPGRTVHHAAATYRGEGKTDAKDAAIIADQARMRRDLQPLRLADDISTELRILTARRADLVADRTRQINRLRATMLEYFPALERAFDYSTTKAALILLTGYATPAAIRRAGAGRLEQWLRKRKARNAAAIASAAATAADAQHTTVSGEDLAARVVARLAKEVMVLDQEITDTDALIEERFRRHRHAEVITSLPGMGTLLGAEFLAFTGGDMAAFGSADRLAGVAGLAPAPRDSGRISGNLHRPRRYSRRLLRVFFLSALVSIRCCPASRAYYDRKRAEGKKHTQAVLALARRRLNVLWAMLRDARTYHAAPPATVAA

SEQ ID NO: 507356 - protein, 334 aa, unidentified
MCNNVFVGCDISKATVDVCIHRENRNARLKQFSNTVAGHRHLIKWITESEPLVRVVIEATGNYSLDLALTLNACSAIELMVANPSATRQFARAQMRRSKTDRVDADMLADFAARMVFVTWTPPEAAILELRGMSRRMQALTTERTRERARLHQAHATRTTSAIVINDIDVNIRHLERRLDAMLLQALRVIAEHEHMKAAFGLLISIRGIAEKSAVMILPEILILPGGMSVRQWVAHAGLDPRKYASGSSVEKRERISKMGNVKLRRALYMPALVAIKWEPNIRAFYEHLIAHGKKPLVAIVAVMRKLLHAIYGMIKNSTAFNGDKFYQIPLQTA

SEQ ID NO: 507357 - protein, 386 aa, unidentified
MKRAKRRGPGPSHLLMTPDHAGNVVGVDPHKRTLTATVADAHGGVLASAHFRVSGEGHRELEAWARQFGQIARWGIEGSASWGRHTAVFLIGRGHDVRDVCANRTPRSDRARQRGKSDTLDSERIAREVLAHSLLPKAFKRAGQEHGPDEQHQLLTLWHNRRRSILTSRQHLVNEAEYLLCELPLELSEQLPDTKAVKPRLAALARRNRRRRYDAPTKLRLQLLDGYRMQIKALELEEKQVVAQLDALVRENGSTLGELSGLSTRSVAELLVEVGDPRRFTEGGFARFNATAPLPASTAEGPGEPVRHRYNPGGNRRVNAILHRMAVTQLRREPRAQRIYANARAGGHTKKEARRVLKRHLSNVVYRRMIRDLHAQLTPDQSLLAA

SEQ ID NO: 507358 - protein, 417 aa, unidentified
MFKKTKKRSTTSRRVRVARSVATSHADTASGPRPIVPRPTTAVTEQGPSRSRVHSPEQSTGPLPPVRRPARPNPQDRDARVDHPSFQVLSSQFPPPGPLYVGIDVAKDKLDVAISEDPAAPVDTIANDPPAIADLVKRLSALKPAVIVVESTGGLERPLLEAMLDAQLPVALVHPGRVRHFAKGVGILAKTDRIDARVLVRFARQAEPRLAEKRRKNHDELRDLVACRRQLTATKTQQTNRRGATFAKPALKSIDAVIKTLDKQIASLDKQIRDIIDADDDFKYLDGLLQSVPGVGPAVSATLAADLSELGQTDRQCVAALAGVAPFPDDSGTTKGKRSIRGGRADVRCALYMATLSAVRFNPVIKLFAQRLKSAGKVNKVMITACMRKLLALINAMVRDGLTWDQLNVVKKLAPTH

SEQ ID NO: 507359 - protein, 337 aa, unidentified
MDYFAGLDISMDETRICVLDREGAVVYEGKSASTAEAIADELAKAPSCRRTVFETGRMAPILFHSLSQLGLPVVCVESRQAYQALKSLATHKTDRNDARGLAHLARTGFFKPVHVKSLSAHAVRSLIIARKKLVGQRVTLENQIRGLAVVFGVRLPRALTTAFIDQALKASEGVAGLSAAMRGLIAARTAVITAVAAIDADIRRMTGASEACRRLMTIPGVGRLTALAFVAAIDDPSRIRRSRDVGAYLGLVPKRYQSGEVDYVGGISKRGDRRVRTLLYEAANVMLTRTKGQLKLKDWAFAIARRSSMRKARVALARRLAIIMHAMLRDGTEFVAA

SEQ ID NO: 507360 - protein, 396 aa, unidentified
MISVGIDVSKGKSTVCIMKPCGEILESPFDIGHTADELDSLISLIKSFDEETRVVMEDTGHYHLPVATYLSSHNIFVCCVNALRMKKFCSQSLRRAKTDKIDSIKIASFGITYWNELVKAYPSNVIYDELKFLARQYYQVTGMLVKSKVNFSNLLDQVMPKINDVLSNQGENHKLTEFVSRYIHFQNILDMGEMKFTSDYCKWAKKKGYRLNERKAAEILALAQNGIPTLPNSQSVKIAVSEAVKLIHSIEESRNTILAQMQDLCNTLPEYSVVKEMDCIGDTLAPRIIAEIGDVRRFKNKHSLIAYAGIDAPPYQSGAFHASERHISKRRNSYLRKTGYEIMQSLIKHKPADNAVYDFIQKKRSEGKCGKEAMIAGLNKFLRVYYGKVMEFYSEH

SEQ ID NO: 507361 - protein, 438 aa, unidentified
MSNKVIFNLDELFISVGIDVGADFSWMSIALPNQQFVGKPYKILHNSIDSLTTAVSKIKEAEELYSLESRIFLESTGIYHYPLFCYLRDKGFNCSVINPIITKNSTNINIRKVHNDRFDSKKAALVGLKPDLKVSLMPSDLALNCRNLCREYFDLMDNRSAYVNKLQGELRMAFPQYLGIFSKVTINTSLTLLETYTSPSAFLEADKQEIIDIIRSTARFGLTYAQNKYNAIIQAATDANQFGYIIDSNIKRIRLYISFIRKYDEEINSILELLHELVDANEDADFVKQIHLIETFKGAGFLSAVSIMGEIGDFSAFSKPKQLFAYFGLDPAVKQSGKFEGTKVQMSKRGSAIARRVIHTLTLQSISISRNGEAKNPVLREYYLKKCDSKPKLVAMGAVSHKVCNMIFAILRDNKPFKIIAPQEHIKQYNAAKCDIAA

SEQ ID NO: 507362 - protein, 343 aa, unidentified
MTQYVGLDVSLKETKLHVLDEAGNRIWRGRCATDAAAIAAAVRRYAPRAVRIGLETGPLTTWLWTALRAEGLPMVCLDARHAKKALDMKVNKTDANDAEGLAHLVRAGWYREVRVKGRSAMLAKALLGARSQLLSMSLALENQIRGILKTFGRIVPKGAGGLFEKNVRALIMDDAEITAVIMPLLQARQVARGKCAALDRRIIRSVQGDATCRRLMTMPGIGPITAVAYVAALEKPDTFKRSRAVGAWLGLTPRRFQSGEVDYDGHISRRGDRQLRALLYEAAAVLLTRVRKESALRRWGLMLWKRLGFKRAATALARKMAVVLHSMWKSGTAFNPTLSAVTP

SEQ ID NO: 507363 - protein, 353 aa, unidentified
MITIGVDAHKRMHVALALDDAGQELGQWRGLNSAAGWRSLAQWAEELGRPRQWAIEGAWNYGRGLAQHLVAAGETVYEVNPRWTALGRRSARKPGKTDRLDAHAVALLARREASTLPRVSPEDDTAILALLTTEREAALGEATRLGNQIHALLMQLDPEYDSRLPTLRSRAGLDALETYPSPGGSLIQNERAAAVRRLATRLRLTLTQAEELARQIAAYAEAGFSPLARLCGVNLLTAGMLAGILGPGRRFSTDAELAAYAGVAPLEASSAGTTRHRLNRGGNRRLNAILFRIALTQAHHSPEARAYLDRRVSEGKSRREAIRALKRFIVRAIWRLWQECETSPVSSPVENVA

SEQ ID NO: 507364 - protein, 349 aa, unidentified
MVADELDYVVGVDTHQDEHTLALVEAATGAVLAQQTVASNGRGYAQALRFAQQQVDAARVWAVEGAGHYGAGLARYLSERGETVLEVGRSPRGERRLSGKDDQLDAVRAARAALRSEPLPRPRSGERREALRLLLVARRSAVDVRREALVQLRSVIVTAPERLRQELRGLPVQRLLDRCSRLRRSTTPTPDQVAARVVLRTLARRIEAATVEADELEREILVHVRALAPELLDEAGVGPIVAAQLIVAWSHRGRLRSEAAFARLAGVAPLPASSGQTVRHRLSRGGDRQLNRALHTIVLHRRQHDPATRDYIARRIAEGKSRRDATRLLKRYLARHLYRLLQNQEPLLA

SEQ ID NO: 507365 - protein, 403 aa, unidentified
MAVPELWAGTDAGKAEHHCVVIDTAGRRKLSRRVANDETALLKLIADVLALSEGEPVAWAIDLNAGGAALMIALLTDNGQQVLYIPGRTVHHASGSYRGDGKTDAKDAFVIADQARMRRDLQVMHRGDDIAVDLRILTSRRLDLAADRTRAINRLRAQMLEYFPALERAFDYKTSKAALTLLTQYQTPAALRRIGKNRLATWLKNRKVRNHQLVATTAIEAAEAQHTAVAGEKLAAVVVAKLTREVMALDEEIAETDDLIEGRFRDHPHAEVILSMPGIGPVLGAEFIAHTGGDMSVFGTADRLAGVAGLAPVPKDSGRISGNMRRPRRYCRRLLRVFYMSAMVAARHCPVSKAFYERKRAEGKGHKQAIIALARRRLNVLWALIRDGRGFETIAPEPPVALG

SEQ ID NO: 507366 - protein, 407 aa, unidentified
MVFVGIDWAEQHHDVCVMSVDGQPLGRARVAEGVDGVARLHALVADHADDPAEVVVGIETDRGLLVTSLVATGYQVYAVNPRAVDRYRDRHAVSGAKSDGGDAKVLADLVRTDRHNHRQVAGDSVLVEAVKVTARAHQSLVWTRQRQVNQLRSALREYYPGALATFGTDLAHPDALAVLATAPTPELGRRLSSARIASALRRAGRVRNIDARAAAIRDGLRVPQLAAPTVVADAYGDTAKALINVIAALTVQIAELESALADRFEQHPDADILRSLPGLAVILGARVLGELGDDPNRYANAKARRNYAGSSPITKQSGSRKIALARYVRNRRLADAITWWAFSSLQSSPGARAFYDRRRAAGDTHHKALRALSNRWVGILHGCLRHHTLYDEATAWGHLTESHAAAA

SEQ ID NO: 507367 - protein, 344 aa, unidentified
MLATVLWKPEQLMDFNSHLQGWETENMPELIQVGIDVAKDTLEVACGPEAATQSFTNNDAGHEALVSALSARHVDLIVMEATGGYEAPCACALQAAGFAVAVVNPRQARDFAKAMGYLAKTDCIDARVLAALAAVLAKRPEREKLIRVLPSEEQQRLHALVLRRRQLVQMLVAERNRLPMSHRAARGSIEALIKAIRKQIVEIEGELASHVARHHADLAGLLRSAKGIGPNTCLVLIADLPELGKLSNREISALVGLAPFNRDSGTMRGKRTIFGGRAQVRCALYMATIVAMRHNRVIKFFYERLLAAGKPKKVAIVACMRKLLTILNAMVKTGKQWDETFHFA

SEQ ID NO: 507368 - protein, 314 aa, unidentified
MNTENEINVGIDTSKTQLDIYIRPLDEFFSVDNSTQGVKEAIKRLKTVRPTRIIIEATGRLELPFVIAAKKAKLPVTVANPLHIRRFAGATGQLAKTDKLDARVIAYFGAALKPEPTELKPENVRLISDLLARRSQLLDMSTMEKNRLSILPKPLHTSLKRHIKQLQTEIKRIELQLDKLIDQTPLWQEKRDLLMSVNGVGKILTYTLLSDLPELGQLNRREIAALAGVAPMNRESGNYKGKRRIRGGRARVRTVLFMAIMSATQSNPKLKKKYLALQDAGKSKKVALVACMRKLLTILNVMMKTGKHWDPELA

SEQ ID NO: 507369 - protein, 318 aa, unidentified
MEVLHAHCAGLDVHKDSLAACVRHMVDGKVTTRVKSFNTTTAELMLLSDWLSSEGATHVAMEATGVYWKPVWHILCDGEFELVLANAAHVKNVPGRKTDVNDAMWLADLLAHGLIRASFVPGEPTLQMRDLLRTRKQMVRERSSHTQRIQKTLEDANIKLDSVVTDILGLSGRRIIAALIAGQTMPQALASLAHRRIHATVDELEAVLRGRVTAHHRFLLKLHLDQVDAIDAAIARIDEEVSANVEPFRVAIEMLSTIPGISRLSAEVIVSEIGIDMNRFPTAGHLISWAGLCPKNDQSAGKRRSNIGVPTDRSLSVG

SEQ ID NO: 507370 - protein, 468 aa, unidentified
MTPRSGKAFRTSEQADDLAVCQRHAAGVDVHAAVHFVSVAPDDVPAGFRNPDPKLPVGVRKFGAVTPELETLAAWLKQCGVATVAMEATGVYWIPLFDLLAGQGFHVILVDPRQTTHAPGRPKSDVLDCQWIRRLHSYGLLTASFRPCDEIVRWRGFVRQRDVLIRYAAMHVQHIQKTLEEMNLKLTEVVSDVVGQTGMKILKDIVAGQRDPLKLAKHRHDNCKSTEAEIAAALTGTWRKEQLFALKQSLKLYEFYQKQLRECEAEIESCLRSMEDKSQGAELPPSQRKHRKPEKNEVRFGARSLLFQMAGVDLTAIEGISETTALVILSEIGVDMSAFAHEKNFVSWLGLCPQHRGSGGKIFQRRTRRGANRAARALRMAAQGCHRAKNALGAFYRRIQARADGAKAVTATARKIAERVYRLLKYGQEYVRQSEEAYESAYRLRLEKALAKKAASLGYKLVPETMPA

SEQ ID NO: 507371 - protein, 364 aa, unidentified
MVIIGCDYHPSGQQVFGIDTESGEVVADRWIAHSGNELDQFYSALPAGTVVGVESSGNMLWFERRLAQYGHQLRLGDAAKIRTKETRKQKHDRRDAELIARLLVEGNFPDLKWVPTLAERDQRQLLMHRHKLVRMRSQVKNQLQHIAMNHGEQKKRQLWTKAGRELLEKLPLEPWTARRRNDLLRWLDLLNRDCEVLEAAVKQAAEARAETRLLMTHPGIGPVISLGFMLTIGTVERFERSRQLVSYLGLNPSEESSGERRRLGGISKQGSSFMRMLLLQGAQTAVRGDEALHRQYRRLASKKHRAVAKVMVARKLAVRMFWMLKTKKTHAELVRMRGSSSHPGVGKTDALSERPASPRIQPQG

SEQ ID NO: 507372 - protein, 354 aa, unidentified
MENYTIGCDAHKRYSQFTVLDGQARVMERKRIEHTPGAIREYLARYPAGTPVAVECVGNWYWIVDDIEAAGCEARLTQAGKAKMMMGHVNKTDKLDADGLALLLYNGTLPTVWIASGELRDERELPRTRMAFTKQRTAVKNRIHAALSKHAIQLEAESDAFSGKGLAALRQTLGSLPTETRRCVEEELALLNEIQGHIDVLEARIREQTQITPSMQLLKTLPGIGDILAIVIDREIGLVERFATAENLASYAGTTPKVKSSGGKTYYGPMRKESNQYLKWAFVEAANAIVRCRNSPSWRNKHVVRLYERTARRKGHAIAVGAVARHLAEASYWVLTKREAYHQPHSKQPPTKQG

SEQ ID NO: 507373 - protein, 355 aa, unidentified
MAVTIVEEARPVTCRTAITGGVDTHADTHVAAALDPVGGLPGVREFPATAAGYAGLLGWLGGFGTVALAGMEGTGSCGAGLARHVTAAGIRVVEVDRSDRQDRRRQGKSDPLDAVSAARAAQSGRAHGAPKGRDGAVEAIRALMVARRSAAGERTRTINQARALILTGPDDLRARFTRHTPAALVTGLASLRPRPGDVTGYAVRVALRELGRRAQFLDGQLERLDELIVPLVTAHAPGLLTVYGLGPRTAALLLIAAGDHPGRLRSEAAWAHLCGVAPIPASSGKVTRHRRGPGGDRRANHALWRIVFTRLGSHPATRAYAERRTAEGKSKAEIIRCLKRHAAREVCRHLRPAAG

SEQ ID NO: 507374 - protein, 434 aa, unidentified
MRGAFDMADFDKSKPYSSWVAIDVAKDYNAVMIERRDGTRKKFRMANSADDHDKLVAFIRELPQPARIGFEATGNYHRALGFRLVSEGFDTCLISSIAGARYREVMFNSWDKNDPKDSEVLLELLKKGIVQRHVEPLIAGHHDLQELSKTYYNVTLSRTRLQHSILNHYLPLYFPEMRKFWCSTRSEWWVNYLLRFPTPSCVQSLPFEEYVTVAWPLLGRKVSKQRKLEELYAVAQRSIGLPIASDSVACETFKLQLHRYLDLNANRKALEERAHEILSQNPDYAVLTSIPGIGPITALTIFAEGGDLRRFGHHRQFLKYCGFDLAKNQSGSMRGLEQLSKRGNARLRLALWMAALNATTHKENSFREKFRRYIQTDPQDADLRRKALTAVAAKMARVVYGLIKSGKTYQGYFEQALPSGSIPLCRAVEAVRTS

SEQ ID NO: 507375 - protein, 361 aa, unidentified
MKKPAQHLIAEVPRRQAKVEITIGIDLGDVWSHFCTLNQDGEVVDRGRFRTTPKAIEKWFTDVAPARVAMEAGTHSIWISAQLQELGHEVIVANVRELRAISHSDRKSDQVDAEKLARYARLDPNILRPIAHRTVAQQEALTLIRARALLVRLRTAAVNAVRGLTKSCGYRMPASATTCFAQRSLSVMPTGLAQALGPVLQQIGEMTIKIKQYDRQIQQLGQTEYPETQALLKVHGVGHLTALTFVLTLGSKERFRRSRDVGCYLGLRPRRSQSGDHDPQLGITHAGNAYLRSLLIECSNHILRPHGRDSALRQWGLHLAARGGKQAKSKAVVAVARKLAVLLHHLWSTQEPYMPFYEQAA

SEQ ID NO: 507376 - protein, 375 aa, unidentified
MKKNVRFLGLDVHAETIAVAIAEPEGEVRSLGTIPNRAESIRKLIHKLGPVEQLKACYEAGPTGYVLYWQLAELGVACDVIAPTLVPMKAGDRVKTDRRDAERLARSFRSGDLTAVWVPDAASEALRDLVRAREAAKQDQLRARHRLSKFLLRSGQRPAAGVKAWTEIYMAWVRRLRFEQVAQESTRLDYLHEVEHMGERVRRLEQAIAEAVKLASPAMQQVIGGLQALRGVAQISAVTIVSELGAISRFASARQLMGYSGTVPSEDSSGQRTRRGSITKTGNAHLRRIAVEAAWSYRLRPGVGPALRKRQQGVPEEIKEIAWRAQNRLHKRYCRLAAAGKDQRKIITAVARELLGFIWAIGVKTEATVQQPMVA

SEQ ID NO: 507377 - protein, 368 aa, unidentified
MKQQTSATTETNIKGRNIIDFTGKTIHVGIDVHEKDFQVAKVLGDICLGNHRMAANGQGLIDHLRTHYPGAGFKCVYESCAWGFTLQRQLQQAGIDCIVVHAADVSSSDKEKKRKTDKVDALKLARNHAAHQLTGIHVPNEEIQKQRNLIRFRKKIVGDLNRSKNRLKSLLKYQGINIPEQLGKKNNWSYNFMNWIEEVAKKDVLLQDTLLLMLEEVKLLRQLLLKTERALRKLMQTSYNDKAKLLMTTPGVGRTTAMLFLLEIGDIQRFGPFDRLNDFVGFCPDTDSSGEIDRDTGITSRRHKQLRSALIEAAWEAIRIDPALLDMYQKLTKRMKGNHAIIRIARKLLRRMRAVLVSGIPYQKGVVV

SEQ ID NO: 507378 - protein, 466 aa, unidentified
MERKGGKGALAEAAGRRQRKGRGKRAGKAGFELAHPDCAGIDVGSGSHFVAVPADRENPSVREFGSFSDDLHRLADWLSACGVRTVVMESTGVYWIALYELLEGRGFAVYLVNARHVKNVSGRKSDVLDCQWIRDLMSFGLLRGAFRPSQEVCALRAVMRQRDMLLAGQARHVQHMQKALAQMNIQLANVISDVVGETGQRIVRAIVAGERDRSRLAALRGPRIHASQEEVGRALEGTWRAEHLFALKQALALFDTYAQMLMECDGELERMLERLARYDGDPGKPKRRGRQKNAPRFDVRVHLFRACGVDLTRIDGIDTTTALKVLSETGPDLSRFPTPKHFTSWLNLCPNTRITGGKRLKGRERNRCNRAGQALRQAAVGLSTSKSALGAYFRRMAGRLSKAVAVKAVAHKLARLVYAALTKGMVYVDRGMAAEEERYRVRAFKHLAKRAAALGYSLSPTLQAAK

SEQ ID NO: 507379 - protein, 416 aa, unidentified
MKIVRPICCGMDVHKNIIVATIGITNKKTRITEYIQETFSTLNPDLLNLKQWLINHKCFDACMESTGKYWIPIFNILEDEINIYLTHPKYVKAIKGKKTDKKDSKWICDLFKHDLIKFSFIPPKEIRALREISRYRYKLVGTRSSERNRYQNCMTVSNIGIGSVFSDPFGKSAQAIMKEVLESDIIEDEKILKCIHGSCKNKDKILDSIKHCNIETDQRFKMNESMTHMEELQVHIDNCEIEIMKRAAPMFDQFMHITQLPGISTLSAILIISEIGVDMKQFESDKQLTCWAGLAPANNESANKKKSVRISKAGQYLKPLLVQCALGAIKDKEGYFGIKYSRIKKRRGHKKAIIAIARMMLVSIYHMILTGETFNPSDYESFRNPKPPIKQQDLTEESAIEFLKKSGFDVSKLTKP

SEQ ID NO: 507380 - protein, 366 aa, unidentified
MEQITRTDAAGQVVRVGADLAKRVIQVHAVDAAGRVVCRRALPRDKFIAWCARLPKGCIVAMEISSGAHHWARRLSELGLAPKLMSAQLVEPYRSQGATGKNDANDAAAICEAASRPSMRFVPVKSVEQQSMLCVHRLREGVKAERTACINRIRGLLAEFGLAFAQGPEALRRVLADVLEDASHEMNTLGRLVIQRAAEQWRQLDEHLAWCDERIAAHLRDNAAVRAAAQLMGIGPVGASAAVATVDDFKQFKNGAQFGAWCGIVPRQHSSGGKNQLGRITRRGDSYLRTLLIQGAKSAVLTAHRRHDPISRWALALRERSGWQIAAVALANKNARILWAVMSKGERFDAHHVSVKPSEVPVAVAA

SEQ ID NO: 507381 - protein, 413 aa, unidentified
MENLNIVCGADIHKRFLVATILSRDSIRHVKRFAMTIDGLSEFRDWVMSKGCERVAVESTGRYWVPVYSILEGTIEVIVANAYKIKHIPGRKTDLNDSEWIAELCLNNMIEPSRIFPKESRDLKNLTRARESYVNELTREKNRIHQALESCSIKLSSVLSDIFGKVGCYILNGLLEGKDVDDLLENLPVNRLKKKADQIYDAIKGGLDSTQIFLIQGSLEHMKAIQKRIDVLDLEIRRRAASRRDDLAILMSFPGIGFTSAVTILAEIGNYRDFKAAERLASWCGLVPSVYQSADKLVTGCITKRGSRHIRWILVEVAHAIARTKNSELKRFFLRIRAKKGYNVAIVALARKVLCIIHHLLINREMYEDGVTRKGKSVVLDEIPSAQISLREMINCLVNAGYEVRKIKSGARE

SEQ ID NO: 507382 - protein, 361 aa, unidentified
MAKSTTIVAFDQHAATTVAAVLLPGQRTAALHSLTSDSSTILRFVQRLRATSVQCCYEAGPCGFELQRTLTAHDIRCDVIAPALIPRRAGDRVKTDRRDASQLAVLYRAGALTAIHIPSEQEEAARDLLRCREDIRADLLRARHRLSKFLLRHGRRFTGTKKAWTTRHAAWLHAQRWPIAALEQTHRAYMRAVDEALGRLHAVDTELRDLLTIEPLRARVERLRCFRGIDDLTALTIAAELGDARRFPSAPRVMAFTGLVPSEYSSGTKHARGRITKTGNAHLRRVLVESAWQYRHHPFLGRALRLRQRGAPAAVIEQAWRAQHRLHRRYRRLAARGKATQHIVTAVARELSGFLWAALTH

SEQ ID NO: 507383 - protein, 586 aa, unidentified
MLSHAPSVRHTPTEEPPRIATRIGVGIDTSRYGHYVAFLDADLQTAAPDLEVIESALGYAKLRRRLLDLAAKHGFVHFHIRLDAAGLYADNLIAFLGGLTLDHAEFTLSCGDTQRNKNYRVAVYGHQKSDPVEARACARYALTERPKPSAVVSPELLPLRQVAGRLQAVVRQRTRLVNQLHQLLARTFPELAVLVQDISTGWVLELLHRYPTARLLAQATAEDLHAVPYLPHDRVDNLRDRARDSVGSLAGTVADELVRDQVRQVRDIQARQKRLETLLISAYRHLPTANHLDTIKGFGEVTAAILTAFVITIDRFDTPGQLVNYFGVLPVEASSGIDRDGTPRGPKRYKMSPRGNDLVRRYLWMAALSAAKHNPACRALYARVRAKHSDKPSIAIGHVMRKLLHLTFAIWKSGKPFDPQHYPWEGPKESTNANGSREEAQAAGHTPDAPARPVVTAACPATVAETPAAVDESPAGVWLDFEHLKRQLPMARVLDHLGLTARLKGSGPQRRCACPIHRGDGRGRTFSVNLEANVYQCFDARCASQGDVIDLWAALHQLDLRTAALDLVNVFALEPSPPTGTEKRNG

SEQ ID NO: 507384 - protein, 349 aa, unidentified
MDRYIGLDAHASSCTVAVVGPSGRKLQSQVLETNARALIDFLNTIPKDRHLCLEEGTHANWLHEVLSPHVQEIVVAGVRQSRGPKSDKRDAFKLAEELRVGSLERRVYKGSRAFASLRASSQAYTSLVTDSVRIQNRVKSLYRSRGVAASGQKVYARATREEELQKLPGWLRPRASTLYQELDAVNEVKKGAAKAMFEEARKHKLYRVLKTCPGLGPIRTAQLLPIVATPFRFANKRSFWAYCGLAIVMRSSADWVRTRDGSWVKTTLQQTRGLNRNSNHTLKYIFKGAATTVIGRRRDEPLYRHYQKLLNGGTKPNLAKLTIARQVASIALSMWRSEEGYDPQKVRTS

SEQ ID NO: 507385 - protein, 450 aa, unidentified
MDKIKEKKQTKKAIQGLPVLKPYAAGADIGDTRHDIAINDGKGGHIVRTFKTFTADVEEAVNWLKEEGVTTVAMESTGVYYLTFYLMLEEAGIEPYLVNARHVKNVTGRKKDETDAMWIQRLHSCGLLQNSFQPDNDFRTLRTYVRQRKGLVTRSSDEVRRMQKAFELMNIKIHIVISDILGKTGMQIIKAIIDGNYDAIELSKLRDPRIKATPEEIIKSLQGIWKEEYLFTLEQAYNTYFFLQQQIKECEEKIQEQLFKQIGKSNQGDITLEQPIKKKGKPKKNQFDTPIGPSLKALTGVDLCKIPGIAEVSVLEFIAETGTDTKKWPGTKCFTAWLNLVPNTKITGGKIISSKMMKKKNRAGQTLRMATTSLASNKTPLGDYYRRMKSKYGGKGAALATAHKLARIIFKMLETKEEFSYDLLIESQKKYREIKIKQLEKQLERLKKVA

SEQ ID NO: 507386 - protein, 439 aa, unidentified
MQKKEIVFEQINANAAGIDIGSEKIFVSPDGRTVKNFSTYSSDYKYCINYLKQSGIERVAMEATGIYWISLYTMLEAEGIRVSLVNPKQTQQKRGDKTDVKDARRIQKLFAAGILKESFIPEGKILEIRLLVRERLDIIDMGSTYVQKMQRCLELMNIKLTSVISQIHGVSGIKMIEAIIAGQRDAQTLLLLCDERIQRKKGVEVLKALEGNYNDTWVFMLKQNFDMWKQHQQQVHLIDQRIALLLKNRVQDKPEVKGNVLDKEKPVRHHKPQIENLHATMVQLFGVNVSSISGINNYTLLRLIGETGVDMSRFPSLKQFVSWCGLSPGHHQSGKKSKWIKQAPCNKAGQIFKEAAQSLENSKYTAIGAFIRKLKMRRGAAIAYKAGARKIAEAFYNTLTKGVEYVEQGIKKYEQQLKSKELSLLQKLAKKHHLQVVAN

SEQ ID NO: 507387 - protein, 518 aa, unidentified
MESDVAINSLVAGSTEVPRDPVGESVSIFRRLSQASFVGQSNKPMKHKRAKSKTKSEATKPLHEPNPDAGGIDLSPTEIWVAVPPERAQNSVRKFEAFTKDLIELVQWLVQCGVRTVAMEATGVYWIPLYQLLEDAKIKVCLVNARHVKNVPGRKSDVRDCQWLQYLLSVGLLSGSFRPAQSVCAARSIWRYRQELISTAGQYVQHMQAALDQMNIKLHYVIDDLTGLTGQAIIEAILKGQRDPVALAKLRDKRIKASEATIAKALEGDWRKEHLFVLQRAWESYRQIQQQIQQCDQELVAYAGELEAATQVIQPAKTMRLRPELLGTEPDKVSIQKPPKVRKKTSKNQPEGPWKEELERFFGVDLTAIPGISVLSGLTLMTELGNDLRSFKTEHHFASWLCLCPDNETSASKVLRRRTRRSQNRVRQALRMAASSLHHDKSFLGQKYRRLRTRLGAPKAIVAMAHQLARIIWTLISRQLPFDPSVFAYQEKLNEQRRLKALKASARQMGYQLAPIAA

SEQ ID NO: 507388 - protein, 300 aa, unidentified
MIVIGTDTHKANHTCVAANSATGQLAGELPAAARKPGFGELLGWSRELDSERIWAIEDCRHVSGGFERFLVQAGERVVRAPPKLTGASRRGERTRDKSDPIDALSIARVALREGPETLPAAHLDQQAMEIKLLLGHRDGGRPASGLEREIAALVQAKAPELVALPGCGTLSAANILAETTGVKCISSDAKLARLAGVAPIPASGKRVRHRLDRGGNRQLNCALHRIAVTQGRAQGPARDFLAKKQAEGKSCIEAASLPQATPRPSGLARCSRCPRADSINSLSPTDDFPNLRPAAELALT

SEQ ID NO: 507389 - protein, 316 aa, unidentified
MYLGIDVSKLTIDCCLIVDGQNYQKKFQNNKGGFEQLINWLQSHKVNDKLHCVCEATGTYYEALAEYLYSRYTITVENPRKIKGYAIAELQRSKTDTQDAKLIAQYCQDRKHKLKAWKPPTKEQKQLQEIARYLDYLKQQRATEKAKQHEAPDYIKSHIQTTISNLTAQIQIVKKQLLQFYKDNPSYNNLRKRLKTITGIGEQATAVLLSTYKRHEFKNARQFTAYLGLDPRKFQSGTSVNGKSRISKIGSSEIRKSLYMPALVAYRCNAFPEFVGRLKNKGKHIKLILIAIMRKLAVIAFTIFQNGQDFQVERYK

SEQ ID NO: 507390 - protein, 377 aa, unidentified
MKNVRKNHRNVKKNTTIHTRLEQQLALVNPTAAGIDVGSEEMWVCVPEHQTVNNVRRFGAFTCDLQAIANWLTTCGVTSVAMESTGIYWIPLYQILEARGFTVCLVNARQLKNVSGRPKTDRLDCRWLQRLHTYGLLMASFRPPEEICQLRCILRHRDAVIRQSSKHVQHMQKALHQMNLLLDKVVTDITGVTGMTIIKHILDGERNPVSLATLRNPHCKSSEDAIAKALTGDYHNDHIFVLRQAYDGYHFAQRQVQECDKTAERWLHHTEKLLDVNDVSLPESTLTHRARQHHEPPEATRTYLFEIYGVDLTQVPGFQAATIQTLLAEVGRDMRKWPTAKHFTSWLGLCPNLKRSGGKDLNSHTRTVQSRAALALP

SEQ ID NO: 507391 - protein, 341 aa, unidentified
MQAITVGLDIAKSVFQVHGVDADGQVVIRRQLKRRYVLAFFEKLAPCVIGIEACASSHHWSRQLQALGHTVRLMPPAYVKPYVKRQKNDATDAEAICEAVGRANMRFVPTKTPEQQSGLVLHRTRHLFIRQQTSVINAIRAHCAEFGIVAPVGRRGVEELLRGIANEKRVPELARACLLALGAQLRRIKEQILEFDRMITAWHRGCETSRRLDEIPGVGPALATAVVASIADPRAFRSGRDFSAWIGLVPKQSSSGGKPNLGSISKQGDRYLRGLFTAGALAVIRYAKIRGTGHRPWLTALLARRPIKVAAIALANKIARMVWAMMARGERYREPVALVAY

SEQ ID NO: 507392 - protein, 349 aa, unidentified
MLIIGCDYHPSFQQIAFVETETGELSERRLVHREEAEQFYGELKEQNAKVRVGMEASGHSRWFESLLRDLRFELWIGNAAEIRTKRVRKQKTDRQDAQLLLRLLLEERFPRIWVPDSENRDLRQLLWHRHRLVQMRTRVMNQLHVVALNEGLQRKKALWRPAGRKELESFELAPWASRRRQDLLEILDQLTPKIQELSKALEDEVEKRPVTRRLMTHPGVGPLTALAYELVIGTPERFHCGKQIASYVGLVPTEESSGSRRRLGHISKQGNVLLRFLLVEAAQVTVRSQPEWRSKFFHLAMRRGRKIAKVAMARKLAVHLYWMWREGCDYSQWKKFGSHAGEPGNRDGV

SEQ ID NO: 507393 - protein, 402 aa, unidentified
MRDSFRKLPSSPRRRGPSDVRRYDTNGMVAPYSIRHQSATVEIVECPLTREEATAMKTTTIGIDLAKTVFQVHGVDERGKVVLKKQLKRVQVLPFFANLAPCLIGMEACASAHYWARKLSALGHTVKLMAPQYVKPYVKTNKHDVADAEAICEAVARPNMRFVAIKTAEQQALLAVHRARQSWVKARTAQANQIRGLLGEFGVILPQGIAHIAQRLPEILEDGDNELPGSFRQLLARLGENLAQLQRQVGALECEIQRWHSASAASQRVAAIPGIGALGASALVATVGQARSFSNGRQLAACLGLVPRQSSSGGKTTLLGMSKRGDSYLRTLLIHGARSVLHQVERHPERADPWLRQLLARRPKNVVAVALANKNTRIAWALLAHGRDYSARLRKQRDGALG

SEQ ID NO: 507394 - protein, 366 aa, unidentified
MGWMAPWRHRRAKMVVVKDHQQREPSMGDITTIGLDLAKNVFQVHAVDVAGSVVLRKRLRRGQVLAFFAELPPCLIGLEACATAHHWARELIALGHETRLMPPSYVKAYVKRNKHDVADAEAICEAVRRPSMRFVPLKTAEQQSALMMHRARDLLIRQRTMLVNALRGHLAEFGLVEAQGLHKVARLIAIVMDEMDARVPDIARQVLKVIVSQIEDIQTRIAGLETQVLAWHKSNPVSQRLATIPGIGPIIATAIAATVADPSTFRSGREFAAWLGLVPRQNSTGGKARLGGISKRGDSYLRRLLVNSAHTVLLCSKVAKTDPWLTSLLSRKPRLVVAVALANKTARMAWAIMSRPDLYRHAAVTA

SEQ ID NO: 507395 - protein, 402 aa, unidentified
MKVSGLDVHKDTIFCGIYDGKEYEKVEEYNTFSEGIRTMGYSLKEKGVKKIAMESTGIYWIPIWNILEEMGFELMLINPYLIKQMPGRKSDVKDAQWIAKLLHKGLLRGSLVPGKTIRQLRTYSRKYVKIDSMVTRVTQEMERTLEMCNIRITSLVSKNNSVSVQKVIEKIISGEDSVEELLSCIHSRILNSKGEQVVRQSLEGHIEEHHRFTLSLAYQQYKLYMDQLKQLEKKMEEICEEHYSREINILTGVTGIAKQAAMQIIAEVGGNVDAFENSGKLTGWTGLRPRNDESAGKYKSTATTKGNKYLRRIMVQCAWAASRTKGSYYKTKYQQLCVRKSRKKALIAIARKLLTVVWHVLKEDKPFNPELLPEYDPKKMIQKMKYHKREFEKIEKLGFSIT

SEQ ID NO: 507396 - protein, 343 aa, unidentified
MIAVGIDTHKESLAICAVDDLGRQLGELSVRNSPQGFRRLERFLAGLPSPRRVGIEGAGGLGAPVAHALDAAGEEVVEVPARLTARQRRRLRRLGKSDPADALAIARVVVSEQDLPAAIHGELTTDLKVLCNYRAQMLGERTRQSNRLHADLAALSPGYGAQLPAFDSAVRQRRAATLLAAQGGVRARLAERRLARILAITLEIDALEGQITALVGSCGTRLTAICGIGSLTAARLLAECGDARRFRSAAAFAMAAGVAPITASSGKVQRHRLNRGGNRQLNLALYTIAFVQSRCDTRAQDYLERKRADGKSWREAMRCLKRQLANVVYRQMVADLNEGRLTT

SEQ ID NO: 507397 - protein, 336 aa, unidentified
MHSLWYTGIDVSRSILDVALRDAGSRHARKAKFDNTADGHRKLIRWLTKRGHQVRVVLESTGIYSLDVSLALHEAKGVEVMVLNPQAARKFADAQMQRSSTDATMALALREFCARMEFRPWEPPAPGRRLLRDLSRRIAALTAEKTRELNRLHATDACEISSEEVRKDLTLHIKYLRQRIEALEQSALELIRKTPDLEQAHARLVSACGIADTSAIQLLGELLVLPPDMSARQWVAHCGLDVRIVDSGTSVHKTPRISKKGNAHVRRALYMPALVASQHQPNVRAFYEQLLDAGKTRMQAIVAVMRKLLHSIYGMLKTNTDFDGAKFRALPQTASA

SEQ ID NO: 507398 - protein, 334 aa, unidentified
MQNVALIGIDLGKHSFHIHCQDKSGNALLRKKFTRTKLMQFLVTCPSSVVVMEACAGAHFMARRISDIGHDVKLISPQFVRPFVKSNKNDFIDAEAICEAASRPSMRFVQPRTETQQAMRALHRVRESLIRDKVKTTNQIHGFLLEFGISLPTGDAVIKRLSLVLAEHEIPEYLSRLLMKLHAHYLYLIEQITELESELNQSIKADATAQRIMTIPGVGPITASLLSSQLGDGKQFSCSRDFAASTGLVPRQYSTGGKSTLPGISKRGDKNLRRLLVQCARSFMMRLEHQQGRLAEWVRKQLDNKHSNIVACALANKLARIAWAITVLQKEYQA

SEQ ID NO: 507399 - protein, 430 aa, unidentified
MKSNTQNAKIEAITEKTLVLGIDVGSETHYARAFDYRGIEYSKKPFKFSNTEAGFATFKEWILDLKERHEKDKVVPGMEPTGHYWFNLGKFLQDNEMKPVLVNPHHVKKSKELDDNNPTKNDRKDPKVIAGLVREGRYMIPYLPDGVYADLRTASNIRFQLQAELTRIQNRISRWFNIYFPEYKTVYGKPDAKSGILILKAAPLPEDILTLGIDGVNQIWRDAKLRAVGKARAKTLIEAAEHSVGSKEGAVSARMEIRMLLEDYESRSIRLQEVMTLIEGLVKQIPMAEKLLEIKGVGIRTVSGFLAEVGDISRFNNPKELQKLAGLALVENSSGKHKGETTISRRGRKRLRYLLFEVAMSLVSKNQEFRELHNYYTTRRLNPLKKMQSLMAIAAKLIRVFYAMLTKGVDYDPKKMVSDIKRPAVYLQAA

SEQ ID NO: 507400 - protein, 319 aa, unidentified
MEVLGIDVSKNQLHAALLAGDHALTKTVPNSKTGITQLQRWLENRKNPQVHACLEATGGWSEAVATALHESGHVVSLVNPTRVKALAQSEMLRIKTDRVDAGLIARFCRMHVPEPWSPPAPEIQELQALVRRHEALLRLRADEENRLDAPTLTLQVRKSISGTVAHFDRQITRIEAAIEDVFKRYPGLRQQRDLLVTIPGIGRTTAARIIGEMPNIVEFRGAKAVGAYAGLSPRHYESGNIRWPSRLSKSGNANLRKALYFPAVTAVRFNPVLKSLAERLRARGKSNMVIIAAAMGRLLVLAYGVLKSGQAFNPHFATA

SEQ ID NO: 507401 - protein, 371 aa, unidentified
MEYTRFVGLDIHKERISVTVAESGRSGAVEYLGEIANDPGAIGKLCDRLGRSGKPLAFCYEAGPCGYGVHRQLTKLGHRCDVVAPSLIPKKSGDRVKTNRRDATMLARLHRAGELTPVWVPDADHEAMRDLVRLRSVVRQIVTRARQHLQGFLLRHGRKHGLGTAWRMAYRRWLSTLAFEHPAQQIAFQDYVDAVTDGERRLQRVEEQISNLLPEWNLRPVVDALQAMRGIALINAVVLVAEVGDFTRFSNPRQLMAYFGLVPGERSSGETARRTGITKTGNSHVRRALVEGAWAYRMRARIGRHKVDRIEALPKAVRDIGWKAQLRLCARYRRLTARGKTANVVNVAIAREMVGFIWSIACTIQSPPKAA

SEQ ID NO: 507402 - protein, 326 aa, unidentified
MSNVQIYAGFDVSKKFFDICVLSIDGKSTSKQMEYDKQGLSRLTEWLPAGTHCVMEATGPYYLRLACWLHQQGFTVSVVNPLVIRRFSQMRLRRAKTDKTDAKLIAAYALMETPQSWEPPAQYLINLQQLDAASEQLQKQCTAWRNQLEAFTAGGLMDKSMKKFLTRMIIQAEKELLEIQSRIDKIIVDHHQQMLKNLISIPGLGKKSASVLILITGGFTRFSDYKKLSAYVGLSPRIFESGSSIRGKSRICKLGMSRIRAVLYVCAWSAKRCNLACRELYERLVAKGKSKKLALIAVANKLIKLAFAIAVKNIPYDENIAKNICF

SEQ ID NO: 507403 - protein, 400 aa, unidentified
MTKFYLGVDVGKYNHQAALINENGLVLTPAYKFANQSQAINELCQTIKKQLPDKQTAVKVGMEATGHYYWHLRDELLKQGFEVVVFNPIETQTKAKLKLRKVKNDRIDSLIIADLVREKDLKKQGETTSFNQPDERLKELRQLTRFTTRLKKQARFYKQGITVLLERICPEFESCFKNVFSKTALVVMREYFIKNISEKKLINLMAKTSRGRIKTEQAKEIIQALNNSLGLSYRNESAKLELSILLDDLGTKLSQIKQLEQRIKDMSENIKEIELIASIKGVSERMASVIYAEISNINRFEKKEQLTAFAGLDPAVKQSGTYLRKQGNHISKRGPKYLRQELYFAAKTAIIFDPELKAYYLKKKTEGKHYNCIMIAISRKILMRIWAVLKQKRPYELRTA

SEQ ID NO: 507404 - protein, 357 aa, unidentified
MEMFHQPGEATEMKVTTIGIDLAKNVIQVHGVDERGKAVLRKQLKRAQVAAFFANLPPCLIGMEACGSAHHWARKLQSFGHSVKLMAPQFVKPYVKTNKNDVADAEAICEAVSRPNMRFVPIKNAEQQAVLALHRARQGFVKARTAQANQIRGLLAEYGIVIPQGIAHIAKRLPEILEDGENELPGAFRQLLDRLGDHLKELDRQAGELEVQIQSWHRENEASRKLAQIPGIGPITASALVASIGDAKSFENARQLAAWLGLVPRQHSSGGKQVLLGISKRGDTYLRMLLIHGARAVIRVAEGKAGYADSWLARLMGRRNKNVAAVALANKNARTVWALLAHGRDYQADYEPERAAT

SEQ ID NO: 507405 - protein, 337 aa, unidentified
MNYSGIDLHSNNSVVSVIDETDRLIAEKRLPNDLARILAFLAPWQAGLAGVVVESTYNWYWLVDGLQAAGFVVHLANTTAIKKYDGLKHSGDETDARYLAHLLRLGILPTGTILPAKHREVRDLARKRMQLVRDRTSHILAIENITARQSGTRITSNQVKQLDLAAVDQMHLPDDVALAVCANVAVITTLSAQIAIVEKRLQEKVAPHADYTLLTTVPGIGQTLATVIVLETGTIERFASVGNFASYARCVDSQRMSNGKKKGEGNTRNGNPYLCWAFIEAANFALRFNADAKQFYERKKARTNPVLARKALAHKLARACFHMLKERKPFDATRCFA

SEQ ID NO: 507406 - protein, 365 aa, unidentified
MTETVYCGVDFHARMQTIAYCDSANGEIQLAQLDHRKDDVREFYSKLTGQVIVGLETGGYSSWFEAMLEELGHTVWIGHATEIRRRANWRQKNDRRDAELILEIMLKGDFPRIHRHSRESVEVLRMLRYRARLVKMRTMISNNLQAIAISSGLTERSRMLSRAGQQRLKNARMTPVTKHQSEDLISLLVPLNERIAKAERWLKEQASTDERVKLLMTHPGVGVLTALGLVHTLEPFNRFTRQRAVVAYVGLEPMERSSAERKRYIGISKAGSRLLRFLLGEAAHVAVRFDPELKQFHERVGKRRGKAKATVAVARKLLIRCWIMLRENVDYAEFRRRGVEARLARLGHRPTMPVVVIERPASSDR

SEQ ID NO: 507407 - protein, 472 aa, unidentified
MAHQQTGEAKRGEQRKKPRRRTPSLLERIRPDAAGIDCGERSHFVAVPVERDPEPVREFRTFTAELERLADWLIQCGIKTVAMESTGVYWIPLYEILEARGFEVVLVNARDVHNVPGRKSDVRDCEWLRELHSVGLLRSSFRPSADIVPLRSYLRQRETLVEETSARILRMQKALTQMNLMLHLVVTDITGATGLAIIGAILAGQRDPALLAAHRDYRCHASSAQVAAALTGNYRAEHLFALKQNFEAYQFLLKQIAECDAAIEALLTTLAAKQPQPQAALPTARRPRPSKNREPRFDIRTPLHRLTGGTDLSQIDSIGPHAALQLIAEIGTDMSRWKTEQHFTSWLALAPNNKISGGRLLSSKTAPSANRAAVVLRRCAMSLSRTSTALGAFYRRLAARLGKAKAITATARKLAVLVYRVLSGRLVYQDPGTIGYQLINRAREIKSLRKRARLLGLQLLDPATGEVLDPVS

SEQ ID NO: 507408 - protein, 365 aa, unidentified
MREYIAFDSHKRYSLVEREDVASGKIVQQVRLTHAPGAVRRYLARCTPGTAVALEATGNWYWIVEEIEQAGLQPRLVHPRKAKLMMGLINKTDKLDVHGLNRLQRNGTLPTVWIPPRPLRDLRELTRTRLVLVEQRTRLKNRLTATLAKYGVPPSEYSDAYGKSARAELEARIEPLPEQTRWVCKQLLAQIDFLVRQIRQLEQRLEDLVEVTPEMERLMTLPGIAEILAATIALEIGDIGRFPDAPHLASYAGTTPAGARQRRPRAVRPAASGREPLSEVGICGGRQLGGRQSPALSGAARQPTLMTVCASARDTTKPLEQWRAIWPRRPFTCCGAKRRTGIRFWKGVVPARCERDSVMSLWLAE

SEQ ID NO: 507409 - protein, 354 aa, unidentified
MGLKHQKEKRSMDYFGGLDVSVKDTSVCIVDDTGGIVREVKVASEPEALLAVLVSPLYRFKRIGLEAGPLSQWLFSALVEAGLPAICVETRHMRAVLKAQINKTDRNDARGMAQMMRVGLYRPVHVKTLRSQKLRMLLTHRKLLQSKAIAIENDLRATLRNFGLKVGVVGTVRFEARIRELVENHPDLTLLVEPLLVVRGVLREQLDILHRRLLAVVRDDNVCRRLMTVPGVGPVVALTYRATVDVPARFRKSKSVGAVFGLTCSSDQSGERDRPGAISRCGDEMMRAMLYEAAQSMLRSKKWSWLKAWAMKIARHRGMKRAIVALARRLAVIMHRIWVDGTEFRWTREAAAAA

SEQ ID NO: 507410 - protein, 410 aa, unidentified
MVKENFIYVGIDLHKETHTAVMIDCYNQKLGEITFPNRPADFPKLVTKVKKCNTDGKEVVYGLENAYGYGRALAVWLIDKGYLVKDVNTAISHRQAKHRGAMYRKSDSDDAEGIALATLNMLDKLPDACPNDAYWSLGQLVHRRDNIMKQRTRLVNQLHEQLCIAYPSYKQFFNDISRPTALYFWEHYPSRKYLKGKSVEDLRAELVPISHNKCSTKTCEKILDAVASDKVKNNAYQDARDMVTLSIVSDLQHYDSQLAEVDKMLEQMYKMLGCTLTTIPGVNVITAVKILAEIGDIKRFSNANKLAQFAGIAPLHLSASGKGKDVATKQGNRRLQATIYFLAIQMVQVSSKGTPRNSVVRAYYEKRKAEGKTSQQALICISRRLISIIYGMLKHGTEYRMPVVESAGEK

SEQ ID NO: 507411 - protein, 345 aa, unidentified
MESMYYIGLDVHKKTISYCVKDRSGQVLQEGKIGATRGELDGWMKTLPQPWSVAMEATIFTGWIYDHLLPHAAQVKVAHPLMLRAIAAAKKKNDRIDAGKIADGLRCDFLPECHMAPTEIRDRRRTLRFRHLLVRQMVQMKNRVSGLLMETGVSYNKQKLHKVGYFLELLSSNEEIHSNIRPLLKLSRDAIVRLQKTEYALVSSLQRDPLLADRIKRLRTVPGVGPITALTWALEMGEVSRFPSIKQAISYCGLCGDEKSSADKVIRTPLSKQRNKHIQRVLVEAAKLAPRENHELALVYETEKQKGNANRATLAVARKMVAYLLAVDRGKRDFVPAEDHRGVAA

SEQ ID NO: 507412 - protein, 494 aa, unidentified
MKAKAAKGKGKHSNSSKRGAKIAARHGAEGMEIVNPHAGGIDCGAEEHYVAVPPQSVEPGEPVVRCFSAFTEGLDALVEWLKACGVTTVAIESTGVYWIALCQKLEAAGIEVFLVNARHVRHVPGRKTDVKDCQWLQRLHSFGLLSASFRPEDIICRLRSLQRHRLNLVSTAGAEIQHMQKALQQMNLHLHHVVSDITGVSGLRIIDAILAGQRDANQLAKLRDHRVYKSTLAQMEAALVGDYRPEHLFVLGQSLQAYRFYQARTQECDAEIERVLQQLAERFESCSALGAQLPQPEVLNEAPSRNPQPAKRKVKRKPQANEPKIDLADYLRRICGVDLTQVIGLNVLSVLLIVSEIGVDMSKWRSAKAFCSWLGLCPRNKISGRKVLDTRTCKVINRVATTLRLAAQSVGRTNTALGIFYRRKTGHLGPAKATTATARKLACLVYHLLKYKEQYREPDPAAYQLKVHKTILAKIQKQAAALGYKLLPTALVPA

SEQ ID NO: 507413 - protein, 344 aa, unidentified
MKVTTVGIDLAKNVFQLHGVNEFGKAVIKKQIRRDQMAEFLVNLPACLIGMEACGSAHYWARKLQGFGHTVKLMAPQFVKPYVKTNKNDAADAEAICEAVSRPNMRFVPIKNIEQQAVLALHRVRQGFVKARTAQANQIRGLLSEFGLIVPQGIGYIASRVPELIEDASNELPGSFRLLVQRLLDHLKELDRQVDELESQIVKWHRQSDASSKLAQIPGIGPITASALVASLGDAKNFDGGRQVAAWLGLVPKQHSSGGKQNLLGISKRGDTYLRTLLIHGARSVIYRAQQKPESCSWINGVVNRRNKNVAAVALANKNARIVWALLAHDREFRFDYAAAKAAP

SEQ ID NO: 507414 - protein, 351 aa, unidentified
MVGDGRQVEVDEHEQIVERVAAIDVAKASGMVCTRVPHPTTAGKRLTRVWEVAATTNAIIALADQLAGQGIERVVVESTSDYWRGFVYLLEARGLSVWLVNARDVKQVPGRPKTDKLDAVWLAKLNERGMLRPSFIPPAEIRQLRDYTRLRSDLTQERARHVQRLEKLLEDALIKLSTVATDIMGASGRDMVEALIAGQRDPKVLAELARGRMRGKRAALVQALTGRFNDHHAELARMLLDQIDALGVQIDRLTSRIEELIGAIPAAQPPPEKASHTGEDTYQPSLPAVSRLDEVPGIGVKAAQVIIAEVGLDMGQFPTAAHLVSWARLSPRTIQSGAKQRADATGKGTPT

SEQ ID NO: 507415 - protein, 404 aa, unidentified
MDDRAEGFGGVDWAWHEHAACVVGTGGEVLDRFSVAHTAEGLDGMARRFAKAGVRRVAIERPDGPVVDALMEGGLEVVVVSSRSVKALRARYGAAGNKADASDAYVLADCLRTDGHRWASLRPDSPATVTLRSHVRARKDLVATRVTVANQLRAHLLVVFPGAVGLFRRLDSAVSLRFLRRFPSAARAAWLSERRLGSWLRANGYCGRKSPAELWARLEGAPRGALGDEGEGRGSVTLAFVSVLEAVCARIDELDARIAELLDAHPDAPIFRSLPRAGTVRAAGLLAEIGDCRARFPTPESLACLAGAAPSTRESGKHRAVTFRWACDKKLRDAVMDFAGDSMRGSDWAAERYRRLRAEGKRHPHAERVLARAWLHVIWRCWQDGVPYDPARHGAAQHLLANTA

SEQ ID NO: 507416 - protein, 352 aa, unidentified
MKAKLVGIDLAKSVFQVCVIALSGSVLFNKKFTRAKFLEWLKDLEPTTVAMEACATGHFWGRKLQAAGHMVRLIPAQHVKAFCRVHKNDSGDALAITEAVQRPKMHFVPVKTLGQQDLQLLGRVRSKLVSQRTELISQVRGLASEYGVTFPTSRAALMAGLPLALEDADNGLTQLARFALLNVLEDIRALDSRLAALTLQTAALAKQEPAYARLLTVPGFGPVVAPTFIAAVGDGKQFEHGRDVSAWLGMVPKQHGTGGKVQLMRISKNGDRDLRTLLIHGARAVLRWVDRRDDAMSRWLVSLRARRGEARTIVALANKLARIGWAVLRGDQDFDVNKAFRPKAVKQKTATA

SEQ ID NO: 507417 - protein, 325 aa, unidentified
MTYIGIDISKTTFVAAFPHGKGYRTETFPNEAKGIRRFILRLDPAIHHCVMEATGNYCFLLLYLLDKAGIQASLINPKKIKNYARVMMSVTKTDSKDACLIADFGERFKPEPYKFPSEQIMILKQKKTVMRQLRKQLTATKNLLSSLEPLPVKDKKCVHSLKQTVTFLEKQIKYMQQEMEAVVTDVFDRQLKLLTSIKGIGVTLATALIIATGGFTYFDNAKQLSRFIGICPTIEQSGTSINIRGHINRNGDETLRSMLYVAAWSASQHNEACRECYQRLRGKGKSGKVAMIAVANKLVRQAFAVVTSNKSYIDGFVSTKPDAAV

SEQ ID NO: 507418 - protein, 425 aa, unidentified
MSGKIIVGIDVSKAFSDICILSPNNDIIKRLKISNDINGMKSLIYVLEKVEDEYEDRAVIIMEATAHYHQILANFFRKHNYEVIVINPIQSGALKNINIRKIKSDKTDAYNIALLYRIKNYNETITHSDTVNSIKKLCRQHKELTDEIVEHINRLIAFLDISFPDFKKVFTDLQGKTPLSLLEKYPTIQEVLSPENKQDIIQLIKENSHKSNSYAEAKYEKLVKAAEKSIEVCIVSLSSAVLIQTTVRVIFSLQEALKAIDDEIKRLSLLDEKFHKEIVLLQSIPGVGEYTACVVLSELGDISNFSKPKELVAFFGLDPGVSQSGTYNRKNNKISKRGSPHVRSILHMLAKSNVYPNRNREYLNPVMRAYFEKKIAEKPYKVVMCAIMRKMVQIIFAVLRNQKSFELRTPEEHQKLIREKSKLVA

SEQ ID NO: 507419 - protein, 343 aa, unidentified
MQTITTVGLDIAKSVFQVHGVDVQGEVLIRRQLKRRYVLAFFQKLPPCLVGIEACASSHHWSRELKTLGHTVRLMPPAYVKPYVKRQKNDAADAEAICEAVTRANMRFVETKTPEQQSGLVLHRTRHLFIRQQTAVINAIRSHLGEFGIVAPVGRNGVEDLLDVVADPSDKRVPEIARACLAALGAQLHRLKEQILEFDCMIRAWHRSSEMSLRLDDCPGVGPVLATALAATVADPKAFRSARNFSAWIGLVPKQHSSGGKNRLGSISKQGDRYLRSLFVAGALAVIRYAKIHGTKHRPWLTALLARRPTKIAAIALANKIARMAWAMMARSERYKEPVALAA

SEQ ID NO: 507420 - protein, 378 aa, unidentified
MRFYNRVHKFYCGVDLHARTMYLCILDHGGAVVLHREVPAEPGAFLEAIAPFREGLVVACECLFCWYWLADLCQAENIAFVLGHALYMKAIHGGKAADDKIDSSKIAHLLRGGNLPFAYAYPKGLRETRDLLRRRMYLVHKRAEVVAHVVNANSQYNLPPFGKKLIYARNRQVLKIAQRFADASVRKNIELDLALLDSLDELIGDVELYLDRTVKVDDADSFYRLRSIPGVGKILALVLFYEIHDIGRFASEGEFLSYARLVRPLKTSAGKVKGGGGAKIGNAHLKWAFSEAACLLARESGQAKRFLARKEKQHGKPKALGILAARLGRAVYHMLRQKRAFDAKRFWNGEPKVPPTPKGKSVMTPGRRRKGARCVLEA

SEQ ID NO: 507421 - protein, 342 aa, unidentified
MRIIGVDLHTRQQTIAMLDTETGEVTEKTLKHEGDTVRKFYEALPGPVQVGIEATGSMHWFLELMEELGIACRVGHPAEIRKAETRKQKHDRRDAALQLKLQVENRFPSIWMPSTELRDLRTLLRHRHQWVRMRTRVQNALQALAVSRGLRRGKTLWSQAGQQAIESLPLPPQAAYRRTELQGLYRLLHEQIEELDQRVREQAVQRPGAQRLLTHPGVGPVTALATDVFLGDPARFADGKALASYVGMIPGEYSSAGKQRFGKLSHYTRRMLVQTWVREENNETIDMDGSDLFGRADGCSLASPGAESSLDKVAGDPRRLLKILGRHWRSNARREVQLPSYS

SEQ ID NO: 507422 - protein, 355 aa, unidentified
MSQKLDTSPAVIGIDIGKNSFHIVGQNQRGAIVLRQKWSRGQVEARLANLPPCRIGMEACVGAHHLSRTLKLGHDARLMPAKYVRPYSKGQKNDYRDAEAIAEAVQRPTMKFVATKTADQLDLQALHRVRERFVGQRTGIINQIRAFMLERGIAVRQGLRFLRAELPGILATRSDALSPRMLRILEDLSADWRRLDARIEGLSSEIEALARQDKGCERLMTVPGIGPIISSAMVAAIGTGDAFSKGRDFGAWLGLVPKQLSTGDRTILGSISKRGNRYLRSLFVQAAWVVLVKVGPKHWDRYGLKSWIEAARKRLHHNVLAIALANKLARIAWAVLHKGRAFECVKTEETASRPA

SEQ ID NO: 507423 - protein, 431 aa, unidentified
MKNRTNQRLEEITAGTLIVGVDIAKSVHWARFVDYRGVEIGKAMSFKNNRQGYESIVTRINAVRNMKILRNPIEAVLIGMEPTGHYWKPLANYLMKTDCRVVGVNPYHTKRAKELDDNSPTKNDKKDAITIARLVKDGRFFDPYLPQEVYGELRGLTNARVSVMKRNSAVKNTITAILDEYFPEIWTVFKNPLKGKASRQILRSCPFPSFILSNGESGVLAEIKKAVKKTVGMKAVRKLMSAAADSIGVQYGLDAAKMRLGWLLDELELVEKQLCEVEQAMETTLHKTGYAAQILGIKGIGIVTAASFLGEVGDPLRFQNARQIANYAGYNLTEDSSGKSKSGTCISKRGRKQLRSILYQMAFTMVGGNDEMKSLYRHLTGRKANPLKKKQALVVISKKIITVIYSLLKKQETYKPDLVLGTVRKELMLAA

SEQ ID NO: 507424 - protein, 337 aa, unidentified
MEYFAGLDVSMEETHICVVDRDGAIVFETQAISSAAAIAEALGAAPTCRRVVFETGRMAPMLFHGLAELKVPVICIESRQAYQALKTLTTHKTDRNDARGLAQLARTGFYKAVHVKSLPAHAVRALIVARKKLVGQRVTLENQIRGLAMVFGVRLPRGLSPAFVDQVVQMSASIPGLSGAMRGLVAARAAVLEAVSAIDADVKRLVRVSDACQRLMTIPGVGQLTALAFAAAVDDPSRFRRSRDLGAYLGLVPRRYQSGEIDYVGSISKVGDKRVRTLLYEAANVMLTRYKGELKLKDWALAIARRSTMRKARIALARRLAIIMHAMLRHGTEFRPA

SEQ ID NO: 507425 - protein, 387 aa, unidentified
MTVQSQVSTFIPRDYEIFGGLDVDKRSMAVTFADHGRLLQSLHLPYSSEHLLHYVRKHFPRQRLAFVYEAGPTGFGLYDDLVAEGYPCLVVAPSMVPRAPGQRVKTNRLDSKKLSEGLRGGQLRSIHVPAPSYRELRHLVQLRDTQVRQLTATKCRIKSLLLYEGIPFPEAPASGQWSARVLQELEALPCSGAVRFKLDHLIGTLYFHFNSAVIVQKQIRRFCQKDPELRQAITLLMSLPGIGWIVAAHSVARLGDWRLITNVRQIAGFLGLVSSEHSTGEKENRGAITRSGDSRLRNKLIQSAWVAIGKDPELRAFYRRIYARHPKKVAARKAIVAVARKLTTRMYAVLKQQRPFVIRPESSTAPLTAEETACPRGRLDSAQSDQP

SEQ ID NO: 507426 - protein, 348 aa, unidentified
MMLIGCDFHPSWQQVCWLDQETGETSEQKLVHAPGEAEKFYKQIAAPARIGMEATGNCQWFVEMATAAGHEVWIGDAAKIRASDVRQQKHDRRDAALLLQLLLEGRFPRIWTPSTEQRDLRQLLIHRNKLVRLRAQAKNELQHLAMNRGLQKKNRLWSEAGRKLLCELPLMHWASRRREDLFKVMALLDTQILSLDLAVKAAAENDPNAQLLMSQPGIGPVTSLAYVLTMGDVSRFARGKQVASYLGLIPREYSSGGHQRLGPISKQGNRFLRMLLVEAAQVAVRCDPKFRSEYLHRCHQKPKGVAKVAAARKLAIRLYWMLRTQKRYPEIVSIESSSRVPLVVRHGG

SEQ ID NO: 507427 - protein, 376 aa, unidentified
MERGSLMLNTTTFVGLDVHARSIKAVALDAMTGEVRSATFGYDAAEVAGWVSSVDPSAKCVYESGVTGFDLQKRLSSMGIDCVVGAVSKMIKPSADRRRKNDRNDAEFLARMLSVGNVVEVCVPDDECEAARDLTRALDDAREDLKRCKQRLSKFLLRHGLVFSETNAKGQRKKNWTAAHWAWIRSISFPDKADDEVLAYYIDAVRQAMENKKRLEKLVEAEASKPRWKKRVDSLRCLKGVDAMTAADIVFEAGEFSRFKSARSFAAWIGLTPSEHSSGESARQGGITKAGNKHLRRVLVEAAWHYISASPHPKDLAKGQAPDPAARRHAAKGIRRLVKRREEMLGRGVHKNKANVATARELACWCWAIGRMVENG

SEQ ID NO: 507428 - protein, 356 aa, unidentified
MISSTKYIGMDVHTQSISIAVRNSVGKVLMDCVIETKASTILQFIDGLRGDVRVTFEEGTWAAWLYDLLKPHVTQVVVCNPRKNALLKEGSKSDKNDARKLAELLRLNHLQPVYHGENGIRTLKELSRSYLTINKDLTRVMNRLKALYRGWGIACPGNDVYAPRHRAEWLDKIREAGVRRRAEHYYQQLDVLRLLRQEVRRDLLVESKKHRGWKLLRQISGIGPIRAALLIALMQTPHRFRTKRQLWNYSGLGLETHDSAQYRVVKGQLERSNKPVTLRGLNKDYNHDLKGIFKGAALRASIAAGPLHGFYEALLAKGRKPTMARLTLARKIAAITLIIWKKEVRFDANHLKQQAA

SEQ ID NO: 507429 - protein, 322 aa, unidentified
MQGKMTSVRAGLAVYAGIDVCKAWLDVYLHPIGRSFRVPNSKEGCARLALELTSAAAGLVVMEATGKLHRLAHRELSAAGFAVAIVNPYRSRKLADALGQLAKTDKIDARVLAFYGAAIGPEVTPVPAKSLAELQELVLARQAAKAQETALKNQAAAAASPVLKRLLKAQLKAQARLIAGLEAAIAALLARDAGLGRRCELLASIKGIGPVVAATLAACLPELGMLGGGQIAALAGVAPMNCDSGEMRGQRRIKGGRAHVRSALYMAAVAASRCNPDLKAFYGRLRNAGKAAKLALTAVMRKLVLLANTLIREDRYWTPKHA

SEQ ID NO: 507430 - protein, 351 aa, unidentified
MSRKTEAVVARTIGIDTGKNTLHLIGLDDKGAIVLREKLSRGRIAARLANVPQCLIGIEAGMATHCVARELIALGHDVKQVPPVYARPFRQGHKNDFRDAHAIAEAVQRPSTRCVPVKTDDQLDLQALHRVRSRLISERTAVINQIRGFLLEHGIPVRQGLRFLRQQLPDILAKRIDVLSSRIIRIIEDLSGDWRRLDERIEHVTEEIEELAHGTEGCRQLMTVPGIGPIIASAMVAAIGSGTAFARGRDFAAWLGLVPKQMSTGDRTILGRISKRGNRYLRTLFMQGARVILLRPANWAKHSFGPWLAAAAKRLHHNVLATAVANKLARIAWTVLAQRRNYESRVIVDAA

SEQ ID NO: 507431 - protein, 358 aa, unidentified
MYKFMKKFFIGVDVSKDTVDVSFFDDDRMKSPEYLAQYSNSPKGFREMVKDLRMCCHGVSSGQWLFCCETTGRYDHPLCHWLVDHGMVVWRESALQIKWSSGIQRGKNDRVDSLRIAEYAWRHQDKMQKFVKPSESLSNLKAAFTHRRRLVEKRTATRCQLKSMSSEKGLSASLARMIVRDLSREIERLSASIATMDESIQKIIRSDSELDRNYRHIISVKGVGPITAVVLIVCSGNFKAITSAKKMACYCGVASFRSQSGTSINRKASVSNLSNRQIKSLLSMAARSASRSNPVFAEYFNRTLSRGKPVALVYNNLRNKIITVVYKLIERDCDFDVDYKRMHSTGQRANEPAIRETV

SEQ ID NO: 507432 - protein, 405 aa, unidentified
MIYVGIDVAKRSHVASAVDDGGGAVIESFKFANTRDGFAGLLERLSEASATPDGCLVGMEATGHYWVALFDFLTAHGYDAAVINPIQTDAFRDVWAVRKVKTDAVDAAMIADLVRYKRFGPSALGEEATEELRNLARYRMSLVERSTMLKNRATAILDRTFPELAGLFSGSYGPAHRALLERCATPEQALSTDVRTIARILSEASRGQLGREKAEQVKAAARKSVGVGFGSGALAFEVRLVMEELGFVRGRIDEVDAELARILNETAGRWLLTIPGVGVALASVIAGEIGDPNAFADPHKLMAFAGMDPTKNESGDTVRSDGHMSKRGPAALRWAFMRAADCARKHDPYFGDYYAKKRAAGKHHYVALSGVARKLMGVSLAVMKEKRPYEPAPPKSHRPGHLLEP

SEQ ID NO: 507433 - protein, 343 aa, unidentified
MGDVITIGVDLAKSVFQVHGVDAEGTVVVRRQLRRRQVLSFFEKLPPCLVGMEACATAHHWGREIQRLGHHVRLMPPRYVKAYGKIQKNDAADAEAICEAVTRPTMRFVELKTCEQQSVLMLHRTRQLFVRQRTTLINAIRAHLAEFGIVAQIGRNGVERLLQTIGDTEDDRVPEVARTCLEALAMQLHLANRQILEADRRVLAWHRSNETCRRLDHIPGIGPLIATALVASVPNPQAFKSGRDLAAWIGLVPKQNSSGGKERLGSISKHGNRYLRTLLMVGALAVIRYAETHGTAHRPWLARLLERRPAKVAAVALANKIARMAWAIMARGEAYREPKVQTA

SEQ ID NO: 507434 - protein, 342 aa, unidentified
MDYFAGLDVSVKETSVCIVDNAGRLVREVKVASEPEALLQVLTPGQPFKRIGLEAGPLSQWLFSALAEAGLPVICVETRHMRAVLKAQINKTDRNDARGMAQMMRVGLYRPVHVKTLRSQKLRMLLTHRKLLQSKAIAIENDLRATLRNFGLKVGMVGPVKFEARLKELVEDLPDLAALVEPLLIVRRVLREQIGILHRRLLFIVRGDDVCRRLMTVPGVGPVVALTYRATVDVPARFRNSKAVGAVFGLTPSKYQSGEVNRTGAISRCGDEMMRMMLYEAAQILLVRSTKWSWLKAWAMKIARHRGLKKAIVALARRLAVIMHRIWVDGTEFRWTREATPA

SEQ ID NO: 507435 - protein, 368 aa, unidentified
MGQKSSKLYVGMDVHKESIDVAVAEEGGEIRHHGQIGGDMNALWRVVRKLESLGRELVFVYEAGPCGFGVYRGLIARGHACWVVAPSNTPRRVRDRIKTDRRDSLKLASLARAGELTPIYVPDVRDEAMRDLVRTREDAVVMQRQARQRLAALLLRNDVRYAGKTAWTAAHRRWIAELKLPQPAQRLAFEEYVQAVEEASARVQRLGQCIEQELATWRWRSVVAALQACRGIQLIHAVRIVAELGDLSRFSHPRQLMSYLGLIPSEDSSGERRRQGAITKAGNTSARRALVEAAWAYQHTAKVSGPIARRQAKVPKVALDIAWKAQVRLCARFRRLAARRLNRNKIVVAIARELAGFVWAIGQRVKPV

SEQ ID NO: 507436 - protein, 342 aa, unidentified
MYYIGLDVHKKTISYCIKDASGQVHQEGKVGATRWELDAWLKTLPQPRTIAMEATIFTGWIYDHLLPHATQVKVAHPLMLRAIAAAKKKNDRIDAGKIADCLRCDFLPECHMASTQIRDRRRTLRYRHLLVRQMVQMKNRISGLLMETGVSHNKKRLHKVGYFRELVSANEEVQESIRPLLRLSRDTIVRMQKAEYALVSSLQRDPLLVERIKRLRTVPGVGPITALTWALEMGDVSRFRSIRQAISYCGLCGDEKSSAEKVIRTPLSKQRNKHIQRVLVEAAKLAPREDHSLALVYEKEKQKGNANRATLAVARKMVAYLLAVDRGERDFVPIDLSRSAAV

SEQ ID NO: 507437 - protein, 350 aa, unidentified
MNVNHYIGFDVHKKSISYCVKTADGQIVEEGKLRATHDALREWAGKRPEPWHGAMEATLFSGWIHDVLKPFAAELQMGHPAMMKAIGASKKKNDKLDARKIADLVRCNLLPACYVAPAEIRELRQMLRYRSLVVAQSVRMKNKMGGLLMEAGAEYNKQRLHGKQYFTELLDTLEEVPESVKDLLRLSRGAMEMFETMQQQLVARLEKNPLLAKRVKLLNSIRSVGPVTALTWILEVGNPHRFSSIAKAVSYCGLTSALDSSADKQQRGPISKQRNAHLQTVLIEAAKLAPRWNPQLAAVHAREVEQGNRNRATLAVARKLVAYLLAVDKSGQPFQPRTPSAAETEVEKVA

SEQ ID NO: 507438 - protein, 326 aa, unidentified
MSPTHVAFNHIVAFEVAKETLVIHVLPGDGQHTIANKPKAIRKLLMRELRRNALADLGSLLVVCEATGGYESHVLEICVELGLAAHKAHGARVRHFAKYLGLLAKTDPIDARVLALYGLKTQGLRLYVPLTPVVMALKDLKTRRDQVQQMLIAETNRLEHAHHASVTRSLKVHIASLRKALATLEADIAAHLKVNDELARKARLMRSVKGVGPMTAATLLAYMPELGTFRKGEVTCLAGLAPIANDSGKSQAPRHIAAGRSNIRTALYMAALVALRHNAVMRRFAASLRQSGKPFKVVITAVMRKLIVTLNAILRSGEPWSHAKQA

SEQ ID NO: 507439 - protein, 313 aa, unidentified
MTAIICGVDVCAAWLDASVRGIVDGYRRFENSAAGIAELAAFCRDHGVGLVAMEATGGHERLAFGLLWNEGIPSAIVNPRSVRQFAQAMGLLEKTDKIDAAAIAWYSEAKRIVPRPPATAGQQTLAAAVTRLRQLVDLRTMQSNQRRLVRDPDASRSFDELLALVGRQIRELESRIVALIGSDPLWGQLDKSFRSIKGVAGRTVARVLAEMPEIGTLSGKAVAKLAGLAPLANDSGKRTGKRSVRGGRSGVRSILFLVAAVVAKHEPDFAAFHRKLTNAGKPKKAIRIAIARKLLVRLNAKARDLRAQIIQTA

SEQ ID NO: 507440 - protein, 393 aa, unidentified
MALFVGIDISKDKFDACGIGGGGEKVFSLTASMDREGFEKLVFHLEGSRSLLLGLESTASYHIALFSYLTAKGYRVVIINPLLIANFAKLSLRKTKTDKKAALTIAQFLMLRREVLEHQRVSADLIELRDLARRRERLTDQVTKLKGNMKRILSVTFPELEHLTGVFAKSILQLLIRFPSADALRKADVDTVAALVVPRSWGRKSRAWVDTLMTTAAASIGVSSPAKELVLKQDASLLLCVQEQMKETTKVLTALCTDRMKKDVEILDSIKGIGEATALNFLIEMGGDVTLYENDKKLIAASGLDPSTYQSGKYEGSSKISKRGNRHLRRVIWLMTRGVVFSNDLFRTYFYKRRSEGLCYKMAMLATAHKLIRVMFAMLAHQTCFEQGGGEAS

SEQ ID NO: 507441 - protein, 360 aa, unidentified
MFTERTSVGLDVHARSVAAAAIDGVTGELFQTRLTPAHEHIRGWIQELPGPVAVTYEAGPTGFGLYRSLTAAGIRCEVAAPSKLQRPSGDRVKTDARDAMHLARLLRLDEVTAVAVPSIAQETARDLVRAREDCRADLMRARNRLSKLLLRQGIVYYDGKAWTGKHDAWLRRQHFEVPATRLTFESDYEAVLTTVARRDRLDAAIAAMAADSEFTPVVRRLSCLRGVSTLTAFGLAVEIGDWTRFTGNTIGSFVGLVPSEHSSGSSRSQGPITKTGNTHARRLLVEAAWHHRTRYRPGKTLRDRWELASPAARVRGDLGNRRLHARWVRFIDRKKKPTIANVAIARELAGWCWSLAVLEE

SEQ ID NO: 507442 - protein, 368 aa, unidentified
MSNGTATMSAPAIESSTMTILALDLGKFKSVACRYDPVTGEHAFETIATTPPAVHDLLIEASPAVLVIEACSASGWISDLAESLGIAVRVANTLGEAWKWKRVKRKTDRDDALKLAKLAASDQLPQVHVPALSVRQHRSLIKHRHALIDRRTGVKNTIRSLLDAQGLSMPMRSRGWTIESINELKQLSRPLSECDARTLWRGQLDLELRLLEAVSTLIKEADKKLDAIASQDDRVKRLKTIPQVGSRLAELVVTTLDNAKRFKTARQVSAYAGLVPKQYQSGQMNRLGRITGQGPGLLRRVLVQVAWGLQRREETRGHAVFERLCHGQRTRRKQAAVALARKILIWCWAILRDESVWDDTRDRRLTVT

SEQ ID NO: 507443 - protein, 482 aa, unidentified
MAKRKMSTFERLQHGKMNRKQRRELDRQLNSEDPSLAVVHPNAAGIDIGNESHFVSIPPDRDAVTIREFGSWTADLHEMANWLKEHGIETVAMQSTGVYWIAVQEVLEQAGLEVYLVNARGTKNLPGRKSDVQECAWLRKLHAYGLLRNSFRPPEEIRAVRTIWRQRDRWVKECGRAVQQMQKALTTMNVQLANTISDISGVTGQAILRAIVVGKRDPWELAKLRDRRIAASEQEIAHSLQGNWREDVLFELRQVLEAYDFYQKQMAACDQELTKYMAAVASREITEKSDLPKDASVPPLSKTARRPQHRRKNQPSFDLATELQRTMGVDLTRIDGIDVMTAQVIFAEIGPDFSAFPDENHFASWLTLAPKHDISGGKVLRRIPAAGRNRVANALRMAAESLCRSNSYLGARYRRLRIRLDGPLAVKAMARYLACLVYRMVTKGQAYVDRGAHYYESKRQEKERLALQRRAATLGLKLVPAT

SEQ ID NO: 507444 - protein, 353 aa, unidentified
MEEKYVGLDVHQSMTVGAVHDGGGRSVMETVVKTEANAVGDFLRGLSGRIHVTFEEGTHAAWLYEVIRPLVAEVIVCDPRRNKLIEDGNKGDKIDAHKLAELLRGGHVKSVYHGASAMRTLKELVHNYDALVDDTTRVMNRIKAVYRGRGISSSGRDVYRKLNRESWLKRLPEGGLRQRTEFLYQELDTLSQIRQDAKRVMLIEARRHAPYRLVKTIPGLGPIRVAQILAAIGLPERFRTKRQLWTYCGFAVVTRSSADYELVGGKVQRRKTRTVTRGLNWNFNRRMKEVFKAAAVTGMQREPFQSYYAGLITKGMREELARVTLARKIVAITLKVWKKGEAFDAAKLKPATT

SEQ ID NO: 507445 - protein, 404 aa, unidentified
MYNAVGIDVSKGKSTVAVLQPGGTVIRKPFDVSHTSQSLNELTDYLDTLEGDTKIVMECTGRYHEPVLKALSEAGLFVTVVNPHLIKNFGNNSLRKVKSDPADARKIARYTLDNWAELRQYSGMDNTRTQLKTLNSQFSFFMKQKVAAKANLIALLDNTYPSVNKLFDSPAREDGSEKWVDYAYSFWHADCVRGIGLKAFTDRYQAFCKKHHYNFQPDKPQKLFAASKELVAVFPKEKTYKLLIQQSIQQLNLASAHVERLRREMNELASTLPEYSTVMGIYGVGKTYGPQLIAEIGDVSRFTHREALTAFAGVDPGVDESGQHKSKSNRASKVGSARLRKTLFQIMTTLLQNAPADDPVYRFLDKKRSQGKPYYVYMTAGANKFLRIYYGKVKECLHNLEQES

SEQ ID NO: 507446 - protein, 412 aa, unidentified
MQVLYARCSGLDVHKNSVVACVMITGTDGQVQQQTKKFGTFTPDLLALSDWLTSQQVTHVAMESTGVYWKPVYNLLEGLFQLLVVNAHHIKAVPGRKTDVNDAEWIADLLRHGLVRGSFIPPARQRQLRELTRHRSNLVQRRAQAVNELQKCLEGTNIKLASVVTDITGVSATEMLSHLLGGQTEPEMLAELARGRMKAKKPLLQKALQGKVHLHHQLILTQLLAEIGYAEEQISEVSTEIAARLKEQEEFLQRLDEIPGVNRRAAEVLAAEVGQDMKPFPTDKHLTSWAGLCPGNNESAGKRRSTRTRPGNRHVKAVLIEAANAASHKKNCYLRAKYHRLAGRKGRKRALVAVARTILQSAYYMALRGTHYQDLGENYYEMRNPLRLASRLAKRIEKLGFKVSLEPVPMAA

SEQ ID NO: 507447 - protein, 429 aa, unidentified
MTPSIKTPITSEPDFAAFVGIDWADQKHAFCLQAAGQKAKESGELEQKPELIGPWVAKLRERFDGRPVAVAVEQSRGALIHALFSYDFLVIYPLHPKTAAKFREAFKSSGCKDDPLDTEQILEILTKHRDLLRPLNPDTPETRLLSRLVEDRRKLVNLRSSHMEALSASLKEYFPQALELVSNNLKSRLAHDLILKWPSFQALQKAKPSQIKTFYYGHNVRSPELIQKVLQIAKSPHALTADAAIVESGSRLSQAYARSIQTLNAEINKYDQRIEQVFQAHPEAKLYTDLPGAGPVMAPRLCAFFGTDRSRYETARNVNSFTGVAPVTKKSGKSRVVYFRVACPKFDRQTFHEFARLSLPECQWARNYVEYYTKKGKKFHTIIRALAYKWVRILFKCWQTRAPYNETAYMETLKKRGSIFATLHLEENS

SEQ ID NO: 507448 - protein, 343 aa, unidentified
MNEITAVGLDLAKRVFQVHAADREGRAVSRKRLRRSHVLSFFAKLPACLIGLEACAGSHFWARELQALGHEVRLIPPQYVKPYVKTNKNDATDAEAICEALIRPTMRFTAVKSVEQQSVLMLHRTRELLVRQRTMLINALRGHCAEFGIVAAQGRSRARELIELVEDPADDRLPSIARQALQCLTSQVGSIQIQIASIEKKLLAWHYSCEASRRLAEIPGVGLITATAVVASAGNATQFRSARQFAAWLGLVPQQRSSGGRERLGRISKRGDGYIRRLLVHGARARLAWSRRKKEVRSAWLTGLLARRPTNVVLLAMANKTARVAWAILSRGERFENRNGAAA

SEQ ID NO: 507449 - protein, 325 aa, unidentified
MRQPESAVKPKTQVALDVSSQMLDVHVWVDKKAFSIPNTDEGFEQLSDVLFAYDVTMILMESTGGYEDNAACYLQLQGYDVVVINPRHARRFAQSMGKLAKTDRIDAAVLAHMAFMIDSGPERDRYIKPVTDEQRKQLSRMSSRRRQIVDLITTEKQRLTHSDAYTRASINVIVSLLRTELKRIESDITRYVKKNFSELATRLLAIPGVGMQAVTVLIADLAELGYVNRRRISALLGVAPFNHDSGKFKGQRRIRDGRQSVRNVLYMGTISATRFNPVIKTFYDRLIGRGKPKKVALIACMHKLVNIINAMMRTGKPFDMTLHGV

SEQ ID NO: 507450 - protein, 343 aa, unidentified
MDYFAGLDVSVKDTSVCIVDGTGKIVREVKVASEPEALLTVLRDSAYRFKRIGLEAGPLSQWLFSALAEADLPVICVETRHMRAVLKAQINKTDRNDARGIAQMMRVGLYRPVHVKTLRSQKLRMLLTHRKLLQAKAIAVENDLRATLRNFGLKVGAVGTVKFEARVKELVDNFPDLLALVEPLLVVRRVLREQISILHRRVLAAVRNDEVCRRLMTVPGVGPVVALTYRATVDVPARFRKSKSVGAVFGLTPARDQSGESDRPGAISRCGDEMMRTTLYEAAQVMLLRSAKWSWLKAWAMKIARHRGMKKAIVALARRLAVIMHRIWIDGTEFRWTREAAAA

SEQ ID NO: 507451 - protein, 359 aa, unidentified
MVYIGVDLHRKVSQVAAVQANGELLWNRRIRSRPEEFAEIVGDLPASPAGVAFEATYGWGWFADLLADLGLAAHMSHPKGTKAISSARVKNDAVDAETLAQLLRTNLLPEAWIAPPVCREARRLVRTRAALVRLRSRFKCQLLALLAEHGVQLPEVADPFGKEGRRFIQSVALAEESQFCVTSNLRVIDLLTTEVRQLDRELVTFFKADPRIRRLRAIPGIGFYTAAVVLAEVWDVQRFPRPERLCSWAGLTPTERSSAGHIRRGHISKQGSRLLRWALVEVATAAPRHEAHRRYFMQVLHNDRRRAKIARLALARRLLTLCYYALRDEGGCRAYPVATTATVAGRGRAPAESGLRVRP

SEQ ID NO: 507452 - protein, 350 aa, unidentified
MKETSTIGIDIAKRIFQVHGVDKNGKTVLKKKLMRDQVLIFMANLPKCLVGMEACGGANYWAREISKLGHEVKLMAPQFVKPYVKTNKNDQADAEAICEAASRPSMRFVPIKSVEQQDILSIHRVRSRLVKNRTALANEIRGLLHEFGIIIPKGINKITAKLTEVLDSEKLSPISQQTFSDLKDEFIENDKRIKDLENRLKMLAGELDKYQQIIAIPGIGLITATALIASIGNASCFENGRQLSAWLGLVPRQASSGGKEKLLGISKRGDIYLRTLLIQGARAILNTKLRTTTESQKAKKDYSKFTQWMFNLRDRSGHNKTVVAVANKLARVVFAVLSSGKDYVENKVCS

SEQ ID NO: 507453 - protein, 419 aa, unidentified
MDLTDLTSTDTEPASPAPPPGLVAGVDTHQDTHTLAVLTAQGAVIATRSFPADQQGYDDLTAHLDRLGPLTAVGVEGTSSYGAGLTRTLRQAGYDTVEVLRPSRRVRRHHGKSDPIDAIAAARTVLSGDGVSQAKDTTGPAEQLRLLLAARTRLISAATAITNSIHSLLTTAPEPLRERYRRLDTPALITRLARTRPTRTITTPRQAATSALHHMARTHQDLHHRAERLNQQMHHILTTHYPGLLAVYGAGTTVAAQLAVTAGGNPGRIHNEAAFAHLCATAPIPASSGKTTRHRLNPGGDRRANAALHRIALVRLRHDPTTKNYADRRTQEGKTTKEIIRCLKRAIAREVYRALTQPPPTDTTSTLAAHRKRHHLTQTDVAHALNTYPARISDIENHRRPLPQLTHRYHQYLTTLDTQ

SEQ ID NO: 507454 - protein, 347 aa, unidentified
MAHFVGLDVSVRQTSVCVVDDAGKVILEQKVPTEPADIIAVLASLHVSLSRIGIEAGPLSQWLVNALTAAELPVVCVETRHMKALLTAQQINKTDRNDARGIAQMMRVGLFKPVHVKTLVAQEQRMLLTSRKLLQRKLLDVESDLRGTLRNFGLKVGTVSGSRYEARIRELVAGFPRLAAIAEPLLNVRRVMRQQLAVLHKMLLDTVRGDPVCRQLMTAPGVGAVVALTYRATVDQPQRFIHSRAVGAHVGLTPKRYQSGETDFDGGVSKCGDALLRTMLYEAAQVLLVHSEKWSWLKAWGMRVAQRRGMRRAIVAVARRLAVVLHRMWVDGSEFRWSRDGAVPAVA

SEQ ID NO: 507455 - protein, 351 aa, unidentified
MPFKTDTATIRTIGIDTGKNTLHLIGLDEKGTIVLREKVARGRIGARLVNVPQCLIGIEAGMATHYVARELTALGHDVKQVPPAYSKPFRQGHKNDFRDAYAVAEAVQRPATRCVPVKTDNQLDLQALHRVRSRLISDRTAVINQIRSFLLERGIPVRQGLRFLRHQLPDLLATRTDVLSPRMVRIVEDLIGDWSHLDERIENVTEEIEALARGDASCRQLMTVPGVGPIIASAMVAAIGNGTAFAKGRDFAAWLGLVPKQMSTGDRTILGRITKRGNRYLRTLFMQGARVILLRPANWAKHSFGLWLTAAAQRLHHNVLATALANKLARIAWTVLAQGRSYEARVEPKVA

SEQ ID NO: 507456 - protein, 444 aa, unidentified
MAMRKRDDEVFPNAAGIDIGASSHWVAVPRHLAEAAGCEPVREVGAMTEDLNALAAWLVSLGVDTVAVESTGVYWIPVFEVLEQHGLKVWLVDARQLKYVPGRKSDVQDCQWLQKLMSLGLLRAAWRPSAEVCVLRAVARQRETLLVEQASWVQRMQKALVQMNIQLTEVLSDVMGQTGQAVIRDIVAGVRDAKQLARHRQRRVKASEAEIARALQGNWREEHLFVLKQALAMYDDIGRHLTECDARLDALLDARSQAKVDIGKLPRAGSKARVEHDIRQRLANWAGVDLTRINGLGVTVVMKLLSEIGPDVSRFASVKHFCSWLGLCPGTKISGGRVLSSGTKRSANRARQALKLAAQSLFRSESALGAFYRRLSARMDKPKANTAAAHKLARMVYFMLTRGEAFVDQGQQRYEEQQRQRSIVALKRRAAALGFQVKPLEAVA

SEQ ID NO: 507457 - protein, 343 aa, unidentified
MDQYIGLDVSLKDTAVSIREDRKRIWRGKCPSDPIILAQMIRKHAPHAKLVVFETGPLSTWFYHALTAEGIPAICIEARHAQKVLNETLNKTDANDADGLARLAETGFYKVVRVKSFDNMLTRTLVAARSQLVSISKQLSNQIRGMMKTFGLIVPNREGRVFGANVRGLLDGNKGLELVISPLLEAWRDIRKHVANLDHQLLAASRQSQSTKLLMTIPGVGAVTAVSYIAAIEDPENFATSRSVGAWLGLTTRRYQSGEIDYDGHISRRGDGRLRGLLYEAATVLLTRTTARTECRLKTWGLKLRERLGFRRAAVAVARKLAVIMHSMLKTGEVFNPLAGDPA

SEQ ID NO: 507458 - protein, 411 aa, unidentified
MNPVIGLDVAKGESQVQAYLERKKPYKKSFKVKHDLDGLASLLDFIKELEDISGERPPLVMESTGHYHTPIVQYFEDRGYLIIIVNPLISYKAKSSSLRKVKTDIIDANHLCELYYKEDLEPYKKRGIKLANLRNLTRQHDNITGMFVQTKLQFQAVLDQVFPEYSHVFGDLYSDVSLKILHAFPTSEDILKANNEVLATKIKEFCNSRSLQWANKQAEKLMTAAAQNPFQKALYSSLALSLDMYINMLFEYKKHLSMLENEIDALSKSIEESKIIRSIPGIGEKIAATIVSEIGEIERFNHPKKLVAFAGLDPSVFESGTFKGTYNRITKRGSSRLRQALYMAVKCAIRDCRKQKTTDEILPRNKKLRAFYDKKREEGKPFRVAVIACANKLLHWIYALLKSRTSFQDLA

SEQ ID NO: 507459 - protein, 433 aa, unidentified
MEEAQDEPLFCERAAGIDIGKQSVMVTVRVPSETRKGGRAQETREFGTTRRQLLELADWLRSHGVERAGMESTSDYWKPVYFLLEQQGLECVLYQASKVKAQPGRPKSDKLDSVWLAKVTEQGSVGGSFVPPEDIRRLRACTRYRRRLTQAMTAEKQRVEKLLEDAHLKLSSVISDVHGVSGAEMLRAIAAGERSPRVLAEMARGVMRRKLAALREALDCSFFTQEHAFVLSMMLDNIDHYTGQVAVLDEKIAVMCEPYARQVAQLDQIPGFGVKTAQDLIGEIGVDMSAFPTAGHLCSWARVAPRPKESGGRRKGGSATGNGNPYIGAALGEAAVSVGRTQTFLGARLRRLVRHMPKKKAQVAVMRTQLVAAHALLSDPEAEYAELGPGYYDERAGTARQARGHVRSLERLGWKVTLEPLDPDTGELTAQAG

SEQ ID NO: 507460 - protein, 486 aa, unidentified
MSNINAKAGNKQLLRCNKNNLLLAIDCAKEEHVANFFDFSTGCFIYKKALHIKNNSLGFEFLFGKALELLKRKRFRKSSIEVYLEDPASYSQSLIYFFQMKDCLVRYVNAFQASSYRDNKRASNDVLDLDGIIRSALMGQYYECPSPLGIYTLIRECTRERQRLIKARTRHKNNLHTLMDLVFSGFLSNSKSGITSYSKGCVELILHKDFGPRLFSKSTQSRILKIIKKAGLNEPEKLSQKLKELANQNINWIEVQPEVFISRRERLQEQIKLYKAREVCIQVQEKQIAHFLQFSPLALCLSITGAGLISVATIAAELGDPRLWRSIDQAASYAGVIPRQKQSGGSMKEAITYAVPKAANKYLKNALMTIVDVAQRYQHPATQLTGITHPIKESFQKVDIRGGASYMATAKKVLRTIYAMVQNEMVYLPNIKNTSKEHYRIWIEESTQHLCKKWQAQGIIPNEKNYIGRWIRHKNEIIKILDESVK

SEQ ID NO: 507461 - protein, 309 aa, unidentified
MENIAFIGIDLGKNSFHIHCQDRRWKAVYRKKFTRSKLIEFLATCPATTIAMEACGGSYFMVRKLEELGHFPKLISPQFVRPFVKSNKNDFVDAEAICEAASRPSMRFVQPRTESQQAMRALHRVRESLVQDKVKTTNQMHAFLLEFGISVPRGSAVISRLSTILEDNNLPLYLSQLLLKLQQHYHYLVEQIKELESQLKRKLDEDEVGQRLLSIPCVGTLTASTISTEIGDGKQYASSRDFAAATGLVPRQYSTGGGQHCWASASEATRRYEPCWFSAPEYLYKNWNTSQAGWPTGSGSYCAGKVTLS

SEQ ID NO: 507462 - protein, 408 aa, unidentified
MPVYIGIDWSEDKHDVVFMNQAGVDVARLTIPHSQDGFVQLEAARRKLGLTPDDCMLGLETAHNLIIEYLWSQAYQQVYVIPPSVVKSNRGRFRQSGARDDQSDGYLLADILRTDRGRLQPWHPDSLLTRKMRAKVSWIHHLTRASTRLSNRLRAVLLRYYPAALQVFPDLSTQIALEFIRAYPTPQAAAKLTFAEFEAFAHQQVYPHAKKLPGCFVHLEGDYPQAGSETVLVYQDEAVQLASLLLQMTRTKLSILREEQALFRQHPDYPIFSSLPGAGELLGPALLVKFGDDRARFPTPASVQALAGTCPVTDQSGKRKVIKSRTACDREWRSLSQAWAVALVNRAKSPLAIAYFEQIRPRCHNRHHAYRCVANRWLAIAWKLWQSRQPYDEAYHFQQRAARSKGHN

SEQ ID NO: 507463 - protein, 323 aa, unidentified
MSSFVGVDIAKNTFDIATHLPNGKHKTKAKIANDPKGFKEFEAWLDKHVEPSALIVMEATSVYHLKLAEFVYNKGYRVCVANPATTSAYSGSELRRIKTDKSDAKLLADFAREKNEKLHSWVPEPLKYRQLKAMVRRLDDLQEMEQMELNRLDVSDEKVKDSINSVLRHIEKEIAETHKAIKKHIDDDSDMRQMRDLIVTIDGIGQKTLERLLAELGDLRKYTDPRQLVAAAGLNPKLQESGKFKGHTLISKIGSARLRAGLYMPGMVALKHNEAIKAMKERLKANGKAPMQIICAAMRKLLHFIYGVLKSGQAYDPKLALVR

SEQ ID NO: 507464 - protein, 395 aa, unidentified
MKRPCIALDVSKGSSHYQGWINADKKCGNPKKIEHNQEGFQEIITKAKELEGITDEKPIIVFEATGVYHRTLQCFLDENDMEYIIVSPLASAKVRKSNIRSTKTDKKDCKNIAKVYFEKDFKIHSKSDEIYDKMLDLNRYYQYLTTQLKKIKVQFRLILDIVFPNIDKLWSRLYSDVPMALLKKYSHPNQLKNKNPETLAKYLMKETCHHYNEAIKEANKIIEYCKTCCSGCSKESINCQVLKDLILQLNEKIQEQDNCLNQIIDLAKDLPNYELLLSIPGISNNLASRILAELGDINRFSRIRQITAYAGLDPHINQSGGNDGLHLKITKKGNKTLRCLLYLAIQNTLQQENKVSEFYHKKIAAGMNPKAAKIACMNKLLRIIYSMCNNGCVYQ

SEQ ID NO: 507465 - protein, 354 aa, unidentified
MSQNSNTAIAIVGIDIGKNSFHIVGLDQRGAIVLRQKWSRGQVEARFANMPPCLIGMEACVGAHHLSRKLKELGHDARLMPARYVRPYSKGQKNDFRDAEAIAEAVQRPTMKFVATKTADQLDLQALHRVRERLVSQRTGIINQIRAFLLERGVAVRQGLRFLRAELPRILATPPDVLSPRMVRVIEGLAGDWRRLDERIEGLSSEIEAVARQDTACERLMSVPGIGPIISSAMVAAIGTGDVFSKGRDFAAWLGLVPRQISTGDRTILGKISKRGNRYLRVLFVQAAWVVLIKPKSWERHGLKPWIEAAKKRLHRNVLAIALANKLARIAWSVLARGRAFEVRKVDEAAAQPA

SEQ ID NO: 507466 - protein, 342 aa, unidentified
MKFYCGIDLSARDCHVCVIDEQLKIVIEQKLRNELTKICQLLEPYKANLKIVVESTFNWYWLIDGLQAEGFEVVLAHTLGLYLITGAKVKTDRRDAYSLAKLLLVGAVPTAYIYPVETRPVRELLRRRLHLVQVRAGEYGSLRRLLLRQGILSRKQQEIKTATETELEQWFAHPLVRLHASQELQRIELYSHQIAELEQTILALTKTEHSYELLLKLPGVGQTIALTILYEVGELTRFANVKDFSSYCRVVPGIAQSGNVTRRGRASKQGNHYLKAAFSQAAVHAVRCYPKVRRYYERQLKRHQGRGRQMICYNIIAHKLAQAAFHVLKEQTEYREELLFGR

SEQ ID NO: 507467 - protein, 370 aa, unidentified
MKHTRFVGLDIHKDQISVAVAESGRGGGVEYLGQIANDPAAISKLCARLARPGATLSFCYEAGPCGYGLYRQLTSLGHRCAVVAPSLIPTKPGDRVKTDRRDATMLARLHRAGELTSVWVPDEAHEAMRDLIRLRSTVRHVLTRARQHLQGFLLRHGRSQGAARAWSVAYRRWLSTLAFAHPAQQITFQDYVDAVTDAEQRLRRVEEQIQVLLADWALRPVVEALQALRGIALINAVVLVSEVGDFTGFATPRQLMAYFGMVPGERSTGRTVRRGGITKTGNSHARRALVEGAWAYRLKPRVGRHKVDRIEALPKPVREIAWKAQVRLCARYRRPTALGKTANVVTVAIAREMVGFVWAIACTVQSPKAA

SEQ ID NO: 507468 - protein, 397 aa, unidentified
MGRVWIGVDAGKASHHAAAVDEDGELLWHRPVRNDEAGITDLVATAASVGPVTWAVDLISAETALLRGLLAAAGQTVIYVPGRTVKAMAAGFPGEAKTDARDALVIGHTARMRRDIAALPAPTELLATLALLLSHRADLIADWVRVINRLRRVLVAISPELERALNLTTIGALVVVSRFPTPEQIRRAGRATLVAALGRALVPAPGRIVDRVLAAADRQSVVLPGQGAAAVIAADLADHLLRVRRQIKDLDKAIAQAVAEHPQAEVLLSLPGIGTIAAAEFIVAVGDLSTFAGPDNLAAYAGLAPVAHDSGRRVGNLRRPTRYHRRLRYMFCMAALTAVRTDGPSKTYYQRKRREGRNHKQALIALARRRVNVLWALLRDNRTYSPTPPAIPMAVAA

SEQ ID NO: 507469 - protein, 414 aa, unidentified
MHHPKMRFTYVGIDSHKETHTAVFLDCFFEKLGELSFENLPDKFAGFLQRAQKFQTDGTTFMFGMEDASAYGRTLARFLCAGGESVKHVNGLLVARERKNQNIVQKSDSVDAECAARVLISKFGDLPDVVPQDKYFILRSLVARRSLLVRHRAATKNYLHSVLMQSYPNYRGFFANLDCKTSLAFFMRYPSPGTLKGVTVEELAAFLEIPSNKSLGLPKAKFILESLQETAVPFQEIRDSVAQSAIRQLMFNIEEIEQLEEGIASFLKHFDCTLTTMAGIDIVTAAQMRSCIGDIKRFSTPAKLARYAGIAPVTYASGKKDLQFANQRGNRELNSLFFWLAVQLATPCGSSRKILNSFFHEYFNRKMSEGKTKRQALKCVQRRLVNIIWNMLTHGEEYVNPPTFDLPEAENEAE

SEQ ID NO: 507470 - protein, 385 aa, unidentified
MSAHPTQIQAAAQLQANTLFASLELSKARWLVTVSAPGSDKLSRHQVPGGDGQALLELLWRLQAAAARRTGAPVMIIVIQEAGLDGFWIHRLLVQNGITSHVVDPASIAVNRRHRRAKTDKIDGVKLLRTLMAWMRGERQVCTMVQPPSPEDEDRRRLARERARLLKERIQHTNRIKGLLSGQGIPDYDPLHRDRRRCLAALTTGDGRPLPERLKAEIGRELDRLEMVVSQLTVVERERDALVARTAEADACAAPAALARLRGVGPELAALLWLEALFRRFDNRRQIAAYAGLTPSPWQSGGIDREQGIAKSGNPRLRRAMIELAWFWVRHQPGSALSRWFVERVGTARGRVRRIAIVALARKLLVALWRYVTQGVVPQGAVLKA

SEQ ID NO: 507471 - protein, 341 aa, unidentified
MKKKTQQTYQFLLRLDSAAGIDVHKEFFQVAVCRETVVPLEQRFGTFTRDLYGLKDFLLEQKIKDVVMESTGVYWKPLYNVLTEAGIKVRVANPLKVKQIPMEKTDKKDAKWLAKLLMNDMVQASFIPSEQQQMLREFTRMRTKYTQQMTRIKNQLVKVLEGCNFKIRSIVKDISTKTAMKLVRALSKGETNTELLVPLCHRSVRKRQGDERLALALQGRLTKNIQQQLSMLIEDLEYFEKQKQKTNQQINELLTEEQQHSIEQLDKVEGISQEQGEVIMAEIGTGITSFGNADQAAKYAGLTPGLADSAGKKKIIKAVPGNKHLRTVMIQIAWSAVKRKD

SEQ ID NO: 507472 - protein, 446 aa, unidentified
MNDRSGLSRGDRNRNARLARLRQLLPFDHAIVGIDLADDKQAAVVTDHDSRVIARRRVSARAWELGDLLDWAVAQASAAGFASVTVACEPTGHRWRVLDQLAAGRGLALVCVQPLLVYRSREGEDLTRDKSDPKDAVLIARLASELRCYEPERADAVQSRLRHLGARRRQLTTDATAQVNQIRDLLECAWPAVLGASGSPFRSATWCAALAVVLDRCAGDLGRVLRLGAVRFEGAVRRELPRWGAVRPCLRIVRAVFAALRDPAGVMAHRPGALERAHLALGDWRDTRARLADAEARMVAVLDDLGLTALVTTIAGLTPAGAAAILAETGDPARFASPRSLVKHAGLCPRDNASGAAQGKTSISGRGRPGLRLAAWRAVWAALPNNPVMAARFTYLTTRHDNRLARQQARTACAAALLRWIHVVVTQRVTWDPAIAAGGRPLQQAA

SEQ ID NO: 507473 - protein, 353 aa, unidentified
MTLYIGVDFHPHQQMVAWCDTETGETGTVDLLHDGEAVQGFFGTLPGPAVVGIEASNRAAWFEKMLFESGHELFVGNPVLIRKRAVSRHKSDRRDAELILGLLLRGEFPAIWRRPAESAGVIEVLGLRQSLVRQRTQVYNRLQALAHNAGLPKGRMRTLAYRAVVREAVMDETAGFARTQLLGLAEELDRRIAEAEVWLKRKAGESGAVRLLMTQSGVGYLTALATVHTLGDVRRFGRLSKQVAAFAGLDPVERSSAGKVRFGSISKAGSPLLRYHLVYAAHIAARFDARLKSFYKRLAKRKTKAVAKTAAARKLLVKLAIMLRDNITAEEFDLRGTRSRQCPSGSGSEMTAV

SEQ ID NO: 507474 - protein, 309 aa, unidentified
MDIIIGIDVSKDRLDIAVTPSGEVFFVDNSHAGLEELVSRLKTERADVVALEATGGFETLTVAGLSAAGFAVLVVNPAQVRAYANAIGRRAKTDPIDAAVIAAFVAATHPEIRPLRDAETQALSELVARRRQIVQMIVAEENRLRMVQAQQAQKSIRRLLAALRRELESLDADMDSHIRKSPLWRVRERLLVSVPGVGSTTARTLLAEMPELGSLDRRQIASLAGLAPWTRQSGQWKGKSFIGGGRGKVRAVLFMAALVASRHNPILKTFRDRLVAAGKPKIVAIVATMRKLLTILNAIIRDQKPWQDA

SEQ ID NO: 507475 - protein, 318 aa, unidentified
MLNESFVGIDVSKDWLDLGWEPAGQSERLAHDEVAMVGLCERLVQERPCLIVLEATGGLETHLASALAAAGLPVAVVNPRQVRDYARACGRLAKTDRIDALVLAAFARAIRPQVRAPRDDETLELGALLARRRQLIDMRVQEKLRLERASPVQRDSIKEHIAWLTERIARFDTDLTHRLRSSSLWRDQEDLLKAIPGVGTITRVTLIALLPELGKLNRREIAALVGLAPFNRDSGQHRGERVIWGGRAQVRRVLYMAAVAAIRSNPVIRAFYQRLRAQGKPGKVALVACMRKLLTIMNAMLKYNTPWNPNALDLEHSC

SEQ ID NO: 507476 - protein, 351 aa, unidentified
MDSTKYIGLDVHKETISIAVLNSSGKLVMETIIETKASTLLQFVQGLRGSLHVTFEEGTWAAWLYDLLRPHVTKVVVCDPRKNALLKTGNKSDRIDARKLAELLYLNKLKPVYHGEHGVRALQELSRSYLTISGDLARVMTRLKAMYRSWAIPCAGKQVYAPRYRSEWLGKISEAGVRRRAEFYCQQLDALRALRQQVRRELLAESGKHKASKLPCQIPSIGPIRAALLIAILQTPHRFRTKRQLWAYGGLRIETHSSADHRYVEGQLRPSKRPVSLRGLNRNHNHELKNIFKGAAIIAATKAGPFQEFYAALVAKGIRPEMARLTLARKIAAITLLVWKKGATAAPLGWL

SEQ ID NO: 507477 - protein, 365 aa, unidentified
MWEAPVVVQRTNVGLDVHARSVVACGLDRQTGEVFEQRLTPSHEEIAAWIRSLPGPAAAVYEAGPTGFGLARSLRAVGIDCEVAAPSKLMRPSGDRVKTDTRDARHLARLLMLGDVTAVAIPSREQEAARDLVRAREDCRGDLMSTRHRLSKLLLRQGIVYSGGKAWTGKHELWLRCQRFDDPALQLAYDTSFEAMLATIARRDRLDRAIEQMAADSEFTPVVSRLCCVRGVATLTAFGLAVEIGHWHRLTGRSIGAYLGLVPTEYSSGASRVQGGVTRTGNGHARRLLIEAAWHHRARYRPGATLRRRWDAASAPARARGQLANQRLHARWQTFDARKKRAVVANTAIARELAGWCWSLAVLDG

SEQ ID NO: 507478 - protein, 361 aa, unidentified
MNATTAAIDLAKNVFQVALADANSRVLEQHRLTRAQFERFFDNRVVARVVMEACGSAHHWARVFAARGIEVILLPAHYVRAYVRRSKTDAADALALLEAVRCADIVAVKVKSIEQQSLQALHRTRSLWMGTRTSRINALRGFCRELGLHVPLGARTGLEAMTRAVADDQSVIPAMLRPVMQLLLDEIRVLETRIAQLERQLALIARASLACRLLMSIPGVGLLTATAIVAATSGSVAHFKSARHFASWFGLTPKESSSGGTRRLGRISKMGDCYLRMLLTHGARSVLRAAKVATTKGQQLIGVRQWALTLQARSNHNKTACALANKMARICYAVLRDQTPFGQPATRLTKKMQRQSFELAH

SEQ ID NO: 507479 - protein, 450 aa, unidentified
MSKGHKTSLSLPVVHQKAAGIDIGSRFHVITVPPDMCPEPVQTFQAFTTDLQKMANWLVSLGIETVAMESTGIYWVPVFEMLESAGIEVILANAREAHAVPGCKSDVNDAQWIQRLHACGLLRASFRPEQNITALRTYLRLRDRFLEYAAAHIQHMQKALNYMNIQLHHVVSDLTGVTGMQMIRAIVQGERDPAYLARFRDVRCRASTEVVIKSLTDNYQPEHVFALEQALMLYDAYQERILACDAQIERILADLNQSKPLPKQPLTQTRKRSKQGNAINFDVRTALYQLTGVDLTQIHGIGPYLALRFIAEWGTDFSKWRTAKHFTSWLTLSPGCKISGGKVLSAHTRKSANRLTAHFRLAAVMVGRTSTALGAFYRWLAARIGKAKAVTATARKIAILFYNMMRYRIAYEDLGADRYELEYRERIIKNLHRRAKEFGYTLQTASECVS

SEQ ID NO: 507480 - protein, 392 aa, unidentified
MYIVGIDIGKNHHEASIVSPEGKQIGHSLRFATTHKGADSLMSFIFNNIGNSSCIFGMEATGHYWYPIYSFLKARGYTIYVINPIQSDSLRKMYIRQTKNDSIDSFLIAEVIRFGQFTTTSMADENILAMRQLCRYRDSVISSRTEIKLRISTIMEQIFPEYEKQFSSLWLSTSMGILEKYLTPENIENAPIDELFEIIKDKSHNKLTMKKAISIREAAADTFGIKIAQDAFSFQLKQLIDRMNFLDKQIEALDCQILEYYEKFDCYLHTIPGIGMIAAATILAEIGDINRFKSSSALVAFAGIDPTVRQSGEFSSTHNHMSKRGSPYLRHAIFLAATTCSFHNSPLNAYYKKKRDQGKHHLTATGAVARKLTTIIYAVLRDSKPYEPKSFC

SEQ ID NO: 507481 - protein, 346 aa, unidentified
MDHVGIDLHKRDSQICWLHDTGEVREVRIRTTPERFEALFGGQAPAQILIEASTESEWVARHLERLGHVAVVVDPNYAPMYPRRRRRQKNDQRDALALATASRTGTYRAVHRVSAAQRAVRQALTIRDTLVQTRTRGVSVVRSLVRGEGLRVASGQAEGFVGRVAAEPVPEPLATTLAPLVTLLTTLEAAIDAVETHVRTLTADDARVPRLQGVPGVGWITATAFVAAVDAAGRFADAGQLAAYLGLVPRDRSSGEGHRSGPITKTGPSRIRWLLVQAGWRVLRATTADAQPLRRWGLQVAERRGTRVAVIGLARRLARILYALLRDGTAFDPMQVAAGRAVRPAA

SEQ ID NO: 507482 - protein, 433 aa, unidentified
MSNFFYSPVIGIDVSANFSYTAILAPNGDIYKKSFKIKHDLNGFNHLVNEIKKVEEEFNMKTAIFMESTGVYHLSLFHYLNKYFDNTFVINPLVTKSNKNGDIRKVKNDKKDALSIATIGKFQNIKLSQQLSLDIFLLKNLVREYYKLTDTSSTFKKKLSADLRVIFPGYNTIFSDSTSKSSIELLSQYPTPQTILEAHKENIIKIFLDSSKKGIIWSENTYSKLFKVANEAKIIGLPLDGLAVKIASSITLIKTIQSEIDTLLQKINNFIQSETFPESIRANIELIDSIPGIGQLTAITIIAEIGDIDGFLKPKHLVAFFGIDSSVNQSGNFKGDDNKISKRGTRIGRRALYSVALASIRNNRNGVPINKVLLDYYQINLKGKKPKIALVAIMHKIINYIFAVLRNQTPFEQRDPKIHKQMFLENNSLNKVA

SEQ ID NO: 507483 - protein, 310 aa, unidentified
MSLYNNFIGVDIGKFNFTVAVYGNNNVGINSFVEDYKPLLSNALSILETTGGYEMELLFTLHKEGFAVHRANTNKVKNFIRSFGNTAKTDSLDAKALALYGFERVELLELFVPQSKKALELYELVQRKNDLKQMLIAEKNRLKAPKADLIKNSCQLMIKVITEQIESIVLKINALIKDDTILIARKKLLISIPGIGNIVANELLILLPELGLLNRRQIASLAGLAPKNNDSGKFTGYRRTGQGRNLVKPLLFLAAMAARNSNSELKLFYLSLINRGKKKMVALTALMRKIIVIANAKLRDLLTKKLEIKI

SEQ ID NO: 507484 - protein, 425 aa, unidentified
MTVFCGIDWAEGHHDIALIDGDGSLIAKRRINESLDGVAELAAMLATAGDSAETPIPLAIETPRGLLVAVLRVTGRPIYPINPLAVARYRERTSVSGKKSDHVDAMALANILRTDAHLHRMLPDDSPEARSISVLARAYQDGVWRRTKLVQELRARLREFYPGFLAAFAAGSGSGRGLSTTQLASGDARAVLAIAPSPAEGLTVSKARVETALRRGGRQRRISSLAASVVAALRVPQLRQDPRVEQAMRVETLALLGVLDMASASVDQLAAALIKEFAQHPDHEIITSFPGLADISGAIVLAEIGDDRSRFGDDRALRAFAGSAPVTRASGKSRIVTRRRTKNNRLTGIGHSWAFTAAARQSPARDHYLLRRERGDGHPAALRHLFNRMLGQLHHCLATGQTYDPIKAFPHATAADPDNIERVAA

SEQ ID NO: 507485 - protein, 354 aa, unidentified
MKRNTKYVGLDVHQAMTVATVRTEGGRVIARSVIETRQDSITEFFGGMRGSVHVAFEEGTQAQWLHDLLNPRVDRVIVCDQRGEKRSGNKGDQVDADELSERLRCGGLRAVYHGASGRADLKELTRAYGNLVEDSTRVMLRLKALFRARAIRTPGGSVYEPKGRAAWVAQLPQRGARLRAETLYAQLDVIRAQRKKTKSAMVTEAKRDPAFAVLETIPFFGPVRIALLLATIATPWRFRTKRNLWAYAGLAVVTRSSADYELFDGSPRRRRRPPLTRGLNRNHNRVLKNVFKGTANVATGHPGPLQDFYHGVLERGMREELARVTLARKLAALTLRLLKTGEVFDPTQLSRPQM

SEQ ID NO: 507486 - protein, 323 aa, unidentified
MNKYNETFGIDISKAVFDCYGSIHGHLQFKNDETGFKKFQKMLSKDSLVVMEATGYYHYRFAQFLHHKNIAVSVVNPLSIKRFIQMKLAKVKTDKSDAKAICEYGLTQEVPLYTALTDVQSECLQLFRLLDSFIKKRTASKNKIHGEEVLGVPSNWVYRSLVRNKKHLDKEIKGIEAKLLSLVKQDQQQQLTLLQSIPGLGLKTALFLIVVTDGFKKFETASQLCSYVGITPTIRESGSSVRGRARISKVGNRKLRNLLFLCSFTACKHNKGCKDIYERIVNKGKSKKLALIAVSNKLLKQAFAIAKSGHPYDPTFVSVLKIN

SEQ ID NO: 507487 - protein, 311 aa, unidentified
MTDDSIGIDISKDHLDVHRLSGGQYAQFTNTREGFAALHRWIGSTATARVVYEATGPYHGTFEQALRDHLPLVKVNPLQARRFAQASGTRAKTDAVDARMLARMGAAFKFEPDPHLPEDLPDLKELQIARTALIKDQTRLKNRFQTQTLAITRRHTKARLDQIARQLAQLDEEITSRLTASPKRQKAYEILQSIPGLGATTAATILIEMPEIGTLTNKAVACLAGLAPITRQSGKWKGQAFIQGGRKFLRAALYMPALVAARFNPDLTRKYQSMKAAGKPSKVALVTIMRKLIILANTLIKDDRKWVKNAA

SEQ ID NO: 507488 - protein, 371 aa, unidentified
MLRSLTNVRDFPDVARHWSAKIEVYVHVQSQPRRGSLVSNVTTVGIDLAKNVFSLHGVDARGVVVLRKTVSRARLASFVAQLPASVIGMEACSGAHEWARRFAQHGHTVKLMAPKFVVPYRKSGKNDGNDAAAICEAVSRPSMRFVPVKSVEQQTMLTLHRVRLGFVEERTATINRIRGLLAEFGVVLPQRAMEVRRGAAASLEQLPAAAARALSDLLAHVRVLDERVNEYECELEQHARRDERAQRIQSLSGVGPISASAIVASVADAHEFKNGRQFAAWLGLTPKQYSTGGKTRLGHITAHGDPYLRTLLIMGARSMLQTALRRTDRLARWALGVRARRGYHRACIAVAAKHARIIWAMLAKNEVLQLS

SEQ ID NO: 507489 - protein, 323 aa, unidentified
MNKYNEIFGVDISKDVFDVYGSKSGHNQFKNAASGFMFFLKNLPKKSLVVMEATGYYHYSLAQFLFKQGVLVSVVNPLSVKRFIQMKLAKVKTDKSDAKAICEYGQINQVPLYSALSDVQSECLQLFRLLDSYLKKRTMTKNKLHGEDVLGIPSKHVYRSLKRNRKHLDTEIASIETKLLSLVKQDQQAQLTLLKSIPGLGVKTALFLIVITDGFTKFETAAQLCSYVGITPTIRQSGSSVRGRSSISKVGNKKLRNLLFLCSFSACKHNKSCREIYERIVNKGKSKKLALIAVSNKLLKQAFAIAKSGNPYDEKFVSVLMAK

SEQ ID NO: 507490 - protein, 416 aa, unidentified
MQVLYSRCCGLDVHKRSITGCCLWFNHTRQRQEETRQFGTQTAELRRLATWLREHEVKHVVMEATGSYWRPVWNLLEMEGFEQTLANPQHMKALPGRKTDTKDAQWSADLFQHGLIAPSFVPTQQMRHLRDLTRTRTKVMQDHTRVVNRIEAVLEDTNIKLSSVVSDIMGVSAQAMLQALLNGERNTAKLAELAQGRMRPKVPQLKEALEGNLQPHHEFVLKRLFMQSRFLQQQQRALSREIEHRLDDEMRQAIALWDTIPGVDEDIATIMAAEMGIRTEQFTDGSHLASWTAMCPGNYESAGKRKSGKTRKGNRWLRGALTQAAWAASHTKGTYLSGLFRRISARRGAKRAIVAVGHSILISAFYMWQNKQPYQELGDAYLDKVKPEKTANRLLKRLAKLGYVVTVTQVPIPQAE

SEQ ID NO: 507491 - protein, 476 aa, unidentified
MVVPNEEPKKPTKPKRPAKPRKSRERSLPVPVPASATALNIINPDAAGIDVHSDMHMVCVPADRDANPVRQFGANTADLQEIVAWLKKCRIKTIALESTGVYWIALFELLEAEGFEVYLVEPGQLSRCGARPKTDVLDAQWIQRLHSYGLLRASFRPPDSVLALRAYWRQRQMQVRYAASHAQHMQKALEQINVKLTEVVSDITGVTGMSIIGAILEGERDPVKLAQLRDKRCQSSEDQIALALQGTWRPEHLFELRQAYELYQFHHRQITECDQQIEAELANFPNRAGAKTHTVKPRKRGRKSNDVRFEATGPLFQALGVDLTLIDGIDVGTALVILAEIGVDVSRFPTEKHFASWLRLCPPQEESNQTKKRRGHRKGTNRVTIALRMCAQSLGRTMTPLGLFYRRIRSRIGGRGAVKATAHKLACLVYRMLKYGQEYVTQSMEEYEAKVKANMLKALKRKAAAMGFQLSPLPTQ

SEQ ID NO: 507492 - protein, 405 aa, unidentified
MNAVGIDVSKGKSTVTIRKPGDVVLMSPCDIPHTQSAINDLIIQIKSLKGETKVCMEHTGRYYEPVATWISDAGIFVSAVNPILIRDFGDDSLRTPKTDKADSKKIARYTLDRWAKLKQYGIMDKTRNQLKTMNRQFGFYMAQKTAMKNNLIALIDQTYPGANDFFDSPARNDGSQKWVDFIHTYWHVDCVRSKSLNAFTEHYQNWCKRKNYNFSAEKAAKIYQISSDLIAVFPKNDITKMLIWQAVALLNTASKTVESLRSKMNELASTLPEYPVVMDMNGVGATLGPQLIAEIGDVSRFTHREALTAFAGVDPGKNDSGKHIQNSVRTSKKGSPYLRKALFQIMDSLIKRSPVDDPVYAFMDKKRSEGKPYYVYMTAGANKFLRIYYGRVREYLSNLSNNETI

SEQ ID NO: 507493 - protein, 387 aa, unidentified
MNEYHYIGFDVHKKSIQFCAKQADGQIVAEGRIAATRLALAEWVARQSHPWKGAMEATMFSAWIYDALAPHAAQLKVAHSAMLKAIAASKHASDRLDARKIADLVRMDWIPGVWMAPPEMRALRLQLRYRNLVVHQATQTKNRLASILMEHGVEYSKSKLHGRQYFRNLLEGLEHVPEEVRNLLRYGRGSLEMFQTTQRLLLRGLDRDPRLAERVGLLRTIPGVGPVTALTWALEIGDPQRFRSADRAVSYCGLVSPWQESAGRSYRQPLSKKRNPHLQTVLIEAAHLVPRYHPGLRQLYDRVEQEQDAGAAVLAVARKLVCYLLAVDRSRQPFQVRTAPSSPSSPTPQTAGTPGPPMDHAQTAPQSSPSRVRRATASGAKATRRPG

SEQ ID NO: 507494 - protein, 347 aa, unidentified
MNTITIGLDIAKSVFQVHGEASGKIVMQKRLRRSQVTEFFAKLPRSLVGIEACGSSHYWARTLRDLGHDVRLIPAAYVKAFVKRNKTDARDAAAICAALGRPDMRFVAIKSVEQQAARGVERSRDLLVKQHTQLLNSVRSQLAELGIIAPQGRRGFLALLQLLTAGDPRVPPLLLSALRLLIGQIEQIGKAVAALEKQIVATARAHPVMRRLATIPGVGPLTAHAIVTAIGDGRQFASARDFAAWCGLTQRVDRTADKRRERGISRQGEMRLRKLLALGASTIMRHLRSSPARATTWQRGILARRPIKVAVLAQAAKNARIAWAMLQSGDVYRAPAITAAATTALAG

SEQ ID NO: 507495 - protein, 401 aa, unidentified
MPDGITVGIDWGGSLHQVAIVDAAGRQIANFGVAHDVTGLAALDERLGAYGEGLPVAVERAEGLLVEHLQARGLRVYPVSPRIAARIRERYRVAPVKDDAFDAFTLADALRHEQTRWRPLAEPSPLLAELRALTRDRERIVAEQVRVKSQLHASLESYHPAATRLFSSLDRKTALAFVRDYPTPAQAALVGERRMARFLARNGYTGRVPAAVLAERLHDNLITAAPGTVAGKRFSACRQADLLELLTHTREAYDARIAELLARHPDAEVFLSLPGVASVLAATLLAEIGEDRERFPEAAALLAEAGLAPVTRQSGEVRRVRFRRAASHRLRQAFTWWAFNSLTESPWARQVYDANRGRGQRQYRALRGLAACWGRILYRCWQDGVPYDAGRHPGARALIEA

SEQ ID NO: 507496 - protein, 350 aa, unidentified
MKVTTIGLDLAKNVFQVHGADAAGTPVLRKQLRRAQMAEFFAQQPPCVVAMEACGGAHHWGRKLRALGHQVRLIAPQYVKPYVKSQKNDAADAAAICEAATRGHMRFVSVKTVEQQSVLALHTARSGFVKQRTALSNQIRGQLAEFGVVLPQGLSKLNGQLPIALADQNNELTGTIRNLFLMLHAQLAHIDDLVARLERQIREWANQDPGARLLQQILGIGPITASALSAVIGDIRQFKNGRQLAAWLGLVPRQHSSGGKSVLLGITKRGDKYLRTLLIHGARAALKAYQRNPEKMPAHLAQLLARKHPNVVCVALASRNARVAWAMLSRGEDYKGWEVAKRPALPAQLS

SEQ ID NO: 507497 - protein, 401 aa, unidentified
MEGPIVSIDVSNGNSHYMCFIKNNKRFGKVKKIDHDIEGFKRLLEDIQKLEAETNEKVYAVFEATGVYTKPLERFLSKNSIKTYIINPLESARKRKEEIHNKKTDKLDPISISKVYYDKEEMIELKKKDETYNWLRKKNRLYEDQLNHLRKYKVTFQNQLSICFPGYLDLFKDGYSDIPMTILKKYPHPDLLKNKKAETVARYLEKNTCHTHKVSLEYALKIIEFAKKTYPGCEKDDVEVEIFKILLDKVIETQRECEKTLNEMITVASTLEEYRYISSIDGIGHNLAARIIAEIGDIEEFKSRAALVAYAGLDPHIYQSGDQDGKHLKISRKGNKYLRCLLFLAVGCSIRGAKDNPVNRFYQKKKQQSNPLNSKAAKTACTAKLLKIIYGICKNKTTYER

SEQ ID NO: 507498 - protein, 434 aa, unidentified
MNERLQAGIDFSQKRADFCLLAPSGLIIERHRRFSNSRPGYEEAKAMLLKVLTRQHFQGLDVAGEATNVYWLPFFWELARDPELAAHDVQLFLLNPRWVKYYKQCFAPDHKSDADDPFYIADRLRTRHPTVAWSAQLDTQPLRLYTRLRFHLIQNLAREKCYLAGYLFLRASAYSSYRPFSDPFGMTSRRLLREDWNLERLATLSVEELAQHLDELSEHHLPDPLANARKLCAVAHQSFRVPQTLNLPLQRLTDLILQEIAFLETQITQADSWITAEAQQHPGVHLLDTIPGIGPVFASGILAEIGSVERFLQGPKWDPKHKTYRARNLRDAEDAVAKIAGLWWPRNSSGDFDAEDRRLSKSGNRYLRYYLIEAADRMRQNIPEYQRFYASKYAEALKHQHKRALVLTARKSVGLIVGLLHRHESYRSKEVDST

SEQ ID NO: 507499 - protein, 325 aa, unidentified
MNHVSQPVLGIDVSKATFDVALVYHRQLHHKQFANHPTGFRALRAWLAKHTTAPLHACMEATGKYGQALAEFLNAHAIKVSVVNPLRIKAFARSELSRTKTDKQDAAVIARFCVAMRPPAWQPAPPELRQLKAYTRRLDALTALAQQEHNRLEGETGFVADDIRQHVKELQARIHRLKKVIAEHLQHHPMLCQQKALLLSIPGIGERTAAQLLTICGSIHQFSHAKQLAAFCGLSPRTHQSGSSVKGRGALSKMGHASLRKALFFPALVAMKYNPQLKAMRERLLAAGKPKMVVVGAVMRKLLHQIYGVLKSGVPFRPEIGARPA

SEQ ID NO: 507500 - protein, 345 aa, unidentified
MGEAYDGRQVVGMDLHRRRSVLVRMTMGGRKLETVRIENSPRALRAVLGRAGKNPRVVVEATYGWYWAADVLAEAGAEVHLAHPLGVKAFSYRRVKNDERDAADLADLLRAGLLPEAWIAPPGVRAVREVTRYRHKLVGQRTSCKDQVHAVLAKLGVPVTHSDIFGTGGGLWLDQLVLPEPYAAKVASLRALIAVLDGEIARLGQQAAGQLAGEPGYAALRELPGIGPVLAAVIIAEIGDVTRFRRPGQLCSWAGLTPRHRESDLKVIRGHVSKQGSRMLRWALVEAIQHQPDRTRPRQVRDAIIARRGEEARNIAKTAAARVQLTQVFYALRDGHVRSAGRPAA

SEQ ID NO: 507501 - protein, 354 aa, unidentified
MVMIGTDSHKRTHTVVAVDDVGRRLAEKTVPTTSEGHLTLVEWAAQWPDVIFALEDCRHLTRRLEQDLLGAGHRVVRVPTRLMADARRGGRRPGKSDPIDAEAVALAALRHPDLPVAELDGPTREVKLLVDHRRVLVAERTRIQNRLRWHLHELDPALQIPSRGLRHYRVMDHLDQRLTGLDGVVARLARQLLSRCRELTGQINALESELRALVKTLAPTLLAVPGCGVLSTAMILGETAGAHRFRSKDAYARFTGTAPIPIWSGSSSGKVRLNRGGNRTINTALHIIAVTQARGIGRGRDYLDKLTARGKTRTEALRLLRRQLSDAVFAALRTDERTRATPATTANTGLPAAA

SEQ ID NO: 507502 - protein, 354 aa, unidentified
MIVIGADVHKRTHTFVAVDAVGKQLGSTVVPATTIGHRKAMQWAHTRFGTTVLWAIEDCRNMSAWLERDLLGAAQKVVRVAPRLMAEHRRTGRERGKSDPIDALAVARAAAREPDLPVASHDALSYDVKALVDYRDSLVRERTSKINRVLWRVHQLDPEHHIAKGGLTMKKHQEALQVWLKTQGTSVDARLAGKEITAIYELTVEIAEVAKEITTLVSAAVPTLLAMPGCGVLSAAKLLGESADITRFPGEAQFARHAGIAPVPVWSANPGRHRLTRSGNRQINAAIHRIALTQARMPDTLGYAYYEKKQADGKSPREAMRCLKRRLARVVYNNLTTDHHARTHEAENPTPAAA

SEQ ID NO: 507503 - protein, 330 aa, unidentified
MKKDRITLGVDVSKKTMDICHWGTHDFIKIENNSSGFKQLAKWMRGKGFVSSQVFFIMEYTGGYEYRFLQYCESKGLSYTRKSGLEIKKSMGMVRGKSDKQDSFRIAQYGEEKAYMLEPSGKLNSTIFDLKQLISFRKRLVRAMAGYKASSSERKAMYGKDAGKVILKVSKTMIDVYKKEIYRVEREILQLIESDESLNRNYQILKSVKGIGPVNAWMTIVYTENFKAFTDPRKYAVYAGVIPFEHTSGTSIRGRKRVSHMANKAIKQELNQAAKIAITHDKTLREYAQRKLTTKAYPLVLNNVKFKLILIMFSLIGRQEMYREDYHYAA

SEQ ID NO: 507504 - protein, 311 aa, unidentified
MDDVFIGIDVSKEYCDVAVIPDGTRGRFTNDEEGQEAVAAFILPLKPGRIVIEATGGYEMGVVRVLADNQLPVVAVNPRQVRDFAKATGRLAKTDSIDAEVLAQFAGAVKPEVRPLPTKEAEMLRALVARRRQLVQMITMEKNRLEKSPHFGSKDIRNHIYYLTEALKKVDRDISRTIRKSPLWKEKETILTSTPGIGPVISCTLVAALPELGTLNRKEIAALVGVAPFNRDSGKYRGRRTIWGGRSHIRSVLYMGMLSAIRFNPVIRAFYQRLLKAGKARKLAITACMRKLLTILNTMMKNKTTWAEARS

SEQ ID NO: 507505 - protein, 398 aa, unidentified
MKTSGLDVHKDTIFCAIYDGKSYSVVKEFLTTTDSIRELGSYLQKEGVKKVAMESTSTYWVPVWDILWEMDFDLKLVNPFHIKQMPGRKSDAKDAQWIAELLHKNMLRGSLVPSPLIQELRTYTREYRNLVNLRTKVLTQMDRVLVMSGIRLSSCISNIDSKSFMQVVEALIRGETNPDKLVSLVYANRKNKESGKLRACLTGNMKAHHRLKLITYKQQFDLFENQINIYLNEMQLLCEEHFSEDINNLTTLPGVSEISAMIIIAETGGDMSAFENSGKFTGWTGLRPRNDESAGRFKSTATTKGNKHLRAIIVQIAWGASRTKGSFFMDKFTKLAIRKPRKKALVAIGRKMLVIIWHILSEKTQYNPQLVHVYDPVKVEHKIKYHEREIERAKKLIV

SEQ ID NO: 507506 - protein, 355 aa, unidentified
MNDAKYIGMDVHQATICAAVRDSSGNLVMEATLETKAETILEFVRGLRGSLRVSFEEGTCAAWLHDLLQPHVTEVLVCDPRKNALWRVGNKNDREDARKLAELLFLNKLHAVYHGETGIRTLKELARSYLTITRDLTRVMNRLKAIYRGWGIACAGQQVYAPRYRAEWLANITEAGVRRRAEIYYQQFDVLAALRQEARRGLLAEARKHPAMSLLRKIPSIGPIRAALLIALMQTPHRFRTKRQLWAYCGLALRTYDSGEYRFVGGQLKRSKKAVTIRGLNKNHNHDLKNIFKGAATRAAATVGPFQKFYEARIASGMKPPMARLTLARKIAAITLLVWKKGVRFDAKQLKPQAA

SEQ ID NO: 507507 - protein, 358 aa, unidentified
MKNPAVKPTNETVYWIGVDVAKATFDAALVRPGQHYPAVPLRELPAGHFDRSARGVAVFLCWMKTQLKDIARPQVRVLMEATGKYSMALAHWMRTQCPMLAPAIVNPRLTSDFVRSLGLRNATDPLAARALALYGAERAPEAYTAPAPEYVELQSLNRYRDALVEQRVAETNRGEERFDSPFVTKLHRQRLLQLDRAIQRVEGEMKALVRRHPALAHDVALLSSIYGVAFLTAALILAELGDLRRFRQARQLTAFAGLNPRVIESGTSVHKRPRMGKQGNARVRKSLYLAAMAAVRGHNDFHHTYLRLRDKGKTAMAALGAIMRKMLTLMRALLISGKPYDPLWNAHGKTNEQITQFT

SEQ ID NO: 507508 - protein, 375 aa, unidentified
MGNHSEAFVGLDTSKLRNAVAIADGGRSGEVRFFGEIENTGAATAKLVRKLATKYGRLTFCYEAGPTGYGLYRQIKSLGHECLVVAPSLIPKKSGDHVKTNRRDAIHLARQLRADELTAVWVPDRRHEAMRDLTRARETAMMDLRSKRQQVSAFLLRQGLHYAEGRKTWTKAHQDWLARQKFEHPEQRLVFEEMMLAVRQAQERLERLEQAIRNAVPDWSLAEVVTALMAMRGMDLVSAATFLAEVGDLSRFQKADGLMAYLGLVPSEDSTGDTVKRGPITKAGNRRARRMLVECSWSYQHPPRVGADKQHKVAAAPPAVRAIAWKAQCRLHGRYRTLMRRGKLKTVVITAIARELAGFIWAIGREIATARVAAR

SEQ ID NO: 507509 - protein, 296 aa, unidentified
MDQKKYIGLDVHQASISVAVRDAAGKLVTESIIETKATTILEFVRGIRGSLWITFEEGTSAAWLYDLLKPHVTRVIVCNPRKNGLLNAGSKSDRVDARKLSDLLRAGMLAPVYHGENGVRTLRELGRSYITVTKDLTRVMNRVKAVYRSWAIPCAGAKVYSPRRRHAWLEKLSEPGVRRRAEQLYQQLDALRKIRREVRAELLAESQKHPANQLLRQIPRLGPVRVALLIGLIQTPHRFRTKRQLWAYCGLALQTRASGEYRFSDGELQAAKKSPALRGLNVNHNHDLKNLFKGRL

SEQ ID NO: 507510 - protein, 412 aa, unidentified
MQTMVERGCGLDVHQATVVACLLIVQKDGRVQKQMRTFGTTTRELLSLRECLLAEGCTHVAMESTGVYWKPVYAILEGALQIVVANAQHVKKVPGRKTDVKDAEWIADLLCHGLLRSSFVPPKPIRELRDLTRYRRKLVESQSAERNRLLKLLETANIKLASVASDVFGVSGVLMLEALVEGKATPQEMAELAKKKLRNKIPELQLALEGKVEEHHRFLLKLQLDRLKAVEEDLAKLEQRIQQKLEPYAAQLALLDEIPGVDWTLAAVIIAEMGVDMSVFQSVSQLASWAGVCPGNNESAGKRKSSRIPKGNVYLKTALVEAANSAAKSKGTYLRDKFYRLKARRGYKRAAVAIAHKILVSVYHMLSQNVSYNDLGDLYLDTRNKNYLTRNLVHRLERLGYAVTLTPQQKAA

SEQ ID NO: 507511 - protein, 464 aa, unidentified
MKANRGRKKNKSPKINIDSLTLIEPNAAGIDIGHREHWCAVPSDRCEKPVRSFGTFTEDLEKLADWLEECGIKTVAMESTGVYWIPAFQILERRGFKVVLVNSRHVKNVSGRKSDVLDCQWIQRLHSYGLLNASFRPEDPMAVLRTYIRYRDELVGARSVQSLHMQKALQQMNVQLHQVLSDVTGLSGQRIIGAILDGERDVDTLVELVDRRVRASKATVKKALHGDYRAEHLFLLKCAFELHQTYEDKIAECDKMIVAQLERLPDRVNLEEKPVPARKPGRPGRLDLVAGKDLRTELYRCTGVDLTAIESIGVHTAQLVISEIGIDMSPWRTEKHFSSWLGLCPDHRISGGKVLSRRTRKVINPVATALRIAATTLQKSKTALGAFYRRMKAKLGSASAITATAHKLARLIYRMLKYGELYVRQGLEDYEQKYRERTLRHLDKTAREFGFQLIPNQPSDSPVS

SEQ ID NO: 507512 - protein, 343 aa, unidentified
MKLFVGLDVSLEKTAICVVSEHGKIMREAQAASEPEALVRRIRDLYGTIAAVGLEAGPLSQWLHRGLTEAGFDVVLMETRQVKGALKAMPIKTDRRDAEGIARLLHLGWFRPVHCKSVSAQEVRAVLNARKAVQQGFIALEMSLRGLLRNFGLKVGIISRGKFEQRIRELTSGNPMLIAATEPMLRARAALRQELAGLERRVRQLAQEDSVCRRLMSMPGIGAVVALTYRSAVDDPGRFTSSKKVGPWVGLTPSRNQSGERDVSGGITKAGDVNLRRALCQAATVMMHRGRATWLGTWAAQVARRRGSKRAMVALARRIGVILHRMWIEDADFRSDGPALNVA

SEQ ID NO: 507513 - protein, 334 aa, unidentified
MTMEMLAIDLAKQSFHLHGIDADGVVVSRKVSRAKLEDAVAELGPAVVAMEACASAHHWGRQLAAAGRQVRLVNPRFVKAFVRGSKNDAIDAEAIYDAASRPTMRFVPVKTTEQQDLQCLHRVRERLVVQRTSLINHARGLLAEYGVVLPKGPWRFRQQAPAAVAEADLSELARELFTELIDQLTDVEARLAKLDAKLVSICREHAACRRLAALPGVGPVIATALVAAVDDGRHFRSGRELAAWIGLVPRQYTTGGKPKLGGIGRRANHYLRRQLIHGARAVISRLAAKDDQRSVWLKGIVARAGFNKALVALANKTARIAWVLLARKEEYLPA

SEQ ID NO: 507514 - protein, 361 aa, unidentified
MNRALKDNQDAFAGQEFYIGIDVHQKQWTISVQSNKLPLAKPLTIDPSAGSLSSYLKRQYPGGKYHAVYEAGYSGFWPARDLLSHEVETIVVNPADIPTMHKERSTKTDSVDSRKLARSLENKELRAIYIPERKAEEYRLLNRYRSQLVRDETRIKNRIKAILAEFNYRVPVELEGNRWSGAYVRWLQTNTFETPYAQIAYNERLEQLAESRKRLAKVLRELKLMATQEPAIASLVKLLQSVPGVGFLTAILLVVELIDMTRFKRFDELASYIGLAPSIHESDERSYSRGLTKRQHHELRSRLLESAWIAVRKDPVLTMKFGQLCKRMNKNKAIIRIAKMLLSRIRTVWKTETPYVYGVIE

SEQ ID NO: 507515 - protein, 367 aa, unidentified
MKKISTAAAKQTRNFQDQKLTIGLDLGDRTSWYCVLDGAGEVVLEQKLSTTPKVMKEVFGGMPRSRIALETGMHSPWVSRLLSELGHEVIVAHARNVRLIGESRKKDDRLDARTLARLARIDPQLLTPVKHRSAQAQSHLMVIRARAGLVRARTSLINTARGLTKSYGERLRGCNPRNMNPEKAQGLSPELQAALAPLLVAIESLSEQIREYNERIEGLAQQSYPEVALLKQVKGVGTLIALTYLLTLEDPHRFRKSRDVGCYVGLQPGRRNSGQSEPQLHISKEGDPYLRTLLVQGAHHILGPFGVDSDLRRWGLKLAERGGKNGKKRAVIAVARKLAVLLHRLWVSGEAYEPLRNCQEVAVPVAA

SEQ ID NO: 507516 - protein, 347 aa, unidentified
MDHIGIDVHKRESQICLLADGGELIERRILTEPKRFAAVLGGRPPARIVIEASTDSEWVARSLEALGHEVVVADPNFAPMYATRTRKVKTDRRDARALAEASLLGAYRRAHRLSDVQRHVRGRLLVRDALVRTRTRYISAIRALLRQQGYRVPSGSAEAFVTRVRALALSGPLLSLIAPLLAVMRHLNRQLAYSDETIERVAAHDERVQRLRSVPSIGPVTAAAFVATIDDVQRFHHAHQLEAYLGLVPREASSGDTQRRGPITKGGSSRTRWLLIQAAVSILRRRPPDAEALRTWALRIAARRGKHVAVVALARRLAGILYALLRDGTVFTPRRTSQPVAAATLPV

SEQ ID NO: 507517 - protein, 410 aa, unidentified
MEVIWGCCAGLDVHKDSVEACVRRMSAGGKVEHEVRHWGTTTRELMAMAEWLGSMGVTQVAMESTGVYWKPIFNILEARFEILLANAHHLKNVPGRKTDIRDCQWIAQLLQHGLLKGSFVPPRPQRELRDLTRQRTQLIDEGSRISNRIQKVLEDANVKLGSVASNVIGASGRLMLEAMVAGEDDPARLADLAQRRMRSKIPQLEQALYGKLTEHHRWMLKLLLDQLRTTEQFIARLDERIVELTRPQQPVLEKLDAIPGVDRRVAEVLMAEIGPDMTPFPSDAHLASWAGISPGNNESAGKKRGGKTTKGSRWLRQALVQAAWAASHKKDSYFQAHARNLMHRRGRKRGLVAVAHSLLTVVYHMLKEDTAYRDLGSQFLDRLRARHLIRFHVRRLQNLGLQVTIAPQVA

SEQ ID NO: 507518 - protein, 405 aa, unidentified
MRFYQHGRKFYCGIDLHAKKMFVCVLDEHGQIVLHRNLPSDGDSLRRALEPFRDGLVLGVECTFSWYWLADWCRDEKIEFVLGHALYMKLIHGGKAKNDKLDSEKLARLLRGGNFPLAYVYPKEMRGTRDLLRRRTMFVRRRAELLAHVQNTYTQYNVPSRNGRGRDRLKEADPTAPFADENVRYMLRADIDVIEHLDETIVKLESQLIRHAKVDDPIRFQLLKTIPGVGPVLALVMLYEVHDIERFEEIGQFVSYARLVACAHESAGKKLGTGGRKIGNAHLKWAFGEAAADHPADGARDSLDRRSEDVHREADEAAWQSPRGRAARREDRSGRVLDDEAEAAVRRGVVLEERPAEVGTADGQECFQDKDDSRRDRDELTARVSRCSGARKSDHRGDPRGRAPR

SEQ ID NO: 507519 - protein, 400 aa, unidentified
MNAVGIDVSKGKSTVAVIQPFGVVIAEPFDVFHTDSSLKELVRFIKSLSGETKVVMEYTGTYYEPVANALHNAGIFVSVVNPLLIDDYDTNRVRKVKTDKLDALKIASYALDKWIKLRKYEPAETVRKTLQIMNRQCIKLNKILVMQKNSFIALLDCCFPNANTLFTSPHRVSDGHEKWVDFVMKFPHVDSVAKLPLSVFRTKYQSWCKKEHYNYSESKAEQIHAYARTIVSTLPMTDAVRKMVSEAAKLLNSTLEALGTLHSEMDALASQLPEYETVMNLYGVGKVFCSQLIAEIGDVTRLKSNKSLTALAGIDPPPNQSGKDDPKSRRISKRGSPALRRTLFLIMTIYLQHQPADEPVYQFLDKKRAEGKPYKVYMIAAAHKFLRIYYARVKELMPKE

SEQ ID NO: 507520 - protein, 389 aa, unidentified
MKIYVGIDIAKLNHFAAAISSDGEIIIEPFKFTNDADGFQLLVSKLESFDKNSIIIGLESTAHYGDNLVRYLVTELYQVCVLNPIKTCQMRKNNVRKTKTDKVDTYVIAKTLMIQDNLRFVSFFDLDMMDLKALGRFRQKTIKQRTRLKIQLTTYVDQVFPEIQYFFKSGLHQHAVYALLKEAPSPKEIASMHMTHLANLLKVNSHGHFTKEQAKELRVLAQKSVGANDSSISIQITQTIQQIELLDIQLEKIEAEMTDIMRFNDSVIMTIPGIGYINGGMILGEIGDIHRFSNPNKLLAFAGLDPSVYQSGNFQAKTTRMSKRGSRVLRYALVNAAWNVVRNNATFKAYYDAKRAEGRSHYNALGRCAGKLVRVIWKMLTDEVEFNLE

SEQ ID NO: 507521 - protein, 407 aa, unidentified
MRIFGLDVHRTFAEVAVLDERGVRSAGRIELTAEALHAFGRQLTQDDDVVLEATCNTHAIARLLRAYVRRVVVSNPLQTRAIAEAKVKTDKIDAAVLARLHASGFLPEVWSPDELTEQLRRQVARRATIVQHRTRLKNRVHAILHRNLLPRCPAADLFGRKGRNWLAAQALPADERVTVESVLRELDHVGEDLAAIDRDLAQIALTHPAAQRLMTIPGVDVAVALGLVAAIGPITRFRSPQKLVSYLGLNPRVRQSGLQPAHHGRITKQGRAHARGMLVEAAWVTAKTPGPLRAFFLRIRGRRGEQIAAVATARKLAVLAWQLLTTEQDYAWGRPLLAAQKRRALELRAGLPARRGQRGSTHGYNLKERRDQEREIGTQAERAYQTLVAHWRPQRPRRTATTKAIRS

SEQ ID NO: 507522 - protein, 404 aa, unidentified
MKVVRKICCGMDVHKDIIVATIASTDGNNVTTYLQKQFSTFNYDLLNLLNWLKQNNCYDVCMESTGKYWIPIFNVLETELNVFLTHPKYVKAIKGKKTDKKDSKWIADIFKHDLLKFSFIPPKHIRELREISRYRIKLVGMRASEKNRYQNCLTVSNIGLGSVFSDPLGKSSRAVLEEVMHSDIITEENIKKLLLKSASKKSEQVMQAIQHSHIETDQRFKLEHAMKHLENLDKYIQDCEVEMIKRCAPFIDIVKHITQLPGISFVSAMIILSEIGIDMNQWASDKEVASWVGVTPQNNESANKKKSVRISKAGQYIKPILVQCALAAIKCNSEPYFKIKYNRIKKRRGNKKAIIAIARMLLVSIYHMVKTGENFNPSDYDSFKNPKQNQSKITTKQALSLIHI

SEQ ID NO: 507523 - protein, 323 aa, unidentified
MAKRNTICAGIDTSKDKLDVALDGSSEELQVKNTAEGHQELVEWLKRHKVKRVGIEASGGYEQAAVVELRRQRFVVIVFQPIQVRAYATFHLQRAKNDKMDAALIAACTAAVKKIHPAPDPRLQPFAVHLTMIDQIKEDIAKLKNRLESCPDERVQKFWKEQIALLAKHRRAEFKALVAAIRKHRDLAARLDLIYSVGGSGLPTAVAILIRMPEIGQITREQAAALTGLAPYDDDSGKHVGARRIDGGRQRLRQALYTAALPASFRWNPQLMALYSRLIAAGKGHKRALVACARKLIVIINAVVARGTPWVAEPPRTASVSVT

SEQ ID NO: 507524 - protein, 283 aa, unidentified
MIRNAPRDAAVYGVDLGKNVFHVVGLDDRGAVIQRVRFRRDTLLAFFERAARTLVGMEACPGSQWLARKLQAMGHQVRIVPAQFVKPFVKSQKNDTVDAEAIAEAVTRPTMRFTQVRTSEQIDLQALHRIRDQLVSSRTRLINQVRAFCLEYGVAIRQGAGVFRLDLPRVLADETNDISSAMRRMLTELFEDVVGLDRRIAGVTREIEGLAAQDDRARRLMTIPGIGPLGATALLAAVGDGHQFRRARDLAAWSALCRGNTQPAARPRSLESANAAIAMSGGC

SEQ ID NO: 507525 - protein, 385 aa, unidentified
MYQLSGSTQAALDYNTTIIGALELSEKKWVLAVQLPGVSRHSRHVLEACGDGLASFVERLKARCAAAGRKIARVILTHEAGRDGFWLARFLARRGIEIHVIQPSSLPVDRRARRAKTDIIDVEMLLRTLMAWLRGEPRVCSMVPIPSEADEEARRAYREREDLTGERRSIVNKIDGILATLGVKGYKALRRDRREQLTAVRQPDGDPIPQKARARIERLLDRLDLVLKLIEQVESARDAVLKKDAPADEAERMIRSLTDLRSIGPDFATLLVREAFVRQFRNRRALGGYVGLGGTPFSSGGSEREQGIGKDGNRRVRAAMVELAWTWLRWQSDSALSVWFRARVGAMGGRIKKIMIVALARKLLVALWRYVMDGVIPDGAKMKAA

SEQ ID NO: 507526 - protein, 343 aa, unidentified
MKLFVGLDVSLEKTAICVISEHGKIVKEAQVESEPEALLDWISDQDGAIAAVGLEAGPLSQWLHRGLSEAGRPVVLMETRQVKGALKAMPIKTDRRDAEGIARLLHLGWFRPVHCKSVSAQEVRAVLSARKAMQQGFITLEMSLRGLLRNFGLKVGTISRGRFEQRIRELTAGNLMLEAATEPMLRARSALRRELAGLERHVRQLAQEDPVCRRLMSMPGIGAVVSLTYRSAVDDPARFTSSKKVGPWVGLTPSRNQSGERDISGAITKAGDVNLRRALCQAATVMMHRGRATWLRTWAAKLARRRGAKRAMVALARRIAVILHRMWKDDTDFRFDIPVPHAN

SEQ ID NO: 507527 - protein, 406 aa, unidentified
MKVYLGIDWSERKHGVCMINERGEVIQQLVISHTPEGFLELDTARRRMEVKARECVVGLETAHNLLVDFLWDQGYEQVYVLPPNAVKSAQGRYRQSGAKSDASDARLIADMLRTDQGRYTAWVPDLALTRQMRAKVSLVIFLTHSIVRTENRLRAVLLRYYPAALEVFSSLDAPITLAFIQEYSLPQAAAQLTFEQFKGFLRQHHHHQPKKWAGCYARLQCPQPQADPAILAVYRSEAKLLANLLGQLVFAKSKALQELEEIYLQHPDHEIYHSLPGTGPFLGPGLLSKFGDDRQRFPSPDIVQAIAGTCPVTVASGKKNVPQFRKACDHEFRYIAQQWAKQTIHLSPWAHAYYANIRPHCHSDNDAYRRLANRWLEIVWKLWIDRKPYNESKHLKQKALRSMPRQ

SEQ ID NO: 507528 - protein, 322 aa, unidentified
MSTPVLGIDIAKQRVEVALLIDGKVKNKSFKNTMEGFEALSLWLKKLGIPKVQSCLEATGNYGEDLGIYLHEAGHSVSIVNPARIKGFAQGELVRTKTDKMDAGIIARFCLAMKPEAWIPPSPEIRLLRALVRRADSLIDMLIQEKNRLGTAHESVIPLIKEHMDYLNKEIKKVRDQIADLIDQNPNLRQKKELLVSIPGIGKATIAVILAELNNLEKFNRVRELVAFIGLAPKETLSGSSIKGKPRLCKVGHVRLRKALYMPALVSIQCNPVMMAFYNRLKGKGKNGKVIVCAIMRKLVHIIFGILKSGKKFDPNYKPVFA

SEQ ID NO: 507529 - protein, 398 aa, unidentified
MTPQQGKKFRTSDDLTITHRHAAGIDIHSVEHFVAVPAEDVPTGFINPDVRLPDGVRKFGANTGDLEAIAAWLKDCGVTTVAMESTGVYWIPLYELLASRGFTVILVDPRQTKHAPGRPKSDVLDCQWIARLHRYGLLTASFRPADDIVQWRGFQRQREMVIRYAAQHVQHLQKALEEMNVKLTEVVSDVVGVTGMKIIKDIVRGERDPLKLAKHRDKRCNATEAEIASALYGNWRKEHLFALKQALKMYEFYQKQMRECDREIETCLRAFADKSAGAKLPERPAKRKPYRHEPKFGARKLLFRMAGVDLTVIEGISDTTALVILSEIGTDLSAFPSEKNFVSWLGLCPQHKGSAGKIFSRRVRRGANRAARAMRMAAQGCHHAKNALGAFYRRIQAR

SEQ ID NO: 507530 - protein, 360 aa, unidentified
MQRKDSQKIFEGQSVYVGIDYHKKSWKVSIYGEQYEHKTMSRDPDAEQLVRYLEKNFPGAAYHAVYEAGFSGFGSCRRLRDLGVNCMVINPADVPTSQKEKLQKTDKADSRKLARSLRSGALSGIHIPDRQLEADRGLVRQRFRIVKDIARKKNRVKSLLFQFGISMAERFTTAQTRYWSRPYTDWLLSLSGADPMVGPLIDNYVRIVNNLRKELLGINRQVRELSRTSRYKDSYNLLVTVPGIGLMSAMAFLTQLGDFTRFKRLDELCNYVGLVPRMYGSGDKMVVGKLINRGRKELKIMLIEASWVAIRQDPALMAKFNELIKTMPKNKAIIRIARKLLNRIRYVIVHRKEYVTGVVS

SEQ ID NO: 507531 - protein, 353 aa, unidentified
MNHTTVAVDVAKSVFQLAVSEHPGHVGEHRRLTRAQLTRFFSNRAACTVLMEACGSSHHWGRQLEQLGHSVRLLPAHAVRPYVCRNKTDRADAMALLEAARKQDLRDVPLKSVAQQTLTALHRLRSGWSATRTARLNTVRGLLREFGFVIPLGARQVVPHVRRLVEDADSGLPDVLRPAMDAACREILHLEQLIADVEAQLKRLAPQIPGVSRLLTIPGIGLLTATALAAFVGDLRRFPTGRHFASYLGLTPREHSSGLTRRLGSISKRGDVYLRMLLIHGARSVLVAASRMDAPDRLRTWALKLQASRGHNKATVALANRLARIAWAVWCHQTDFAAGAGAGGPHAMEDLDG

SEQ ID NO: 507532 - protein, 343 aa, unidentified
METYYYIGLDIHKKTISYCIKAIDGSLIDQGKIDADRKSLGEWVKGLPGPWVGAMEATIFTGWVYDFLKPYAIDLKVAHPEMLKAITAAKKKNDRSDAEKIGDLLRVNLLPECHMLSEEIRELRRILRYRNHIVRTAVNMQNKISGLLMEVGVCYSKRRIHGKKYFHEILERVEEIPPSVKELLKLSRSSYEMFRTFQKRLVETLRTNNLIHDRVQRLMTIPGVGELTALTWVLEIGDSGRFTSIRKAVSYCGLCSAQRESAGKEQRGPISKKRNKHLQTMLIEAAKLAPHWNEQLAIVHERELKKGNRNRATLAVARRLVAYMLAVDKKQADFKLPAAMQVA

SEQ ID NO: 507533 - protein, 342 aa, unidentified
MLIRTVARDNKPAFTRKNNMENISQVHVGVDVSKGRLDVHIHPLEKHFSVANSARGIEDLISKLSIYEVQRVVYESSGGYQKMLHRKLKEAKFKVWEVDPKRVKYFIASEGVKAKTDTIDAKMIARFSALKPQERKEIPLSDSADELRALVKRRSDLVEMKATEKKRLVHPAQIHCTKKIKRHIRFLEKEIQEVEDDIEKIINKDKQLKKKCEILESMPGVGPKISQILVAEVPELGILQNSQIASLIGVAPYVNQSGNYKGVASIREGRPSPRKGVYMGALSASHSKDNVFQRFFDRLIKKGKSAKVALVALMRKMIVVSNALVRKNEFWNPHFQKSTQIA

SEQ ID NO: 507534 - protein, 408 aa, unidentified
MLNAVGIDVSKGRSTVAVLQPGGVVVRKPFDVYHNQNEMNDLVTFIKSLDGDTKAVLECTGRYHRPIVEALHRAEIFVSAVNPHLIKNFGNNTIRKVKTDPADAKKIARYALDNWHELREYSDMDSKREQLKTMNTQFDFFMKQKTAAKSNLIALLDQTYPGVNNLFDSPVRADGSEKWVDFAYSFWHVDCVRRLSLNTFKERYTAFCKKHGYIFNELKAEEIYSASKSLVATLPKENGYRDLIRFSIKQLNLESEHVEKLRVDMNSLAAQLPEYPVVMGMYGVGTTFGPQLMAEIGDVMRFTHREALTAFAGVDPGRDDSGQRVAKSVKASKCGSARLRKTLFQIMTCLLQNMPEDDPVYQFLDKKRSEGKEYYVYMTAGANKFLRIYYGKVKEYMRNLQAEQSQGK

SEQ ID NO: 507535 - protein, 501 aa, unidentified
MFIRSICKQAVEKKRRNSTMKKRNIFQNQSQEILAIFEMAGNRSKVMCVPMDYAKKDHVVMFCNGNGKIIRKPFSVKNSPGGKNYLIDQVTKSCRHHGIKPEHVFYGGEDCGSYADNFIFALRSTNCLVAGVNAHDAKKQRENMQASTDSLDLMGICKMLISCRGNCSPAQTGIYWNLRTLVRQRRKLVSMATAVRCRIHTMVDRIFPGFLNEKKSGIFPFSKGSLALMGNKFSVHQIRRRRPSALSKFLARHLVQHSDHCTKKLQQYASQVLVPPADHIAVLQISLQQQVTLFTCLQDNINHLNKEIAQHLAQTPGAFLTSIRGIGITLAAGVTAEIGDPYKQKSLSNLVSYSGIIPKVKQTGGVQGKTRVKKVAKRCNRILKNYVVQSAGHIGIYGPEDLQSDYKRRDAQGQHADFGMSRRFLRMAISMMKTFHTYLPKNLRATKINMKDRADYYLQTWPKLIEKWHRAQALDIAFDKNMPLGQWRNIVEELYGIELSL

SEQ ID NO: 507536 - protein, 312 aa, unidentified
MGKIINMEKVSFNQVVKVGCGIDVHKDIIVATVRKNESEYETREFSSYTSSLTDLREWCKSQKVTHIAMESTGIYWKPVFNILEEGDFEILLVNARHVRNVPGHKTDKKDSQWLSKLLLSGLLKGSFIPPVEIRDLRDLVRYKRKVVGQCASEKNRIIKILEDANIKLSSVLSNVDGAVGTRIIDDLIAGKTEVGELLKHYHGKIKASREEMGKALQGRLTKHHQFMLQVIKESISDKEKLIEKLDKQIDEAVAQYRVELELLQTIPGVAYDSAVNIISEVGADMNQFPNEQHLSSWAGMSPGNNESGGKKK

SEQ ID NO: 507537 - protein, 415 aa, unidentified
METAFTFYVGVDWGTEAHQVCVTDAAGKVLWERSIEHSGEAICEFLGFLDTATGMEPGQAAVAIEVPHGPVVEAFLERRYAVFAINPKQLDRFRDRHTTAGAKDDRRDAFVAANSLRTDQHCFRRVVADDPLIVRLRELSRTEESFSGQLIRGVNQLSQLLLRYYPQLLKLCPYPGEPWLWALLELAPTPEAGAKLTLARLKSLLCSHKIRRWTARDLKQILSGPALPVTPGTVEAVSEHVLLLLPHLRVLHSQRKQVADRMQHLLEELESAPAEHHHSTEYRDLVLLRSLPGIGRILAGMIMAEASGPLRDRDYHALRAYGGIAPVTRQSGKSRQVSMRYRCNKRLRYALYHWARLSVQHDSHSKEHFERLKLAGHGFSRALRGVADRLLTVLIAMLRSGQPYDSAKRSSAVAA

SEQ ID NO: 507538 - protein, 422 aa, unidentified
MLEETQDTEEFIERVAALDIGKKELVCCVRVPGQGKRGRRLQEVRTYQTMTRSLLVLADRLGELGVTRVVMEATSDYWKGPFYLLEAQGFEVWLVNAKDVKHLPGRPKTDRLDAVWLCKVAERQMLRPSFVPPPVIRRLRDVARYRADLVAVRTAEKQRVEKLLEDAQIKLSVAASDIFGVSGRAMLAALLAGERDPKVLAELARGRMRAKRSVLEEAFTGHFTDHHGFPLARMLARVDALDADIAELDGKLEELIAPFTAAADRLDEITGVGRTAACAIIAEIGTDMGRFPTPGHLASWARFAPAVKQSAGKTKGKNATGHGNPYLARVLGEAAAAAGRTDTFLGERYRRIARRRGAKRAIVAVGRSILVIIWHLLADPDARFHDLGPGFYDTRINPERAKRNHVRQLEALGYKVTLQPAA

SEQ ID NO: 507539 - protein, 427 aa, unidentified
MNEPKYKPTICVGADVHLDKIVLQAVDKALGHEALECFRVTNNLPGAQLAAATIAQTATELGYARIEIGWESTGMLWIPFHRYLSTEPLLHPFELELICFNPKLVAKFKDGLVLRSPKNDDRDAFDIAARIRFGELPVTFVPGDFWQGLRRLTRYRYRLSKALSQEKMRFQSYAFLKASDWKRVKPFSNVLGATSAALLTEFTVAELQEMTHDQLVDLIKRRGRGRFTDPTTTARAVRQALRTSFPIAPRMDEIVTDSLAAIWDHIRYLDRSMKRLDKSIARYIDPIPNPIITVKGLGAVITAGILAEIVDVLRFEEQKHLAQYMGLTWRKSSSGGFVSQNTRLSKVGNVYLRYYFILGANLLRQHNLEYKAYYWRKHQEVSKYQHKRALVLTARKLVRLVHALLTKNVPYVRPRTTDPDQEDDGLQ

SEQ ID NO: 507540 - protein, 409 aa, unidentified
MERQIERGCGLDVHRDTVAACVRVPSPQGERGQHVRTFGTTAAELLLLRDWLGAHGVTHVAMESTGVYWKPVFYVLEDAFTCLLVNAAHIKQVPGRKTDVLDCIWIAQLLEHGLLRGSFVPPVEIRELRDLTRHRKVLIQERQRAANRLHKLLQDAGIKLASVATDILGVSGRAMLEALVQGTTDPEVLADLARGKLRKKLAALRQVLAGRFRPHHAFLVGQLLAHVDYLDEAITTVSAEVDTHLAPFARQLTQLDTVHGIARRTAEVILAEIGVDMSRFPSDGHLASWAGMCPGNHESAGKHKSGKTRKGNRWLRMTLIEAALAAIRTKDSALAARYRRLMRHRGHKKAVVAVAHAILRAVYHILADHTPYRDPGPDYYDRRHTHRVTRRAVELLERQGYRVVLEPAA

SEQ ID NO: 507541 - protein, 458 aa, unidentified
MAERENQTRSTDELDGFPVVRRDVAAIDVGSEQHWVCAPTRSGAGREVAVFAATTPGVEQLIAWLHERRVMSVALESTGVYWIVPHEMLERAGFAVQLVDTRELSRVPGRPKSDRLDCEWIQRLHSCGLLRGAFRPGEQVCMLRTLVRDKGRLVAEQSDWLRRMQKSLDQMNVRVHRAVADLEGATGMAIVRAIVAGERNPQRLAQLRDVRCQKSEAEIAEQLTGHWREDHLFSLEQGLKMYDAIAERIQAYEREILHYLAAITPADRRDDQAPPPPGPKARTMRRRGQDPLRQALYRMSGADLTTIDAIGVETVSVVMSEYGPDLARFPTEKQFVQHVGLAPHRPTSGGKPVKKRKKPASATARVGAALRMAATSMRRSQTALGAYYRRTAQRLGSDVAVFATARKLAQYIYRLLRWGHPYVDEGVAAYEKRYQAARLKGLAISAKRLGYVLVSVET

SEQ ID NO: 507542 - protein, 408 aa, unidentified
MELIALHKRVIALDVHQAKITACAIVEHDDGRIEVTKREFGAFQRDRRALGQWSLEIAPEVVVMESTGVYWKSPYAALEAVGIRAWVVNARHVKTVPGRKTDMADAQWLATLARAGLLRASFVPPVQMRQLRLVARQRQKLVGMLSAEKNRLHKVLTDAGIRLSVLVTDIHGQSARAIVKALIAGKPMHEVLDCKGRLRSTREELFEALSTEQFSTVHVFVADEIVQHIEQIEQRIARMDRFLLDGLQTMRPQLNLLQTIPGVDQIGAAMLLVEIGADMAVFGSAERLASWVGICPGNNESAGKRKSGHIRKGNAWVRRLLCEFAQAAARTRCALKDKFDSLAIRKGRKKSVIALAHKMLRTIFSMLSRGTHYQDKSVDYEALSVARNAPRWMKMLVKHGFIAEPSPL

SEQ ID NO: 507543 - protein, 351 aa, unidentified
MDRYIGLDVHSQSCTLAVEDARGKRLTERVLETNGKVLVECLQGIAGTRHLCLEEGTQSAWLYEVLERHVDEIVVVQPEKHRGNKSDSIDAWALAERLRVGAKTGRVFKAPGRFTALREAVHGYTMATQDVVRAKNRLCAVFRARAVPAAHDALYDSARRSTEINKLSPPQQHLARQLGERLDSALSAHAEAESWLREQGKLLPEVARLATAPGIGPIRSAQIVATVVTPDRFRTSRQFWSYCGLGVVTRSSADWAKDGDGWKRRELATTRGLNRNRNPLLKNVFKGAAMTVIAQMPNHPLHADYERQLAAGTKPNLARLTLARRIAATVLAMWKTKEDYNPTKQPPKTTA

SEQ ID NO: 507544 - protein, 339 aa, unidentified
MRREEFECIGVDVSKKTLDVALFRGKVDWNDGHIKIDNNSTGYKELKKWLHLKHAEKKQLRVCMEATGLYTHDFRTWLEKESITYYVVDSKLMHHFAPPQSIKGIRQTKNDKAGAFRIAIYCSLFHDTMMPSKLPSAAYFKLKRLLAERKQYSKQSVLYKQQLHDISIYDTVSSRIRKEEELKNLKIHIKQTDAEILTVLDTDDAIKQNYNLLISIVGVGLVVAVTTIVLTENFTTFTNPRKYASYIAIAPFPHESGTSVRGATKVSKQGFRQAKADLSISVLSAISHDPDIKDYWLRKKTEGKHTGTILNAIKFKLVLRMFAVVKRGTPYVNTKGYKG

SEQ ID NO: 507545 - protein, 377 aa, unidentified
MANVQQDFAKNKPIYAGIDVHKRDWVVTILCQGEELFHGTVPPDTSGLIRRLRGCMASEVHTVYETGPTGYWLHEALVEAGFDSIVTPPSLVPHIVTRVKTDHRDSRKLAAMLAGGFLKRVHVLTPEERAHRQLLRTRNQIEKHRKQTQNQIKGMLLFHGKRPPATLRERWSQDYLRWIESITWEYEALKTSMTTLLELFNHLDKQYKALTLEIEHLALTEKYRERARLLTTIPGIGIFTAMAILIELQDIERFRRADQLASYIGLTPSQRSSGERIRMGRITHCGNGRLRDRFVESSWTLIRYDLGTRATYERIKHQTGSGKKVPLCGIAIARRLVLRVRRVLIDKVPYKLSGPGSLPAGRDKRQEARRLVLKRVS

SEQ ID NO: 507546 - protein, 419 aa, unidentified
MSKQPVELAAFIGLDWADEQHAVCLQEAGATRREALKLDQTPEALQAWIQQLRARFGGRPVAIAVEQARGALIYALMHVDFLQLYPVNPQTLAKLRQAFYPSGAKDDPGDAELLLEVLLKHRDHLRVWVPDNILTRSIQLLTEGRRKLVDERTALTNQLTAALKMYFPQALDWFGDLHTARACAFLQRWPSLPQLQGATTSSVRKFYRKQGYRGDDKLKQLIQNIQQAQPLTEDPAVVLSSAMMVHALVKQIPSLTESIQDYDRQIASLFKEHDDSTLFGSFPGAGPTLAPRLLAAFGSDRNRFEYAAEVQQLSGVAPVTEKSGKACWVHWRWACSKFLRQSFHEFAGQSILKSVWARAYYQQQRQRGQSHHAALRALAYKWIRIIFRCWKDRTPYDEATYLKSLQLRGSNLASALKTT

SEQ ID NO: 507547 - protein, 427 aa, unidentified
MKKEDSRLEEFRQLRNEIRGSEKHLLVGIDIGKEKQNAFLGTATGKTLYKRLIFENNKEGFEKLLTHTEAAKVQNNLSQVVFGMEPTANYHKPLGEYLITRGHEVVLVSGNAVAKNRQLLDGRWDKHDGKDAANVADLISQGKCQYYEYPCREVRDLRGLLSLKRKLKKQAQGFWLRIRNNLVAQYFPEMDRYYGSCAQDNLAIVKNCLSPSVIAGMEYNEFFKTVVSRKKGLRQHKHLYKIWQLAGDSICCEAGDAAVCEAEVLVEQLKQTRKAIEQVDKEVLKLCCLFSEYEFLMSIPGFGPDISAKVLAYIGDEYRFDKASQVVKMAGLDLNANRSGKTTDRAVPVISKKGKADLRYALYQAAMVASSRNQHFIKYFTEKIRGREKEKGIKTKMRVKLSAKLLIIAWTLMKNKEPFNPDYLTVT

SEQ ID NO: 507548 - protein, 409 aa, unidentified
MQPILKSCCGIDVHKNMIKASIAKGPLDSPPKFYTRTFSTMTRDLLKLKDWLTENDVEAVAMESTGVYWKPIFNILENDFQVILANPQYLKKVPGKKSDVKDCEWIASLLRCGLIPASFIPQRPIRELRELNRTRRKLVGMMSSEKNRIQKVLEDANIKLASVGSKIDGVSSMTMIQALLDKDRLSKEEITDMARGKLKSKVDQLVEALNGKVTDHHRFLLKLHLNNIAFLADQVQEIDEQIQKLMIPFQKEESLIQTIPGISKISAKAIISEIGVDMSQFPSEAHLASWAGICPGNNESAGVKKSGKIRKGNRYLKAILIEVAWAASRTKGSAFSAIYNNIAKRRGKKRALVAVGHQILIAVYRTLKTGELFVDQGAEAIYRRNLESRQQSAIRLLERSGYSVAKASV

SEQ ID NO: 507549 - protein, 393 aa, unidentified
MVVSVGIDVSKNKHDCFIVSSEGEVLADVFTIPNNMDGFYALLEKIRACTTPQDKIKVGLEATGHYSYNILGFLLDNGLATYVLNPLRTNLYRKSLSLRKTKTDRVDARTIAAMLLSDVGLKPYTNTAYHNEELKSLTRYRFDKVKERAKLKSSISRLVCILFPELEKLVSSLHLATVYALLEEFPGSKQIAKAHLTRLKTLLGNVSKGRYGRDMAVTIRSAAQNSVGSCMPAKSLELQHTIRLIRELDAEIAEIEAEIETMMDKIQSPITTIPGMGFRMAAMILAEIGDFSRFESPDKLLAYAGMSPSTYQSGQLKNCYPHMEKRGSRYLRYALYNAAKYVCHWDPTFAAYLAKKRDEGKHYNVALSHATKKLVRLLFALERSRQPYCSLAA

SEQ ID NO: 507550 - protein, 438 aa, unidentified
MSEKSKSLNVGIDIAKSSFVAEFMDDEGKRIAKGQGFDNNLLGAGELEEALLNLASRDGYQRCRVGLEATSFYDFHLAEYLAGSLRLQAVFGIEVYRINAQRIKNFKRSYPNMDKTDKKDAWIIADFLRFGRLPPPYAKKDAFWALQRITRYRFHVVGALTSEINYFAAHLFLGAPGFLQQEPVRPLSATGKMLLEEFASPDELANASLEELTVLITKAGKNHRLNPEEVAQRVQQAARESYRLRPELAKNVNFVLTMSLRSIRAYKAALKEIDEAVGDQSEAFVNPLITVPGLGPVYSTGLLAEIMPVERFPSDDALAKMAGLWWPRHQTSEFEAEERRLPRGCNRYLRYYLVEAANALRVHNAEYKLFYEKKYQEVTKHQHKRALVLTARKLVRLVYSLLKSNRNYSLEYEPPVRLPKEQKNTTAAATSPKELACG

SEQ ID NO: 507551 - protein, 448 aa, unidentified
MNTRTTVADPGFRYFPDTQGYRPIIPPALPVINGSALHQQSASPPDTDTVSLPQKMHRLTFQTLIFILQLPQTPQFGHAQTSEFLLPVNGMDYLLPLRLTVRNVLTRRITMNIVFLGIDLAKNVFQLCGLNQAGKPVYTKRTGRKELLQTLANIPACLIGIEASTGAFYWQREFEKLRHKVKVISPQYVKPFVRGQKNDGNDAQAIAVALMQPTMQFVPPKSPEQQDIQALHRARQRIVNRRTATVCQIRGLLLDRGSPIGSAVSRARRAIPLILEDAENGLSSRMRRTIAELYELFNDLGRRIHFFDKEIETVFRQSEACQRIARVKGIGPKTATAIVAAIGKGTEFKNGRHFAAWLGLVPRQHSSGDRQALMNMMKKGDKHLRTLFIHGARAVVRVATNNNDGHMNQWVNQLKERRGFNKTTVAVANKNARIIWSMLRNETEYQVV

SEQ ID NO: 507552 - protein, 370 aa, unidentified
MSQSRTLFIGMDVHKDSIAVAYVAQDHGAEVTYLGARGTRQCDIDQLVRKMQSKAKHLLFVYEAGPCGYWLYRYLPRKGSDCWVVAPSLIPHKPGDRVNTDRRDARQLARLARSGDLTVVYVPKVEEEAIRALSRAREDAISDLKDAKFRLKAFLLRQDIRYVGRAHGGPAHLRWLSEVVCPTPAQQIVFQEYVRAVQEHTERLQRLEQELQEQVNAWRLNPVVEALQALRGVQCTVAVTMVAEIGDLTRFDTPRELMQFLGLIPSAYSSGEQRRQGSIPKAGKTHARKAVVEGAWAYRYPAKVSRHLQLRLEKPPKMIQDLSWKAQVRLCTRYRRLVSRGKHANVVTVAMARELVGFMWAIATQVPLTA

SEQ ID NO: 507553 - protein, 372 aa, unidentified
MGESIMNNVTSLAIDLAKNVFQLHGTDAKGKPILRKKISRAKLAEFVVNLPLCKIYMEACGSANYWGRKFKGFGHQVKLIHPKYVKPYVKRNKNDMNDAAGIAAAARDPDMRFCDVKTEAQQDVQSVHRIRSLLIQQRTALSNQIRGLLAEYGIVIPKGISNTRRCLPEILGNNLNNLSGLMLDCLLELNNSFRQLDERIAFYNKKIELLFKENEVCKRLEKIPGIGELGATILASVLGNGSAFKNGRHFAAFLGLVPRQHSSGGKAKLLGISKGGDTYIRTLLIHGARAVLRWVNKKTDNQSIWIKNLVTRRGKNKAAVALANKIARIAWAVIHENTEYNPNYKPIIKNAPNLSAGSLATALSRSALRSPA

SEQ ID NO: 507554 - protein, 343 aa, unidentified
MHKLSVAGFLGCGIDVSAAQLVVALQSEGEGYVQRSFPNRAPGHRALIVWLQKAGRQVRVCLEATGLYSLDLALALHGASGIEVAVLNPKRVNRFAATLCRSKTDPADAQVLAEYARRMPFQLWQPPCAAALELRAVTRHIAALTQQHTRESNRLHAASASTAGARCVRQDLKRSLRDLERRIAKLRGAALARVQQHPELRVRLALLLTMPGIGEVSALNLLGELALLAPSLTVRQWVANSGLDPAHHQSGSSVQKRSRISRAGNRYLRRALYMPALVAARHDPHLRAFYQALVARHKAKMQALVAVARKMLHAIFGIFRWNCAYDGPRLLPNIGLPDLIAAA

SEQ ID NO: 507555 - protein, 345 aa, unidentified
MDHFAGLDVSVKETSVCIVDETGKIVREVKVASEPDALLPVLMNPAYHFKRIGLEAGPLSQWLFSALAEADLPVVCVETRHMQAVLKAQINKTDRNDARGIAQMMRVGLYRPVHVKTLRSQKLRMLLTHRKLLQSKAIAIENDLRATLRNFGLKVGMVGKVRFEERIKELVENLPDLAALVEPLLVVRRVLREQIVILHRRLLAIVREDEVCRRLMTTPGVGPVVALTYRATVDVPARFRKSKAVGAVFGLTCSKYQSGEIDRRGRISRCGDEMMRAMLYEAAQSMLRSKKWSWLKAWAMQIARRRGMKKAIVALARRLAVIMHRIWVDGTEFRWTREQAAAAAA

SEQ ID NO: 507556 - protein, 336 aa, unidentified
MRELLFVYIGVDVSKETLCVDAGDAFRGVVPNTPDGIRKMLAVVKRKLGRGRASHVCLEATGPYGEALLAVCRGGGFPCSVLNPAKVRHYAKAMSESAKTDPIDARVIREFAEAKHPAADRVPGSAETLLRQLMTAREALTKSAVQLEGVLDSMTCASARKAVTQAVGCIKRKIRALEDGMATALKADRRLEGLAAELAGIDGVGALSAAKIVALVPEPGSLGRRDAASIAGLAPFRRDSGKFSGKAFISGGRASVRRALYMPALVAVKHNPTLKAFYQRLVGQGKPFKVAITAVMRKLFIHMDGVAHKWLAAHGGTGEGNAPQPFPLLPSFPRTP

SEQ ID NO: 507557 - protein, 458 aa, unidentified
MNKVKTKKAKTKSILEMPVVNPYSAGIDVGDKEHVVALPEGLAEVRVKKFGTMTCDLEQIIDLLKQGEIDSVAMESTGVYWKPLFSMLVRNDFEVYLVNAGHVKNVTGRKTDENDAMWIQKLHSCGLLKSSYLPDDEQEALRTLVRYRKTLVQDSSRFVNRMQKSLELMNIKFHTVIKDITGKTGKAVVEAIIAGQRNAADFLPLIGKGIKSDLSTIEKSLQGNWREEHLFTLKENYTIYKEYREHIAVCDNEIEKQLQQYEAKRNEGIIEGTVADKAEDHQWIKKQRAKNHPRFDVRGYLQRIYGVDVLSIYGLNNVGGLEILAETGTDMSKWKNEKHFVSWLNLCPNNKISGGKLISSKLLSKKPSPASIAFRHAANGVQKSDHWLGDYFRRMKAKGGNKYAIIATANKIATIFYKMVRYKEEFKPMDLELYQQKYKQAKIAYLERKLNELKRLAS

SEQ ID NO: 507558 - protein, 314 aa, unidentified
MILPLRCVGIDVSKRMLDIFDDGIGTVERIANAPQPIIEQVARWRCGNVFVVFEATGVYDRELAEALHQAGIRFARINPARARDFARAGGQLAKTDAIDARMLAAFARQMAPAADPPPEPARNTLALLAKRRDQLVQMRAQEKNRRSEARDRAMKESIARVLSYLDGEVEAIEAEIKALIKSEPEISEQARLIRSAPGIGPVACMQLIAQMPELGQVGPKQVAALAGLAPLNVDSGSYRGKRAIGGGRKRVRDALYMAALNAVRRDGSFKNFYQRLRAAGKPAKLALIAVARKLLTILNAMLRDRKIFLQPKPS

SEQ ID NO: 507559 - protein, 311 aa, unidentified
MYYIGIDVSKKDLSVFDGKDLKFINQEGLTSFKKYLKKKYSLSEIAIIFEPTGVYSLYLKEFCAENSIKAYIVNPKQSHNFTRALGRRSKTDKIDAQILYQFHKLIDLNDIKVPKVNQEAKVLASYLVSYEFALKQRISLSHHLESLRDKQLIALIKRDLKRAKRLEDRIFDDIKEYLGKNQNLKEDYQRLSTIPGIGEKAAIALLALFKTYQDTNRAQITALAGLDPVRRESGTSVKHKVKISKNGKGIYRKILYLPTLCATVHNQKIRVFYQRLIAHHKTKKLAVIASMRKILLIAHAMYRDKTEYVAT

SEQ ID NO: 507560 - protein, 390 aa, unidentified
MFYLGIDIGKFNHAAALMNQQGKVVATLSPFPNTRNGFQNLLALITEHLPPTEELRVGMEATGPYWIPLAEWLKTHGWIPVILNPIKTASLRNYGVRGAKTDNIDSVLIANTLRIEGEQPQPASPKLSDELRHFTRLRADMVKDRTRIGLRVTSILDRLFPELLSSFSKALSPSCLALLCEAPTPSKVLALGEEKLAALLRKASGGNLKATQAKEIIDKAAQSIGVSSQSMEEVLALLLEQINLINSQLRVVDHRITQLYEQAGVCFTSIGGVGTLSAASILAEYGSVTKFTQPKQMVAFAGIDPKLRNSGQHQGQVHISKRGPHYLRRALYLACQGVVRNDDYFHSIYQRHRDKGKSHKEAIIAVINRFIHVLYAIWRDDRPYYPLTQA

SEQ ID NO: 507561 - protein, 349 aa, unidentified
MKIIGCDFHPSYQQIAMLDSVSGEIVEKALSHERKEEVRTFYAGLEGSVRVGIEASGQSQWFERMLAELGHEVWIGDAAKIRASCERKQKTDRRDAELLLRLLAEDRFPRIWVPTAVERDARQLLLHRHKLVRLRTQVKNQLQAQALNQGVQRKRKLWSEAGRKQLESLPLLPWASRRRAELLQLLDQLEASISELDRAVAEQASARPAARRLMTHPGMGPVTALAFALTMGPTERFQRGKQVASYLGLIPSEHSSGGHQQRLGHISKQGNPFLRGLLVEAAQSAVRYEPEMRRAYQRLAQRKCRALAKVAMARKLAVRLYWMLRLQVNYAQLIQGSHAGQSGTFCGRS

SEQ ID NO: 507562 - protein, 372 aa, unidentified
MSANAITFVGMDAHKKAINVAMLLPGTKQPMEWQVANEPAAIRRLAKKLVREAPGEVRCCYEAGPCGYALQRELESAAGIICEVVAPSLIPVKPGDRIKTDRKDARKLAEMQRGDLLTVVHPPTADEESVRDLCRCREDAQEDLTRARQRMGKFLLRRGLVFTVCKRAWGKLHRQWLRGLSFENSADLAVFGDYLLAIEQLEERVLTLAAKLTEIAQRDPYREPVGWLRCFRGIDTVAAMTLVAELHGFRRFRSARELMAYLGLVPSEYSSGESRHRGSITKAGNGHARRMLVETAWHYRHRAKSGETLRRRREGQPARVIALADRAQERLCRRYRYLVERGKPTPKVVVAIARELVGFLWGALQKPVEVRS

SEQ ID NO: 507563 - protein, 338 aa, unidentified
MKLYAGIDLHANNSVVVVIDEDDRIRYQKRVHNELGALLQALAPYQATLQGIVVESTYNWYWLVDGLMATGYRVHLANTTAIEQYKGLKHTDDESDARWLAHLLRLGILPEGYIYPKEERAVRDLLRKRSQLVRQRTSNLLSIQNLLTRNTGSALSGNRIKQLTIAEVEELLPQAELALAVKSNLAVLQCLEEQIEQIEAVVLAQLKLRDGFQPLLTVSGIGQILGMTIMLETGEIGRFATVGDFASYCRCVSSQKLSNGKRKGQGNVKNGNKYLAWAFVEAANFAIRYNAQIKRFYQRKQAKTNGVVAIKAVAHKLARACYYILRDQVPFEVTKAFA

SEQ ID NO: 507564 - protein, 318 aa, unidentified
MENISQWVGIDISKATLDVYLRPMGKAMKVANTKEDRAKLVETLKSYTVNLIVLEATGGLETELVIQLQEADLPVALINPRQGRDFAKATGKLAKTDAIDAQILAHFGEAMQPQILAVESEESRQLGDLISRRRQLVEMRTAEKNRRERARGKALVDIEAHLEYLDNCLEKLNQEIEELTQANQQWLEKVNLLKTVPGIGQVISTTLVSDLPELGQLTAKQISRLVGVAPINHDSGQHKGKRMIQGGRAQIRATLYMGAVVAMRHNPVIKTFYERLVGRGKSKKLALTACVRKILVILNAMVRQNQPWQLADNLPPCS

SEQ ID NO: 507565 - protein, 405 aa, unidentified
MFEIEDVGVFLGLDVGKSAHHGHGLTPAGKKVFDKPLPNSEPKLRAVFDKLTAKFGTVLVIVDQPASIGALPLTIARDAGCRVAYLPGLAMRRIADLYPGEAKTDAKDAAVIADAARTMPHTLRSLELTDEITAELTVLTGFDQDLAAEATRTSNRIRGLLTQFHPSLERVLGPRLDHQAVTWLLERYGSPAALRKAGRRRLVELIRPKAPRMAQRLIDEVFDALDEQTVVVPGTGTLDIVVPSLAASLTAVHTQRRAMEAQINALLEAHPLSQVLTSMPGVGVRTAAVLLTTVGDGTSFPTAAHLASYAGLAPTTRQSGTSVHGEHAPRGGNRQLKRAMFLSAFACMNADPASRTYYDKQRARGKTHTQALLRLARQRISVLFAMLRDGTFYESRTPKDIELAA

SEQ ID NO: 507566 - protein, 356 aa, unidentified
MEGDNDAMYIGVDTHKAAHVLVALDEQGRTLGTRDITNSPDGWGEALRWAQGWPGERVWGLENSGSWGTGLAQALLAQGEAVVCEVSPQRTAQYRRRGRTQDKTDHADALAIARLLVAEGEQLPRVQADDASTELRLLSDHRDNLRGERTRLINQLHDQMVQLDPAYKVNSGPLKQRRGILYCRDWTLAQPSGVASTRLLIVHQRATQILRLDDELTAITMEISVRVQATQTPLLALRGVGEVTAARLIGELGSPPRIRSATALAALSGIAPVAVSSGGRTGYRLNRGGNRRLNRAIHIIALSQRRCEPRAQAYYAKKRAEGKTAREAMRCLKRRLVDVLYRTLCQDRGVPAASAA

SEQ ID NO: 507567 - protein, 466 aa, unidentified
MPLRLGIDIACRAAHQVSLADEQGRFIWTGRRFRTTPQDLDRLWNMLPDGTDPADVLVVMEPTRNAWVPLAAWFRRHGAEVVLVPPERSADLRRYYAKHTKSDRLDSQLLARLPMLHPDGLYAERGLGPGDALKRAAKLHSTLTHRRNQSLARLEALLEILGPAWHDAIGADLANRTPLKFLAAGYADPYVVKRLGRTRLARFCYRHSRGAWGEPHADALLTAAHQTLQLWSGGELDYPDLAEDIGIEARLALQLTEEIKDLDERTALLLGAADPAGILTSAPGVATITATAILGRLGDPNRFSSLAGARAFTGLVPILDASGLNGRHGGPTKRGDAVLREALFMAAGQARRIDPTLAAKYHRLMTEAGKHHNSALCHIATTLLTRLIACWRAGQPYVLRDVDGTAVTIEHARAIIAERYAIPKDLRARRRTTTQERTGEARSRQALHQPVRPTRTLRPPQRLDIT

SEQ ID NO: 507568 - protein, 327 aa, unidentified
MTDSVLGIDIAKKKFDVALLQDGNYKMATFTNDRRGFTKLVRWLKNGHVGQLHACLEATGSYGEALALFLHETGFCVSNVNPSRIKAYAESQLRRNKTDREDAKVIAHFCLTQQPSHWTPPPPAQRELRSMSRHLNALKKMRTQELNRLKSGANSTIVHSALEEHIAFLDAQIQQLADQIQEHISNRDMLKKERKLIQSIPGFGRLSAAKLLAEVPDLTAFASAAQLAAYAGLTPRQKESGSSIHKRARLSKTGNTHIRAILYFPAMVAIRHNPIVRALAERLEARGKSPMTIIGAAMRKLLFLAFGVVKTDKPFDPNHHVNILRTT

SEQ ID NO: 507569 - protein, 343 aa, unidentified
MEHFAGLDVSVKETSVCIVDDTGKITREVKVASEPDALLAVLTNPLYHFKRIGLEAGPLSQWLFSALAEAGFPVICVETRHMRAALTAQINKTDRNDARGIAQMMRAGLYRPVHVKTLRSQKLRMLLTHRKLLQSKAIAIENDLRATLRNFGLKVGVVGTVKFEARIRELVENVSDLVVLVEPLLLVRRVLREQIGILHRRLLVIVRDDDVCRRLMTVPGVGPVVALTYLATVDLPARFRNSKSVGAVFGLTCSRYQSGQVDRNGRISRCGDEMMRAMLYEAAHIMLVRSTKWSWLKAWAMQIVKRRGIKKAIVALARRLAVIMHRIWVDGTEFRWTREAAAA

SEQ ID NO: 507570 - protein, 366 aa, unidentified
MNNGSKGAAKMTAGLDLGDKYGHLCLIETESGEVIEEGRLRTTPEAIRRRFDSEQPLRIAIEVGTHSPWVSRLLEECGHQVLVANARKLHLIYANKRKSDKLDAENLARLARVDPKLLYPLEHRSEQSQAHLALLHSREVLVRSRTQLINHVRGTVKSFGHRLPKCSACSFHDKVADGIPELLREALEPILKTIASLSARIRDYERKLETLAQEHYPETELLRQVQGVGALSALAFVLTLEDPDRFEQSRTVGAYLGLVPSKDQSGEHDPQRHISGEGDEMLRRLLVGSAHYILGPFARDSDLRRHGMKIAERGGKNAKKRAVVAVARKLSVVLHHLWVSEEVYDPLYNARRQLEGVSYPFVKAVS

SEQ ID NO: 507571 - protein, 331 aa, unidentified
MLQTIDVGIDVALASLTVVVLDPAGQPGPPFEVPNTAAGCRRLRRRLERLELPVRACLEPTSTYHLRLARELFASARVTVCLVNPRAVRDFARGAMGRGKTDAADALVLARYGRALEPRAWQPPGPVERELRAISRRIDDLTGRRTALKNRLHSLAAAEPPGVVVADLQSELRGLATRLRKLRAAACALIRTQPQLERRYQLLLSMTGIGAVSAIRLLAELGGLPAELGKKQWVAAAGLDPVPRESGKSLNGPRRISKQGNARLRMGLNVPALVAARYCPPVRAYYQRLQDRGLAKLAALCAVMRKLLQAIWGMFHSDQPFNPELLCQAPR

SEQ ID NO: 507572 - protein, 356 aa, unidentified
MQTENKELDFRNKTIYAGIDVHKTKWVVTLRMEHLELKTFSMEPSVEGLVGHLKKRYPGASYSSVYEAGQSGFWIDRQLKRLGVANMIVNPADIPTTGREKDEKDDYRDSRKLARELENHTMRGIYVPCESQEALRSLCRIRSQFVGEKARLKNRIKCFLAYYGKPFSGKNSRQWSERLLTTVGEIRYPSSISNECMGLYLEQIVLLQQKVKAIEQMMKEKAEELGVLRTVERLQTIPGIGFVSAITIYTELSDITRFQKLDQLCSYIGLVPSTSSSGEKERIKGVSLRQKKYLKNIIIEASWMALRKDRALTLSYSQLLSRMQSQKAIIKIAKKVLNRIRYVWIHDTDYQLSVVR

SEQ ID NO: 507573 - protein, 337 aa, unidentified
MEQQQHYVGIDLHRRRSVIVRRTESGETLETVRIDNDPVALAAELAKAGEHPEVILEATYGWYWASDVIQGCGGTVHLAHPLGNNWGNRRVKNDERDATDLVDLLRMGRLAEGWVAPPPLRELRELLRYRGKLVHMRTSAKAQVHAVLAKEGVAVPMSDLFGIGGQRLLDEVELGKSYRIRVESLRDLIEIYDREIAMLEKETAPFFAGDLGYHAIQAIPGVGPVLAAVFGAEIGDIGRFTSARHLCSWAGLTPTHHESDEKVRRGHIIKQGCRLVRWAAVEAVSRQRGDTPIRAHHQRVGERRGKQIGRVAAARKLLILVYYGLRDGEIRCLAKTG

SEQ ID NO: 507574 - protein, 341 aa, unidentified
MEQASTIGLDIAKHVFQVHGADAAGHVLFRKRLTRARLLGFLAAQAPCVIAMEACAGAHYWARAIGKLGHHVRLIPPAYVKPFIKRQKNDAADAEAICEAAQRPSMRFVPVKTEEPQANGIVFRARDLLVGQRTQCVNALRGHLMEYGYVFPKGITHVESLVALIDDPSSALPDGVRVVLKLLVDTFTALEAQITALDVEIKQRSTSDPTARRLMTIPGVGPIASTAITALVPAAEGFRAGRDFAAWLGLTPLQKSTGGKQKLGAVSKRGERTIRRLLIIGASAVVQQASRRGASKGSWLAQMLARKPKMLVTVALANKMARIIWALLVKGGTYRAPAVAA

SEQ ID NO: 507575 - protein, 435 aa, unidentified
MRCERGSVDVVLPARSRSESTGKGTGMRIIGLDIHRAFAEAVAWEDGKLNRLGRVDMRRDLLSAFAARLSPEDVVVVEATGNAASVVAVIAPHVKKVVIANPMQVRIIAHAKIKTDTIDARVLAQLYASGFLPEVWIPDEPTQALRRQVTRRNQIVRQRSRLKNIIQSILHAHLIPSCPHQDLCGPRGRDWLAVQVVPEDERLAIERHLREFDRLGEDLKVIERDLARSALADDGVKRLMTIPGVDMVVALAMAAAIGEATRFDKPQKLVSYLGLNPSVRQSGPGPAYHGRITKRGRGHARGMLVEAAWAAARAPGPLRAFFLRVRARRGQHVAAVATARKLTIIIWHLLIKGESYTWARPSLHAKKLRDLELKAGHKAARGQKGEAHAYNVKSHRDEERRWVEQAETAYTRFVAGWNRRGPKKVRTGAAKEERL

SEQ ID NO: 507576 - protein, 330 aa, unidentified
MPEPVVIGIDVAKASLAVAVHPSTEAWSCATTSEALDALVARLIAFQPVRVVLEASGGYEMPVVAVCTAAGLPVSVVNPRQVRAFAQAIGRTAKTDPIDALVLARFGARVEPPVRAIPDTTTQALAALVARRRQLLEMLGAEQRRLAQATTGPVRRDLRNHIRWLQRRVTDVDREIGGTVEQSPVWRVQEDLLRSVPGIGPTIARTLLAELPELGRLTRRQIAALVGIAPFNRDSGRWRGYRTISGGRASVRATLYMGALVATRYNAPLAAFYDRLRTKGKPAKVALVAVMHKLLTILNAMMKHQTEWDPKAASTSASPTRRTRAAAVAH

SEQ ID NO: 507577 - protein, 371 aa, unidentified
MDEAIKVYVGLDVHKESIEIAAADIGRAEPRALGRITHDIPKLLRVLGKLAEPHAVHVVYEAGPTGYGLQRELAARGYHCQVIAPSLVPKRPGEHIKTDRRDCLNLARLSRNGDLTAIWVPDTADEAIRDVARAREDAINARSKARQHLRAFLLRHSVRYSAGKKAWTKMFYRWLGTVIMPNSVSQMAFVEYRLAVQAADERVERLTGALTQSICGWRFEPVVAALRALRGVDSVVAIGLVVEVGDISRFDHPRKLMAYLGLVPREHSSGERTQRGSITKAGNTHARRLLIEAAWNYRFRAKIGRQAQARQEDLPAPVREIAWKAQVRLCDRFMRLSGRGLHQNKACVAVARELTGFVWAIARIGQPAHAG

SEQ ID NO: 507578 - protein, 402 aa, unidentified
MNCVGIDVSKGKSMIAVMRPFGEVVVSPFEVRHTASELSELARLLKNLDGETRVVMESTGNYHAPVAWLLHGAGFYVSVVNAMLVHDYGNNSLRRAKTDKKDAVKLANYGLDHWLTLPRYVPEEDTRLMLKTCYRQYQQYSKVQTMLKNNLISLLDTAFPDANRLFTSPPRADGSEKWVDFVATFWHCECVCGLSKKAFTAKYQKWCRKHGYNFSQDKALDIYASACGRFGVMPKTNTAKLLVEQAISQLQTTSAALAALKQEMQSLAASLPEYPVVMEMFGVGPTLGPQLIAEIGDVRRFHSKKALVAFAGIDAPPYQSGQIDVRSRSISKRGSASLRRTLFLVMGVLLQCAPMDEPVYQFMNKKRSEGKPYRVYMMASANKFLRIYYASVKAYLDSLEHD

SEQ ID NO: 507579 - protein, 324 aa, unidentified
MITKENPPVFIGIDVSKANLDVAVRPTGESWQVSNDPEGIGQLVEKLRQYSPMVIVMEATGGYEAASAIALGVAGLPIAVINPRQGRDFAKSLGRLAKTDRIDATILARFGEAIRPEPRKLADEQTLQLQAVITRRRQLLEMLVAEKNRVMLAHTIVRPRLIEHIQWLENELDKVDKDLRDQLQKSPLWRENDENLRSVPGVGPVTSTTLLAELPELGHLDRKKIAALVGVAPYNCDSGQMHGKRAIWGGRAAVRSVLYMATLSATRWNPVIRSHYQHLRDEGKPFKVALVACMRKLLTILNAIIRSKSSWNSDLAVPKSLATA

SEQ ID NO: 507580 - protein, 370 aa, unidentified
MLDTTTFVGLDVHARSIKAVSLDVMTGEVRCATFGYDAGAVAAWVRSVDPRARCVYESGVTGFDLQKRLSGLGVDCVVGAVSKMIKPSADRRKKNDRNDAEFLARMLSVGNVVEVWVPDDECEAARDLTRALEDARDDLSRSKQRLSKFLLRHGLVFDERTPTGRRKGNWTRAHWSWIESIRFAEGADNEVLAYYVEAVRRAAEEKSRLEGLVGAEARKPRWRRRVDSLRCLKGVDTATAADLVFEAGEFSRFRNARSFAAWVGLTPSEHSSGESDRRGAITKAGNKHLRKTLVEAAWHYLTCSGRPKDLAKGQAPDPAARRHAAKGVRRLVERREALLARGVHGNKANVATARELACWVWAVGLMAEEA

SEQ ID NO: 507581 - protein, 366 aa, unidentified
MEQETSRFVGIDLAKRSMEVCILAEGKSALRSSFKTDAAGRARLAAKLNGNDTVAVEACSLAFVLARQLGRDVGCRVHVLNPGKLAVIWQSTRKTDKEDAQKLASLIQRYPEDELPIVNVPDEREEAMRSVVSMKHYLVVLRTSLLNRLHALYVQGGMTFVKKSELDSGAARERMAGQLDGRLARFAAVLGKELEVTEEQVASLDEEMRRMVAEHELAPYIMSLPGVGPGVAAAFLAYAGDGSRFSTPAQVANYIGLVPRLDCSGETNRYGHITKEGCRAVRGVILQATWSLIRCKEGGRLKEKFFLLSERRGKTRSAVALARRMVGLIWILVSRREYYADASKEMLEKKFRHYGLKSEGWESNVA

SEQ ID NO: 507582 - protein, 347 aa, unidentified
MKFYTQTHKHYCGIDLHARCLYVCILDQQGNILVHKNIKANPQALMQVVEPYLDDLVIGVECMFSWYWVADLCREREITFILGHALYMKAIHGGKAKNDRIDSNKIAVLMRGGMFPEAYVYPREMRGTRDLMRRRMHLMRKRSELLAHIHNTNSQYNLPEIKKNLCYAFNRDGIAERFSDPSVCKSIELDISLIEFYDKQLSKVEWYIQQQAKDCDQHSLILLRTVPGIGKILSLVILYEIHTIERFASVQNFASYCRLIKCNRESAGKSYGTSGKKIGNAYLKWAFSEAAVLFLRKNPEAQAWVEKMANKHNKARALTILAHKLGRAVYFMLQRKTVFDQERFLNS

SEQ ID NO: 507583 - protein, 309 aa, unidentified
MTLPLFHVGCDISKATIDFVDNSNGTHKQIVNTRREIVKFLKPYRDKNVRFAFEATGYYGLELQASLSKAGLVPIMVNPLHARRFAQSRGHLAKTDRIDAAQLADMAKRFDLPPTKTFCQAEQGLKSLITRRDQLVDQRASEKKRLHQTDMKPVIASLQRTIGQLNEEIELFEVLIEQAIAAEPEFVQKSRLLQTVPGIANATAPVFIAMLSELGHTNRREIVALAGLAPFNRDSGTMRGHRSITGGRQRIRRALYMAALAASRTKSKLGEKYRALRAAGKPAKVALIAIARKIVTIINAILKTGMAYQ

SEQ ID NO: 507584 - protein, 394 aa, unidentified
MILVGIDIGKNKHTFSIIDKNSGEILLSPSDFSNNLKGFLFLIQKLSSYTKSELLIGMEDTGHYHFALLKYLLDRRYAVALINPTTTDLTRKLQGGITKNDPLDSLTICDVISSNHRNKPYRVTTLNRFDLYEQKQLTRHHHNLKEELNTYKNRLQKCIDIVFPEFNSLFHSKYGIVYMNILKAFSSAKAIANADIRSIRKCFEFKGQGKRISLSAEQLKLTAKSSIGIPSVAEEIQIRHLVSQIELLEKQLSEIDKRIEEFSLKNNSPILTIPGISHFSGTSIISELGDICNYTKASQIIKFAGVAPYHYESSQFTAQHTAITKKGSKYLRKTLYQIILPVISNNEVFYAYYTKKLNEGKGHRCAQGHCIRKLLRVIYHLLSTRQPFNPKLLV

SEQ ID NO: 507585 - protein, 358 aa, unidentified
MKYYIGCDAHKKYSVFAGVSEAGEIIPAQRVEHDREKYSSFLKGLPPASQIAIESVGNWYWLIDEMEKAGHIPTLVNAGKAKLMMGNINKTDKLDAKGLAVLSINGTLPAVWIPPRELRDQRELARMRIFLVHIRTSLKNRIHATFAKYAITFEEVSDLFGVRGRNLIEKRLAELPPETRDSVKEQLKLLDQLQRQISMVEERIRQIVKITPEMQLLMSIPGIGPILTILIALEIGNVARFGDGAHLASYCGAVPRVKSSGGKTYYGKTRPDVNHYLKWGLTEAANVIVLTQHRMTGHHVVTLYRRIRQSKGHAKAIGALRRHLAEASYAVLRSGQPYHEPGTPRKSSVTKEVCARLA

SEQ ID NO: 507586 - protein, 372 aa, unidentified
MNNTITHVAMDTHKKEHKVALHYPCHEEIVRFAVKNNAWDIKRMVNKIKKQVPADIKFCYEAGVCGFTLKRRIEALGCQCTVIAPSLTPIKPGDHIKTDRRDALKLLTMFKAGLLTEVHAPNVEQEAARELTRCRQTAQENLKRIRHQLLKFLTRHGYVYTDGNHWTQKHITWLRNLEFDQPLLVDVFDNYFTQMNHCLQRLDSLDKQVKKLAESNCYKEIVGFLRCFHGIDTLTAITIITEIFDFGRFSSPCQLMSYLGLTCSEDSSGQKQHKGPITKAGNKRVRRLLVETSWHYRHPCKLSNTLRIRRKNQPQWVIDIADRAGQRLRKRYRHLITNGKMPCKATVAIARELTGFIWSVFNEYQRRITKAA

SEQ ID NO: 507587 - protein, 424 aa, unidentified
MKVTYQTCCGVDVHKSFLVATIVKTTGGIEPSYQKKRFSTFNNSILEFKQWLLDNDCHDVCMESTGKYWIPVFNLLEDEINVVIANPKWVKAVKGNKDDAKDSKWIGDLFRLGLVKGSYIPCKKVRILREYTRYRYKLVSCRSSEKNRYQNALTVCNVALDSVVSDIFGKSSTSIIDYLLEQSGTSINHEEIASKLLRSLKSKEDAVIESVEGYQMTDAQKYRMRLVRAHMDYITAEINDVDKMIENMISSNPDFENAVRFLCTIPGVKHDSAITIISEIGTDMSQFSSSKRLCCWAGLTPGSNESAGKKKSVRITRAGVYLKPALVQCAHAAVKSDKSPYYKKKYDSLVKRRGKKRAIIAIARMILTAIYQMLSTGEQWNPSDLYKIDMPAPLLEKQKAKAIKQAKKLLQREGLLPPDEPLAS

SEQ ID NO: 507588 - protein, 403 aa, unidentified
MNSVGIDISKGRSTIAVMRPFGEVVISPFEVRHTGSELSKLAKQLKSLDGETRVVMEATGNYHASVAKLLHNAGLYVSVINAKLVHGYGNNELRRVKTDRKDAVKLANYGLDRWLTLPRYIPEEDTRLLLKNCYRQYRQDSKVQTVLKNNLISLLDTVFPNANRLFSSPIRGDGSEKWVDFVAEFWHCRCASEKSERAFTSKYLRWCRKHGYNFREAKAHTIYAEASGHIGVMPKSETTKLLVEQAVAQLRATSTALAALKQEMQSLASVLPEYPVVMDMFDVGPTLGPQLIAEIGDVRRFYSKKALVAYAGLDAPPNDSGDVTGRHKSMSKIGASSLRRTLFLVMSVYLQTAPLDEPVCQFMDRKRAEGKPYRVYMMAFANKFLRIYYATVKAYLESLEHTV

SEQ ID NO: 507589 - protein, 314 aa, unidentified
MASINVGIDVGKDELAVAMLPGGESFTEINDERAVTRLVKRLGALGCERIVLEASGGYETLVVGALAAAGLPVAVVNPRQVRDFARAIGQLAKTDQIDAHLIALYGERVQPPIRPLPDEQTRALRELCVRREELIEMLVAERNRLRMASKATRHEIAGHVDYLLKRLKRMNRDLDQAVRNSPLWRAKGELLTSVPGVGPVSCATLLGMLPELGELNRGESGALLGVAPYNHDSGTLRGRRSIRGGRPRVRRVLFVATVSAVRCNPVLRAYYLRLRGNGKPVKVALIATMRKLITILNAILKTNTPWRSLCPVAP

SEQ ID NO: 507590 - protein, 349 aa, unidentified
MSQNLNSAVAVIGIDIGKNSFHVVGLDNRGAIVLRQRWSRGQIEARLANLPPCLIGMEACVGAHHLSRKLQALGHDARLMPAKYVRPYSKGQKNDFRDAEAIAEAVQRPTMKYVATKTVEQLDLQALHRVRERLVSQRTGIINQIRAFLLERGVAVRQGLRFLRAELPRILATPPDVLSPRIVRVISDLAEDWRRLDDRIDQLSSEIAVLARQDAGCERLMSVPGIGPIISSAMVAAIGTGDAFSKGRDFAAWLGLVPKQMSTGDRTILGKISKRGNRYLRVLFVQAAWVVLIKPMSWDRHGLKHWIEAAKKRLHRNVLAIALANKLARIAWGVLAGGRTFEASKLQIA

SEQ ID NO: 507591 - protein, 326 aa, unidentified
MPVAVGVDVSKAKLDVALLNLQGKFRSKVFSNDPSGFKTLLLWLNAQVPEGHACVHVCMEATGAYHEALALCLHDQGVRVSVVNPLRVKRFAEGNMVRNKTDDGDAKCLARLCQVQQPHRWEAPTPGVRALQALVGRLEALQQMRQAECNRLDVAHESVRASIVNLIAKLDGEIAQVRRQIDKTIDDDPDLKRRGELLHTVPGLGDKTIPQLLAYIGRPQRFSSVKALIAYAKLAPMIQQSGTSLNKHRGTHPMGHAALKQALYFPAMVAGRFNPLVAAFWSRLKAQNKPGKLVVEACMHKLLAIAYAVLRSGKPFDPNHLKPDGA

SEQ ID NO: 507592 - protein, 311 aa, unidentified
MTDHTIGVDISKSHLDAFRLEDGAAQRFENSAAGFRALSKWLGKAPVARIVFEPTGPYHKAFEAALGENFPLVKVNPLQARRFSEAHGTRAKTDAVDARMLARMGAAFDLAPQESNSREARILRDLHVARTGLIKDRTRLRNRAQTQDIAVLKRQTRARLAQVERQIAELDAEIAALIEAQETTARSRDILCSMPGIGAITAAAMLILLPEIGTLERKQVASLAGLAPITRQSGQWQGKAFIGGGRKPLRDALYMPALVAVRHNPDLKAKYDNMRTAGKPAKVALVAVMRKLIEMANALVKADRKWTPKTA

SEQ ID NO: 507593 - protein, 345 aa, unidentified
MVIMKQYVGLDVSQKETSVCVVDESGKVVFQGRARSDPGALAELLSKRAPSAERIGFETGAMSSWLWHELNRIGLPVVCIDARHAKAVLSVRMNKSDENDAQGLAELVRVGWYREVKVKSAESQATRSLLVARSRLVAIRRDLENQIRSMLKEYGLQFSRSIGAQFRRKVLELVVEGHPLRSVIGALLSVHEQACEEQEKLDRQVRRLARDDCTTRRLMTVPGVGVVTALTYRHTIDDPSRFSSASDVGAYLGLTPRRKQSGETDVSGRVSHWGDRLLRTYLYEAASVLMHRTKKWSPLKAWGIRLSKRIGMKKAKVAVARKMAVLLHCIWVDGTSFEWGSEKTA

SEQ ID NO: 507594 - protein, 420 aa, unidentified
MSHDADYAALVGIDWADTKHDFCLRATGAEQEEYGVMGHLPEAIDQWAKGLAARFPGSKIAVCLEQSKGSLIYALLKYDCIVLYPINPRMLAKFREALAPSGKKDDPADAQLLLELVSKHRQKLKPWRPADEHTRTLQFLVEHRRTLVNDKTRLTNRLTSVLKGYFPQVLCWFAALDTPLVCDFLKRWPILEAVQKADDTTLRMFFQAHHAHNRAINQQRMDGIRQAIPATIDQAVIRASVMLVHTLVEQVSCLTEAIGRFEKEIDALTRSHEDFPVFASLPGAGPVHTSRLISALGTDRSRYEHVEDLLTFTGIAPIMERSGKTTVTHFRWFCPTFLRQSFHEFAGQSIQHSQWAKAFYRQQRLRGKDHQAAVRSLAFKWGRIIFQLWKNRTLYHERTYVAALQRRGSPLWQVMAAQEA

SEQ ID NO: 507595 - protein, 355 aa, unidentified
MNQEKYIGMDVHQATISVAVMESSGKLIMECILETKAATILEFIAGLRGTLSVTFEEGTSAAWLHDLLKPHVSHLVVCDPRRNALLKDGSKSDRIDARKLAELLHGNKLHAVYHGEHGVRTLKELGRSYLTITRDLTRVMSRIKALYRSWAIPCSGTTVYAVRHRAAWLAKIPEPGVRLRAERLYQQLDLLQPVRQGARRDLMVESHRHQAVKLLRQIPSIGPIRAALLVALLQTPHRFRTKRQLWAYSGFAVETHDSGEYRFVRGKLVRNRERISVRGLNHNHNHDLKNLFKGAALSASTRPGPLCDFYVALLEKGMRPTMARLTLARKMAAITLTIWKKGVEFDAKPLNRQAA

SEQ ID NO: 507596 - protein, 375 aa, unidentified
MEGAPMLDTTTFIGLDVHARSIKAVSLDVMTGEVRAATFGYDAGAVAGWVRSVDPRARCVYESGVTGFDLQKRLSGLGVDCVVGAVSKMIKPSADRRRKNDRNDAEFLARMLSVGNVVEVWVPDDECEAARDLTRALEDARDDLSRAKQRLSKFLLRHGLAFDERTPTGRRKGNWTRAHWSWIESIRFAEGADNDVLAYYVDAVRRAAEEKARLEGLVEAEARKPRWRRRVDSLRCLKGVDTASAADLVFEAGEFSRFRNARSFAAWVGLTPSEHSSGESDRRGAITKAGNKHLRKTLVEAAWHYLTCSGRPKEPARGQAPDRGARRHAAKGVRRLVERREALLARGVHGNKANVATARELACWVWAVGLMAEEA

SEQ ID NO: 507597 - protein, 343 aa, unidentified
MGNNVLYVGVDVHEIESHLAVLEQDGSLVEERRLPTRELGGFLSSLPGEKRVAIEATGFVYPVYDRLSSLEGCVVTVANPNRLKLISGSSTKNDRNDARALGDLLRTDYLPVAHLRDLETREKLSVVNDRVTYGSRRGELKGTIKWLLKRRGIEVDSPFSDDGLRKLRELHLQEIDFRLDELVMVESVVKRLDSQIEAIASKDPKAALLDSLPGVAPYTALFLTCVLDDVERFPDSKHACAYLGLVPWLDESADTTRLGHITKKGDKWLRRNLVECARVAVRKDPHLGEFYARLKHRRGERKALIAVARKLVSYAYWMLKRNTTYEGLSPWNLTWGDDPRGSE

SEQ ID NO: 507598 - protein, 400 aa, unidentified
MFCGWDWGSTHHGVCVIDDGGAIVKRWLVRHSGEELAVLFDELAELADVRMLPIAIERGEGLVVGLIAGAGHPVLMAEPAAFKAARPRWGLAGAKSDLGDAFMLADYARTDGHRLRRVEPVELATRELGALVRARSSLVETRTAASNQLWAILAEHWAGAGVVFQKLTSDIALAFLTDYPTPQSAVLLGEGRMRQFCTRHAYRGGKSAAELVSRLRAAPTSGEPITPAVLAAIIRGSVAQIRVLNAEIAHLERDLATALTAHPKATLLKTLPRVANVSLAQLIAEIGPLLERCDNPEQVAAMCGAAPVTRASGKSRTVGFRYAANKPARVAITGFADNSRHSSAWAGDCYRRARARGARHPHAVRILARGWVRVIWACWNTNTVYDPSRHRGEQLLAGRT

SEQ ID NO: 507599 - protein, 402 aa, unidentified
MADGPTRFFGLDIHKEYFVAVGVNVQREVIFGPQRVSNYQLAEWAERVLALEDAVALEMSTNTYLFYDTLVPHVRSVIAVHPPSVALVTNAQVKTDKKAALALAQLHAAGMLTGVWIPPHEGRDLRALIARRDKMVRLSTMAKNRLHSTLQRNHLVLPEKPFSPEQRSWWKNLSLSATEKFLVLSDLDTLEFAQKQVEQVEDCLKQKSAEDERIPLLVQLPGVAMLTAITILAAIGDITRFPNAKKLVGYAGLGTRVHDSGMTHTSGRITKTGRKDLRRAMVNAANHAVIHHVHWKKEFERMEPRLGRSKAIIAIARKLLVAVWHVLGKQVADRFAEPRDVANSFFAHAYRIGVKNLPDGQSALAFTREQLDRLGIGKELQEIGWGMKPRKLPPSKMLLQKK

SEQ ID NO: 507600 - protein, 375 aa, unidentified
MSNHSEAFVAFDSSKLRNAVAIADSGRTGEIRFLGEIENSTTATAKLVRKLASKYERLTFCYEAGPTGYELYRQIKSLGQECIVVAPSLIPKRPGDRVKTNRRDAVSLAKLLRAGELTAVWVPDRHHEAMRDLTRARDTAVNDLRSKRQQISAFLLRKGLHYCAGKKTWSQAHLNWLMSQRFEYPEHRLVFEEMMMAMRQAQERLERLEQAMRAAVPDWSLAHLVTALMAMRGIDLISAATFLAEIGDLSRFQSPCELMAYLGLVPSEDSTGDRIKRGPITKAGNRRARRTLVECSWSYQHPPRVGKDKQAKVAAAPQAVREIAWKAQSRLNRRYRALVRRGKLKTVAITAVAREFAGFIWAVAREATAARAAAK

SEQ ID NO: 507601 - protein, 346 aa, unidentified
MQPMYYIGLDVHKRKIGYCVKDGSGRIHAEGSISATRLDLDHWMRSLPQPWSAAMEATMFTGWIYDHLQPHAAALKVAHPLMLRAIAAAKKKNDRIDASKICDCLRCDFLPECHMASTAIRERRRTLRYRNLLVRQMVQMKIKISALLMEAGVSYNKQRLHKAGYFRELLATNPDIDEGLCSLLRLCRETVVRLGKNESALVRSLERDALLVERVERLMSIPAVGPITALTWALEVGDVKRFSSIKKAISYCGLCGAERSSGNTVQRTPLSKQRNKHLQTTLIEAAKMAPRNSPELAMLYDKEKQKGNANRATLAVARKLVAYLMAIDRGQRNFQIAETNSSSVAA

SEQ ID NO: 507602 - protein, 339 aa, unidentified
MTQVSTIGLDVAKKLFQVHGVDAAGAVVVRRTLRRAQVLTWFARLPPCRVGLEACATAHYWARELIKLGHDVRLIPPAYAKAYVRRNKNDAADAAAICEAVSRPSMRFVAVKSEAQQAAAGLHKVRALLVKQRTMVINQLRGLMAEFGIVAAKGPGHVGELAAALADPAAAPIPAPLADALAPLGALLGELDRRIAALDRQILDWGRSQATFGHLLTIPGFGPLLASAMTALVVEPRSFRSGRDFAASLGLVPRQDGTGGKVRLGPISKRGNGYLRRLLVNGAMAVLASRRARQDAWLGKLLAGKPRKVVACALANKMARIAWAVMTRQEDFRARPQAA

SEQ ID NO: 507603 - protein, 313 aa, unidentified
MTPSTIFVGIDVANARLDLAWRPTGERWTAPNTERGIRSICRRLRTPAPALIVLEATGGLELPLTGALAAAGLPVVVINPRQVRDFAKATGRLAKTDALDAAVLAQFAEAVRPEPRPLPDAATQALSALLLRRRQLIEMCTAEKNRLGTAPTPVRKGIRAHITWLEGRLADLDEELAHAIRKSPLWRDKDDLLQSTPGVGPVLAQTLLASLPELGTLTRQQIAALVGVAPLNRDSGTFRGKRRVWGGRAHVRAALYMSALGATRFNPVIRVFYQRLCAAGKAKKVALTACMRKLLTMLNAMLKHQTPWTIKVA

SEQ ID NO: 507604 - protein, 341 aa, unidentified
MEEYIGLDVSMKETAVSIRRAGERIWRGKCASDPSIVAELIRKRAPSAKRVVFETGPLSVWFYHSLRTKGLPAICIDARHAKAALDMATNKTDANDADGLAQLAEVGFFREVRVKGYDSMLTRTLVAARTRLVRITTELSNQIRGVMKTFGLLVPAGKGSTFEKNVRSLLADQDRLASIVLPMLEAWRGIRVRAAELGRQLVRDARQSQACRILMSIPGIGAITATAFTTAIERPDNFKKSRSVGAWIGLTTRRYQSGEVDYDGHISRRGDRPLRGLLYEAAAVILTRSSTHSTLRTWGLQLRERIGFKRAAVAVARKLAVIMHTMLKTGELFNPNAGAVA

SEQ ID NO: 507605 - protein, 340 aa, unidentified
MPLYGGIDLHANNSVVVLLNEQDQVIYQKRLPNHLPTILEPLSLHHGEIEGLVVESTYNWYWLVDGLMEAGYRVHLANPAAMQQYNGLKYSDDHSDARWLAHLLRLGVLPEGYIYPKAERAVRDLLRKRAHLVRQHTANVLSVQNIMARNTGARFSVKRMHELTKQELQSWLTEESQVLAVTSSLAVLDCLKHQIKTLEQAVHKRVHHTPSYEQLLTVAGIGTILAQTIALETGAISRFPSVGHYASYCRCVDSHKLSNGKRKGTGNVKNGNPYLAWAYMEAAQFALRFQPAAQRFYQRKLAKSRNNTILARKAVAHKLARACYYMMRDLVPFEATKAFG

SEQ ID NO: 507606 - protein, 316 aa, unidentified
MLYVGIDVAKNKHDVTALNVPGKTVLKPLTFSNNKAGFELLDLSLRQLNQDCLIALEDTGHYAFNLLNFLHEQGYEVYTYTPLLIKEFAKSLSLRKTKTDKKDAHGIALKLLSDPNREQFQHDNRQVELKILARHIHRLKKKQSDWKVQYTRCLDIIFPELDKIVGKHSEYTYQLLTRYPNPQKRIEAGFDKLIEIKRLTASKIQDILSVAPRSIGTTSPAREFEIIEIIKHYKRLIDKVEKCVNDLMAEFNSVITTVTGIENRLGAVILAEIRNIHAFDNPAQLQAFAGLDSSIYQSGQIDLAGRMIKRGSPHLR

SEQ ID NO: 507607 - protein, 371 aa, unidentified
MKSILYIGMDVHKENYTLCCYSFDKDELQYKQTITPDYKLILKYLEQIRKRCPDEIEFVCGYEAGCLGYTLYHQLTDRGVKCVILAPTTMGITNNNRIKTDKRDAGNIARCLAFRTYSEVHVPTAEDNEVKEYIRMRDDQKKALKIIKQQILALVLRHGFRFEEGRNYWTIKHVTWLKALDLGGILQESLAEYLITYDYLTDKIERFDKRIEELAGGERYQETVKKLSCLIGVKTHTALATVVEIGDFNRFAGAEKLAAFLGLVPGEDSSGEKQRRGSITKAGNAHVRRLLVESAQGYTRGAIGHKSKDLKRRQNGNTPEVIAYADKANERLRRKFYRMTLKNGTKRNVAATAIARELACFMWGLMTDNIA

SEQ ID NO: 507608 - protein, 416 aa, unidentified
MDTMYERCCGLDIHKKTIEACFRSGKKKTHMSFGTTSAELRKLTMWLVENDCQSVAMESTGSYWKPIFNILELSGTDMEIIVVNARHMKNVPGRKTDVHDAEWIAELLQYGLLRPSFIPDREQRELRELSRYRKSLVEERAREINRLQKMLEGGNIKLTSVVSEVTGYSSRRLLDRLLRSDEPMTEDVISGLVHTSLAGKSKELETALDGLLSELQKELLIKVLDHIDDMSKRIADLDDFCRKQMKKYEDALDKLDEIPGIARRTAETILIETGLDMSRFPTAKHFARWAGLAPGNNESAGKRSSGRTTKGNPTLKSTLIQSAKVAARKKDSFFKARYQKIAARRGANRASVAVAHSMLIAIYHILKSGERFKDLGEDYYNQFNKEKKKKYYLKKLTKLGVNLKEATLSISIQAAT

SEQ ID NO: 507609 - protein, 351 aa, unidentified
MLMIGVDYHPSVQQIAFTDTETGEFGERRLNHSDGEAEKFYRDLKQRGISVRVGIEATGYSRWFERLLVELGFEVWIGNAAEIKTQRVRKQKTDRADALLLLKLLLENRFPQIWVPSPENRDLRQLLWHRHRLVQMRTRIMNQLQAIAMNEGKRWKKRLWNEQGRAELEKFQLAPWASRRRQDLTELLDRLNPTIEELTTAVQQEAKKRPEVLRLRTHPGVGCLTALAFVLIIGTPERFECGKQIGSYVGLIPAEDSSAGRQRLGHISKQGSTLLRFLLVEAAQAAVRSDPDWKRRYIHLAMRRQKSIAKVAMGRKLAVRLYWMWRREWDYQQFRQFGSYAGELGTGHGVN

SEQ ID NO: 507610 - protein, 444 aa, unidentified
MQILYSRCCGIDVHKDSVTACVCVYSEEPEPEVRKKEFATYHKALGTLRLWLFAQKVTHVVMESTGVYWKPVWQVLEGHFQLILANPYQVKNIPGRKTDARDSQWLAELLAHGLIKPSYVPPRQTREQRDLTRYRVKLAEERNRVHNRIHKVLEDACIKLDTVATDILGVTGRAIIQAIIDGVDSPNFLAERAKGRLVAKIPELRLALRGRVTDHHRLMLRELMEDLEFVERKILRLEQMLASRMDLEASARLCSVPGIDLLTAWTILAELGSDMSVFASPRHAASWAGLCPGNHESGGKRLSNRTRKGNRWLRRAFCQAAWAATRKKNCYLAAFFYRKAGKHGIRKAIVATAHRLLVIAYCILRDRTEYREIGGDYFDQLHPERTRNRLVRRLERLGHEVTLQPRAVPVISSPGEILTPRRRRGRPCLCAQRQIPCIHNGFRN

SEQ ID NO: 507611 - protein, 351 aa, unidentified
MMIIGVDYHPSFQTIAFLMEETGECGEQELNHSDGQAEKFYRDLKQRGICVRVGMEATGYSRWFERLLAELGFEVWMGDPAEIKAKRVKKQKFDREDARLLRRLMLENNFPQIWVPGPENRDLRQLLWHRHRLVQMRTRIMNQLQALAMNEGYRWKKKLFSEQGRAQLEKLALAPWASRRRQELLELLDRMNPTIEELTAAVEQEARKRPDVLRLMTHPGVGPLTALAFVLIIGTWERFPRGKQIGNYVGMIPSEDSSAGKQRLGHISKQGNSLLRFLLVEAAQAAARIHPDGRRRYMHLAMRRHKSIAKVAMGRRLAVRLYWMWRNGCEYSQSLKFGSYAGQLGTGHGVK

SEQ ID NO: 507612 - protein, 402 aa, unidentified
MYNAVGIDVSKGKSTVAVLQPAGVIIRKPFNVNHTSSELDELAKYIGSLEGETRVVLECTGRYHEPVVKTLSEAGLFVSAVNPHLIKNFGNNSIRKVKSDPADAKKIARYTLDNLIELRQYSSMDNTRTQLKTLNSQFSFFMKQKVAAKANLIALLDNTYPGVNKLFDSPVRDDGSEKWVDYAYSFWHVDCVRKIGLKTFTERYQAFCKKHHYNFQPAKPAELFLASKDLIAVFPKEASYKLLIQQSIQQLNLASSHVEELRSKMNELASTLPEYATVMGMYGVGKTFGPQLIAEIGDISNFSHREALTAFAGVDPGVDQSGTHNSKSNKASKCGSNRLRKTLFQIMSTLLQTAPEDDKVYQFLVKKRAEGKPYYVYMTAGANKFLRIYYGKVKECIRNLEQ

SEQ ID NO: 507613 - protein, 343 aa, unidentified
MYFIGLDVHKKTISYCVKDAAGHVHQEGRIGSTRRELDAWINTLPQPRTIAMEATIFTGWIYDHLLPYAEKVKVAHPLMLRAIAAAKKKNDRIDASKIADCLRCDFLPECHMAPTAIRDRRRILRYRHLVLRQAVQMKNRVSGLLMETGVSYNKLRLHRMGYFEQLLSTSEEISESIRPLLKLCREHIDRSIRLDTALLRSLERDPLLSERLRRLRTIPGVGPITALTWALEVGDTSRFRSIKQAISYCGLCSAEKSSADKTLRTPISKQRNKHIQQVLVEAARLAPRYSEELALLYERERQRGNANRATLAVARKMVAHMLAVERRNTDFIPAGEFKRTAAA

SEQ ID NO: 507614 - protein, 352 aa, unidentified
MLIIGCDFHPGFQQVAIFDNRTGEMEEKRLQHRAEAEQFYRALAGQEVLVGMEACGHYPWFERLLAELGMELWLGDAARVRASVVRKQKTDRRDAEHLLQLLMEDRFPRIWVPSLEVRDVRQLLVHRHKQVQARTRTKNQLQAMALSCGVQRKRRLWTKAGRAELEQLALLPYASERRKRLLEALDGLEAEIGELDRRVAEEARERPEAVLLMTHPGVGAVTALAMVLTLGPAERFGSGKQVGSYFGLIPSEDSSGGKQRLGKISKQGSSFLRFLLVEAGQTAARYDPQLKRFYRRLAVRKNRSVAKVAVARKLATRLYLMLREDWTYAQLSQAVMQVSPSHSVAGKQEPSA

SEQ ID NO: 507615 - protein, 316 aa, unidentified
MRSVKRGGRSCHFMSALVCGLDVHKDSIYATILNYEGKVINQMRMDNEKVLSYLAHYKVNKVAMESSTAIAPLYRKLAGKGFDVVVSHPKKTRYIAEAKIKSDRVDSKAIAELARLDALPLAYVPDVETSKLREKVRRRAFLVRERAKLKVKIKSILTYEGIKVPFDHGLFTLKGVEWLGSLNLESVDSYLRIMNIFNMEIKVLSKQLLGLAENDEDVRLLMTVPGVGYYSALLVKSEIGDINRFPFGERLCSYAGLVPSTHASGKTVWHGGVTKEGSRWLRWVMVQAAQTHVRSFDSTITCMYSRVAERRGRARD

SEQ ID NO: 507616 - protein, 459 aa, unidentified
MGKAKACKGGKNQLQVIHPRAAGIDVGSKFHVVAVSAEYDPDPVRKFNSFTTDLHRLADWLKAVGVTTIAMESTGVYWIPVFEILESRGFDVILVNAREAKRVPGRKTDIKDAQWLQQLHQYGLLSASFRPGEKIASLRSYLRHRERLTEYAAAHIQHMQKALMQMNLQLQHVVSDITGDTGMRIIRAIIEGERSATKLASYRDPHCKQSEKTISAALTGNYRPEHVFSLKQAVALYDFYQKQIKECDQEIEKALAALNSDKNSPSEPLPKARRTQKQKNEPGVPIREMLYTLTGVDSTQINGIGPYTTLRLVAECGTDMAKWPTSKHFTSWLTLSPGNKISGGKVLSSRTRRTKNRATTLLRIAAVNIGKTQTALGAFYRRLAARVGKAKAVTATARKLAVLFYTLMRYGKAYVEPGADYYERQYRERVLLALSRKAAALGYRLAQKQETSPVTGNVS

SEQ ID NO: 507617 - protein, 430 aa, unidentified
MTNREPTPPDAALVAIDVSKLKNDVLIEIPGKMRRRRLTVINSRAEHDRLVELLTGLGCPVIAGFEATGNYHRPLAFRLLGAGIALRLVSSVALARTREALHNGWDKNDPKDAQVILHMLRIGATQIYADPLVAGINDIQELSKTHEIISKAKTELWHRLLTHYLPLYFPEIARFAGNSRSDWFLAFLERFPTPASITAHSKEVFIDAAWDVVGKKVSKARLLGDIYETACSSIGLPVPIDSSAISMFRLVIAEGRSLIRQRDAIEERADTALSRNADYQRLRQIPGIGPINAMTILAEAGDLRRFRHHRQFLKFCGLDLATYQSGQFRGQTKLSKFGNARLRRTFWVAAQVAIRQRDNSFRAKYERYIAKDRDNADLKRKALTAITAKMARTAHAVIKSGSDYRPFIEGPVPSGRTSIRVGHEGASATL

SEQ ID NO: 507618 - protein, 354 aa, unidentified
MSQKLSSAIAVIGIDIGKNSFHIVGHDQRGAIVLRQKWSRGQVEARLANLPPCLIGMEACVGAHHLSRKLQMLGHDARLMPAKYVRPYSKGQKNDFRDAGAIAEAVQRPTMKFVATKTADQLDLQALHRVRERLVRQRTGVINQIRAFLLERGIAVRQGLRSLRSELPGILATRTDVLAPRMLRIIEDLAGDWRRLDARIEDLSSEIEALARQDKGCERLMTVPGIGPIISSAMVAAIGTGDVFSKGRDFGAWLGLVPKQISTGDRTILGKISRRGNRYLRVLFVQAAWVVLVKVKCWERYGLKSWIEAARKRLHHNVLAIALANKLARIAWAVLNKGRAFECVKTEETASRPA

SEQ ID NO: 507619 - protein, 463 aa, unidentified
MAAVMIGVDPHKGSHTAVAAGLAEEPLGELRVRACAARAGELVAWTAVWPERTWAVEGARGLGRLLARQLAAAGERVLDVQPELACRVRLLQAGDTNKNDPDDALPAAIAALRSRACRPVTADDYPAVLKVRAERHRDLGRARNQVACRLHAVLCDLVPGGLAKEISAAQAAEILEQAAPSGAVAQARAGLATEFLAGLRRLDAQLRDTRKKLAAAVRASGTTLTQVFGVGPVVAGTIAGDVTDVARFPGRDHFAACNGTAPAGASSGNRTVRRLSLRGSRRVNHAIHMAAINWIRHRHSDGRACYEKKLAGGKTHKEALRSLKRRISDAIFARLQADARRAAEASVTGPGGQPGNDSASSAAGSHPARRLFGQATPGPDTTIRPGTTAGPPSGPRSSRTESRGRAGHSPVAATEPSAKRQAQVERPEPSADERPGGTARRRPHPAARKAPVGTTSKKNPTPT

SEQ ID NO: 507620 - protein, 517 aa, unidentified
MPPVWLYLLGSRNAETDCAVVPSCPSISLVRELAILSLVKHLAIPFRREPYPTAPLSGLPQFLLEAAVMKQKKTSKKKPMRLPKHLEHLNACAAGIDVGSKSHFVAVPDGADPEPVREFSTFTDDLERLADWLISCGVTTVAMESTGIYWIPVFEILESRGIEVKLVNACHVKNVPGRKSDVLDCQWLQQLHTYGLLRGAFRPADQVVALRAYVRQRATLVKISGSHIQHMQKAMAQMNLQLHNVVSDITGVTGMRIIKAILAGERDANKLAAFRDNRCKNDAKTIARSLHGNYRPEHLFSLQQAVELYEFYLAKIGECDRQILAQLQAFDAKNSEGSFGGGKPPASLEEALMRMSGVDLTDIDGINTASAVKIIAEIGIDMSRWKTDKHFTSWMALAPGAKISGGKVLSSATKKIANRAAQAFRMAAYGLARSKSALGAYFRRQKARLGAPKAITATARKLATIVYAMLKNGTCYNDLGQDYYEERYQSRLLQNLKRKAKHLGFELTPTGGEIVGS

SEQ ID NO: 507621 - protein, 422 aa, unidentified
MLAESHDDEQIIARVAALDIAKAELVCCVRVPASAGGKRRLQEVTTYSTMTQSLTELANRLVEMGVQRVVMEATSSYWKPVFYLLEAHGLDPWLVNARDVKHLPGRPKTDVLDAVWLCKVAERQMLRPGFVPPWPIRRLRDLTRYRTDLVSARTAEKNRVEKLLEDACIKLSVVASDIFGVSGRAMLAALVAGERDPKVLAQRARARMRGKIDRLEQAFDGHFADHHRFLLSRMLARIEGLDADIAAVDAQIDVQLAPFAEAAARLDEIPGIGPVAAAAIIAEIGVDMSRFPTAGHLCSWAKFAPGINSSAGKPQGSASSGHGDPYLARVLGEAAVGTSKTNTFLAARYRRIARRRGQPRAVVAIGRSILVIIWHLLHDQDARYQDLGADHYNRHVDPSAMKRSPIRQLEALGYTVTLTPAA

SEQ ID NO: 507622 - protein, 457 aa, unidentified
MSRAKAARGRRGAALQVIQPAVAGIDIGSREHWVCGPVPADGPPPVQAFGTTTAQLQALVQWLQAAGVQSVAMESTSVYWIPLYELLAAQGIAVLLVNVRQLHGVPARKSDVRDCQWLQQLHSCGLLRGSFRPAESVCRLRALTRERATLVADRTRIVQRMQKALDQMNVQVHHAVTDLTGQTGLAIVRAIVAGERDPQRLAALRDRRCKKSTAEMAAHLTGTWREEHLFNLRLGLRRYDELTAILAEYEAQLARWITELTPGARQAAAAPAHPTLTKAKALARRGEEAARQRLWRWAGADLTRIDGLGVTAAEVILSEVGLALDAFPDEHHFAAWLRLTPNPGTSASKVVHRRRHGTGATRVATVLRLAASTLTHSQTALGAYYRRVARRKGSAVAIAATARKLALLVYRTLRYGHAYVDEGAAAYEARFQTQRLHQLKQTAQQLGYKLVPVLDAA

SEQ ID NO: 507623 - protein, 344 aa, unidentified
MNKLSRVGVDLAKNVFQLHGVDRHGERAWRRRVTRDKWLKVLLDKVEAGCVIGMEACTGAHHWARYLQARGFTVKLMAPQFVKPYVKSNKNDANDAEAICEAMSRPNMRYVAVKTVEQQDIQAAHRIRSELIGHRTAKANQIRGLVAEYGLVAPQQMTRLRAAVPAWLEDAENGLTDRFRWLLSGLWNDLQALDQRVAELDGEIEAIAQSDPVAKRLQQLRGVGPLIATALVAAVGNAEQFANGRQMAASLGLTPKQHSSGGKDRLLGISKRGDAYLRSILIHGARSVIRTATHKDDRLSQWVTSLAARRHPNVAAAALANKTARIAWAMLRHGTDYQADRIAA

SEQ ID NO: 507624 - protein, 465 aa, unidentified
MKSKPAKAKKQNKKISVDAVWEPVNLHAAGVDIGSREHWACAPRAAAPQNVRKFGTFTADLEAMAEWFKECGVTSIAMEATGVYWIPLFQILERRGFHVLLVNARQTKNVAGRKSDVQDCQWIQRLHTYGLLQGSFRPEDPYCVLRTYLRYRDELVVARGTQGQHMHKALLQMNVQLPQVLSDVTGVSGLAIIDAILKGERDPGKLAALVDRRVRAGQQTIQAALRGDYREEHLFVLGQAFELYHTYEARIAACDGQIVRALATLPARVEPKPQPLPARKPGRKPYLDKMAGVDLRPELHEIFGVDLTGIEGIGVLTGLVLLTEVGPNVSRFRSEKQFCSWLGLCPDNRISGGKVLSSRTRRVVNRAADALRLAASTLERSQSALGGYARRMKARLGAAEGITATAHKLARILYRLIKHGETYVRQGLEDYEQKFQAGKLRALQKTAHAMGFELIQKQTVPGGVS

SEQ ID NO: 507625 - protein, 404 aa, unidentified
MHDPTEAFGGVDWATDDHAVCVVDGQGQVVVEFDVANNAAGLAALCRRIETAGARRVAIERPDGPVVDALLEAGLEVVVVSSRSVKALRERYGTAGNKSDRSDAYVLADCLRTDGHRWRNLEPDSPATVTLRSHVRARKDLVETRVATANQLRAHLRVVFPGAVGLFRDLDSPISLRFLERFPSAGRAAWLTDKRLATWLRANGYCGRKDPAELYTRLADAAHGTAGDEGDARAAITLAYLTVLKTLRAQINELDTRIAELLDAHPDAPIFRSLPRSGTIRAATLLAEIGDCRARFPDPESLTCLAGVAPSTRASGRHRAVTFRWSSDKKLREALCDFAGDTMRASPWADHRYRSLRAAGKSHPHAERILARSWAHIIWRCWQDSVPYNPNRHGAAQRLNHQAA

SEQ ID NO: 507626 - protein, 347 aa, unidentified
MKHVAIDLGRPNSVLCEVSGDGRKLTRRFRLDRGNLERYFGERAPSRVLIESGTESEWVARYLEGLKHEVVVADPNYAGMYGERSRRVKTDNRDADALLEANRTGVFRRAHRRSEGQRGVISLLRVRGSLVRTRTQWINVVRAVARGQGYRIRSGAAETFEERLLEVQLHLPAELRKLAQVLVGLMAGLNEQIKGLDREIGAVGKRDPRVRLLQTAPMVGPLTATAFVALVDDVSRFKKAHKLESYVGLIPREWSSSEKRLRLGITKRGDSFVRWLLVEASWSIMTSRRPDTFELRRWAQNIAGRRKRKVAVVALARRLAGILYAMLRDNKPFDPTRIGQNTRTKIA

SEQ ID NO: 507627 - protein, 408 aa, unidentified
MNTLYVGIDVSSKSNVVYLMLPNGDKHSNFSVANSHEGSTQLVKRILSALTSLSLDTVLIGLEATSVYGDNLVYFLREDASLAPFHRKIHVLNPKQVKKFHDTYNDLPKNDYVDSFVIADCLRFGRINKEVYLGDYRYKALQNITRARFFAVQNLIKEKQRFMNVLFKKYSTMTQEKVFSDTFSTTALAVYDEFDSAEALANMDLHELTDFIIKKGKNRFPDPDAVAKAIQKAARSSYRLPKTVNDSVNQVLSISITSIKALESQIKEFDKAIKAQMELLPNVLISIPGIGPVYSAGIMAEIGDINRFDNQAALAKYAGLAWKQHQSGDFEAEVTRLIPSGNRFLKYYLCEAALSLVRCDKEYSDFYHLKYKEVNRCQHKRALALTARKFVRLVFRLLKDNRLYCPAK

SEQ ID NO: 507628 - protein, 419 aa, unidentified
MTQKDDTTFVSIVHPVCCGLDVHKKMIAACLIFIDEFGKEQHEIRQFGTFTNDLIELRRWLISHNCPIVAMESTGVYWRPIHNILEGYLDVILVNARHIKNVPGRKTDIEDSKWLAGLLKHGLLRGSFIPEKDVRTWRELTRMRRTYTESLGDYKRRVHKLFETANIKIDSVVSDLFGLTGRNLMKLLCEKDRELNIKDIADCAKGRLKAKVPELFLSIQGFFEDHHRFQLTSLLTTISTIETQISSITKRLDSLIAPHLNLIDRLDEVPGINKVSAQSILSEVGITLDEFITMAALASWAGLCPGNNESAGKRKNGRSSVRNHPLKTILIEVAWAAVKKKGSYYRAKYYKLKSRRGAKKAIVAIAHRILKAIYCIIKNGDRFKDPGESYLLENDKKRALKRLKQQAKMMGMELVAVPA

SEQ ID NO: 507629 - protein, 327 aa, unidentified
MKKVTQTIGIDVSKLTLDAYAMTVDKHEQFTNDTGGFLQLVDWAVKKKVGRGEILFCFEHTGWYCLMLSWFLYENHYPYCCVNALEIKRSMGLRRGKSDKADAMEIAGYAWLRRDELIPSVPPSKYLIELQRLMALREQLVKHHTANANLYKGMLNIVTNSNQDTAMTILASEMQEIQKYIQGTEKAMKTLINEDQQMKHNYKLSKTVKGVGMVLAIQLLLHTHNYTRFESCRQFSAYCGLVPYPYQSGTSINGRNRIHPICDQKMKSLLTTSSVSAIQHDSELKKYYLKRIEEGKPKMSVINIIRNKIVSRVFATVRRGTPYIEIK

SEQ ID NO: 507630 - protein, 340 aa, unidentified
MNQITRIAIDTSKLVFTLHAVDAQDRPVLRRNLKRQELVAFFTKLPPVEIAMEACGGSHHWGRTLQALGHQVRLIPPQYVKPFVKRAKNDRNDAEAISEAAARPGMRQVPVKSAEAQAQAMLLSVQELLVRQRTQLVNALRGHATELGLVAPVGDKGFAALRAEIAADATLPAPAVEALRLLGAQIDQLEARRAQIDAKLMAQHKANADSRRLSAIPGVGPISGLNFSLRVDASQFRSGRHFAAWLGLVPSEHSTGGKQRMGGISRAGNERLRQLLVLGATAVIRHAKPGRPGVSAWLLALLERKPRKLVAVALANKMARVIWAMLTSGEAYRQPQAAAA

SEQ ID NO: 507631 - protein, 462 aa, unidentified
MGRKGKRTKGIEEAHPFAAMSQVNPNAAGVDIGAVEIVVGVAGENNTQIVKAFGNYTVDLQAIGNWLNEHKIKTVAMESTGVYWIPLFEVLESMGFKCLLISSRSLRRVPGRKSDIVDAQWIQTLHSYGLLESSFRPQADLVALRTMLRHRAQLLEHRAPHIQHMQKAMLQMNVQLSQALSDVMGETGQAIIRTIVKGERSPQVLAGFRDPGCKKSEEEIGQALTGTWREEHLFVLKQSLELYDFYTQQVEVCDKEIDRMYAMIRPDWEMGELPPIPKKKLHTHSKNAPKSAREIRAHLKRINGVDLSLVDGFGVSLAQIVTMEVGSNVSEKFPREGNFCSWLGVAPKHEISGGKVLKNKTLKTKNRAGQAFRMAAQSVKNSKDSIFGVMYKRFRARQGPSQATVSTAHAIARVVYRMLKYQVEFETICVNEYEKKYEEQQVKYFKKKAAKLGYQLVPVVPA

SEQ ID NO: 507632 - protein, 342 aa, unidentified
MDHFAGLDVSVKETSICIVDDTGRIVREVKVASEPEALLKVLRNPTYRFKRIGLEAGPLSQWLFSALAEAELPVICVETRHMQAVLKAQINKTDRNDARGIAQMMRAGLYRPVHVKTLRSQKLRMLLTHRKLLQSKAIAIENDLRGTLRNFGLKVGMVGQLKFEARIQELVENFPDLSVLVEPLLIVRRTLREQIIILHRRLLAIVRDDEVCRRLMTTPGVGPVVALTYRATVDVPARFRKSKSVGAVFGLTCSKYQSGEVDWSGRISRCGDEMMRVMLYEAAQSMLRSKKWSWLKAWAMQIARRRGMKKAIVALARRLAVIMHRIWVDGTEFRWTRESAVA

SEQ ID NO: 507633 - protein, 348 aa, unidentified
MIVAHHYDHVVGVDTHARTHTYAIVATKTGEILGTKAFPVTAAAIDRAIAWVRGIAGGSVLFAMEGTGSYGASLGRALLRDEIVFCEVRPPKKSSRVRGKTDEIDAIAAATSAMGIELEALTRPKADGLRNALRVTLDARRDMEVRRTSARNQLNALVRTADFGLDTRRALTDRGVQQLANLDANRSDVAERIIRAEAVRLASTVIDLGRQMRHNREVLAELVELLAPGLQQIYGVGPVTAAVAVAAYSHPGRVRSEAAFAALAGVNPIPASSGNTTRHRLNRGGDRQLNRALDVIARVRMVSEARTRAYVERRTSEGRTVREIRRSVKRYIARELFKALQVRMVLGT

SEQ ID NO: 507634 - protein, 433 aa, unidentified
MPFLPIIFTNLRVQKGVPMALKIVYKICCGIDVHKTFVVACIASTNKQGITTYKSCRFSTYTKGLKELLQWLLESNCNDVCMESTGKYWIPVYNVLEKDCSIVLAHPKYVKAIRGKKTDKKDAKWIADLFKHDLVAGSFMPPADIRQLRDLMRYRYKLTCFMSSEKNRLQNCLTVSNIQLANVVSDTFGKSSKRILDKILENPLDTSFDIESLIHSSMKKKIPELELAIDGYITPEQAGKLKIIKKHFEDLESRKAELEKLILALAAPYQQKIDLILTAPSFKNIFSAIGVISEIGANMEAFPSAKHLCSWAGLAPTNNESAGKKKSVRVSKAGCYIKPLLVQCANSVVKSEKHPEIRNRYLRLRKRRGHKKAIIAIARMLLTALYNMLKNNEPYNAELYRKSDVLPVGREISVEQAVLMARLQGYKIKSVTQ

SEQ ID NO: 507635 - protein, 369 aa, unidentified
MADYREAFVGIDVAKLRNAVAIAEAGREGEVRFFGEVDASAVNMRRVIVRIANRFNRVHFCYEAGPTGYGLYRLIRSLGHECTVVAPSLIPRKPGDRVKTNRRDAVSLARLLRAGELTAVWVPDEGHEAMRDLVRARAAAVEALRVHRQQVSAFMLKHGRTYPRKKGWTMRYLRWLQEQQFDHPAHQIALQEMVEAVRVDRERVERLERTIEEFVSAWSLEPLVRALQTLRGIDLIVAVTFATEVGDVSRFESPRQLMGYLGLVPGERSTGETVRRGGITKAGNGRVRHMLVESAWTYRHPPKIGKTKLYRLEQASPAVREIAWKAQSRLTARYRKLAACGKRTTVVCTAIARELVGFMWAVARQVQPA

SEQ ID NO: 507636 - protein, 480 aa, unidentified
MIKSIFPRKNQSLVDLFDSAKHPHKVACVALDYAKATHTALICDGGGRRLKAAFPVSNSPEGLDYVMERVQKVCRKHAIEPSHVFFGGEACGTFAINFVHAIEQKGFLVLSVDPHQAKQQRSCFQASTDKLDLLGIAKTLLDQHGSTQTTCTGVERLLRNVTRHRARLVTTKTAVRNRIHSLVDQLFPHFLDETQSGVPAFSETSLWLMEDRFSPRQVGARHLRTTVAQAKKKGLQKPEDCIRKLKIHAASVLEPVPEWVGSLQTALHHEVQLHRNLLECITQADRQVAQLLARTPAAMLTTIHGIGITLAAGTGSEIGPPARQSSVRRLSSYAGIVSRVKQTGGPEGEPRHGSVSRRCNHLLKNAVVQSANHLGQHGPPELKEDHRRRGAGGQHADFGMARRFLRIGMNLMRTGQCYLPPELREHPEPEALKTYYLKAWERLHGIWKKAGALEEAFDPRNPLGQWRDCIQTLYEIELPL

SEQ ID NO: 507637 - protein, 353 aa, unidentified
MLDVGVDLHKRYSQVATLDEWGELRQQRVEHGEGGMEKFLRELEPASRIAVEATGNWWWFVDLAEGLGHRVTMSDPRQTQAIAGACFKYDAADAERLVELLKLGYLPCVWIPPAPLRYAKEVMRYRGLLVRMRTGLRNHLRGMLRKRNLTPTMKGLWTEAGRAYMGQVELNADADRIRREALGLLNSLDERIGHWDQELKRRVEKDPLTERLMTAPGVGAQTAFGFRTFVGEIERFANPKKLSSYFGLVPRERSSGDKRRLGHITKAGDGLMRHLLVEAALMASRKPGPLREYYRRMLRHKGKAKTRVALAHRLVTVLYWMWKKNLDYRQYLQGEARQAGEPVGSAGRAGPKL

SEQ ID NO: 507638 - protein, 321 aa, unidentified
MQEWYMGIDVAKKKLDCALRLPNGKYKHKTFDNAPKGFEELRVWIFSFDVTQLHVCMEATGVYWEAVAEYLANHQYVVSIINPVQIKAFGASRLVRTKTDKVDAKLIADFCKENRPEPWKAPSLEEQALRAMVLRLDALQEIRTQESNRLDVARESVKDGIVSHIAWLDEEIKNLSKKIRDHIDSDPDLKDRKALLESIPGVGERTIALLLAFSLAPGRFTNARQVTAYAGLDPRHHESGSSVQHKTRISRVGHNLIRKGLYMPAMVTLYRTSWGKHFLARLSSAGKKPMVIIVAMMRKLLHVAFGVLKSGQKFNPDLHAA

SEQ ID NO: 507639 - protein, 322 aa, unidentified
MLPTLGIDISKDSFHVELSINHKLRHRRFTNRKEGFAELCGWLSKHKATPVHACLEATGPYSEALALYLHEQRHTVSVVNPAQIKAFGQSELLRNKDDRPDAALIRRFCEKQCPIAWTPPPAHFRELQALTRHLENLLETRQQQLNRLETTTTKNVVKSLRQLVTHLEAEIKRTEQQIENHVDRHPDLKQQCQLLESIPGIGKRTATRLLAEIENISQYKSARQVAAYAGLTPRNNRSGTMRGQSRLSKTGNARVRKALFLPALVAKQHNPVVRNFCQRLARHGKNKMQLVGAAMRKLIHIAFGVLKSGKVFDPNHELLLNS

SEQ ID NO: 507640 - protein, 344 aa, unidentified
MNYYAALDVSLRSVHLCVIDDQGKLIAETKLSSEVTDIIAYLDGLDFELSIVGLEAGTLAQYLTYGLQSAGYEVVCMEARQVKAALSAMRNKTDKNDARGIAQLLRTGWYSQVHIKSMESHQVRALLSCRKAVLSKCIDLENEIRGLFKIFGIKLPPKLGHGSFDAAVRDVITVDTTLNQSLLPLLDARLVLYRSFRELDNRTRHMAHADPVCQVLMSAPGVGFITALTYKAGVDDPYRFKHSRTVAAHFGLTPRRFQSGEIDIDGHISRCGDRDVRCTLYTAANALLTRSSKWSPLKAWGMKLAKTRGHRRAAIAVARKLAVILHRMWLDDVPFRWSTEDARS

SEQ ID NO: 507641 - protein, 389 aa, unidentified
MKIFVGIDIAKLNHFAAAISSDGEILIEPFKFTNDADGFQLLVSKLESFDKNSIIIGLESTAHYGDNLVRYLVAEFYQVCVLNPIKTCQMRKNNVRKTKTDKVDTFVIAKTLMMQDVLRFITFFDLDMMDLKALGRFRQKTIKQRTRLKIQLTTYVDQVFPEIQYFFKSGLHQNAVYALLKEAPSPKEIASMHMTHLANLLKVNSHGHFTKEQAKELRVLAQKSVGANDSAISIQITQTIQQIELLDSQLEKIEAEMTDIMKFNDSVIMTIPGIGYINGGMILGEIGDIHRFSNPNKLLAFAGLDPSVYQSGNFQAKTTRMSKRGSRVLRYALVNAAWNVVRNNATFKAYYDAKRAEGRSHYNALGHCSGKLVRVIWKMLTDNVEFNLK

SEQ ID NO: 507642 - protein, 429 aa, unidentified
MDEALKPTTKSEDKHMKIHKYLGLDVHQDDSIIAIAEGDRTGEVRVYGKVSSDLYATEKALRKIRGEHGVLHVAYEAGPTGFVLYRRLQQLGIDCIVVAPSKTPQPKGGRQKTNRRDALQLARLHRAGELTGIHVPDEVDESIRDLTRARSDASRDLKRAKQRLKSFLLRQGYHYTGKANWSEAHQRYLRELVLPLPALKAVLEEYLQAIDRCTERLTRLEELLVAQVPQWRMYPAVQALMCLRGFELVAASILVAEINDVRRFAHPRGLMAYLGLVPSEDSTGDTRRLGAITKAGNAQARWILVEAVQSADHPPKVSAPLALRQQGQPEAYRTLGWKTQVRLYKRYWHLTRRGVMAGKVKIALARELVGFVWDLLRQVPVPAAPASAAHPAPQATAPIPPATAAPAPGSRSATRRHPPGAQLSALVRD

SEQ ID NO: 507643 - protein, 404 aa, unidentified
MKGPIVSIDVSKGKSDYQAFKDLNVKYTGSRSIKHTKEGFDEIVSLVREMEKKLETEVCVVYEATGVYHRVLKKVLEDNNIKQFIINPLLSAKTRKNDSLRSPKTDKLDPKSIAKTYYSHSLHNSHKQETIYHELRELSRYYEDILVHIRKDKVAFRAQLDIVFPGYDTLYDDLYGPVALAIIEKYPHPEMLQKKKINTVSKVIQNKTCHRQAVSDTMADKAIEYSKTIYSGCDKDDIEVLILQRFIKKLNEDMAEAERTIGEMIKLAQELPDFNIIKSIPGIGDNLAARIIAELGDMTRFKKKNELVAFAGLDPRISESGQNDGDHMHITKKGNKRLRCLLYLAVTCSIRLKRDDNSIKDFYIKKKQQSNPMCSKAAKTACASKLVRIIYSMCKTGELYQYNK

SEQ ID NO: 507644 - protein, 343 aa, unidentified
MLYIGLDVHKEFCQACVMNESGRAISNSRFSSTKTGLDSFLKQFEDAKFVLESTGIWEFIYEGIEERGFEVVLAHPLKVRAIAEARVKTDKVDAQTLAHLLRADLIPRSHVPPRDIRNLRQLVRQRAYLVRHTTSLKNRIHAELLRHGVRRPGDIKSAFTKGHVQWMRSLRIPTIESNLNCLEGIQSQIENLSSLLLDEFNSRKEAQLIATIPGVGYYGALLILAEIDDVHRFSHPNKLCAYAGLVPKVHQSASSVWHGRINKDGSKYLRWILTEAVHSHIRFCPESNLSRFYSRVAKRRNDQKAVVATAKKLLCTIYWMLKREERYHSQGSDLGEKAASSNA

SEQ ID NO: 507645 - protein, 305 aa, unidentified
MTTYIGIDVSKLLLDIHHNGQAAQIPNTEKAIRAYLKSLPDDTMLVCESSGGYEATLITQAHSQRRPIARINARQVRDFAKAKGRLAKTDTLDARIITEFAQTFHPTPLCPADPLQIELSALVKLRSHILNQITQNNNLQETLSDKNILRILASTVAALKKQEVKIRSLIVATIKRSPSLTSNVSRLQEVQGIGLVTAFSLLSFMPELGTLSDTQAASLAGVAPFNHDSGQFRGQRHIRGGRSHLRSALYMAALVASRYNPILKPLYQRLLAAGKPKKLALTVLMRKLILLANRILKNPQFSLVS

SEQ ID NO: 507646 - protein, 378 aa, unidentified
MIATTRPEMSVSEPTLYVAFEVGKKEWQLAMTSGFGVDPWVRTVVSGDLPAVAGALRQGRMRFALPAQARVVSCYEAGRDGFWIHRALTQLGLDNRVVDSASIEVNRRARRAKTDRLDALNLVRMLVRVCAGERKVWSEVRVPTVAVEAARHVSRERTALRQEQTRLSNQLRGWLATWGCRLPRYRKPGWWTAVRDWAGAPLPLEVQTRLARAEARWAVLERQRTELEAQQQAAVPAAAPASALRQLVQLKGVATTSASVLLDEGLVWRGFRNRRQIGGLLGFAPTPFDSGESEREQGISRAGNGHLQSISIQLAWNWVRWQPLSALTQWYRARFGTGKRARRRGIVAVARKLLIALWRYVTTGVVPAGATLKVAAIA

SEQ ID NO: 507647 - protein, 340 aa, unidentified
MSIVGGLDVHRAQITYDHLDTETGEAEVGRIVPATRLELRQWLSRFEDKDAVFATEGCTGWRFVVEELQHAGVEAHLAEPADTATLRGRKKRAKTDRADARHLRRLLLEDRLPESWIAPSHVLEVRTKARTYLALMNHRRAWQQRIQAQLFHQGVEKRSGLLTVAGRAHLEGAELSAAGRQLVEVALRIIDALGAEADQLRSELKAFAHRQAGCRALVDEIYGVGELTAAIIWAEMGDTRRFSSSDQAVRHTGLDITVWSSDTKRSPGRLSRQGPAALRWALFEAALAATRQSSPDHAYYLGVAERLGAKRAYLSVARKLARRIHHILRGLGDAGFEEVT

SEQ ID NO: 507648 - protein, 387 aa, unidentified
MYYCGIDVAKMGHVVSVIDDTGKVVNQGVPISNDRIGFEKLINLLQPYQGEIQVGLEATGHYWLALYDYLCHLDYSLSVINPLQVKAFRRMDIRKRKTDRLDSVAISEFLRFANPGKTSVDLPVILQLKELTRFRFRLVQQIGDCKRKIISILDRVFPEYEQLFSSVFLASSRQLLHKAVTADEFAAFDLTELEQILLTASHRRLGTEKAREIQLKASQSVGVSFLTDAIHIEIRCMLQLIELLEEQCSQVETKVEELVNTIPHHITTIPGIGKVTGAMLLAEIGDINRFPAPQQLVAYAGIDASVFKTGQFEGDKMHMSKRGSHYLRYALWQAAIASLLHNPEMKQYYDKKRAEGKEHGVAMGAVCHKLLGNIYVIMKEQRPYVTH

SEQ ID NO: 507649 - protein, 316 aa, unidentified
MTHHTVGIDISKARVDAYSAPEGRAARFSNDAAGFRKLIAWIGPQARRVAYEPTGPFHRDFEDALLKAGLPLYAINPYQVRCFARSQGRRAKTDAVDARTLATIMADAIGDLRPTAPKSPSDRDLAELRLVRDALVADRTATLNRGKHLRHVLAKRVNKERLAQIERQLKRIDAEIQKLLRSEETLRRRSEILTSIPGISSVTAAGLIVHMPELGTMTGPQAASLAGLAPVTRESGTWKGRSFIQGGRDRVRRALYMPALAAIRANPALGQKYDALLANGKPPRVAITAVMRKLLVLANVLVQQDRLWTPEPPATA

SEQ ID NO: 507650 - protein, 392 aa, unidentified
MVARIATTDESLVTTYSKSKRFSTFTSDLRRLALWLADNNCKDVCMESTGKYWIPVYNILEPTCNLVLAHPKYLKAIKGKKTDKRDAKWIADIFKHDLLNGSFIPPADIRQFRDLVRYNFKLTNYTTGEKNRAQNCLTVSNIKLDDVFSDVFGKSAAAITSYLLEHPGETFDVAPFVDRRCKTPIEEIQVAVDGMMCANQAEKLRIIRSHMGSLELCKMNLESEILSIAQKFWPQVTLVITVPGIQTFSAIAIIGEISVDMSVFETSRHLCSWVGLAPQNDNSAGKKKTTRVSRAGAYIKPILVQCANAAIKSNKNPEIRNRYNAIKKRRGHKKAIIARMMLTAIYNILKKNEPYNAELYSQSNKPPVQREVTVERAIFILQRQGYLVTAST

SEQ ID NO: 507651 - protein, 458 aa, unidentified
MRKQNRRSPKVAVTPTLRRHNPAAAGLDIGAEEIWACVPAERDPQPVRAFGTFTPDLLALADWLVQCEVTSVAMESTGVYWIPIYEVLEARGLEVYLVNARHLKHVPGRKSDVQDCQWIQQLHSYGLLTASFRPAEDMRVLRAYLRQRAMLVEHRAGHIQHMQKALQQMNLQLTQVLSDITGTTGLQIIRAIVAGERDPQVLARLRHGRCQRSEAEIAKALSGHYRPEHVFALKQALALYDFYTAQVQECDTYLEQHYAAIKPTYDEQTPPPPLGPDPKPNSHAKNAPAFDVRACLYRILGIDLTATDGLEASSAQVLLSEVGTDMSKWPTEKHFASWLGLAPHNDISGGKVLRSKPLKGNRRAAQALRLAAQTLGRTQTALGSYYRRLRARKGPTHAITATAHKLARMLYHVLKHRTPYQPQSQETYDQHLRQRAIRHLKRTATRLGFTLLPQPVAA

SEQ ID NO: 507652 - protein, 458 aa, unidentified
MNRKRSKPKIDRKMPMVHPNAAAIDVGATMHMAAVRADRTPEPVRSFGTFTTDLHRLVDWFTECGVETVVMESTSVYWIPIFELLDARGFTVFLVNARDAKHVPGRKTDVSDAQWLQRLHSYGLLRASFRPKGQIAELRAYVRQRERLLEYAASHIQHMQKALTEMNLQLHHVVADITGATGLRIIRAILAGEHDPKALARLRDYRCHASAETIEKALTGSYRAEHLFALEQALALYDAYHEKVSACDARIEAVLKELSIDRGRRSDSLLSPSRPRTDQVNGLAFDVRAALFALLGKDLTQIDGLGPYLSLKLIAECGDDLSAWASAKHFTSWLGLAPSNKISGGKVLSSRTRRCGTRAAALLRLAAVTVGRTDTALGAFYRRLSARIGKAKAVTATARKIAVLFYNAVRHGMEYVDPGASYYETRYRTRVIDNLHRRAKVFGFVLQPMEPTPGGAVS

SEQ ID NO: 507653 - protein, 355 aa, unidentified
MERYIGMDVHAASCTLAVISEKGRKLKDFPVETNGQALVEAIRMIPGHKHLVFEEGLQSAWLYETLTPHVDDIVVAGITTSRGPKSDKADAYALAENLRVGHPDKHVFKAPRQFTRLRELSRSHSTLVADTVRVQARIKALYRSRGVLVTGVNVYGVRHREEWQRQLPSSIQTRATRLYEYLDFLWVQKNQAESDLLREAKKHPTAKILETAPGFGPIRAARLLPIVVTPHRFRTKRQFWSYCGLGIVTRSSSDWVQAADGTWIKARVPQTRGLSRQHNHFLKSIFKGAATTVITQNKKDPIYARYERLLDSGTKPTLAKLSLARMIAATVLRMWKDEKEYDPGRASPTAKKREG

SEQ ID NO: 507654 - protein, 350 aa, unidentified
MLIIGCDYHPGFQQIGFVDTETGECGERRLVHREEAEQFYRELKERNLAVRVGMEASGHARWFERLLRELQFELWIGDAAEIRTRRVRKQKTDRQDAQLLLRLMLEDRFPRIWVPDSENRDLRQLLWHRHRLVQMRTRVMNQLHVVALNEGLRRKKALWRPAGRKELESLVLAPWASRRRQDLLDVLDQLTPKIQELTRALEEEVQKRPVTRRLTTHPGVGPLTALAFELVIGTPERFHCGKQIASYVGLVPSEESSGDRRRLGHISKQGNALLRFLLVEAAQVTVRSHPQWRSKFFHLALRRGRKIAKVAMARKLAVHLYWMWRQGWDYGQFEKFGSHAGAPGNRRGVQ

SEQ ID NO: 507655 - protein, 310 aa, unidentified
MSAVNAAIEVGKHKLDIALGSEGELWSEANDARAIKRLVKRLAQAGCARVLIEGGSYQNVLVAALRAAALPVVIINPRRVREFAKSIGQLAKTDRLDARMLALYGERVQPPVRELPDEQSQALRALAVRREQLIEMLVMEQNRLEHAPKALHHDLQAHIDYLRQQIKRADDELDRAVRDSALWDKYQLLNSVPGVGPVLSRALLADLPELGRLNRGEIAALAGVAPFNQDSGTLRGQRKIEGGRPRLRRVLYVASWAAVRCNPVLKPFYLRLRADGKPAKVALVAAMRRLLLILNAMLKNHTSWRPPCPV

SEQ ID NO: 507656 - protein, 344 aa, unidentified
MGEVSTIGLDIAKSVFQAHGVDVDGIVVIRKRVSRAKVLKYFGELAPCLVGIEACPSAHHWGRELQRLGHTVRLIPPSYVKAYLRRSKNDANDAAAICEAVTRPSMRFVPIKTTGQQTVLMLHRTRQLLVRQRTMLSNALRGHLAELGIISAKGRNGTAELLKIIADGEDSRVSPLVRSILEVLARQYGAIGAEIASIDKSIKALHRVCEASRRLAEIPGIGPLSATALVAEIGDWSTFSSGRSLAAWIGLVPKQHSTGGREKLGHITKQGNRYLRWLLVVGAMAVVRYARKYGARRRPWLARLMERRPTKVAAVALANKIARMAWAIMVRNERYKEPKLLLAA

SEQ ID NO: 507657 - protein, 356 aa, unidentified
MSRDIKYIGMDVHKEAIVIAVLNNSGKLVMESIVETKASSILQFIHGLQGELHVTWEEGTWAAWLYDLLQPQVAQVLVCDPRRNALLKEGNKSDKVDARKLADLLRTGMLRPVYHGEHGLRTLRELARTYQTLSKDLNRVMNRVKALYRGWSIPCAGTQVYAPRYREEWLGKIEHAGVRRRAELLYQQLDGLQALRRTLRPELLAESRKHKAAKLLRQIPCIGPIRAARLLALMQTPHRFRSKRQLWTYSGLGIETRDSAQYRFVRGQLQLAKKPQQIRGLNQNHNHEMKEIFKGAATRASCGVGPLRDFYEALLDKGMKPEMARLTLARKIAAIALTLWKKEERFDAEQLKTQAA

SEQ ID NO: 507658 - protein, 399 aa, unidentified
MAQQVWAGVDAGKSEHHCVVIDGDGQRLLSRRVPNDETVLVELIDAVTALADGGEVTWAIDLNHGGAALLIAMLVTAGKRLLYIPGRAVHHASGSYHGDGKTDAKDAAIIADQARMRRDLHPMHPGDELGAQLRILISRRTDLVTDRTRAINRLRAQLLEYFPALERAFDYGHSKAALILLTGYQTPEALRRAGPARLEAWLRKRKAYNATGVAATALAAADAQHAQIPGQQIAATVVARLAKEVMTLDTEIGNTDTMIEDRFRRHRHAETILSMPGFGVLLGAEFLASTGGDMAAFDSVDRLAGVSGLAPVPRDSGRISGNRKRPRRYDRRLLRACYLSAQIATRTDAASRTYYDRKRAEGKTHTQAILALARRRLNVLWAMLRDGTTYHAETTPAAA

SEQ ID NO: 507659 - protein, 346 aa, unidentified
MTIVEEKPAITGGVDTHSEVHVAAALDPVGGLLGTRQFPATAAGYASLLGWLGKFGDVALVGVEGTGSYGAGLTRYLTGHGVRVVEVDRADRQDRHRSGKSDPLDAVSAARAALSGRASGAPKGRDGAVEAIRSLMVAKRSARHERTQAINQARALILTGPDELRARFAGKRAARLAEAVAALRPRPGDAADYSLRVALRELGRRVEFLDDQIGRLDDLIVPLVTARAPGLLSLHGVGPDSAALLLVAAGDQPGRLRSEAAWAHMCGVAPIPASSGKTRRHRLNRGGNREANHALWRIVITRMSTHPATRAYVQRRTAEGLSKKEIIRCLKRYVAREVYPYLRPGA

SEQ ID NO: 507660 - protein, 354 aa, unidentified
MVTIVREEPPRIVVGVDSHKEAHQAAVLDRTGALLGNECFAASTAGYHELEAWLATLGEIDRVGMECTGSYAAGLTRYFRERDVKVFEVNTTHRATRARRGKDDAIDAEMAARKVLSGEARAWAKDTTGDIESIRLLKLSRESAVKARTVALLQIRDVLITAPAELREWIESAGGTRHRVNRAGALRPDLERLGEPMQAAKFTLRQLSRRVKFLDEEIAGVNAQLNHLVARCAPHLLECCGIGTQHAAQLLITAGQNLERLNNDGAFARLCGVAPVPVSSGKTNRMRLHRGGDRQANRALHLIAIARLRLDPRTQIYMERRRAEGLSKMDVVRCLKRFIAREVYNALKLDLLQN

SEQ ID NO: 507661 - protein, 407 aa, unidentified
MASIDRTKYLFVGVDLHKKTHVAVLCNCFGDVMKQFKITNAPNHFPAFLEDVKKHAEGKDIIFGLEDVNFYGRSLAKFLIANGYIVKEVNSSYTKKKRNKGTNRNKTDELDAKAICMNLIMEYDDHPVANPQDIYLAIKQTLSTRNNYVKMAANMKLSLHNLLIHHYPNYTDFFKDLESKTARGFFYTYPSCEMVANVSAEELTKTLQQYNKSVPKTKAQEILNAIAANGWADNGYQEERNQSIRSYIQSIEHLEAEIAALEKQLDRLIDETGYPLKTIHGVDTVLAATFIANIGDINRFKHHSQLAKLAGIAPIEHSSGESQNRYSNKLGNRELNKAFYSLALTQIRQGINPLMYEYYQKKIKEGRKKKQAMVYVARRLVSIVFSIMKNKTPYRHPVFVEAEAVGA

SEQ ID NO: 507662 - protein, 356 aa, unidentified
MSETVSTEIIVGVDTHKDVHVAVAISGLGARLGTKTIPVGAKGYRDLAAWALSFGAVRAFGIEGTGSYGAGLSRFLCEQGHAVLEVNRPNRQLRRQRGKSDPLDAEAAARAVLAGQADTLPKSGTGTVEMIRHLKTARDTAVKGRTQAMLTLKSLIVGVPAILREQLERVGGKMKLLRHLAALRPGPITSTTASAKASLRAIARRWLALDGEIKEHDVHLKALTTSRAPELIKAHGMAAGTAAEMLLLVGDNPERIRSEAAFAKLCGACPIPASSGKVTRHRLNRGGNRQANAALYRVVIVRMRGHQPTLDYVRRRTAQGKSRSDIIRCLKRYVAHEIFGYLCSTSKPATTPLGSS

SEQ ID NO: 507663 - protein, 454 aa, unidentified
MSETHKKLKYIYVGIDCHKITHTASIINAFNEPLGTITFNSNREGFKSLVDFVSKINTENLVPVYGVEDCNHLGYSLSSYLLSKNCIVKVVNAIYTYSERKNNPIISKTDKIDSFCLAKVTLDKLDVLPNATHDDLYWTLKQLSKMREAILKHNIEYKFKLHAQLLHHYPNYYKFFHSFDCNTALALWETYPNPTILMHSPVEEVESLVYSVSKGYFNTSKVHLILDYIKEYDYDLIDYQAERDELIRTLVKQIKYNTEQIEMMDAEIDQVVQKTGYKLTSMVGLDKVLAAKIISEIGNVNRFPSADKLARYAGIAPVSFSSGKKDKDVCNKYGNRKLNSYIYILACIHINPGGRGMQRIMSPIFYDYYQKKISEGKTKHQAILQVMRRLVNILYGLMKSKTEYVHPKKLAEELEQKNNESAMKERAEKKAEQLKALKMSKKGCISSSSMVKFN

SEQ ID NO: 507664 - protein, 384 aa, unidentified
MPAKRKVVDPLEPERHRCARVEMSSNHSRDRGSAMNITTYALDLAKQVFQVHWVEPDTGEIRRKALLRAEVNAFFAQRPPGVVAMEACGSAHHWGRVLRGLGHEVRLVAAQFVRPFVKTNKTDAADAEAIWEASQRPGMRYVALKSEEQPAVLSLHRMRQQCIKVRTMQAHQVRGLLYEFGAVVPKGWRALLAQAVPLLADETRCAVPELVRRQLLTQLEGLRALTRRVTELERQIGSWQRGERECQRIAAVPGVGKLTATAVIATVGDARAYRSGREFAAWLGIVPRQSGTGGRIKLLGISKRGDPYLRTLLIHGARTVLNHQSRADRQLDPWLKGLISRRPKNVVIVALANKMARTIWALLAHGREFDRCWSRAWMPAPALS

SEQ ID NO: 507665 - protein, 404 aa, unidentified
MSELGCGVDVHRDLLVAIVMGDSFKETKRFVNDVGSINGMKEWLKGHGCRRVVMESTGIYWVPLYLALEEAGFNVLLANAWQVKAIPGRKTDQSSSEWLAHLLRSGLVKASYVPEKRVRDLRELTRLRVKLVGTRTAFKNRCHKVLNRVNIRLGSRLSDVFGKAGSEVLEGLMEGKTVDDILEHTSNRWLKKRGDEIKEVVKGVLSQSDIFVLKHCVDMVKQADEKVLMMDAQIETLVNEHDVEIVASVPGVGRKSAAAITAEIGDAKRFLDGKKIASAAGLAPSVYQSAGKYLTGGITKQGSKWLRRIMVEVAHVAVRARDSKLRAFYLRVKARKGEKTAIVAVARKMLTIIHHLLVNGEKYVEEGFEKRFRSKGSARLRDVPLEEMVVVLRESGYVVRGPFG

SEQ ID NO: 507666 - protein, 367 aa, unidentified
MKQVNTAPPGQSRNFSQQKLTIGLDLGDRNSWYCVLDEAGEIQLEQRVRTNAKVLREVFGGMPHSRIALETGTHSPWISRLLSALGHEVIVAHARKVRLIGESRKKDDRLDAQTLARLARIDPQLLCPVKHRGAKAQADLTVIRARAGLVRARTGLVNSARSLAKSYGERLRGCNVRNMNPEKAQQLSPELQPALEPLLAAIEELSARICQYNERIEGLAQSSYPQVALLKQVKGVGTLIALTFLLTLEDPHRFRKSRDVGCYLGLQPGRRNSGQSAPQMHISKEGDPYLRTLLVQGAQHILGPFGVDCDLRRWGLKLAERGGKSGKKRAIVATARKLAVLLHHLWISGEVYAPLHNSNRAIVATAA

SEQ ID NO: 507667 - protein, 344 aa, unidentified
MKISTMGIDLAKNVFAIHGIDEAGNVGVQRTLRRGQFLAFFRKLEPCLIGMEACATAHYWARELLQLGHEVRLMPPSYVKPYVKRGKSDGIDAAACCEAVGRPTMRFVPIKSEEQQSVLSLHRTRALLVRQRTQTNNVLRSLCAEFGVVGAKGAKPLGDLAAMIRNESDGRLPAQARLALMPLADQLQHLARNIAALDYQIVKGCRSDEACRRLQTIPGIGPITASAVIATIGNPERFRTGRDLAAWIGLTRRANATGGKDRPGPISKQGDRYLRQLFVQGAAAVVGTIQNPRSTAATPWLRELAARKNPKLAIIAQANKMARVAWAVLAKGQDYRADHAGTMA

SEQ ID NO: 507668 - protein, 321 aa, unidentified
MDTQERAAAAALVAGIEVSKAALDVALRPGGEAWRCAKDEAGIGELVSRLKPLAPHLIVLEATGGLERLLVAALALAGLPLAVVNPRQVRDFAKATGQVAKTDARDAAVLAHFAEAIHPSPRPLPDAQNQALAALGERRRQVVGMLTAEKNRFQQALPTVRPKVAAHIQWLAQALDELDGELDQTLRTSPVWRERDQLPRRVPGGGPTVSLTLLAHLPELGQGSVKHVATLVGLAPLNRDSGTWRGTRATWGGRRQVRVVLYMAALVGVRHNPALRAFYERLLARGKPKKLALTACMHKLLTLLHAMLRDRAPWRSTLLAA

SEQ ID NO: 507669 - protein, 433 aa, unidentified
MKVLYERVAGIDVHKDMIKVAIRSPGDKPWTRKTEILEYRTFYGVLQAMARELRRRGVTRVVMEASGVYTEPVYYALGEQDFEQVAVINPAHAKALKGHKTDARDCARLAELFECGLLHGSYIPAPELKEVRDLTRYRMKTVQARTSEIQRLGKALESAGIKLGSVASSITGASATAMIEALIDGERRGGVLADLARGRMRDAGKLADLSMALTGRFTEHHALLCRLHQDRIAGFDAAVTGLDDRIAGKAARWQREADLLTSVPGFGDVVAQAWLGEIGPAPHLHFATHEKLACWVTLCPGNNISARKRKHGRTGDAGTYIKPMLVQAAWAAIRVRGRLQARYNRLVRRFGGDKNPGAKKKAIIAIAHTLLKIAYQVLKSGTPYQDLGADFYTRRESPEQKQAWLERQLQKLHPGCTITITVSPPEAALAPGA

SEQ ID NO: 507670 - protein, 341 aa, unidentified
MSKLFIGLDVGSTTFHQVGMQPDGSIKLSRSFAMSEANLIKAFTGLGCDLHVHMEAGELAPWVRSVVAPLVAQVVISHPPANAWIGKDPNKRDQLDATKLADLLRVNRLHPVYYAEQQTRREFKQLVQHFDDLTDQQIRIKYKIKARLRAQGVIVRGLQLFTASGRGEVLNRVTSDQVRETILQLYQVLDQTLATQLAAHKLMLQAARSFPEVELFKAVPGIGPITACRFSAYIQTPHRFSTVRKIWRYCRLGVSRRSSDGKLLSHPKLDPSGCGRLKDVTRKAFEAALRRKDDNMFKRAYERSLASTHNKTHARLSVQRKFVSVLRAMWLSMTPYRDELG

SEQ ID NO: 507671 - protein, 395 aa, unidentified
MLYLAVDQHKNHLTINIRNEQGDVLEKGQVHTSPDEIDEFFVAFAKKVRKHRGYMAIVEVCGFNDWLLEKFKKTQCKEIVIIQPDHSAVNKTDKRDADALGALLWNNRKRLEGGQRPNGIRRIFPADPTDAQVRQLANYRQHLLQQRTRVINKIKGIINKHNLSHDAPTENSATQKFRKWIKAVQLPVVDRLEVNMNIETLELYDKQVIEIESELVKRAESSKEKMADVYRLKAIPGISAMGAITLLSRIGDIKRFKNPDSLANYFGLTPGCHNTGGKHRIGGITKRGNAVARVVLNFAVNHIARKDPAMKAWHKKIKNKKGAKTARVAVMRRLATIIWHMLRWGKPYQFRYDPPAVTPKKDDLRSSKEVFGGIDNRNHSRKKGTPLKCRGKTKA

SEQ ID NO: 507672 - protein, 359 aa, unidentified
MMVGDQTKGESSMNFYNNTHPYYCGIDLHARSLYVCIIDHDGNTVVHKEITANPEKLHQLLKPFLGNVIVGVECMHCWYWVADFCEDLNIDFILGHALYMKAIHGGKAKNDRIDSYKIANLIRGGNFPLAYTYPKEMRATRDLLRRRTKIVRHGAHLKAHASNTTSQYNLPSHNLNLKNASAREQLRSTFPDKSVQKNIDLDMAILDCYAKELSKVEWFIEQQAKQHNPVHLKLLKSIHGIGPILALTIIYEIGDINRFESVQNFASYSRLVKCKAESAGKSYGMQGNKIGNANLKWAFSEAAVLHLRGNDKAKNYLLTLQKRMSKAKALSVLAHKLGRCIYYILKNETAFDETRFIRG

SEQ ID NO: 507673 - protein, 416 aa, unidentified
MKIVRPICCGMDVHKNIIVATIGITNKKTRITEYIQETFSTLNPDLLNLKQWLINHKCFDACMESTGKYWIPVFNILEDEINIYLTHPKYVKAIKGKKTDKKDSKWICDLFKHDLIKFSFIPPKEIRALREISRYRYKLVGMRSSERNRYQNCMTVSNIGIGSVFSDPFGKSAQAIMKEVLESDIIEDEKILKCIHGSCKNKDKILDSIKHCNIETDQRFKMNESMTHMEELQVHIDNCEIEMMKRAAPMFDQFMHITQLPGISTLSAILIISEIGVDMKQFESDKQLACWAGLAPANNESANKKKSVRISKAGQYLKPLLVQCALGAIKDKEGYFGIKYSRIKKRRGHKKAIIAIARMMLVSIYHMILTGETFNPSDYESFRNPKPPIKQQDLTEESAIEFLKKSGFDVSKLTKP

SEQ ID NO: 507674 - protein, 337 aa, unidentified
MNYSGIDLHSNNSVIVVSDETDHVLCQRRVPNDLAVVLRTLEPYRQEIVGVVVESTYNWYWLVDGLQAAGYTVHLANTAAMKRYEGLKYSDDETDAAYLAQLLRLGILPTGYICPVEQRALRDLARKRLQLSRSRTQHILAVESNVARQTGGRIASRVVKQLTEETLKTFGLIENVTAAMAANVAVIQTLNVQIEKLEARLRSEMRPQAQFGLLTTAPGIGEILATTIMLETDSIERFAGVGNFASYARCVDSKRVSNGKKKGEGNVKNGNRYLAWAFVEAANFARRYCPEAKRFYERKKARTNSIVATKALAHKLARACYHMMKENQPFDVKRCFA

SEQ ID NO: 507675 - protein, 355 aa, unidentified
MNQEKYIGMDVHQATISVAVMDSRGKLIMESILETKAATILEFLQGLRGSLSVTFEEGTSAAWLHDLLKPHVTRVVVCDPRKNALLKDGSKSDRIDARKLAELLRGNQLTSVYHGEHGMRTLKELGRSYLTITTDLTRVMSRIKALYRSWAIPCIGTGVYAPRHRAEWLGKIPEPGVRLRAERLYQQLDLLQPVRQQARRDLLTESRKHHAVKLLRQIPSIGPIRAALLVAQLQTPHRFRTKRQLWAYSGFALETHDSGEYRYVRGKLQRNRERMTVRGLSNHHNPEVKNLFKGAAISASTHPGPLYDFYVALLEKGMRPTMARLTLARKIASITLTIWKKGADFDATQLHRQEA

SEQ ID NO: 507676 - protein, 339 aa, unidentified
MAIVGGLDLHRKQITFDLVELETGRVERGRIAPAHRETFRRWLTGVAAGGPVDLAVEGCTGWRFVVEECATAEVRAHLAEPADAAALKGRRQHAKTDRLDARHLRELLEAGKLPECWIPPELVLEVRTKVRLYKDLLDERTGWQQRIHAVLFHHGVPAQTRLLANERERLVRLDGLSPAGRQAITVALRVIDTLDGELLRLREELVAFAKRQPGCKELQHEFGIGPLSSVVIWCEMGDARRFANSRNAVRHTGLDISVYSSDGKRSRGHLTRQGPPLLRWALYEAGRCASRATSPDHAYYEQAARRLGKRRAAMSVARKLARRCHHRLRALGDTALAPT

SEQ ID NO: 507677 - protein, 392 aa, unidentified
MYIIGIDIGKNHHEASIVSPKGRQIGHSLRFATTHKGADSLISFIFKNIGDSPCVFGMEATGHYWYPIYSFLKFKGYTIYVINPIQSDSLRKMYIRQTKNDSIDSFLIAEVIRFGQFEATSMADENILAMRQLCRYRDSVVSSRTEIKLRISTIMEQIFPEYEKQFSSLWLGTSMGILEKYLTPENIQNAPIDELFEIIKDKSHNKLTIKKAVSIKDAAADTFGIKIAQDAFAFQLKQLIDRLNFLNEQLEALDHEILSYYEKFDCYLHTIPGIGMIAAATILAEIGDIHRFKNSSALVAFAGIDPTVRQFGEFNSIHNHMSKRGSPYLRHAIFLAATTCSFHNSPLNAYYKKKREQGKHHLTATGAVARKLTTVIYAVLRDGKPYEPKSFC

SEQ ID NO: 507678 - protein, 428 aa, unidentified
MKNRNVQKLEAITPGTLVVGVDIAKETQWAQFVDYRGLELRKALKFRNHKNGFDSILASIETIYKNRRLDNIIVGMEPTGHYWKPLANYLLKNKVNVVMVNPYHTKRAKELDDNSQTKSDKKDALTIARLVRDGRYYEVYMPQDIFAELRVLSNSRISLMKRSNALKNTITAVMDEYFPEIVTVFKNPLKGKAAMQILKSCPFPSLILELGIDGVLFEIKKAVKKTVGRKKAQQLVETAKSSIGVGYGLVSAKLKLGLMIEELELLTKQLEQLEKAMEKALADTGYGEIILSIPGIGVVTAASFLGEIGDPMRFDHPRQICKMAGYNLIENSSGKNKSRTVISKRGRKNLRSILYQMAMTMVAVNDEMKELYKYLKTRPNNSLKKKQALVVISKKIVTVIYNLIKKQTEYQAELVLGEFRKNQIKQAA

SEQ ID NO: 507679 - protein, 309 aa, unidentified
MPPSLFAGIDVSKSRLDVALGDQFFSVEHTEEKLSELVEKLEAGSPQLIVLEASGGLESALVAYLAEAGLPVVVVNPRQVRDFAKATGKLAKTDKIDAKTLSRFAEAIKPQRRPVKDAERRQLSDQVTRRRQIVGMISQEKNRLSRASVQVRSDIEHHIAYLKERLDRSDKDIEKIIKSSPLYQDTAELLCTVPGVGPVTIASFIAFCPELGSLDRRQIAALVGTAPLNRDSGSRSATRCVWGGRKAVRNQLYMATVSAIRCNCKIREFYLRLSAAGKPKVAITAWMRKLLTILNAMVRQRKYWQFNAV

SEQ ID NO: 507680 - protein, 338 aa, unidentified
MTIVVGFDVHRSQITFDQLDRETGELRRGRIEPATRESLRLWLCRYQGEQVEAALEATTGWLFVADELERAGAGVHLAEPAETRARRGPKRRAKTDRADARHLRELLAEGRLPEAWRPPAHIQELRTRVRLRKTLVDERTRWLQRIHATLFHHGLPAPGALLSHPARARLAGLELPPAARERIAVALALAEALDAQLAPLEAELRAFARRQPGCRALMREHGIGPLLAPTILAEYGDVRRFGASRRALRHTGLDITVAESAGRRAPGKLSRQGPQLLRWALCEAAKRAAHPSAPDHPYYAAVRERSNAGRATLSVARRLARRCYHRLSELGEEALVPA

SEQ ID NO: 507681 - protein, 397 aa, unidentified
MYIVGIDIAKRKHEAAVIDGEGTVIIKPFSFTNNCSGYNRLLAMLTKAKLPLDEVSFAMEATGHYWLALFTRLQKEGFRVQVINPVQTNSIRSFYIRQAKTDPRDALLIAEVIRFGHFSESTLHPENIYELRELCRGRHAIVSMQADVKRKVVALLDQVFPEYETAFTNLFGDTSMAILQACPTPKELSEMPLKELCHLIEVSSHKRFRMAKARELQELARNSFGFAMAGDVFSTMIRLYAKHLDFLKQQVREMDRKIAEIMETLDTPITTITGIGPTLGAYILSEIGDISRFSSAAKLAAYAGIDPTMRQSGEYNGVRNRMSKRGSPYLRHAIWLATSSAVLHDPALKLYFQKKRDEGKPYMASVGHACRKMVSIIYAVMRDNKAYTPYIPNEISA

SEQ ID NO: 507682 - protein, 343 aa, unidentified
MQFFVGIDVSLDSSSICVIDERGVIIKEGKTDSDPTAIARFVRHKGRKIEHVGLETGSLSQWLHAGLSREGFRVTVMEARHVRAAFAAMRVKTDRNDARGIAQLIRLGWFKAVHVKAPSAQETRTLLNGRRFLVDKLTGIENSMRASLRNFGLKMGHVTRSKWAARARELAVGIPALELIIESLLRVRDALRQELRTIDRQLLDEAKADPVVRMLMTAPGVGAVVALTFKSAVDDPTRFKRVRDVGPWLGLTPSRYQSGRTDIVGHITKAGDAGVRTALYEAATTVLSRVTRWSTIKNWGMRVASRSGAKRARVAIARKLAIVLLTMWRSQTPFRWSATQASA

SEQ ID NO: 507683 - protein, 316 aa, unidentified
MKLYSAFDLHSNNSYLAIIDENGKRVFHRKVKNDPQLVVQSLNPFENYIEGIVVESTFNWYWMVDLLSDQGYEMHLANPSKIQQYSGLKHSDDKDDAFWLAEMLRLKILPEGYVYPKEQRPLRDLLRKRGHLVRLRTSLIVSLQNILARNIGDKMKTNDIKALKEDRVTPLLAGNDDISLAGRVSKEAIDSLTRQIKAIEVAVEKKMDLRKPYDLLLSMPGVGRVLALTIMMERGPIGRFTKVGNYVSYCRKVPAGRFSNEKKKGTGNRKNGNKYLSWAYAEASELARRLDAESRTYHDRKRRHTNAPIAHSTLAH

SEQ ID NO: 507684 - protein, 330 aa, unidentified
MDKIEACGIEVSARELVVALGDPQGGTRLRRFANRAVGHRALLRVLQSLGKVRVVLEATGMYGLDVALALSAEEGIELMVANPRAVRHFAQAMMQRSKNDQLDAVVLREFAARMPFRAWTRPTENQLELWAIARRLEALTAQRAAEKNRQHAAGLSHAVPVVVRREIASSLRFLERSIARLQREAQRRIAADVPMQRRYELLCSIPGVGAVSAIHTLGELALLPEDRDVRQWVAYAGLDPRECRSGTSVHKRVRISKVGNRHLRRALYMPALVASRRQPHLREFYERLQRRGKNKSQALMAVARKLLHAIYGMFRTLKPFDGSLLFASAS

SEQ ID NO: 507685 - protein, 399 aa, unidentified
MHKKLIVACFRKGSKQELRNFGATTRELLELANWLQNGGCEMVAMESTASYWKPLYNILESSELKAMVVNASHMKAVPGRKTDTKDAEWIAELLQHGLLKASYIPDKQQRELRELVRYRKSLVSERTRELNRLQKMLEGANIKLSGTVSDINCMSARNILEYLLTGEFFDEAKYDEMYKQKIIAHNLKASKEQIIDDLNGVMTPLQRRMMKELLSHLDELNVHINNLEDEIDNFMKPEEKKATQAIQDVTGIGKNSSQAIISVIGTDMSRFPTAGHLAAWAGLCPGNNESAQKRKTGKMRKGNALLRSTLVVCAHSATRNKNSYFYAQFMRISSHRGKKRAYVAVAHSMLIAIYHILKDGVVFKDLGADYYNQFNKERKINAYLKKLKALGWEVPVVAA

SEQ ID NO: 507686 - protein, 405 aa, unidentified
MVTYVGIDWSSQKHDVCFVNEAGAAIARQVIAHTPAGFAEFERQRQRLGVEPAECVIGIETAHNLVLDYLWGHHYHQVYVIPPNKVNRESTARWPSGARSDPSAAYLLADLLRQDTTRFPVWRPDSLLTRQMRSRVSLVMHLTHHIVQMANRLRAVLWRYYPAALTVFSELTAQIELVFITAYPTPQAAAQLTYAEFQAFAAQHHYSQPRKLPAGYARLQQPQPQADASTVLTFQDEAVQLAHLLLPLVQAKQAQLRDLGQLFKQHPDAFIFDSLPAAGEVLAPGLLVKFGDDRQRFPSAASVQALAGTCPVTDGSGQRRVVRFRKACDHEFRTMTQQWAKATLDESAWAQAYWQEIRPHCDSNSAAYRRLANRWLAILWKLWQTRQAYDEDYHLQQRAARSKPR

SEQ ID NO: 507687 - protein, 293 aa, unidentified
MELYAGIDLHASNNFIAVIDANGKRVFKKKVPNEAEIILSILGSFKEEVIGVVVESTFNWYWLVDLLSEAGYRVHLANPCAIQKYSGLKHSDDKHDAFWLAEMLRLHILPEGYIYPKEERPIRDLLRKRGHLVRLRTSLILSLQNIVARNCGVGLNVNDAKRLKENVVIPLLESNDDLAMAGLVSKETIDFFTRKIWAVEAMVEQRVQLKDRYRNLLTIPGIGKVLALTIMLETGPISRFPKVGDYASYCRKVGSKWTSNDKSKGKGNKKNGNKYLAWAFSEAAELARRYNTL

SEQ ID NO: 507688 - protein, 323 aa, unidentified
MQGKVSFQEDAMPVVYAGVDVSKEWLDIHLHPLGESRRFSNDKTGIRQLKRLLARHRPKSIVMEATGKFHRPAHRSLWLDGFAVAVVDPLRARMFARACGYLAKTDRLDARFLALLAESLRPPADTPPSPHVEALQELVNARSAAKCDITALQNRSKTATTALLRGELNRLVRRLEQYVERLDKEIERRVGEDPQLSRRAEILTSIPGIGRVTALALMAGMGELGTCSGKQAAMLAGLAPIANDSGARTGRRSIRAGRPAPRRALYMAALSACRYNSALARFADTLKAAGKPAKVILVAVMRKLLVLANCLLSHDRLWTPNPP

SEQ ID NO: 507689 - protein, 413 aa, unidentified
MDVVYPCCCGLDVHKASITACVLWAEGGGRARKEKRRFGTFTADLLELTDWLRTCGVTHVAMEATGVYWKPVWNILDGSCAEVLLVNAQHIKAVPGRKTDQKDSEWIADLLQHGLLRGSFVPPQPTRELRDLTRYRVSLAQECNRIANRIQKVLEDANLKLASVASDALGASGRAMLRAIIGGEDNAATLAEMAKGLLRHKIPALREALTGRVTAHHRFMLRELLDDLDHAEAKMMTVEQEIDRRLRPFQDDVARLCTIPGVDRVTAWGLLSEIGFNMDQFPSAAHLASWAGMCPGNAESAGKRLSGKTRKGSAFLRRHLCQAGWAVSTKKHSYLSALFRRVARHRGTKRATMAVGHAILVIAFHLLKRKTTYMDLGPDYFDRRNADAVRRSLVKRLQNLGHSVTLAPAPVFS

SEQ ID NO: 507690 - protein, 543 aa, unidentified
MTGLDGLGKGRKALNVAQIAREPSRNGCQFGILAIPIRSRKTTHTIHRIREESGMTVPVTTIDENGGEREYCMRGSCPEPGRIILVVPLSPQRSLTGEPRGTTNCRRHRRWRAREGDSPPKRLPPDLIQEETMQVVYMRCAGLDVHKKTVSACVSVCDAGAGKRQQTRTFGTCTGDLLELADWLREQGVTQVAMEATGVYWRPVWAVLEGQFEQMLVNPQHIKAVPGRKTDTKDCEWIADLLQHGLLKGSFVPPTPIQDLRDLTRYRVELRQSQNRVANRIQKLLEQANVKLASVASNALGVSGLRMLEAIIAGEANAAQLAQMARGKLKSKIPQLEQALEGRVRNHHRFLLAEYLDEWKSLGERIRRIEAEIDQRIRPFESAVALWQTIPGVDRVTACNLVAEIGVDMNQFPNAQHLASWAALCPGNHESAGKRMSGHTRDGNKWLRRSLCQAAWAVTRQKNCYLSAQFHRLAARRGVKRAVMAVAHTMLVIGYHMLKTGQTYHELGAAYLEQINKDQLQRYFVKRLQRLGLNVTVTPAIAA

SEQ ID NO: 507691 - protein, 269 aa, unidentified
MDHFAGLDVSVKDTSVCIVDGTGKIVREVKVASEPDALLAVLRNPAYRFKRIGLEAGPLSQWLFSALAEVDLPAICVETRHMRAVLKAQINKTDRNDARGIAQMMRVGLYRPVHVKTLRSQKLRMLLTHRKLLQSKAIAIENDLRATLRNFGLKVGMVGTVKFEVRIKELVENLPDLILLVEPLLVVRRVLREQLDLLHRRLLAVVRDDAICRRLMTVPGVGPVVALTYRATVDVPARFRKSKSVGAVFGLTCSRDQSGERDRPGAITR

SEQ ID NO: 507692 - protein, 341 aa, unidentified
MKKFIRTAVDLGKNYFQVHGLESNGGLSVSRKLKRSKVLEFYSQVEPCRIGMEACGSAHYWARELIAMGHEVVLIPPAYIKPYVKRGKNDAIDAAAICEAMSRPGMRFVPVKSADQQAVLMLHKTRELLVKQRTMSVNALRGHLAEFGLVAARGIGRIDELLALAQADAALPRIAKSAVACLAQHLEGLDQSIETVEEDIAKAHRQNPTSRLLDEIPGVGTLIASVISASVPDPGVFKSGRDFAAWLGLTPRQNSSGGKEKLGAITKQGNRYIRKMLVVGATSVLRVAAKRKGALADWINALRARKPERLTAVALANKLARICWAVMTTGESFRGQIYLKA

SEQ ID NO: 507693 - protein, 357 aa, unidentified
MTSSVAAIDSDEVVLGVVTHRDQHTAAVVSVAGVLRGCRQFPATGQGYRDLLCWARGLGVVRRAGVECTGSYGMSLSRLLQGERVSVLEVNQPDKRARRHRGKTDEVDAEAAARAVLAGRAGAVAKASDGPVEALRQLKIVRDSAVQARTKALNQLKAVIVTADPAIRQALTGLSTKGLVQRSAQLGEGDGPDATSRYALATLAGRIIALTSEADRTEQRITALVDAVRPALLERVGIGPDSAATLLIVAGDNPERVQRETSFAALCGVSPVEASSGNMQRRRLNRGGDRQANAALHRIVVSRLRWDTRTQAYMQRRLAEGRTRREVIRCLKRFVAREAFGLINPPDPVTATPSIAA

SEQ ID NO: 507694 - protein, 411 aa, unidentified
MQLLLVGDDWAEDHHDVELMDEAGRTLARARLPEGAAGMARLHAMIGEQLGGDAETAEVRVGIETDRGLWVTALAAAGYTVFGVNPLQVARYRERHGVSGAKSDAADAHTMADMVRTDAHQLRAVAADSPAAQAVKVVARAHKTLIWERTRQVQRLRYQLRDYFPAALEAYADLDAPDALELLARAPDPASAARLTTAQVAAALKRARRRDIAGKTTAIRAALRSPQLAQPPQVTAACAAVARSLTAVITAVSEQVKVLEGQVQAHFSQHPDAEIIASQPGLGPILGARVLAEFGDDPRRYASAKARKNYAATSPITRKSGKRKTVLARYVHNDRLRGALDGQAFTALKASPGARAYYDQQRARGLSHRAALRQLANRLVGILHGCLKTRTLYDEATAWPQHASHQITTAA

SEQ ID NO: 507695 - protein, 312 aa, unidentified
MDATVIVGIDVSKDRLDVAVRPGGEAFFVRRDGDGIAALIERLMPLGPVAIAVEATGGFETVVAAGLAGAGLPVVVLNPAQVRAFANALGKRAKTDPIDAAVIAHFVEATKPAIRPLPDEDTQLLADLVSRRRQIVAMIGAERQRQKRAPARIAKSIVRLVKALEKELASLDHDIDDAVRGSPAWRDKEDLLASVPGIGKTIARTLIAELPELGSLDRRQVAALVGLAPWTRQSGQWRGKSFIGGGRAAVRAALFMGAMVAARHNPALKAFRDKLVAAGKPKLVAIIATARKLVTILNAVIRDQQPWREQKA

SEQ ID NO: 507696 - protein, 465 aa, unidentified
MKPHRRPHEKKPPSRPSLLERMSPNAAGVDCGSEAHYVAVPPDRDAAPVRSFRTFTTDLHRLADWLTTCRVTTVAMESTGVYWIPLYEILEARGLDVVLVNARHVKNVPGRKTDVVDCQWIQELHSVGLLRGSFRPTAAIAALRAYLRHRETLVQSAATHAQRMQKALVQMNLQLPVVISDITGVTGLRILRDIVAGRTDPHALAQHRDHRCQASAAEISAALTGHYRPEHVFVLQQNLELFDTYQRQVAACDAAIDTHVQTLAAQAPAPAGPLPAPRTKKKPRDNEPRFDIRTPLHQLTGVDLTQLDAIGPYSALRLLAEIGTDMRRWPTEKHFTSWLTLAPHNNISGGRLLSSKTQPSANRAAGILRMAAMSLGRTGTALGAFYRRLAYRVGKAKAITATARKLAILVYRTLKDRLVYQDPGAAAYDAQHRTRVIRRLRQRAANLGFTLVDHDTGEVLAGAVS

SEQ ID NO: 507697 - protein, 363 aa, unidentified
MKIMVGIDLHSNNALCGLMDESGRRMIHKQLPCDLAAILQMLKPYQKRIATIAVESTYNWYWLVDGLEDHGYHVVLANPARMQPYSGKKHTDDVSDAYFLAELLRLNLLPTGHLYDRKTRPVRDLLRRRLLLVRQRTTLILSFKSLNERTLGQRVPLARVKTMSPEDAQARFSEPADQLLVGEQITLMDHHTDSITKLEQHILGVVGEWSTYQRLQELPGIGKILGLTIALETGDAKRFADSGNFASYCRCVKSLRQSNHKKKGENNRKCGNKYLAWAFVEAAHFACRYDDQCRRFYDRKKQQTNPVIATKSLACKLAKAAWHVMAQDVPYDAARVFGPGKLKDFGETGREPAKGSGHPSQQD

SEQ ID NO: 507698 - protein, 353 aa, unidentified
MKYDKYIGFDLHQATTVVAVLDAEGKVVLETIVATEAAAVIRLVRSLSGRLHITFEETTQARWMYDVVRGYVSEVIVCDPRRNKLLGEGSKADKPDARKLADLLRAGLLRPVYHGHEATRQLKELVRGYETLSADTQRMMVRIKAIYRAHGIRTPGSAVYQQKQREQWVQLLTESGTRQRVSWLYEELDHLRPLRKQAKMAMVAEGRKHRAFGLLRTIPQLGPVRCAMLVATVDTPYRFRTKHQLWAYSGLAIVTYMSSEYEIKAGRVVRSRKPLATRGLNRNCNRRLKELFISAAVAGSRSEPYRSYVEGLRQRGIRAEMARLTLARKIAAVALRVWKKGETFDPKKLNSRT

SEQ ID NO: 507699 - protein, 415 aa, unidentified
MDVVHRRCAGIDISKTDVKVCVRTPGPGQRRRREVRTFTTMTVDLLAMRDWLLAEQVTVVGMEATGAYWKPVFYLLEHDMDCWLLNARHMKAVPGRKTDVKDCEWIAQLVEHGLVRASFVPPEPIRQLRDLTRYRTEIIRERTREVQRLEKLLEDAGVKLSAVVSDLTGKSARAMLEALIAGERDPAVLAEMAMASMRRKRPLLTQALTGRFGAHHAFLARAMLDRIDACTAMEHRLSAQIDQQVQPFRRQLELIETIPAVGRRAAEVILAEIGADPTRFPTAADLASWAGMCPGNNQSGTRSTPTPTRHGDPWLKATLGQVAVNAARTKGTYLAARYRRIASRRGKKRALVAVGHSILIATWTMLTRDLPYQDLGGDYFTERLDPHRKARHARRLLDQLHQLGYQTTLHPIEAT

SEQ ID NO: 507700 - protein, 398 aa, unidentified
MTESSDYESVQVFIGVDVGKDTHHAVAINRSGKRLFDKALPNDENKLRSLISDLKQHGQILLVVDQPATIGALPVAVARSEGVLVGYLPGLAMRRIADLHAGEAKTDARDAAIIAEAARTLPHALRTLKLADEQIAELSMLCGFDDDLAAQTTQASNRIRGLLTQIHPALERVLGPRLEHPAVLDLLQRYPSPEKLASLGEKKLAAQLCKLAPRLGKRLAADIAQALAEQTVVVPGTNAAAVVLPRPALQLITLRKQRDEVALEVEQRVLAHPLYPVLTSMPGVGVRTAARLLTEVACRAFASAAHLAAYAGLAPVTRRSGSSIRGEHPSRRGNKALKRALFLSAFAALRDPLSRAYYTRKMSQGKRHNQALIALARRRCDVLFAMMRDRTFYTPQGS

SEQ ID NO: 507701 - protein, 344 aa, unidentified
MKLFIGLDVSLAKTAVCVVSEHGKIVKEAEVGSDPAALTQFALEQQGEIAMIGMEAGPLSQWLHRGLTEAGLEVVLMETRQVKGALKAMPIKTDRRDAEGIARLLHLGWFRPVHCKSVSAQEIRALLGARKSIQQGVIALEMSLRGLLRNFGLKVGAISKGRFDARIQELVASNTALVAATEPMLRARATLRHELARLERHVRSLAQDDPTCRLLMTMPAVGAVVALTFKSAVDDPARFSSSKKVGPWVGLTPSRQQSGERDVTGGITKAGDAHLRRALCQAATVMMNRGRGSWLRTWASRVAKRRGTKRAMVALARRIGVILHRMWLDGRNFCWEGAPEPIHA

SEQ ID NO: 507702 - protein, 346 aa, unidentified
MHYIGMDCHISTLDFAVVNDTGRQVKASRVATNVNNFMEFVKTVAPPRIVYMEEGTLAAWALEVCVRFGEKLVITNPKENHWIGSSGQKNDPLDALKLAQLARGGYIKEIHHPVGERRRFRELMEAYHDTVKSTTRIKNKIKAKFRQNGISCTGNTVYSEAYRKEWKGKLPQNATLLLILGGLWQQLEQLEKTAKEILTAARAQAKYYPEIKHFEAIPGIGFISAATVSAILETPYRFGNKRKVWMYSGLGVMKRSSGGKLYSEKLTTDYNRLLKYTIKQSAEAAIRAEDNPFRRKYLDMTLLRGIAHNLAKLTIARDMLATIWAMWKKGEKYNPEIRERASQKQG

SEQ ID NO: 507703 - protein, 322 aa, unidentified
MSKKKLILGVDVSKKKLDVVVLGETKLTTIYKKFNNTPLGFEKIIDFISKNNPFNLEVVLGLESTGIYQVAISNYLVSKGVTVYLLNPNQVLNFKRYKGWLAKTDKIDSFVIAKFIEASENDLVKYIPKSNTEKKLYSYVVRIDQLNKIRTQEINHKESSFLVLEEVEKHILELSEKIEEYKKSLSLLLKTKENQELLEKVEVLTSIKGIAVFTAVSILVFMSEIGTMNRKQITALTGLAPLANDSGSKNGQRHIYGGRKRLRRALFMPSLSAMTNDKILNEVYKRLDERGKPGYKIRVVIMKKMIIRANTLMKEYYKNKAA

SEQ ID NO: 507704 - protein, 344 aa, unidentified
MKVTTLGIDLAKNVFQLHGVNEYGKTVIKKQIRRDQMAEFFANLPACLIGMEACGSAHHWARKLEGFGHTVKLMAPQFVKPYVKTNKNDAADAEAICEAVARPNMRFVPIKNIEQQAVLALHRVRQGFVKARTAQANQIRGLLSEFGLIVPQGIGYIASRVPELIEDAGNELPGSFRMLIERLLDHLRALDHQVVELEAQIVSWDRQSAASSKLAQVPGIGPITASALVASLGDAKNFDGGRQVAAWLGLVPKQHASGGKQKLLGISKRGNTYLRTLLIHGARSVIYRAQNKPESCRWINGVVSRRNKNVAAVALANKNARIVWALLANEREFRPDYTTAKAAT

SEQ ID NO: 507705 - protein, 410 aa, unidentified
MGTGTGMEVVVAQPVWAGVDAGKADHYGAVIDAEGKPLLSRRVANDEAALLELIDKVTTLADGGEITWAIDLNAGGAALLITLLIAAQQRLLYIPGRTVHHASGGYRGDGKTDAKDAAVIADQARMRRDLQPLCPGDDIAVELRILTSRRADLVADRTRAINRLRAQLLEYFPALERGFDYSKSKAALILLSGYQTPDGLRRAGAARVAAFLRKHKARNADAIATAAIEAANAQHAIVAGQQLAAGVVARLAEEVMALDTEIGDTDAMIEDRFRRHRHAEIILSMPGFGVILGAEFLAATGGDMSTFPSVDRLAGISGLAPVPRDSGRIGGNLKRPRRYDRRLLRARYLSALVSIRTDPASRTYYDRKRAEGKHHTQAVLALARHRLNVLWAMLRDQTTYQPTAPNTAAA

SEQ ID NO: 507706 - protein, 462 aa, unidentified
MKGKSRRRSSKRARREQRILEKIHLNAAGIDIGSESHWVAVPEDRDEQPVREFKSFTHELLALADWLETCGVDTVAMESTGVYWIPLYEILEERGIEVLLVNARHVKGVPGRKSDILDCQWIQQLHTFGLLRGSFRPDAPVTALRCLVRHRDQLVEAAASYVQRMQKALVLMNLQLHNVISDVTGVTGIAILRDIVAGQTDPTVLARHRHPRCKASESEIAASLTGHYRDEHLFVLRQALELYDLYQEKIRSCDEQIEARIRALEATCESPGTLLPKSRRTQGRSSNEPPFEIRSPLFTLCGGVDLTELPGIGPYGALKLVSEIGLDMSRWPTEKHFASWLTVAPRNQISGGKLLSSRTQPSANRAAKILRMAAMSLGRSDHALGAFYRRMGARVGKAKAITATARKLALLVYRMLRYRTPYHELSAADYDRQQRSRILRGLRRRAASLGFELVDTSTGLVM

SEQ ID NO: 507707 - protein, 376 aa, unidentified
MYSITKYVGFDVSKEKIAVAVADFGIAPARFLGLIENSPEKIRKILKRLGKPEELYVCYEAGVMGYELARFLKGLGVKCMVVAPSKIPQAPGPKVKTDRRDAMRLAELLRAGELISVWVPGEDDEALRDLSRARKARKEDLKRAKQRVKMFLLRHGIRKPDGMKAWKEPYCAWLRSIEFPFRATQMAFQEYLIVVEEIEQSVRRLELEVHEIATDSPHAPMIKALQALKGVQETAAVTIVAEIGDFTRFSNPEELMAYAGLVPREYSSGNKTWRGNITKTGSSCLRWILTECAWSYRYKPRISRELMKRMEGLSPHIQAISWKAQVRLNKKFTKLLIRGKSGSVAVTAVARELLGFIWAIARQVNYEMEGGQGEVA

SEQ ID NO: 507708 - protein, 498 aa, unidentified
MSINIFPDRSQVLNEKSIGGDLRKVLVVPLDFAKQTHVVQIARGTGEYLRKRPLNVHNNMAGMNWLLDKVESCRAKYRIPKRNVIFGGEDPPEYVWNFVSAIGAAGYRFVRVNAKEAKKHRVNSRATSDTLALDGIAQVILLRRAYELQDRSEIYGAMKQAERSRRKLKRDETAVKNRIHRGVDILFPGFLNESLSGLQSFGKGSLALMQDRFSSIRIKRMRLDTLAGRLRKNHVREPEQVAAKLKEMAAAALPPDPAMLDYLQGSLTAKVAQLRAVAENIRFEEHEMARCLVQTPGFLLTSIPGLGVVLAGGIVAEYGDPDQWPHPDKMASYAGIVARHYQSGGPQSSPVPGRLPIDANHHLKDQLLQAAHHTGQFRHPAWSRLELPGEHQLYENFRRVESREGCSRLSTAKRLLEIGRAMIRDRRVYLPRTALRPEAADAMPPDQHVEYLEIVAEMLTRKWKPYNLSGIPEERNQLRFWLKETEELAKFTKKHNNK

SEQ ID NO: 507709 - protein, 349 aa, unidentified
MEEISTVGIDIAKSVFQVHAIDVGGNVVARRQLRRQQMLKFFAQVPPCLIGIEACGTAHYWARELSALGHDVRLMPPAYVKPYVKRQKNDAADAEAICEAVTRPTMRFVPVKSVEQQSAAMLHRSRALLIKQRTMLLHSIRAHLAELGISIGVGVSQIVRVVRELAEGERSDLPELARFVLESLAKLVCDLAHRLQAIEKKLISWHYKNDLSNRLETIPGVGFVTASALSSIVPDPQAFKSGRHFAAWLGLVPRQNSSGGKARLGRISKQGNPYIRQLLVLGATSVLRYVRRDGDSGTGWIGGLLRRRPPKVAAVALANKMAQIAWSIMTRGGEYEEINDRRAVQPANS

SEQ ID NO: 507710 - protein, 370 aa, unidentified
MSVRRILAKTIDTDLEYEAIGIDLAKNCVSAALLTTDGEVVCIDRLDYSELEKSAQALSSTTFAMEPCTEMNYLVQKLEAWGHRCLVIGGKNVQNYVENHYSGQKTDLNDAQALAFLAQDTQLRTIKAKDVEQQKYASLTTLREQYIKQYRQTIVSLKGICQAWGLNISKGISGKARLKDLIENHAAFPEELRESLVDMVTHAQTTQKVLNKITKTLEVLAKNDKVCQLIQTIPGLGTICSCRLRATVGDIKRFKSPKDFPAYYGLVPRSIATGHNERKGKITHRGDRTMRSLMVQAAGSLVNMATKGKLKSKQLTKWILKKQKEKMPWGKLVCAVAAKLLRIVRAVLISNKPYNSKIAGVAKCSLPKGS

SEQ ID NO: 507711 - protein, 405 aa, unidentified
MNAVGIDASKGKSMVTILRPFGEIVSSPHEVKHTSDQIDDLIREIRSLEGESRIVMEYTGRYHEPMARWLSDAGLFVSLVNPKLIKDFDNDSLRKVKTDKADSVKIARYTLDKWHKLKQYGAMDELRNQLKIMNRQFGYYTKLKTAMKNNLISLLDQTFPGANTFFDSPARSDGSQKWVDFVDTYWHVDRIRSMSLAAFIEHYQKWCKRKGYNFQPDKPAEIYESVRNIIPMLPKDEVTKFIVRQAVNQVNTASAAVEELRTRMNDIASQLPEYPVVLAMKGVGTSLGPQLMAEIGDVTRFTHKGALTAFAGVDPGKNDSGSYSQKSVRTSKRGSAPLRKTLFQVMDSLIKTMPQDDPVYEFMNKKRSQGKPYYVYMTAGANKFLRVYYGRVKEYLSEHPEIAEN

SEQ ID NO: 507712 - protein, 407 aa, unidentified
MEVIHPRCAGLDVHKQTVVACVRIVGSGPPLQEVRTFATTTSGLLTLADWLDSFGIDVVAMEATGVYWKPVWHVLEGHFELVLANAAHVKNVPGRKTDVNDAMWLADLLAHGLIRASFVPPVAVQELRTLTRTRKQFVRERTAHVQRIDKLLEDANLKLGVVLSDILGKSGRAVLQAIIDGHTDPERLASCVTTRVKASHAELLEALRGHVSAHHRFMLKLHLGHIDALDRAIADIEKEVGLGLEPFRHAAKLLSTMPGMSAIASNVVVAEIGIDMSRFATPGHLLSWACMCPRNDESAGKRRSTRLRRGGKWLKTTMVQAAWSAIKVKGSYLQAQFHRLRARRGAKKAIIAVAASMLTAIWHMLRNGTEWHDLGAAHFDRADAHKTANRLIHRLQQLGYVVQLTPA

SEQ ID NO: 507713 - protein, 391 aa, unidentified
MDKAWAGVDAGKEFHRAHVLDASGKELLSRKVENDEDDLLKLIDEALCLAEEVIWAVDQPGGGAALLLALLWERNQRVLYVPGLTVDRARDAYRGESKTDARDARVIADQARMRSDLGELRPGEQEIAELQLLLARRRDLVTDQSRTITRLREALLSLFPALERALDVNSKGPLTLLTHYQTPTQLRRAGHKRIATYLRNRGVKGSNKVAHKALGAARSQSVTLPAQEVAAAIVAELAEDVLGLKDRVESIDQELGQRFFARPEARVLVSLPGMGPILGAEFLVVVGEISAFESADRLAAYAGLVPAARDSGKRVGNNKRMRGGNKVLKRVFYQSAFASLRSAPESRVFYDRKRAEGKRHTQALIALARRRVNVLWAMLRDGTTFEDRSAA

SEQ ID NO: 507714 - protein, 407 aa, unidentified
MQVYIGIDWSESKHDIVIMNEAGAAIARQTVPHSPEGFLKLEDMCQNLEVSPADCLFGLETAHNMVIDFLWSRSYTNVYVIPPSVVKSTRGRYGQSRARTDQSDAFLLADLLRTDRHRLQPWHPDSLLTRQMRAKVSLINHLTRSVVRLSNRLRAVLLRYYPSALHVFSSLRTQIALQFIRAYPTPEAAKALAFAEFEAFARQHGYPQPKRLPKCFAHLQSPCPEATSETVLVYRDEAVQLAALLLSTVRAKNKALRELTVMFEQHPDRDIFASLPGAGKFLAPALLVKFGDDRQRFSSSAGVQALAGTCPVTDSSGKRRVVKFRRACDREFRNIVQKWAITSKPESLWATLYWEQVRPHCNSDSHAYRCLANRWLAIAWKLWQTGELYDEAYHLQQRALHSKPRQN

SEQ ID NO: 507715 - protein, 387 aa, unidentified
MTNPAQVFEIIPRHYDIFGGLDVAKKNMAVTFTDHEALMRSLRLPYSSAHLLHYVRKHFPDRRVAFVYEAGPTGFGLHDELVTAGYRCLVVAPSMVPTAPGDKVKTNRLDSRKLSVQLRGGELRSIHVPAPRYRELRHLVQLRDTQVGQLKATKCRIKSLLLCEGLAFPAAPESSQWSARVLSELLELPCSEAVRFELDQLIGTLHFHFNSAAAAQKQIRYFCQNDPELRQSIRLLTSLPGIGVIVATHLVARLGDWREISNGRQIAAFLGIVSSEHSTGEKANRGRITRAGDSRLRNKLIQSAWTAIRKDAELRAFYLRIYHRHPKKIAARKAIVAVARKLTTRIYAVLKEQRPYVLRPENLPAPLTAEETVGPRGRLVGPQNEQP

SEQ ID NO: 507716 - protein, 341 aa, unidentified
MQAVAVGLDIAKNVFHAYGVGAEGQRVFSRKLRRAQVEVFFSKLEPCLIGIEACATAHHWARTFGAMGHEVRLMPPAYVKPYVKTQKNDEADAEAICEAVTRPNMRFADIKTVDQQSVLVLHRTRTMLIKHRTRMGNTIRAHLAEFGIAEAIGREGLARLIDLIVTGEDTRVTGITRRAMMCLVEQYRLLQDQILDLDRQVMACHRSSEASKRLATIPGVGPLAASALVASIGDASSFKNGRSFAAFIGLVPRQSSSGGKERLGKISKRGDHYLRWLLVVGSLAVIRYAQRHGTKRPWLIKLLQRRTTKIAAVAMANKIARIAWVLMTRGDVYREPAAQAA

SEQ ID NO: 507717 - protein, 449 aa, unidentified
MKKHDLKQRGLPVIHDYAAGIDIGSRFHVVAVPADLAKESVQTFQAFTADLERMANWLVSLGITTVAMESTGVYWIPVYEILEAHGLQVVLANARDARAVPGRKTDVNDAQWIQRLHACGLLRASFHPDREISALRSYLRLRERHLDYAAAHIQHMQKALTHMNLQLHHVVADITGLSGMRIIRAIVAGERSPSSLAALSDKRCKAGVDVIEASLVGNYRPEHVFALTQALSMYDAYQAQLLVCDQQIAQTLIKLSQEKTLPAEPLPKPRHNTRQPNALNFDVRTLLYQLVGVDLTQIHGIGPYLALRLVAECGTDLSRWRTCHHFTSWLTLAPGCRISGGKVLSAHTRKTKNRVTAHLRLAAVTVGRTNTALGAFYRRLAARIGKAKAVTATARKIAILFYNAMRFGMNYQDPGADHYEQKYRERVVKGLHRRAAEFGFTLQPLEGVS

SEQ ID NO: 507718 - protein, 370 aa, unidentified
MKKRVTFVGLDTHKNSIEAALADDGRNTEVRLYGTIGGDLASLDKMIRKLQTTGVELRFVYEAGPCGYEIYRHLRAHGFHCDVVAPSMVPKRSGDRIKTDRRDARNLARLYRAGELTAIYVPREDDEAMRDLVRGRQDAIHAQRKARQQLGGFLLRHGFRYSGKCVWTLAHRRWMAEIKMPHPSQQVILEDYVHSVEECTQRVHRLTEQILQLMPDWRMHPLVTALQALRGVAPVVAATAVAEIGSMDRFESPRQLMSYLGLVPSENSSGQSIRRGAITKTGNGHARRALIEAAQAYSYPARISRVILKRQEAVPEPIRQIAWKAQLRLCARFRKLTARGKSRNRVVVAIARELSGFMWAIAKQVPVPQA

SEQ ID NO: 507719 - protein, 384 aa, unidentified
MGECIMVGCDLHDKSMLLRVAVDRGEPVTRRGGTTAAGRQAVIADLGARAAQAGASRVVLAYEACGFGFRWHDELRAAGIECCVLAPSKMERSPHRRKRKTDEQDAQALLDLVRSHVLAGVPLPAVWVPDLQTRDDRELVRQRLLMAEEASRAKVRIHWLLLRSGQESPPAEVWSLAYYRWLRKLAKGGLPAGAAAALGSLLRQLCGLEKEVARLDRQVKALSQEPRYAHPAAVLQEEKGVGRLTAMVFLTELGELGRFANRQQVGSYLGLTPASFESGQADDRKGHITHQGPSRVRKVLCQAVWSRLRVAPQERAAYDRLVRRNPKQKKIAVVARMRSLGVLLWHVGLAAQRAGGGLREEGGRCPLSPRAKPRGVGELRAAGP

SEQ ID NO: 507720 - protein, 347 aa, unidentified
MNYCGIDLGGVSSYAFVTDEKGTKLWSGPIATEKVAFERLVKKFAGGGLSIAIEAGNQTAWVHEELVKLGAEVTVVHPTKVKLIAESRRKTDKIDAKILCELLRLNALPHPVHMPGPEARELRGLLVARRQLVSARSKLSNVARGMLRQTGVRLPAGGLSSLAGWKRLLAGGFEQEHLLLIVSAYYDSFRALTKSIRELDQQLAQREKNEPRVQRLQTMPKVGRIASLTFLAAVDDVKRFSSSRKLVGYSGLAPTVRQSGERTEYGAISREGRSELRAVWVQIAHLVARDKTKATQPLRTWFNQVARKRRKKTALVALARRLLVIAYQLLKTEQDFDVGRLKKKRAA

SEQ ID NO: 507721 - protein, 349 aa, unidentified
MRYFAGLDVSLEETSICIVDETGQIVKELRAASEPGPLVAALRNTSLTLERVGLEACSLTAWLHEGLTQAGLPAICIETRQANAAMKTMPNKTDRNDARALAQIMRTGWFRQVHVKSRRCRQWRSLLVARRTILNEMRSIENVVRAILRESGVKLGTPSRADFVERVRELAGGDSELTPLVEPLLAILVAMLREFARLTKLVLDTARKEEVCRRLMSVPGVGPITALAFRATIDQPDRFQHSRDVGAHLGLTPARYQSGETDIQGRISRCGDELARTALYEAAHTLMTRSRKWSSLRAWGMKIAKHRGMARARVAVVRKLAVIPHRMWADGAEFRFGKQPGAVSVVLAA

SEQ ID NO: 507722 - protein, 349 aa, unidentified
MIVIGIDPHKQTHTAVAIDKATGQVLAEITVRARRQGFERLVEWSRHLDRQRLFAIEDGRHVSGHLERYLISRGERSVRVPPRLMGEARRADRVRGKSDPIDATAVARAALAHPDLPAATLAGPEREIGLLAAHREQMVNERTAIQSKLRWLLHDIDPDLAPGPRTLDRFATLDRLQTRLRELAPTADVRICLDLVVRCREITVRANELERELAPLVDATTPELVQIPGCAVLTAAKIVAETAQIGRFPTEGHFARYAGTAPVPASSGAVHRHRFNRRGNRQLNAALHRIAVTQLRIHQPAKDYVAKKRSEGMSKTEAIRALKRRLSRVVFKTMTSVNRPTDGLIAAVA

SEQ ID NO: 507723 - protein, 424 aa, unidentified
MKVTAITTEINPERMLDVAFDVGKDKLNSVFEIGPRRYEDEFCNRSSLIRRELKSYMEQARANGFDALRVLCEPTSGYERALLKIAHQLGCRTAYVGGEASHKFRMVVYGEPGKTDTRDARPLLAVAAHGKLLTARQLPAEYELLREINGEYDWNSKHRVMARCEIHGLLVRLFPDMPMGVDFLYDAGGLAMAREYGWSPKRILAAGLPRLRECLKTAYGRLRKETATNIWAAAGQSVQLHDGGPGADYVAERLQRHYQEFERLDQHRQALCARLEEVYLNLQEKDPRLPGEVNGVIKLYMLARIVAETGPLSDFRSIQQLYRLAGLNLCERKSGKYQGMTKISRKGRVALRRVLARAILPLVHKGKLYGAWYHTSDGKTQKGKGMTALMRKFLKMLFGWYKSGRAFDLKRVFISAGDYAAQAA

SEQ ID NO: 507724 - protein, 317 aa, unidentified
MTQTITIAAGIDTSKHKLDIAVHGSAARWQVENSLAGWRQLANHLVEAGVTRVGIEATGGYERGVVLHLREKGFSVLVLQPAQVKAYARMHRRRAKNDALDAVLIAACTANLEPPRVLPDARLEELAGHLTFVEQTEEDIARLKTRLEHVEDPRLRRLVIKDIADLKVRRAVEMLRIVKALRAHADLARRFHLVLSVPGIGERTAIAIIVRMPELGRISREEAAALAGLAPFDHDSGVFKGQRHIAGGRGRLRRSLFAAALPAAFRWNKALIELYARLIARGKLHKVALIACARKLLIYANTVVQRGTPWVQDKAAA

SEQ ID NO: 507725 - protein, 313 aa, unidentified
MAETVVTAGIDVSKEWLDCAVWPGKAELRVERNAVGFDQLAAWLVEHRVSRVGLEASGGYETVVMDALQARGFAVIRFNAKRIRMFAKAKGRLAKNDRADARVIAQATLVLDENTPPERRRDLDPLVEHLAYRRQLRDWLGDCANQLEHLRDASLRRQILVRQVGLNKALAALDAKLAKLVAAHKDWHALEQRLRKVPGVGPVLAQTLIALLPELGQVSRRAIASLVGVAPFDDDSGKRAGERHITGGRDAVREVLYMAAVAARRWNPVIAAFAKRLAGKKPKVIIVACMRKLLTILNAMVRDGQDWNPGAAA

SEQ ID NO: 507726 - protein, 347 aa, unidentified
MKRIAVDLAKSVYQVAESIQVGRVDRRKRLDSRAFAQYVQEQLEPVEWVMEACGTAHHWGRLMQEKGHRVVLLHPRYVRPYRRRNKTDRNDCDAILEAARCQEIRPVPVKSMQQQQVQQLHKLREGWKKSRVQRINLLRGILREAGVDAPSGIKPFLRQACELIERPEVRALRGALQVVLAEINLYEQSMRECEEQLARWHADDEIVHKLDEVSGIGLLTASALKSAVGKPERFASGRHLSAWLGMTPNEYSSGERRRLGRISCKGNVYVRTLLIHGARAALLAAKRCKARTPERLTHLQRWVLDTAERIGHNKAAVALANKLVRICWAVWCHERRFSGNWQSTKPA

SEQ ID NO: 507727 - protein, 411 aa, unidentified
MSDQPVAGIDIHKDFLVVTVLGKDLKKTKEYQTHETDLNHLKRWLARMKVRKAAMEATGIYMIPCCDKLIDRFDLYLVNAADVRMLPGKKTDILDSEWLAVLLQKDLLKKSYIPPKEWRDIRELFRQRKGFVQTKSRVKNKITKILTQEGFNLSRVFSDVFGKTSRLIIELLVSQRSLKQILQEHAENTYIERNIEILSCLPKSKTLSDAICFVLKLLLDELDQSQQRIDLLDQQLAYMTLEVFQKQTDIEILKSMPGISDQIAIGIITELNSIDRFPSAKHLVSYAGLSPAVYETGGKKKNKGVNKRGNKYLRTLFIEAAWGASKTKSSRLRQYYHTKRSQKGKKKAIVALAAKMMRIAYHLLKYQEMYVEDHFRKNLRNVLLPNKQTSISLGELDRILRSRGLRITTSR

SEQ ID NO: 507728 - protein, 291 aa, unidentified
MLDRDTGEIVERIVKHEGTAVRDFYAGLPPPIVVGIEATGSMGWFLRLMEELGITCRVGDPAKVRAVETRRQKHDRRDARLLLQLLTEGRFPAIWMPSAELRDLRALLLHRDQWVRMRTRVKNALQGLALAHGLRRGASLWSRDGQARLTALPLPPHAGSRRSELQALHDHLTTHIEALDQQVSAQVDGRPQARRLMTHPGVGPVTALATEVFLGDPSRLADGKAVASYIGLIPSESRVAIASVAADSPSRAIRCCAFCGAKRPFMPRGAIRHSRASIDGSCSSRGSAKRA

SEQ ID NO: 507729 - protein, 385 aa, unidentified
MIHVGADVHIRNSVLNAKDEDGQVLARGRCGNTMLELSRFFAPLERRARATGEPIRVVMESTGNSRAMQRLLTRYGREAGIDLTAEVLHARKLRVIAESVNKCDRVDADILTELSRSNLKLPTCYMPDDEEFALREHLRARSDLVKIRTMIKNRAHAILHRRGILTPKTDIFSQAGGRFLDQLNLDPAGRTILDRFRELLGQLDASINDSTASLRSLTREPRWAKPAVLLQTMPGIGLITSMTILAELGQLTRFRSRAAVANYAGLVPRHRDSDQKRWSGGITRRGPAHLRGILIEAAWIATPRVPVYQALFQRIEQKKNKKTAIVAVARRMLEDAWMLLIKDEAFRYVPVSVGDPHGSRARRSANPEHRERRSRVSKAASSVAG

SEQ ID NO: 507730 - protein, 396 aa, unidentified
MTTIGIDIGGRTHAVARCRDGRARADREVLRVSQNRAGFDTLDAWLKQQAEPVTLVTMESSGHYWMPLASHLRRLEVPVAVVNPLAAKYFAKSRLARTKSDPADARSLAEMAMRDSPATRDPLAGAELRQAARFAMTLVTEQAKVCQRLIRLVELGFPELGELFDDPTCRTARQVLRIAPTARAATRRRMSTLANANGEPGRRRLGQAKAERLQAAAASSIAVPELDAEVSFEVGLLLDQYDLLEGQIEAADQRVASLLDGELARRLRTIPGVGPSIVATLLAEIGDIERFTDFDQLLAYAGVHPAERSSGRKGSNPETAWHMSKAGNSHLRAAAYRMAIVGVQHNPVIAAHYARKRAAGKSKMNALGHCMRKALSIVWGVWRNGQDFDPNWGVET

SEQ ID NO: 507731 - protein, 408 aa, unidentified
METLHRRCAGLDVHQKEIVACRRIASGRKVRSELGRFATTTQGLLALSSWLAEAKVTHVAMEATGVYWKPVWHVLCHDFSLVLANASHIRNVPGRKSDANDATWIADLLAHGLIRASFVPPQPIQELRDLTRTRRELTREIVRHTQRIQATLEEANIKLASVISDILGLSGRRILKAMVAGERDPRRLAELGHSRLACTREDLAAALDGRPRDHHRFLIGQHLKTIEQLEGTIGEFDARLEAALAPFLDAAERLKDIPGFADNVAQTLLAEAGADMTAFPTADHLVSWAGMCPRLDESAGRKRSKRLRKGAPWLKPVLVQAALAAIKVKNSSLRARYFSLKPRLGHKKAIIAVAAAMLRIAYHMLKDGTFYQDLGPDYRGRKNPEHAARNLAKRIRALGYDVELKKAA

SEQ ID NO: 507732 - protein, 406 aa, unidentified
MKEFTTNAVTKSEAMTGLGLVSRVLEQAGELYGAYIGLDVHKETIAVAIAECGRAEPEYYGEIANTPKKVAKLIERLSARYGGERLLWVYEAGPCGYGLYRQLITCGHACEVVAPSLIPKKAGDRRKTDRRDALGLARLSRAGELTAVWVPGQEQEAIRDLTRAREDMKGLELKARQRLGAFLLRHGKVYDQGKSRWTQAHFRWLETVKFDSPIQQIVLQEYIEAVKALQRQVAGLEKHMREALPGWSLAPVVEGVMALRGVSLITAMTILAELGDISRFDSPRQLMAYLGLVPGEDSSGPNRRLGPITKAGNGHVRRVLTEAGWNYRFPARKTRDIEKRAEKTSPAVQAIAWEAQKRLCGRYQHLLKAGKLKQQVVTAVGRELAGFVWAIACEVMGKAHGSRATA

SEQ ID NO: 507733 - protein, 338 aa, unidentified
MKTTTFGVDLAKRVFQIHWVDTETGEIGRRQLKRAQLREFFANRPPAIIAMEACGSAHFWGRQLISLGHEARLIAPQFVRPFVKRNKTDAADAQAIWEAAQRPEMRFVAVKSEAQQSVLTLHRVREQLVKVRTMQINQMHGLLYEFGAAVPANRHNLGEAAQALTRLADTIPAVVIDTLREQLRRVDALSQDIAEIERRLAAWQRGNEAAKRLMAIPGVGPLSASAAVATIGDARAFRCAREFAAFLGLVPRQSGTGGRVKLLGISKRGDVYLRTLLIHGARAVLACSKHLSETSQRLLARRPFNVAVVALANKIARTIWAMLAHDRVYQPGYTAHAA

SEQ ID NO: 507734 - protein, 370 aa, unidentified
MIMIGCDFHPGLEEIALLDTSTGRRWQSWLSHAFGLDRVRKFYGELSKPVLVGLEASGYSLWYEEMLEELGIELWVGDPGQIRKAAPRKQKTDRNDARLLLQRLEEKRFPRIWVPDKATRDLRPLLMHRHKLVTMRRAISNQLQAIAINRGLQKKRALWSKEGREQLRSLELPHWTRRRRDELLALREQWDAEIAELDEVVEHQAERNTDARYLMHHQRGEGPITALAVVLSLGPVERFASARKVASYAGLIPAEYSSGGRQRLGHISKEGNPFLRWVLVESATVAVQHDPEFKHRYWRLVERRGKSIAKVAMARKLLVRLYWMLRRRHLSRVGRPKKSQCTAVEALGSATAPQGSSRLDMADGMNRSLQ

SEQ ID NO: 507735 - protein, 486 aa, unidentified
MNSIVLTANVQPNLDVNYIGMDVHSDNVVVCVRRNTINSSGQLVGKTIKTKKVVIKNSQEPLVELLSKYADGQQHIMTAESTFNWYWLADIAEDHGWNFRLADPCTVSQANIKAANDETDAEYLADRLRTGSLKSTSVLPRQLRGVRDLMRHRLRVMQEVSDKKVRLSNLYHNHCAHPMLGKLLAALQDAYDEINIDAVLESGICNNGSELIIGDLLTGLREAETRLAKIEAAVYGRIDEIDSYKAERMLLKTSMKGCGDVLSAIIVTEIGDISRFRTMGEFVSYCRLAPTSKLSNGKSKGQGNAKNGNAYLSWALTELATLMARFNEPIRRYLERKQEKTGLRVVAVRALAAKLARCVYQVLRKKESFDLGLAFGSKPTHGQMTAAAEAAQTPPEPALPPVPAVAGEHHCPAEESDAPIVVKEPVPVKSKRSTRKKAVSAASSEPAVAAEGRQTARKADRVKARCALTATPPSCAGTSCVKSRRE

SEQ ID NO: 507736 - protein, 394 aa, unidentified
MKLVGIDVGKNSHHFCVMDKETGEFNVTPSSFSNNKEGFDFLINSLKPYSKKSILLGMEDTGHYHVALLKFLLSNGYTVALINPKTTDLTRKMEGAITKNDKLDTITICDVLDTPERKKQYRITKVDRFDLYEQRQLTRHHHNLKEELNIYCNRLQKSIDLVFPEFNTLFGSKYGVVYMNLLKTFGSAEAIASTDIRTIRKCFEIKGRGGRISLTAEKLKECAKNSIGISSEVETIQIKHLVSQIMLIKEQIAEIDKKIEEFSIKNNSPILSIPGISHFSGTSILAELGDIGNYSKPSQIIKFAGVAPYHYESSQFTAQHTAITKKGSKYLRKTLYQIILSVINFNPVFKEHYQLKISQGKGLRFTQGHCIRKLLRIIYHLLETGQSFDPALLR

SEQ ID NO: 507737 - protein, 316 aa, unidentified
MNQSTNSVKFLGVDVAKDRLQLFCNGLKVPAQIDNTPKSIASWLKGLKRLHSQLHIVCESTGGYENTLLRACWKAGVLVTRLNPARVRDFARCRGLLAKTDAIDAKAISEFASTFPPDPTPEPSPQQVLLAELVARREDLKTQRAAESNRSRDIQDKVLRRMLEKHLQFLDAQIKQIDKLIEDTISQDQAMHQKREILVRTKGVGATSAAILLSCLPELGTISGEAISALAGVAPFNRDSGTLRGKRCIRAGRAVARKALYMCALVGSRANPILKDFYQRLISKGKPPKVALTALMRKLVVHLNSSLKILNSPSPC

SEQ ID NO: 507738 - protein, 404 aa, unidentified
MSVQAAPVTPSTIVLAVDVGKTSAMLLATDGARKRVFGPVEFAMTHSGLAATVHRVSAVVPPSAQVKVGIEAAGHYHRPVCDYRWPAGWEVLEFNPAHVAEQRRVAGRRRVKTDAIDLEAITERVLAGRGQVITDRAVRIGELAAWAAHRSRRVTTRTATKNQLLGQLDRAFPGLTLALPDVLGTKIGRLVAAEFADPGRLSALGVNRLIRFAAVRDIQLRRRVAERLVAAARDALPTRDGVVARRVLATDMGLLADLDSQIENAERELAALLPVSPFATLTSVPGWGVVRASNYAAALGDPDRWPGSRQVYRASGLSPMQYESAGKRRDGKISREGSVALRRALIDLGVGLWLTEPAAKAYAAKLKARGKHGGIIACALAHRATRIAHALIRDHASYDPSRWS

SEQ ID NO: 507739 - protein, 418 aa, unidentified
MERMFERCCGVDVHRDTLVATIRIAGEKRVSTQSRTFATYADGLEELSGWLDEHGVEAVVMEATGVYFQPVVHALRRLGPHRLVSVANPLAVKQMPGRKTDVSDSAWLAKLLMNGVVSPSFIPPEQIEELRKLSRYRAKKVACKTATKNRIIKLMESEGIKLATVVSDVLGKSGRAMLQALVQGGRSAEQIAELAQGSLRNKRAELVRALKNPVNETTLWILGQQLDDLAQEEARIAQVEAELSRRLQAHYSREMALLQTIPGIAEHIAATIVAETGADMSLFPSAAHLASWGGLAPGNHQSAGKSRRVAVRAGNPWFRTALVQAAQVLARKRDSPFRAFFLRVLQSSANYNKAVLAVARKLAVTIYYVLRDGELRWPEPQVLSDSSQARLKQQAVTQLEKLGFEVSLTKPKPGPSES

SEQ ID NO: 507740 - protein, 387 aa, unidentified
MTEFFDAHRPATAFDHDSTLVVAMELSGKSWQLGAVIPGVSRRPKTGVKARDMNEVMRVVDRWKAEAVRAGKTIARIVVAYEAGRDGFWIARELSSRGIEAHVMQPASIPVERKGRRAKTDRIDLDMLLRTLLAWLRGEPRVCTMVRVPSVEEEDARRPGRERDKLVRERVGLENQIQSLLGLQGIGDFRPRLKKAAEKLEALRTRSGAALPAQTMAQLRRLMKRHSVASEQIAEIDAARVAEVDAPDPDRGIGMIRLLVAICGMGLETATRLVREVFSRPFRDRRGIAAFVGLTGTPFQSGGMEREQGISKNGNTRVRCLLLQLTWRWLRFQPDSALSRWFFGRVGEGKGRIRKVMAVALARKLLVALWRYLETGVIPKGVRLADA

SEQ ID NO: 507741 - protein, 368 aa, unidentified
MSEIIRIGVDTSKSVFQLHGVDAAEQPVLRKKLRRRDMLGFFERLPATKVGMEACGGTYYWARELTALGHEVKLMPPQHVKPYVRRGKNDRNDADAICEAMSRPRMSFVAIKTAESQAAQMLMTTRERLVAYRTQLINTIRGHAAEFGLTAAKGPAHVEPLLTRIAEDGRMPELAKELFAMHGVELSRLKIELREIEAKLKAWHRQNEMSRRLAEVDAIGPIGGCLLAIKAPDPQAFRCGRDFSAWMGLTPKDHSTAGKMRLGVITRAGDEALRRTLVGRHLGDQAGEQRQGSSLALWLRDLVARKPPKLAAVALANKLARIAWRLMVSGERYDAARAGIVSPTARIAPCSRRQGRGAPPAAVACGQP

SEQ ID NO: 507742 - protein, 357 aa, unidentified
MAKKPKKQRVAGGVDTHSGTHRAAVVLINGRRLADAEFPATAAGYAELLAWMRSFGRLHAVGVEGTGSYGAGLARHLRGQDVRVVEVNRPDRRQRRAKGKSDPLDAYAAAEAVLAGRATTVPKAGDGIVESIRALHLVRASAIKARTACTNEMKALIITAPAQLREHLRARAATSLAQACSRLQPHEDLADPAGGVTAALRRLAARYQALTTEIADADTQLAALVKQARPDLLAVRGVGVETAAQLLSTCGDNPDRLHSEAAFASLCGVSPVPASSGKTKRHRLNRGGDRQTNRALYMIVITRMGHDAHTRAYVARRTAEGLSTKEIIRCLKRYVARELYKTLTCSHVNTQDLSATA

SEQ ID NO: 507743 - protein, 325 aa, unidentified
MTTSSPSSVSLFVGIDVALDKLDLARSDSDKLLTVANDPDGIAQIVGMLQSASPTTIVVEATGGLERRLLETLIDASLPVALVNPAHVRHLAKGLGILAKTDAIDARVLAEFARLASPRLAQKRSANQSELDALVTCRRQLILIRTEQTNRRRTTFSKSAIKSIDAVLKTLAKQIASLDKQIRKLIESDDDLDHLDKILRTAPGVGPVLSSTLVVDLPELGKVDRREINALVGVAPFNHDSGRLKGKRAIRGGRASIRSVLYMATVTAIRSNPIIRSFWAKLLKAGKLKMVALVACMRKLLGLLHAMIRDNLTWHELSVVKALDL

SEQ ID NO: 507744 - protein, 343 aa, unidentified
MQSISTIGLDIAKSVFQVHGVDAAGQVVVRRQLRRGHVLAFFQKLPPCLVGIEACASSHHWSRELQELGHTVRLMPPAYVKPYVKRQKNDATDAEAICEAVTRPNMRFVPTKTVEQQSCLMLHRARHLFIRQQTAVINSIRAYLAEFGIVAPVGRRGVEQLLEVVADTADYRLPEVARACLTALGSQLRALKAQILEFDRHIIAWHRSSATSKRLDAIPGVGPALATALVASIADPKVFRSGRDFSAWVGLVPKQNSSGGKDKLGSISKQGDRYLRSLFTAGALAVIRYAKIHGTGHRPWLTALLARRPTKVAAIALANKLARMAWAMMARNERYKEPAALAA

SEQ ID NO: 507745 - protein, 362 aa, unidentified
MRNHRSLVGLDVHARATVAAVLELESGELRFRRVGGPPRSAVGFLEELPGPVLATYESGPAGYGLAREAALRGIEVRVCAPGSIPRKPGDRVKTDRRDAERLVRSLLAGELSFVRVPTVAEEQFRDLARCREAVRVDLMRARHRLSKFLLRREVEFPGDGGNWTRSHWNWLRSLEFSDHASRSVFCDYLAAAISLEQRRGGLDGQIEIAAPESPWAQTIADLRCLRGIETVTAYGLCCEIADFRRFEHPSSLAGYLGIVPSEHSSGEQVKRGAITKAGSSHARRLLVEAAQHYRHRPAIASRLERRQRGQDPRACEIGWRCQQRLHRQWQRLRVQRGKPANVVVTALARELSNFVWEVGQLN

SEQ ID NO: 507746 - protein, 381 aa, unidentified
MTTLATHNPQDTTTAGPLFVAFELSEKTWKLGFTTGHGQKPRERTVTARHQECVLAEIAQAKHRLGLPDTAPVVSCYEAGREGFWLHRFLQAQGITNQVVDASSIEVNRRRRRAKSDGLDVRKLLSMLMRYHHGERQVWQVVKVPSVEAEDHRHLHRDLETLKQERASTTTRIQGLLRSQGIRLTSLHQLPEQLEALRLWDGSPIPPGLRRRVLRVYAHHTFLSEQIAAVEAERRAQLQTSTEAQIDKVRQLMQLKGMGINGAWLLVMAFFGWRAFTNRREVGGLAGFTPTPYHRGDSARAQGITKAGNRHVRWMTTELAWSWLRLQPDSALSVWFRERFGKGGKRLRRIGIVAVARKLLIALWRFLETGVLPAGAVLKEG

SEQ ID NO: 507747 - protein, 457 aa, unidentified
MPQPKRSRSRTGLSAVHPAAAAIDIGATMHVAAVGPDRDTEPVRTFGTFTEDLHRLADWFARCGVKTVAMESTGVYWIPVFEILEQRGFEVMVVNARDAKHVPGRKTDVSDAEWLQRLHEYGLLRPSFRPQAEIAGLRAYLRQRERLLDYAAAHIQHMQKALMQMNLQLHHVVSDITGVTGMNIVRAIVAGERDPNVLASHRERGCHASVETICQALVGNYREEHVFALSQAIELYDVYQTKVAACDKQIEVILKRLKKSATPPASKLLPPKHRSRQPNAPSFDARAALHAILGVDLTQIHGLGPYLALKLVGECGINLTAWPTAKNFTSWLGLAPRNKISGGKVLSSKTPRTSNRAASLLRLAAVSVGRTDTALGAFYRRLAARAGKAKAITATARKIAVLFYNTLRHGMSYADPGATYYEERYRRRVLGNLQRRAKSLGYVLQQADRDPTQVVVS

SEQ ID NO: 507748 - protein, 418 aa, unidentified
MNEYGNTRVSRRYVALDIHKHYCVVAGVDREGRVLLQPVRVEHADLEGWLKKNLRSTDHVVIESTTNAWHVYDLLAPLAERVVVANPIQVKQIAKARVKTDVRDTFILARLLAANLVPEVWVPPIHVRQLRQLLSQRRQLVETHTQIVNRMHSVAHRHHLKHARGKRFNEKTTAWQKDKRLSKLEQFQLELEMENRAYIEKQISRIGKEVAKMSHQKPWAESMTYLMQLPGFGVITGMTVLAAIGEIQRFESARHLASYSGLTPGVEQSGTKNRDKGMTKEGRKELRWAMVEVAQRAVKSDPRWTRRFQELEKRMHRNQAMVAIARQLLELVWYVLTRRQAYRHFSQERIAYKYLTWAWQMDEAARDGLTRQQFARYYLMRLGIGHDLTRIALNPKYPRKLASEAELLALRPELNHIE

SEQ ID NO: 507749 - protein, 313 aa, unidentified
MDSLGYVGIDVSKNTLVVFVTGHVVEKTNDDSGISELVALLRESSPTLIVLEATGGYEMLAAMALGAAGLPVAVVNPRQVRDFAKAMGRLAKGDRIDAELLARFGEAVRPEPRALPTEEARLLTAELNRRRQIVEMLTAEKNRLAKAHPAMKKRVEAHMAWLGKELKKLDKELHQTIRKSPLWRERDDLLRSAPGVGPVLSTVLMAELPELGSLNRKQIAALVGVAPFARDSGKYRGPRTCWGGRASVRAVLYMGTLAAVRSDAGFIKYYEALLQRGKAKKVAITACMRKLITVLNAMVKSHARWSPELAFSS

SEQ ID NO: 507750 - protein, 410 aa, unidentified
MQTLVERGCGLDVHQATVVACLLIVSKNGKVRKQVRTFGTTTRELEGLREWLLSEGCTHVAMESTGVYWKPIYVILEGAFEIVVANAQHVKKVPGRKTDVKDAEWIADLLCHGLLRASFVPPKPIRELRDLTRYRRKLVESRSAERNRLLKLLESANIKLASVASDVFGVSGLLMLQALVAGQATPQEMAELAKKQMRKKIPALELALEGKVEEHHRFLLSVQLRRLRTVEEDLGILEQRIQEKLEPYAVQFALLQEIPGIDGKLAAAIIAELGVDMNVFGSVPQLASWAGICPGNNESGGKRKSSRIPKGNVYLKTALVEAANAAAKAKGTFLRDKFYRLKARRGYKRAAVAVAHKILVAIYHMLSHQACYNEWGDLYLDNLNKHHLTRNLIRRLERLGYTVTLEQKAA

SEQ ID NO: 507751 - protein, 343 aa, unidentified
MDHFAGLDVSVKDTSVCIVDEAGRIVRDVKVASEPEALLSVLTNPACHVKRIGLEAGPLSQWLFSALGEAGLPVICVETRHMRVVLKAQINKTDRNDARGIAQMMRVGLYRPVHVKTLRSQKQRMLLTHRKLMQSQAIAIENDLRATLRNFALKVGVVGPVKFEARIKELVENHPDLVALVEPLLMARRVLREPIGILHRRLLAIVRDDDVCQRLMTVPGGGPVVALTYRATVDVPSRFRNSKAVGAVFGLTPSKHQSGESNRTGGLSRCGDEMLRTMLYEAAHIMLVRSAKWSWLKAWAMKIAQHRGLKKAIVALARRLAVILHRIWVESTEFRWTGQVAAP

SEQ ID NO: 507752 - protein, 472 aa, unidentified
MPGFIINILNVKRMESYLGIDASKGYSDFALLDKNKQPLEETFQLDDTRSGHNKLKELLGQFIFAHKISELYCGIESTGGFENNWYSTLIEMSKSMPVKVARLNPSGVKKNIEAGLKRNITDALSADYIAEYLVSHAGKVVYSEQDTRYASFRDMQTCLTLQKKQSTQLINELKMLLYSSFPEMVRFCKDSMPGWVLEMLILYPVPASVVKIKPERLARIRHITLEKAQNIIEKAKTSIVSRPDATREFIIRSLARQILQKQEAIKEFKGFLAANCTGPEVDLLQTIKGVAAYSAASIMVEIEDIKRFPSPKHLASYFGLHPELKDSGDKKKVTHISKKGRPAIRATLYMCAQTAVVYDPHLKQIYHKHRNKGRKHKQAIGVIMHKLLRIVWGMLSSNKPYDARVDQKNQTKSIKTQPGKETAETNKKRRFQEHDQAAPISNRQNKKRKAHLESQVGSAERMRDHLNAPEQK

SEQ ID NO: 507753 - protein, 393 aa, unidentified
MICVGIDVAKDKHDCVILNSEGKALTGVFTIPNNADGFDTLLQKIHGCTSPDDKIKVGLEATGHYSYNILGFLLNQGLPTYVINPLHTNLFRKSMSLRKTKTDRVDAKTIAAMLMSNVDLKSYTDTAYHNEELKSLTRYRFDKVRERAQLKQSVSRLVTILFPELEKLVPTLHMSSIYALLIEFPGAKQITEAHLTHLKSLLKDASKGRYGRDMATEIRDAAKHSIGSVMPAKSLELRHTIRLIRELDSAIEDIESAIEAIMDEIQSPITTIPGMGFRMGAMILAEIGDFSRFDSPSKILAYAGMSPSTYQSGQLSLAGTYSHMEKRGSRYLRYALYNATKYVCHWDPGFAAYLAKKRAEGKHYNVALSHAAKKLVRLIYAMEKSRQPYKRAA

SEQ ID NO: 507754 - protein, 423 aa, unidentified
MTKLCSTPAGAVLVAIDMSKNRQEVLIERPEGGRRRRMTVMATKEDYDGFAEQLAAIGRPIVVGFEATGNYHRTLAHLLLTAGFELRLISSVALVRTREALHNGWDKNDSKDAQVILHMLRIGATQRYVDPLAAGINDLQELSKTHEAISRMKTQTWHRILTHYLPLYFPEIARFAGNSRSDWFLALIERFPTPASITALDREAFSAEAWPLIGRKVSKARLINDVYETACSSAALPVPEDSVAITMFRMVIAQGRCLIHQRDQIERLAHARLAEHVDYQLLRNIPGIGPINALTILAEAGDLRRFNHHRQFLKFCGLDLATCQSGTFRGRTKLSKYGNARLRRTFWMAAQVAARQRDNSFRDKLGRYTAGHADDADRRRKAMTALTAKMARVAHAVVKTGTEYRPFLERPDTRWKDPSLLVP

SEQ ID NO: 507755 - protein, 318 aa, unidentified
MGVAIGVDSHKSSLAAAGVDELGRSLGAREFANTPAGHKRLLGWARAVGEARVIGVEGSGIYGAGLAGFLLLAGEDVREVPASLTHRERRRKASQGKSDVVDALAIARVVAREKELPTPERSVVLADLKALCDYRDQLVRARTQVANRAHRDLVVLRPGYEQAIPNLTGKRYLGRASSLVRGDHSVRAELLRRRIAELRRLSAEMAAIETQIGAKVRESRTTLTEIAGIGPLLAATILGEVGNVGRIRSRAAFAKMAGTAPLQASSGMTHRHRLNRGGNRRLNWALHYMALCCYRTDPSTRAYIERRRAEGKSFKVDI

SEQ ID NO: 507756 - protein, 375 aa, unidentified
MAEFGAWCNDLDVVCTKESCNGTTLRWIGRGPGRNEPLHVDSEGKTVWEVKVSTEPAAIRCALEGYADRLSRIGVEASSLGLWLYREFHEGGLPIIVVEARHMRVSLSTMRNKTDRNDARGIAQMMRLGWFRAVHVKNVEMQKMRTLLTNRKLLKRKLVDIENHIRGALRTYGLLVGAVGRGQYEARVRELIERTDMVFSTMIGTMLTVRRAILDGYSKLHRILLQVVQHDQICRRLMTVPGVGPVASLSFKVGVDDPLRFTRSRTVGAHFGLTPRRHQSGTSIDYEGHITKQGDVSVREALCEAAASLLLRVKKWSALRAWGLRVAKRSSMLCAIVAVARKLAGILHRMWIDGSDFKVGFGAKVTQRLKLKPAQ

SEQ ID NO: 507757 - protein, 350 aa, unidentified
MSHKTAATVALTIGIDTGKNTLHLIGLDDKGAIVLREKVARGRITARLANVPRCLIGIEAGMATHYVARELGALGHDVKQVPPAYSKPFRQGHKNDFRDAHAIAEAVQRPSTRCVPVKTDDQLDLQALHRVRSRLVGQRTAVINQIRGFLLEHGIAVRQGLRFLRQQLPDILAKRSDVLSPRMIRIMEDLSGDWRRLDERIEHITKEIEVLADTDVNCGQLMTVPGIGPIVASAMVAAIGNGAAFARGRDFAAWLGLVPKQMSTGDRTILGRITKRGNRYLRMLFVQGARAILLRPKSWVKHSFGPWLTTAARRLHRNILTIALANKLARIAWSVLARGRVFEASKLQVA

SEQ ID NO: 507758 - protein, 368 aa, unidentified
MTVVGIDVSKGKSMVAAMKPGGELVAAPYEVRHSDIELSHLALDVLCMEPDTRVVMEATGRYHEPVAALLHSEGIFVSILNPLLIKQSGAGSLRKVKSDPKDALKIAKYGLDNWSTLREYTPMEAIRQQLKLCARQCDLYNKNIVMLTNNLISLSDKTFPRVNELFSSPEKADGHLKWVDFYRSFWHCDCINRMSPDAFEERYKKWCKRKGYHFSTDAADALYAASCGSYTTLPRDNNAKLLVTVAADQLIALRENQSKLEAEMLNLCKQLPEYETVMAMYGVGKSTGPHLMAELGDVRRFPHRSSIVAFAGVDPGVVGSGKMQLSSVTTSKRGSPQLRKALFQVVSTYVKCKPENEAVYQFYAKKRD

SEQ ID NO: 507759 - protein, 392 aa, unidentified
MYIVGIDIGKNHHEASIVSPEGKQIGHSLRFATTHKGADSLMSFIFNNIGNSSCIFGMEATGHYWYPIYSFLKARGYTIYVINPIQSDSLRKMYIRQTKNDSIDSFLIAEVIRFGQFTTTSMADENILAMRQLCRYRDSVISSRTEIKLRISTIMEQIFPEYEKQFSSLWLSTSMGILEKYLTPENIENAPIDELFEIIKDKSHNKLTMKKAISIREAAADTFGIKIAQDAFSFQLKQLIDRMNFLDKQIEALDCQILEYYEKFDCYLHTIPGIGMIAAATILAEIGDINRFNSSSALVAFAGIDPTVRQSGEFSSTHNHMSKRGSPYLRHAIFLAATTCSFHNSPLNAYYKKKREQGKHHLTATGAVARKLTTIIYAVFRDGKTYEPKKFC

SEQ ID NO: 507760 - protein, 330 aa, unidentified
MKKWEFTLGVDVSKNTLDISCSELNEHVKIKNGTEGFTVFLKWCKHFKIDLKQSFLVMEFTGGYEYKLIQFCESRGILYTRIPGLAIKNSLGITRGKNDKVDSSRIAQYGEEKHKSLTPSRPLNPAIVSLKELLSFRKRLVRENAGYQATIKERIHMYGGNKKDIIVKKLEQKLKGNIKNIAAIEAEMLNIVAQDEKISINYRLITSIKGIGKINGLMTIAFTENFTSFTNPRSYAVYVGVVPFDHSSGISIKGRKRVSHIANKELKQELNQAARSAMEWDKEMRSYGEEKLKTKCYKIVLNNIKFKLILRMFAVVKRGEIYVENYRNVA

SEQ ID NO: 507761 - protein, 315 aa, unidentified
MKTLTEDKPAYAGIDISKDTLDVAVAGQKPAQYANSVAGITALIKALKSLPRSARVICEPSGGYERGLLEELWAASIEVSLVNAARVRAFARAQGLLAKTDKIDATVLRHFGELLNPELIEAPAPERQQLADLVQRREQLVNILLMEEQRLTQARHKQVCKLCERLIKELRTQIKQIEDLIENHIDEDPTLKQQSDRMQEVKGIGKVTASTLLAEMPELGTLSRNEVGALAGLAPYNRDSGQLRGRRTIRGGRVRVRRVLYMAATVAARFNPILKTFYQRLVAAGKPKKLALTAVMRKLVVLINHLLKNPEFTLA

SEQ ID NO: 507762 - protein, 344 aa, unidentified
MTYYAGIDVSLRTVNICVVDGEGEQVAETKLSSDVQEIIAYLDELECNIDLIGLEAGTLAQYLSYGLQAADFDVVCMEAQQVKAALSAMRNKTDKHDARGIAQLLRSGWYSQVHVKSMESHHIRMLLTSRRAVLDKCIDLENEIRGLFKIFGIKLPPKLGHGSFDKAVRAVIEADEKLSHALLPMLDARLVLYETFRVLENRTRHLARGDSICEFFMTAPGVGPITALTYKAGVDDPTRFKRSRTVAAHFGLTPRRSQSGEMDIEGRISKAGDAEVRRALYVAANSVLTRSSRWSPLKAWGMKLKKNRGHKKAVVAVARKLAVILHRMWIEETQFQWGMEGVRS

SEQ ID NO: 507763 - protein, 369 aa, unidentified
MGEYSEAFVAFDTSKVKHAVAIAEGGRRGEVRFVGDVASSPATVARLIGKLTGRYAKLHFCYEAGPTGYGLYRQIRELGHECTVVAPSLIPKKPGERVKTNRRDAVSLARLLRAGELTAVWVPDATHEAVRDLVRAREAAAQDLRRKRQQLLSFLLRHGRIFDGRKHWTMAHRRWLADQRFDHPAQQIVFQDGIDAIEDALARLRRLEEQLVAIVPSWSMAPVVEAYQAMRGASFLVAVTFAAEIGDVRHFDNPRQLMGFLGLVPRERSTGETVRRAGLTLAGNRRARRVLVEAAWSYRHPARVSQTMLVRLEGLPKAVRDIAWKAQVRLCGRYRRLSAGGKKLPVVIAAVAREMAAFLWAIGHRVAPA

SEQ ID NO: 507764 - protein, 309 aa, unidentified
MKKVSTAAAQQSRNFSVQQKLTIGLDLGDRNSWYCVLDEAGQIQLEQRVRTTGKALQEVFGGMPRSRIALEIGTHSPWISRLLRELGHEVIVANARKVRLIGESRKKDDRLDAQTLGRLARIDPELLYPVKHRSAKAQSDLSMIRARAGLVRARTALVNTTRNLAKSYGERLRGCNVRNMNPEKAEGLSPELQRALEPLLSAIEELSERICEYNDRIEALAETSYPQVALLKQIKGVGTLIALTFLLTLEDPHRFRKSRDVGGYLGLHPGRRNSGQSEPQMHISKEGDPYLRTLLVQGAQHIKTVRHRL

SEQ ID NO: 507765 - protein, 362 aa, unidentified
MDFLTVDTTHVVEPLVVLGVDTHADTHVAVALDGLGRRLGSKTVSATDAGYAELVAWAEGFGRLDRVGVEGSGSFGVGLARFLRARGVPTVEVNRPNRQHRRRFGKHDTADAEAAARAVQAKTATGEPKSADGPAEMVRTLQLVRRSALKARTQAANQLRALLVTAPEELKTGLLGLSTAKLVGKAARFRSGGLPEDLRASTKVAMRSVARRYQQLSKEIAELEEQIARLVSEAVPALTSLRGVGTDTAASLLLAVGDNPERLKSEASFARLCGVAPVAASSGKTTRHRLNRGGNRDANRALHVLALGRMSWDERTREYVAKRTAEGKSKREILRCLKRYLAREVYRVLVAAGTPTASLSRA

SEQ ID NO: 507766 - protein, 319 aa, unidentified
MTIVGFDVGKYTLIAVRIDHSVQSKETFKINNTKEEIDNLLDSLKAKYSHLTIGSEATAEYHKTLALEAIEREIPFRLLHPITTKQFTRATVRKKKTDLTDALVIAKLIYQCEGRLLTKEDFSSSKILFRTAVKLTMHAQSLILMKQHISEHYPEEKKAIEILDNCINVIHSSVKGFRNGSEIESEQDQEILKLLQSIPGIGQALSQIILAEIGDINRFKDSSSLIAYAGIDPKVRQSGAILAKNTHITKRGSPYLRRAVFMAASIGMRYDPEMRAYYDKKRGEGRRYKEAVIALSRKMINRIYAVWKRKTPYVKVQTT

SEQ ID NO: 507767 - protein, 362 aa, unidentified
MKNSQLDFTGQTLYIGIDVHKKSWQVTILLNGMKVKVFSMNPNPKELNNYLTNHYPNANYHSVYEAGFSGFWANRQLQALGIKNIVVNPADVPTKSKERRKKTDKIDSSKLARELSVGNLDGVYIPSTKAEALRTLIRLRRQIVNDQTRQKNRIKSLLLFLGYSVPEDVETKHWSQRYIKALRNLDIEHEESKATLNELLNNLNFIRSQLVKILEQIKGFIAKDQQADKTVRLLKTIPGIGPILAVILYSEIIDIYRFKKLDELANYVGLSPAIYSSADKEINLGLTKQKNKYIRNYLIESAWIAIRKDPALQMAYGLLCKKMSSNKAIIRISKNLLNRIRTVWINQQEYVIATVAWIKNKQ

SEQ ID NO: 507768 - protein, 339 aa, unidentified
MLNVGVDLHKRMSQIAVLTEEGRVAQRRVANEAAEVERFFRGLPPARVAIEASGTWWWLVDLLEGLGHQPVLSHPKQTKAIAAARLKNDRVDAERLALLLRGDLLPTVWIPPREIREARELLRHRVSLVWRRTHIKNQLLALLARRNLQPRVATQWMSAGGRRELAELSLGPSADTIRDDTLALLRLLDAQVRSVDQELARRWDSDPRVQRLQTIPGFGPFVATLLVLELADIERFPSAKHVASYIGLTPRVRASADRVRTGHISKEGNRLLRWALIIAATQAARRPGPLRAWFRGLQQRKGTKIARVALARRLAEIAYQVWKEDIDYLAVVRRTGVRG

SEQ ID NO: 507769 - protein, 334 aa, unidentified
MIMKFTNFVGVDVSKLTIDAHLQGSNAFKTFANNTKGFTALLLWTKKLLPSVDQSAIIVCFEHTGMYSIGLAIYLQEADIPFAMISPLEINKSLGMHRGKSDFIDAKRIANYAWLHRDDIKPSVLPAKSILKLQSLLTLRDRLVRDKGGFEATCKEQPLLLGIADNAEMFEIYKSMIGHLTTQIKSLDAQILSIIDCDVYLKKTYDLLTSMKGIGPIIAANMITSTHNFSRFTNWRKFACYIGTAPFEHTSGTSIRGKTQVSHLANKQLKKLLHLAAISAIIHNKELRAYYLRRVSEGKSKMSTINVLRNKILARMFALINRQSGYVELAKYAA

SEQ ID NO: 507770 - protein, 291 aa, unidentified
MTEQASNARPRSFKTFTSSLNELKEWLLSNGVTHVGMESTGVYWKPVYKVLEDSIPNVWIVNARHIKNVPGHKTDKMDSEWICKLLLAGLLKPSYIPPKEQRQLRDLTRYRNKLIQQIASEKNRMMRILEDCNIKLSSVVSNTSGATATSLIDMLCEGKVLTLDDINSVYHGKLSASPEELLEACTGFVEEHHIYLLQMIRKDIDQTQTLVDDLSERIKRLLSKYENVLELLREIPGFSTKVVEDLVSEIGLDMSHFPSEKHLSSWAGLSPGNNESAGKKKAHESLTETNR

SEQ ID NO: 507771 - protein, 403 aa, unidentified
MFAGIDIASERHVLARLDDAGAAIGKPITITEDRAGYDALMAALGPAPVLIVMEATGHYWKNLFAVLTSAGHDVALLNPLIARRFQEASLERTKTDAIDATGLARLAFEKRPAPTHLHDEVAEALRELVRHRDRLRQDFDDRVRQLHRLVDLGFPEFTRYVRGLDSMLATCLLAEYPTAHAFARATPRRVAKLRYDGRHFVGPELAQSLVEAAKRSVGQHHGPAYKLQARHICQDLDIWRKRLAEIEHDIEDLLDTHVPGKLITSIDGIGPQTAARIIAAAGDPAHFKTAGAFAAFVGVVPGLRQSGKQTSTRAGIGPLGSARLRRALWMPVLSAVKRNAWLRAFYLRLRAAGKPAKVALIAAMRKLLHAVYSVAKHRRPFVTTKQGRAVEPQNSATARPCGP

SEQ ID NO: 507772 - protein, 400 aa, unidentified
MLEDVSKGKSTVAVLQPGGTVIRKPFDVSHTSQNLNELADYLSSLDGTTKIVMECTGRYHEPMVKALSEAGLFVSIVNPHLIKNFGNNSLRKVKSDPADARKIARYTLDNWTELRQYSGMDNTRTQLKTLNSQFSFFMKQKVAAKANLIALLDNTYPGVNKLFDSPTREDGSEKWVDYAYSFWHADCVRKIGLKAFTERYKSFCKKHHYIFQQDKPEKLFNASKELVAVFPKEKTYKLLIQQSIQQLNLASEHVERLRREMNELASTLPEYSTVMGIYGVGKTYGPQLIAEIGDVSRFTHREALTAFAGVDPGVDESGQHKSKSNRASKVGSARLRKTLFQIMTTLLQNAPEADPVYRFLDKKRSQGKPYYVYMTAGANKFLRIYYGKVKECLRNLEQTE

SEQ ID NO: 507773 - protein, 338 aa, unidentified
MKQIITIGLDLAKNVFQVHGVDAAGKVLVRKQLRRAEVLRFFAALPPCLVGMEACATAHHWARELTQLGHTVRLMPPAYVKPYVKRGKTDAADAEAIAEAVPRPTMRFVAVKTVDQQSILMLHKVRDLLVRQRTMLINALRGHLAEFGIVSARGPGGVSAAITALHEAQDGLPELARQVLHGLITQTRIIGAEITKAEQRIMAWHRASAASQRLATIPGIGPITASAIAAAVPDATLFRSGRQFAAWLGLTPRAHSSGGKQRLGGISKQGDGYIRRLLVIGATAVIRFARQDNASKTWAARLLERKPARLVSVALANKTARIAWAVLVHNQPYVAPAS

SEQ ID NO: 507774 - protein, 343 aa, unidentified
MKLSRVGVDLAKNVYQLHGVDRSGETILKRRLKRHQWLKVLLDNTEPGCVIGMEACASAHHWGRELQSRGYTVKLIPPQFVKPYVKSNKSDAKDAEAICEAMSRPNMRFVTVKTVAQQDIQATHRIREELKVRRTAKANQIRGLVAEYGLVAPKRLSSLRAAIPCWLEDAENGLTHYFRSLLQGLWDDLLILDDRMCEMDKTIKQLAKDNEDCVRLQQLRGFGPMISTAMVATVGDARQYHKSRQMAAAIGITPRQHSSGDKHRLLGISKRGDVYLRMLMIHGARSVVTRAKHKDDPLSRWVTEIATRRHPNVAAVALANKNARMAWAMLRNKTDYNPDFAMS

SEQ ID NO: 507775 - protein, 400 aa, unidentified
MAGPHKASHTAVAIGAAEERLGEVRVRASAAQAGKLVAWAAPWPERTWAVEGAGGLGHLLAQQLVAAGERVLDMPPKLAARVRLLEAGDTNKNDPDDALSVAVAALRSKARREVTADDHGAVLKVWSKRHRDLGRARNQVACRLHAVLCELVPGGIAKEISAGQAAHFLAQVTPSGAAALARRELAAEFVDDMRHLDAQLRETRKKLAAAVKASGTTVTAIFGVGPVIAGTVIGDVADVSRFPGRNQFAAYNGTAPVEVSSGNRKIYRLSLRGNRRINHAIHMAAVTQIRHRHSDGRVYYDKKLAEGKTRKEALRCLKRRISDAIYARLQADARRAAGTPADAGPGGQPGNDSDSSAAGSHPADQLFGQATPEPGTTLRPAALRRRTAPKPTPKKTPETP

SEQ ID NO: 507776 - protein, 353 aa, unidentified
MHTHQKSSDPIATIGLDIGKNTFHLVGLNKRGAIAMRIKVSRNQLVRRLVNLPSCLIGLEAGSGSHHIARQIEPLGHDVRLIPAQYVKPFLKGHKNDFRDAEAIAEAVQRPTMHFVAIKTPEQSDLLSLHRVRSRLVRQRTAIINQIRGFLIERGITVRQGPVPLRKVLPEVLSSPPEALSPRLVRLIAELDEDWRRLDERLEALSAEIESLSEHDTACQRLMTVPGIGPIISSAIVAAIGTGSGFKQGRDFAAWLGLVPKQESTGDRTKLGRISKRGNKYLRTLFVQAAHVVIERRPAAAMRALWPWIEKASKRLAHRNLLAIALANKLARIAWAVLARGRDYQPRITTNAA

SEQ ID NO: 507777 - protein, 385 aa, unidentified
MAVQSLKHGGRAVAEDTTTYVAFDSSKETLAVALADGGVRGEVRFWGTIANSVEAVRKLVTRLAAKHPVLSFCYEAGPCGYGLYRQILSLGHPCTVVAPSLVPTKPGGHVKTDRRDAAMLASLFRAGELQAVWVPDADHEAMRELIRARQTAMQEVRRSRQLLLSFLLRHDRATPTRQHWTRAHRSWLARQSFAHPAEQIVFEELIQRIEIAGARQGRHEDAIRKLLPAWSMGPVVTAIQALRGVALMSAVTLVAEIGDFGRFASPRQLMAWLGLVPKERSSGSKVARGNITKAGNTRARRVLVEGAWTYRLPARMGEDIARRNEGLPEAIKAAAWKAQVRLCTRYRRMTLTGKPQNIIVVAIAREMAAFVWAIARMAQPAGAAT

SEQ ID NO: 507778 - protein, 340 aa, unidentified
MDDVTLIGVDLAKRVFHLHGAAGDGSVVFRKKLSRAQFRRFMECHPRCVVAMEACGSAHHWGRLIAGFGHEVRLVPPVYAKQYVKRHKNDAADAEAIAEAASRPTMRFVTVKSQTQQTQAMAYRTRDMLVRQRTQLVNALRGHLTEFGVVAPQGIAQIKKLAAAIDAPETELPELVQQLAHDYLEMIGALTARIAVLDQTLQRVTAADEKTAFMRTVPGVGPITVAAIEAFAPSLESFRRGRDFAAWLGLVPKQHSTGGKERLGRVSKMGQRDIRRLLISGAMAVIRWEIQKGDDANPWIARLLARKPRLVAAVALANKTARMIWATATKKQSYRIPVAA

SEQ ID NO: 507779 - protein, 423 aa, unidentified
MPYRIAGIDVHKKKLAVVVADVECSDEFRFERRWCGSSPEQLRALSQWLIEQEVEEVVMESTAQYWKPVWGALERCWRPVCQGRDAAGRISRTLHLAQALSNRGRRGRKTDFRDAERLVKRLVSEELVLSFVPDTEQRLWRTLTRSRYQRTREKVRLQNQLEALLEEAHIKLSSLVSDLLGASSRRMLNAIADGETDLAALAALAHQRLRATPTQLQDAFGACKELNPLYRRLVRMTLDGLQFVEQQIGKLDQEIASLLQPHQSAVERLASVPGLGVDSAQQIIAEVGANAATFPSAGKLSSWVGACPGKEESAGVNRSRRSPKGNRQMRRILNQAANAAVKRKGSIFELLYRRLVSRMGHNKTIGVVTNRLCHLIWIILHNGVHYEERGPAVSEQSKQRHTAKMIRKLRLLGYTVEPATNPA

SEQ ID NO: 507780 - protein, 427 aa, unidentified
MDFTQNERLNQINEQTLIIGIDIAKHKHVARAIDDRGIDLSKRLVFPNSLEGFQLLLEWARQLSADTSRPNLMLGMEPTGHYWMNLAYFLKSQGERPVVVNPMKVKKSKELDDDSPTKNDTKDAKVIAQVMRAGRYHEPTLPEGIYAELREGVKLFDIIQEDLSSIKAQIHNLLDRYFPEFMTVFKKWNGKMAMAILKLGYLPTDIRQKTEEELLYDVKALGTKNVGVARMRHLKKAADSSVGMTVGLRMAREELRYLVDQYESLNERLDNLKEELEELVLTVPGADLMMAINGVGAMTIVGFFAEIGDLSNYKDPRQIIKLAGLNLMMNQSGTHRGKTTITKRGRRRLRSILYQVARPLTFHNDAFKALHQYYKHRRTNPLKGKQSFVALGRKLIKVLFVIGTRKCAFSEEHMLRDIPHMRDGQAA

SEQ ID NO: 507781 - protein, 343 aa, unidentified
MNKLNVVGVDLAKHVIQVSVLSRGQRELQNRALSRRKFAEFLAQQGRSLVAFEACATAHYWARVAQRHGHQVKIIPAKAVTPCGNGHKTDENDALAVAEAALRPKVKLAPLKTVEQQGLQAIQRSRELLVQERTGLSNHVRGLLMEFGIVIPQGYAALYRQLPEVLEDAENELPHLYRPTLHLLWQRLCALREDIERLNREIEALVRQNPACERLTALEGVGPIGAVLLFATLGTGEAFANGRQFSAYLGLTPKQYSSGGKVALSGISKRVANRRLRAVLIQGARAYVHKLKQPRSSKDHWLAALIQRGGHGKAALALANKNVRTAWAMLTQGTDYQRAPAGA

SEQ ID NO: 507782 - protein, 343 aa, unidentified
METTRHIGVDLHRNCFTACTRLENGRNYVTEWKLEQLPKFVNQLRPSDEVAVEMTGNTRLFHDAVAPHVKRVVAVNASQFQVITHSVKKTDPHDARNLALYLAKDLLPEVRMKDKARAQIASLTQTRDTLVKQRTALKNKINNLFSAQGLLLSKESLASEKGLKAVLEAQLDVLVELELKILVQQIRSLNHSIAELEETIRRESQKLDGHKNLTSIKGIGGLSAGILLSIIGDIGDFSEEGKLAAYFGIVPRISNSNATERSGRITKCGTKLGRTTLVQCALIAQRFSPYLKTYYERKKKSRGTGKAIIALARKFLGIIYRTLKYQWVFQDFPNFVLAEDATA

SEQ ID NO: 507783 - protein, 353 aa, unidentified
MAHVVIGMDPHKSSATIEIINEKEKILHAGRYSTDAAGYRSMLAAGRKHRDRIWAVEGCNGIGRHIAQRLVADGEPVVDVPAKLSARARLFSTGQGRKTDPVDAHSVALVGLRTGGLRPIREDDATVALRLLIDRRDELGVARTQVVNRIHRLLLELLPGGAKTHLTATQAKVLLAKVRPRDIAGKTRRRLAAELITDLAGLDAKIKTADKELHQLIDTTGSSLRELHGIGPANAARLLGDVGDIARFADKGRFASWNGTAPLDASSGEQHRHRLSRAGNRRINRVLHIMAVVQLRTDTEGRRYYDRKVAAGKSSMEAMRLPETAAVRRGLPADAGRRDCVSGRPGRTFGGGS

SEQ ID NO: 507784 - protein, 391 aa, unidentified
MVCVGIDVAKDKHDCCILDSDGTIRADCITIPNNMDGFKQLLQTIRDCTKRSDKIKVGLEATGHYSYNILGFLLDNDLAVYVMNPLHTNLYRKSLSLRKTKTDRVDARTIATMLLSDVDLKSYTDTAYHNEELKSLTRYRFDKVRERAKLKQSVSRLVTILFPELEKLVPSLHIASVYSLISEYPGAKQVSEVHLTKLTNLLTTASKGRYGKDKAIQIRDAAKTSIGSVMPAKSLELKHTIKLIKELTSEIDEIEDSIQQIMDELHPPILSIPGVGIQSAAMILAEIGDFSNFESPDKILAYAGCSPSTYQSGKLTNCYAHMEKRGSRYLRCALYNATKYVCHWNPVFAEYLAKKRAEGKHYNVALSHAMKKLVRLIYALQKSGKAYLTAA

SEQ ID NO: 507785 - protein, 410 aa, unidentified
MIKENYIYVGIDLHKETHTAVMIDCYNQKLGEITFPNRPADFPKLVAKVKKCNTDGKTIVFGLENAYGYGRALAVWLIDKGYLVKDVNTAISHRQAKHRGAMYRKSDSDDAEAIALATLNMLDKLPDAYPNDAYWSLGQLVHRRDNIMKQRTRLVNQLHEQLCIAYPSYKQFFNDISRPTALYFWEHYPSRKYLKGKSVEDLRAELVPVSHNKCSTKTCEKILDAVASDKVKNNAYQDARDMVTLSIVSDLQHYDKQLAEVDKMLEQMYKMLGCTLTTIPGVNVITAVKILAEIGDIKRFSNANKLAQFAGIAPLHLSSSGKGKDVATKQGNRRLQATIYFLAIQMVQVSSKGTPRNSVVRAYYEKRKAEGKTSQQALICISRRLISIIYGMLKHGTEYRMPVVESAGEK

SEQ ID NO: 507786 - protein, 355 aa, unidentified
MNSERYIGLDVHQATIVVAVTDSSGKLIMESMLATEAATILQFFAGLRGTLAVTFEEGTWSAWLYDLLNPHVDQLVVCNPRKNALLKDGNKSDRIDARKLAELLRGHQLKPVYQGENGVRMLRELSRSYLTIVKDLSRVMNRLKAVYRSWAIPCAGRDVYYRRHRAQWLDKIREAGVRRRAERLYEQLDMLQHLRQQARRELLAEARKHAITARLRQVPYLGPIRSALAVALMQTPHRFRTKRQLWAYSGLALETRISAEYRMVEGQVRRSKKLLCIRGLNQDHNHDLKGLFKGAATLASVRPGPFQEFYQAALAKGIKPTMARLTLARKIAAITLTLWKKGESFDPEKLKSQAA

SEQ ID NO: 507787 - protein, 386 aa, unidentified
MPQKLKPMRTVCGLDVYIDSIFVCILNENGILFQDKIGVLTPDLERLVDTLHEHGAAEVCMESTSIYWMPVWRILEPYFSLKLVNPYFIKQLPGKKSDIKDAEWIATCLLKDLIRGSYVPEDRIQQLRHYDRRIFDLNKDIVYKLAKLDAALQRCNIRISNYVSTTDGKSYQKVVEKIAEGTTDPKVLAGLIHGRIMNRVGKDVVSASLTGVITQADIDVIRQIRDEVTLAQKHRKECLDKMEELCNKWFPDQMKNLQTVPGVSLRSATSVIAELGTDMSSFEDAAHLVSWSGLKPRNDESAGKIKSRKITHGNKFLRKTLIECTWAAAKTRGCFYNTFSYHQTVVRRKNKMKVQVAIARKMLTAIWFILHDNVPYRDYTPDIVAE

SEQ ID NO: 507788 - protein, 411 aa, unidentified
MLGLYCGIDWATAHHDVAVIDDDGKVVARGRVSNDAAGLAALLILLAEAGDSSDHRVPIGIETDRGLFVAALRETGRTIYPINPLAASRYRARYSVAGAKSDAADAVLLANIVRTDPGAHRPLPADTELAQAIRVLARAQQDAVWARQQVGNQIRDLLKDFYPAAMVAFAGLPQGGLARADARVILTAAPTPAQAAALTPARLRRLLVKAGRQRHLDRDVERLRDIFTDTYLHQPLVVENAMGIQLTSLLRQFDAACTAVAELAEAAIAHFEQHPDAEIITSFPGLGNLAGARVLAEIGDDRTRFADARGLKAFAGSAPITRASGKKTVVLHRHIKNRRLAAVGSIWALSSLRGSPGARRHFDTRRAAGDWNRQAQRHLFNKFLGQLHHCLHTSQLYDEHVAFPPPLQLAA

SEQ ID NO: 507789 - protein, 341 aa, unidentified
MTHFSVLAIDLAKHSFSFVLLSKQGSIEKKGTVSRVKLIKLFSTLKFDKVAMEACSSAHYWARRLKDNGHTVELLPPQHVKGYLRGQKNDINDALAIAEACQHGKIRPARVLTIKQQDEQAFSRIRELLGAEQTKVVNQIRGLLSEYGIIISKGVASFSRDLPLILEDAENGLTPEFREILFRRYQQFLAIKSELDWYNQKLQQKVKSEKICQKLIAIPAVGPINSFSLFHWLGDGKQFKRGRDAAAALGVVPKQHTTGGKVRLQGISKRGNRRLRASLVHGARAVVTQAIRQLKEDKLSLWLRSLVERRGFNKAVVALVNKVVRIAWVIVAKGETYHPAV

SEQ ID NO: 507790 - protein, 312 aa, unidentified
METLHSLQKVTAGIDVHRMLLVVTVLIDQEDGTVRKEQRQFGGFKRDKRAMVMWLVSLGVELVVMESTGIYWKSPYAFLEQAGLTTWVVNAHHVKQVPGRKTDLADSEWLAVLGRFGLVRGSFIPPQDLRELRLVSRYRRKLASTLAAEKNRLHKVLDDAGITLGAIVADLDGVSARRMIEGLIAGQEPAALAGLGRGKLREKQDDLALALDGDLSPRHRFVLQQLDAHLRFLEQRLIEIDQTLFQAMQPYAWAWRLLQTLPGIDQLAACLILIEIGDDLSHFGSADRFASWAAVCPGNHESAGKRKTGETR

SEQ ID NO: 507791 - protein, 427 aa, unidentified
MSVAQNEKIRQVTETTMVIGVDIASDTHWARAFDWRGLELSKAVKFENSAEGFHYFLCWASELAAEQKKGRIMVGLEPTGHYWFTLAAYLQGGSMKMVLVNPYHVKRSKELDDGHPSKSDKKDPKTIAKLVLEGRYVLPYIPQGLYAELRVAMNCRWRVQKELTSVQNQIQRWLKIYFPEHKTVFGEFEGIGSMALLHAAPLPSDLVALGVDGINQIWRQMKLRCAGLKRAQRAFEAAQNSVGCTTGIEAARMELQILLEDYDAKLQQYERIMKVVESLCRQIPEVEELLKIKGIGLITVAGIFAEVGDLRRFSFPRQLQKLAGLAITENSSGKHKGQTEISRRGRAHLRAILFRAVMPLVARNEECQKLHHYLTTRAENPLKKMQSIIAICCKLLRVFYAVATKGCAYSAEKMLADIRRNQPLKAA

SEQ ID NO: 507792 - protein, 367 aa, unidentified
MKKVSTIAAATTKNSRDEELTIGLDLGDRNSWYCVLDEGGQVVQEQKLSTTARALREVFGRMPRSRVALETGTHSPWVSRLLSELGHEVIVANARKVRLIGESRKKDDRLDARALARLARIDPELLCPVKHRSAQAQADLAMIRARAGLVRARTGLVNAARGVAKSYGERLRSCNVRNMNPEKAEQLSPELQRALEPLLSAIEEVSERIGEYNDRIEALAQDSYPQVGLLKQIKGVGTLIALTFLLTLEDPHRFRKSRDVGCYLGLQPGRRNSGQSEPQMHISKEGDPYLRTLLVQGAQHILGPFGVDCDLRRWGLKLAERGGRNGKKRAIVATARKLAVLLHHLWVSGEVYEPLHNSQRMTVTVAA

SEQ ID NO: 507793 - protein, 354 aa, unidentified
MKDQAIQYLALDVHQSTVVATVREQGGAIVMRATVPTEARAILRLVRSVGSRVHVTFEEGTQAQWLHDVITPYAERVVVCNTRGEGEGGNKNDQLDADRLSERLRLGSLKSVFHGAKSLLTLKELVRNYNNLVEDSTRVMQRIKALFRARAIPTPGVSVYRLSQRKQWLSRLDGGARIRAATLLTQLDVLLELRPKAKAAMIVEARRQPAWKILRSIPFLGPVRVAQILAIIRTPFRFRTKRNLWPYVGLAVVTRSSADHKFEGGKLRRRQKAPLTRGLNRNHNPILKSVFKGAANAATAKPGPLRDFYEASLARGVRDELAKVTLARKIVSVVLRLWKKGELWDPKKLTMQAT

SEQ ID NO: 507794 - protein, 420 aa, unidentified
MERMVERCAGLDVHQATVVACVLINERGRRPRKELRTFGTMTHELEALRDWLVAERVTHVAMESTGVYWRPIHAVLEEHFTVIVGNARHIRNVPGRKTDVKDAEWIAELVCCGLIRPSFVPAKPLRELRELLRYRRKLTEAQAAERNRLQKQLEIANIKLGSVATDVFGVSGRAILRTLIEGASSPVEMAGLARGRLRRKRDELAHALKGRLDDTQRFLLSMQLRRVEDIEILIKELDQHITGKLGPYQTELALLMQIPGVDWVVAAALIAEIGVDMSVFVSVHHLAAWAGLCPGSHESAGKRKNTTARKGNVHLRTMLVGAARPAARTKGSYFKDKYYRLKARRGSMRAALAIAHKILVAAYHMLARRVDYRELGEAYLDRIDQTRTAINLKRRLERLGYVVSILPQTTPSDAQATRPA

SEQ ID NO: 507795 - protein, 344 aa, unidentified
MTTISILGIDIAKNTFQLHGADRTGKAVMRKRLPRHQLAAYVATLAPCTVVMESCGGANYWARIFQRSGHTAKLISPQFVKPFVMTNKNDANDAQAIVEAASRPSMKFVPIKQVEQQDIQSIHRVRTRVVKNRTALINEIRGLCLEYGVVIAPGAARVKSSLCAVIAESANELTPSSRECMQDLYEELVDVELRLKRLDTRIRQLCRQNESCQRILKIPGVGELTATAIVAAVPNPKEFRNGRHMSAWLGLVPRQSSSGDKQVLLGISKRGDRYLRTLLIHGARAVLSHYKDLDNDYARWVGRKKATLSHNKAAVALANKNARIIWSMLSTGEEFNYGAQAAAA

SEQ ID NO: 507796 - protein, 479 aa, unidentified
MTAKNKDAKTDTDGKCAGAAAEHGGDGAEVAEDRVQVVTYAAAIDVAKGFGMVCTRVPGSRPDRRRQKVWRVEATCAEVTALMDHLRCEGIQRLVLESTSDYWRIWYYLAEAAGLEVWLVNARDVKHLPGRGKSDRADCVWHCKLNERGMLRRSFVPPEPVRDLRALTRTRARLAQDQVRHQNRVEKILEDALLKISVVISDLFGASGRRFLDALVAGERSPKALAALGDTRLKATRQELEDALTGRFRDIHAFEISTHLRLIDAINDEITRLDEKIEQQLALVPRTAPACTACGLAGGGHAPGCADQEVPLLGLAGRLDEITGIGECNAAVVIAELGTDPSTFPTPGHAAAWARLTPRTMQSGETARPGRTGKGNRYIRGALGQAAMTAAKTDTRLGAMYRRIARKRGKQKAIVAVSRIICEIAWILICDPGARYQELGPDYCSPRSPARQTRDKIRDIERLNPGKKVILVDAGPEAA

SEQ ID NO: 507797 - protein, 453 aa, unidentified
MVNEINGFPVLCEHAAGIDVGSEKHWACAPARTGGGREVAVFAATTPGVDQLIAWLKDRGVTSVALESTGVYWIVPHEMLERAGFEVLLADTRELGRVPGRPKSDCQDCEWIQRLHSCGLLRGAFRPPEPVCLLRTLVRDKGTLIAERADWIRRMQKSLDQMNVRVHRAVADVDGATGMAIVRAIVAGERDPHRLAALRDRRCRKNEAEITEQLTGHWRADHLFSLQQAVKMYDAITERLQEYEHEILNQLRQMARAESGPDAPPPTNPNKAKAIKKRGEDPLRQALYRISGVDLTTIDAMGVETVNVILSEYGPDLSGFPTEKQFVAHMRLAPYRPISGGKPVKKRKKPGSASARVGAALRMAALSLRRSQTALGAYYRRIAQRAGGDVAVFATARKLAQYVYRLLRWGQPYVDQGAAAYEKHYREARVHRLAQTAKTLGYQLVAVEALCRD

SEQ ID NO: 507798 - protein, 346 aa, unidentified
MYQDTLIAIDLSKNSFQGCLLDKYHHERFNRKFSRNKLTDWLSRQQPLTVAMEACGSAHHWARLVERMGHRPLLVPTRTVSRYREGHKTDATDARATGVAARQPKVKFVAPKTVEQQGIQGIERIREHFSDHLTATSNMIRALLYEFGLTIPKGISAFKRGVVEIMEDAENDLPMPLRIQLIESWEYYLELEARLKIAKRARDQIIAQHEVCQQLMQLQGVGPVNSLGLYLTLGDRGASFGNGREASACIGVTPKQYSTGGEVTMLGISKKCANKRLRSNLIQGARSVIKALKKRDPKNGLEAWLKALIARRGEGRAAVALANKTVRLAWAMLHYGENFKLHPDMA

SEQ ID NO: 507799 - protein, 359 aa, unidentified
MEVQEVAPRPVVGGVDTHKDLHVAAVVDEHDHVLASQSFATTRQGYRQMLAWMRSFGQLRCIGVEATGTYGAGLLRYMQNAGVEVLEVTTPDKHDRRRRGKNDDLDAQNAAHAAFAGKRTVTPKTRDGMIESLRVLKACRKTAVAARRVALQMIHNTIICAPDDLRDTLRKMTRMQLVRTLAAWRPDLTDYRTVISAYRISLKSLGRRYLELHDEIADLDAMISAIVDELAPNLVARNSIGHAGAAQLLLTAGDNPKRLHSEAGFAALCGVSPVPASSGKTTRHRLNRGGDRAANSALHIIAIGRLRTDPRTKAYMAKRMAEGHSKLEAIRCLKRYIAREVFTLIGQRQKEINQARITA

SEQ ID NO: 507800 - protein, 326 aa, unidentified
MNVIRVGVDIAKSVFHVHGVDRHDQTQWQGKYARNKWLTALSRKVPAGAEIGMEACASSHYWARELQKRGYCVRLIAAQFVKPYVKSNKNDRVDAEAICEAMSRPNMRYVAPKTVAQQDIQAAHRIREELVGQRTAKANQIRGLVGEYGIVAPVGIQQLRRALPEWLEEAENGLSDSFRVLLHGLADDLRYLDDRITALDERITDSVKQDPVARRLMTLRGVGPLTASALSGALGDGKAFRRGRDFAASLGLTPRQHSTGGRDRLLGISKRGDSYLRKLLVHGARAVLRHVGGKDDGLSHWLQALASRKHVNVATVALAACRTDVR

SEQ ID NO: 507801 - protein, 334 aa, unidentified
MGGGKIYVGMDTHKQFSFVTALTEKGDVIKQEKLVNFSDEFNEFFRELSRNKTLEIAIESTEMIMPFVKALERYGKIKVAHPTKLRLIAESKVKTDKIDSTVIANLLRTNYLPESYIPPEEIREIRTLCREHYAIKALIVRVKNQIRHYLLSQGIIREDNVFTKENRKKLREMNSDFINRKLDMLECMEEKLREVDDEIKERVSNVKEVELLTTIPGIGIYTAALLYSEIADIERFKKFSKLCSYVGLNPSMYQSGNRKYFGRITKQGNKLLRWALIQSAYVAVKFDPELKIFFERLKQKKGVKKAIVATARKLLKRVYAVWKRKEPYESCGSL

SEQ ID NO: 507802 - protein, 378 aa, unidentified
MASKDTKYVGLDVHKDTISVALAESGRENPVFYGSIPSTPEALHQLIKRLDGDRSVLRFCYEAGPCGYEVYRQLVWWGYECVVVAPALIPRKPGDRVKTDRRDALSLARLYRAGELTPVWVPDEEQEAIRDLVRCREDGKQQEQKARQRLNAFLLRHGHVYSGKSAWTQAHFRWLEKIRWVHPAQQIVFEEYIQTVRQASARVAALEEEMERLWPNWSLGPVVEGLMALRGVSLIGAMTVVAELGDITRFDSPRELMAYLGLVPGEYSSGQRQQRRGITKTGNGHVRRVLVEAAWCYRFPARKTAHLQRKAERTSEEVQAIAWKAQKRLAHRYRHLHHQGKPKQQVCTAVARELAGFIWAIAWQVTDPVHAAAVIGGE

SEQ ID NO: 507803 - protein, 344 aa, unidentified
MSQVITIGLDIAKNVFHAHGADERGVMVFSRKLTRGKLLDFFAGQPACVVALEACGGAHHWARELQTMGHAVRLIPPAYVKPFVKRNKNDAIDAEAICEAAQRPGMRFVAVKSEEQQAAGLVFRTRDLAVRQRTQLINAIRGHLAEYGWVAPRGTAHMAMLADLLEEEEMISTLPRAARPMFKIMVDMLAELDKQIAVLDREIARRAKDDEAARRLMTIPGIGPIAATAIIALAPPIETFRKGRDFAAWLGLAPRQHSTGGKQRLGGISKMGERTIRRLLIIGGSSMVRQASRFGAPAGSWLERMLARKPRMLVSVALANKMARMVWALLTRNEDYRAPAAVTA

SEQ ID NO: 507804 - protein, 368 aa, unidentified
MDEYDGRQFVGMDLHRRRSVIVRMTPEGERIGATVRIENDPGALAELVASWGESPEVVLEATYGWYWAADVLAEAGANVHLAHPLGVKGFAYRRVKNDEFDACDLADLLRMGRLPEAWIAPPQVRGLRELVRHRSKMVALRSGLKAQVHAVLAKQGVRVPMSDLFGVDGTKLLDGLALDPPFHTRVVSLRYLIDAFDGEIDTVTKDLRAQLKKHPGYQAIQAIPGVGPVLAAVFVAEIGDVTRFPTPQKLCSWAGMTPRHRESDTKIHRGRITKQGNHLVRWAAVEAVQKLYGGGIGAARTRLAETPRQEHRQGRRRPQAAHPGLLRAARRAHPLPGPTGVSLTPAQLTRAVVGGLTPTTRWRGRHHD

SEQ ID NO: 507805 - protein, 350 aa, unidentified
MLIVGCDYHPGFQQIAFVDTETGEFQERRLQHRGEAEKFYRDLAARGVKVRVGMEASGHARWFERVLAELQFELWIGDAAEIRAKRVRKQKTDRQDAQHILTLLVQDRFPRIWVADWENRDLRQLLWHRHRMVQTRTRMMNQLRAVALNEGLRCKKRLWGKKGRQQLESLRLAPWATRRRRDLLELLDRLNPLIAELTQAIEQEVEKHPEAQRLITHPGVGALTALAFVLVIGTAERFQCGKQIASYLGLVPAEDSSGERRRLGHISKQGSAILRFFLVEAAQVTVRSVPEWRSKFFHLAMRRGRKIAKVAMARRLAVHLFWMWRKQWDYQQLKEFGPYAGKPGTGVGVH

SEQ ID NO: 507806 - protein, 502 aa, unidentified
MDLEEVGAAQWRRWDELGRETASVMPTITKSKAKLKSQGAAPVTALASRDRVDVPTAKRRARRRFGPSDAPAWRIEGYKVVENRAILPPSGENPDGAPTRSETQFTQGAQGRMTMRIVALDLGAKKTCYCELCQGQVVQRLTVSEVGSLRPLLGPEQPAAQVAIEACREAWFIHDLLVEWGNEVVLVDTTRSRQLGIGQHGRKTDRIDAETLARALEIGRIPAAHVLSPKRRELRRVLGVRRALVEARAQLVTTVRGLVREQGGKIPSCATENFVGKVRRQSLTPEVAQLIEPLVVLVQSIDTQLANTEEQLAALSAQEPIIATLTTTPGVGTVVAATFMSVIDEAKRFQSAHQVESYVGLVPSEDTSGGKRRLGAISKKGNSYLRTLLVQAAWTILRSSDKSDPLYLWVTQLVQRRGKQIAVVALARRLIGVLWAMWRDGTVYDAKHLAQQGTRGLRGAIQTIEQQTAALARAAKKDSTKHPTPRIATPRRSRKAPAANAA

SEQ ID NO: 507807 - protein, 430 aa, unidentified
MKFNTQNAKIEAITENTLVLGIDIGSETHYARAFDYRGIEYSKKPFKFSNTEAGFMSFKAWIQDMKEMHEKDKVVPGMEPTGHYWFNLGKFLQDNEMRPVLVNPHHVKKSKELDDNHPTKNDRKDPKVIAGLVREGRYMIPYLPEGVYADLRTASNIRFQLQAELTRIQNRISRWFNIYFPEYKTVYGKPDAKSGMMILKVAPLPEDILTLGIDGVNQIWRDAKMRAVGKARAKTLMEAAEHSVGSKEGAVSARMEIRMLLEDYESRNVRLQEVMALIEELVKQIPMAEKLLEIKGVGIKTVSGFLAEVGDISRFNNPKELQKLAGLALVENSSGKHKGETRISRRGRKRLRYLLFEVAMSLVSKNAEFKELHIYYTTRRINPLKKMQSLMAVAAKALRIFYAILTKGVAYDPKKMINDIKRPKIYLQAA

SEQ ID NO: 507808 - protein, 409 aa, unidentified
MMEVLYARCAGLDVHKRTVVACVRLAASTTVQQEVRTFGTATRDLLALADWLTSHGCTHVAMESTGVYWKPIWHVLDGQFALILANALQVRSVPGRKTDVNDAMWIADLLAHGLIRGSFVPPAPIHELRDLTRTRKQMVREVAQHTLRIQKVLEDANLKLTSVLSDVLGMSGRAMIEAIIRGEADPERLADLSQGRLKASRPAVVDALHGRVTAHHRFLLRLHLTHIDTLETTVREVEARVGDALIPFQAAVDRLMTIPAVRHTVARVIVAEIGLDMTRFPTAGHLVSWAGLCPRLDESAGKRRSTRTRPGAPWLKTALVQAAWVAARTRNTYLRAQFLRLKSRRGPKKAILAVAGSMLTAAYHILKNETTYAELGADYFERRNKTQVARRLVKRLESLGLTVEIKPAA

SEQ ID NO: 507809 - protein, 341 aa, unidentified
MRYIGLDVHKDNITACVLTSTGKPKFEKNFIKDSESWNLSELMEYGDKEGFCVMMESGTYAYQPFRFFSDQGVETHVVHAQALKLITQSDKKTDMKDAYTIARMLRLWKRGEIDLQMAFMPTREQCELKDICRYREEISRKIGDETRRIKSHMSRNCEHLPDEFGNFQTRKARDYVRSAFPADITLMRRMADLERLFEERDHVQKEVESRLPGSREVEILTTIPGIARQTAVQIMSMIVDIDRFEDAEKLCAYFGMVPRVRDSGGKEHHGRMTKSGDRMMRMVMERVTESHVRNCDSSVTRYYKRKCSEMGTKKALITASRKMLSVIFAMLKSGSDFRLAA

SEQ ID NO: 507810 - protein, 344 aa, unidentified
MNKVMAGIDLHSNNVVIGIMDIDGKRVTSSKLPCELKEVVKFLAPFKKRLERVAVESTYNWYWLVDGLQALEYPVVLANPAGMQQYSGIKHADDTNDAFFLAELLRLKILPTGHIYDAQLRPVRDLLRRRLTLVHHRTALMLSFKSLFTRTTGQEMTLKDLKQLEIKQAQELYAHPANQMIAGMQIKHIEQLSESIDKIEKVVMASARELPSYGRLTTLPGIWIILGMTITMEVGDIKRFASPGNFASYCRTVEAQRTSNSKKKGENNSKCGNKYLAWAFVEAANFARRYDAQCRKWYDRKAAKTSNVIATKALACKLAKAAWYVMSQGSDYDAQRMFGQPTSP

SEQ ID NO: 507811 - protein, 351 aa, unidentified
MTMLAEVAGAVVGGDTHRDTHALEMLAPNGTTIAALAISNDDDGFAEAIAWIAGNVPGPRVVAGLEGTRSYGIGLARAVAAAGLIVVEVQAPRRADRRHRGKSDPIDAHLAGLQVLRMPAGELPAPRADGDREALRILLSARRELTMARTRQINRLRALLPGGDDTDRDLSRGTLTGARLQAIARRRARASDTTEQSVRRAEARRLANAIRAAAAELAANKRHLAGLVRGLAPALLDKTGVGPVSAAQAIVSWSHRGRCRSDAAFAALAGASPLQASSGRTTRHRLNRGGDRQLNRALHDITLTRWRADPRTHDYIARRRAAGKNDTEIRRALKRYVARELYRALQASPAA

SEQ ID NO: 507812 - protein, 402 aa, unidentified
MRRCIGLDVHREFAQVAIWEDGVIWQAGRIQTTPEALRLFADSLCATDEVALEATGNTYAIARLLERQVGRVVVSNPQKTRAIAEAKVKTDKVDAAVLAGLLAANYLPSVWLPDDQTHALRRQVTRRAHIVRQRTRLKNQVQSILHRNLIGRCPAADLFGTKGRAWLATQDLPADEHQAVGALLRQLDFHGQELRIVDAELGRVGLERVEVRRLMTIPGVDATVALAIVAAVGDFHRFASPQRLVSYLGLNPRVRQSGGQPAQHGRITKQGRAHARGMLVEAAWAAAKTPGPLRAFYERVRARRGMQVAVVATARKLATLCWHLVVGEQDYAFQRPSLTDKKLRALQLRAGMPPRRGRKGTAAAYSLKEVRRRERALTEQAEVAYRQLVADWQPKRPATKPR

SEQ ID NO: 507813 - protein, 322 aa, unidentified
MIEETICVGVDVAKSTLDVAVTDSREARQFVNDDEGISQAVRYITGVKPVGIILEATGNLEIPLAAALQAGRLPVAVINPRQVRDFARATGALAKTDRIDARILALFGAQVKPEIRPLPDKKAREMGSLLTRRRQLVEMLTAEHNRLFQAGDDIRPSIETHIQWLEEALSDINDDLDRRIRLSPSWLEKVILLKSVPGVGKVVSSSLLIELPELGMLNRRKIAALVGVAPLNRDSGTMRGRRTVWGGRAKLRAVLYMAALVASRRNPIIAAFYQRLLDAGKMKKVALVACMRKLLTILNAMMRTMTIWQPESTLRCVSTEAS

SEQ ID NO: 507814 - protein, 342 aa, unidentified
MEQVNIIGLDLAKRTFQLHGSHSNGGVAFRKKVSRDKVLTFLSEQPRCVVAMEACGSAHHWGRAIRDVGHEVRLIPPVYVKPFVKRQKNDTADAEAIAEAASRPTMRFVAVKTEEQQARAMLFRTRDLLVRQRTQLINALRGHLAEFGVVAPQGPANLSPLSQAVEEPETSLPLLVVELGRIYLDQIETLSKKIAEFEKATAREAARATTTRRLLTMPGVGPITAMAIETFAPPMEVFKRGRDFAAWLGLVPRQHSTGGKQHLGKTSKMGQRDIRRLLIIGAMAVVRWAIRKGDPTATWLHRMLARKPRMLVAIALANKMARSIWAMLTKAEDYRVPVVATP

SEQ ID NO: 507815 - protein, 416 aa, unidentified
MEVLYPRCAGLDVHKDTVVACVRVAGEGKAQTEVRTFDTTTPGLLALADWLGEHSCTHVAMEATGVYWKPVWHVLSDGNLTLILANAAHVKNVPGRKTDVADATWLADLLAHGLIRPSFVPEPETQAMRALLRTRKQLVREQAGHIQRIQKTLEDANLKLASVLTNIMGLSGRAILDALINGQTDPDHLLTLVDRRVKAPPEKLRAALQGRLTDRHRFLLRLHLRQIDTLATAMAEIDQEVDHDLDPFRDAVRLLSSIPGVSELTAQVIVSEIGTDMSRFPTAGHLISWAGLCPRNDESAGKRRSNRLRKGAPWLKTTLVQCAWAGARKKASYLNAQFQRLRYRRGPKKAICAVAASILTAAYHMLRDGTFYRDLGPDHFQTASPQAQAQRLASKITKLGFICTITKGQTVKPVSV

SEQ ID NO: 507816 - protein, 343 aa, unidentified
MRTVTTIGFDIAKSVFQVHGVDAAGEVVVRRQLKRRQVIAFFRKLPACLVGIEACASSHYWSRELQALGHSVQLMPPAYVRPYVKRQKNDMADAEAICEAVTRANMRFVPTKTPEQQSGLMLHRTRHLFMRQQTSVINAIRAHLAEFGIVAPVGRRGVEELLRVVADCNDKRVPEVVRACLAALGSQLLSLKKQILEFDRMIMAWHRFDQTSKRLNCIPGVGPLLATALVASVADPKTFRSGRSFSAWIGLVPKQHSSGGREKLGSISKQGDRYLRGLFVAGALAVIRYAKIHGTKHRPWLTALLARRPTKVAAIALANKLARMAWAMMATGERYNYPASLKV

SEQ ID NO: 507817 - protein, 355 aa, unidentified
MTFVGLDLHKRYITACALDAGGAVLAEAKRLPASLDALGAFLAALPAPVTVAMEATLYWAWLTERLEAAGCTVQVAHAYQAKLIGQARSKTDPIDARKLAELLRTNLLPTIWVADAATRARRQLLRGRAFLVRQRTQLKNRIHGHLTAENQVCSTTDLYGKAGRTWLTSVALSPALREQVDVLLRLVDSLSQEIHALDQLVKRAARGNVVATQLQSLPGVGPFGALMLEAEIGPIARFRSSHELAAYAGLVPSTHSSGGRTTHGGVGPAGNRWLKWILIEIVQTLKLAPGPVGAYYQRLLRAKGKAKATVAAARKLCCYLYWMLKEGWSYAEWLRQHDGSPSSEVRPVQRMGAVA

SEQ ID NO: 507818 - protein, 407 aa, unidentified
MDVLHPKCAGLDVHQQTVVAGARTGAGKAVTYDVRTFGTTTAEVLALSDWLTAHGCTHVAMESSGVYWKPVWHVLEGHFELVLANARHIRNIPGRKSDVNDAPWIADLLAHGVIRGSFVPPEPIQELRDLTRTRKQLVREIAQHTLRIQKTLENANINLTAVLADVLGSSGRAILRALARGERDPERLAELASDRVKASRAELVAALHGRVPPHHRFMLTLHLTQIEALEAAVREVEARLGDALAPFRAALDRLITMPGVSETVARVIVAEIGFDMTRVPSAGHLVSWAGLCPRLHESAGKRLSNRTRSSNPWLKTTLVQAAWAAARKKDSYCRAQFLRIKSRRGPKKAVLAVAASMLTAAYYMLKHGVHYRDLGADHFDRRDKAKLAKRLIARLHDLGLTVEVRAA

SEQ ID NO: 507819 - protein, 350 aa, unidentified
MHYVGVDYHKRYSYLVVKDGEGRVERRGSVSNERDELQRFVEPYRPGRAVMEATRNWGVMYDWLEEALEDVVLAHPLKVRAIAEARIKTDKISADILCDLLRTNLLPEAYVPCRETREAKNVLRQRMFFVRMQTMIKGRIHTIIDRHPEIACQAPVVTDLFGATGTRWLRQVVLAGHDNQLLASSIELLQAVKEKIGESDKMVKELASNDHRVRLLKSIPGLGPFFSVVAANEIDNVARFSDEKKLCAYAGLVPSTHASGGKTFHGRITKTGNKWLRWAFVEAVPPAIKHDADLFAYYQRLKTKKGNNAAKVATARRLLTIAYRVLKQERLYERRKRMSAKCSPAALKSL

SEQ ID NO: 507820 - protein, 302 aa, unidentified
MGVDIAKSYLDAAIGNEKRRFANERVGYRELIKWIKRLKVPVQVICESSGGYERALVQALVGAQLKVSLVQANRVRQFARAAGILAKTDRIDAKVLCNFAEAMQPGTISASQLEQHHLRELESQRRHLTHLLVMEQNRAARVSDGCVRKLNRSLLKQIKKQIEQLDLFIKEHIEASPELSAKAQKLTAINGVGARTAALLLAQMPELGQLNRREVAALVGVAPFNRDSGKMRGKRAIYGGRRPVRHGLYMAALVAARHNPILRAFYLRLRAAGKPAKLALTATMRKLLIVLNSALKPDLNYA

SEQ ID NO: 507821 - protein, 399 aa, unidentified
MTKGVVAGIDWASEVHVACVLDGDGAVAGRFSFTHDAAAIRAMVRRLRSAGVAGVAIERGDGPVVEELLAAGLAVFVVPSRQIKGLRTRYGSAGNKDDRFDAYVLADTLRTDGHRWKPLRPDTGATRALRALCRSRKDLVETRVQVLAQLRANLDLAFPGAIGLFTKPASAISLAFLRRFPTAVRAAWLSPARLAAWLRSAGYSGGVSATMLHARLTAAAPGLAGAEGEARGQITLAFASMTAALNEQIRVLDAEIGRLFAAHPDQHIFASLPRSGIIRAATLLAEIGDCRQRFPTDDALAALAGACPSTRQSGKRSQAVFRWSCSKKLRAAVMDFANGSRMSDPWAAAIYAAATARGCRHPHAIRILARAWLRIIWRCWQDGTAFDPALHRGRHAAAA

SEQ ID NO: 507822 - protein, 482 aa, unidentified
MKPRQAEKDKEVIADSSCGHWNQMNRQQRRHMMRKMQSDDLSLEVVHPDAAGIDIGNESHYVAVPPTRDSQPVRRFGCTTAELKAMADWLKQCGIQTVAMQSTGVYWIAVYDILEAAGLDVYLVNARDTKNLPGRKSDVQESQWLMKLHTYGLLRNSFRPSQEIRTMRTYWRQRNDLVQSASRHIHRIQKALTQMNLQLANVLSDVSGLTGQAIINAILAGERNPHKLAAFRDPRVQASEEQIARSLEGNWQEDLLFVLKQEQDGYEFCQKQMAECDRQLEQYFQRREDRSQGASLPEEKRKTRLKKKNGNKPQFGLRADLFRMSGTDLTQIDSIDVVTAATIVSEVGWDMSKWETEDHFVSWLRLCPDNRISGNKIIGKGRLPTNNRVSIALRMAASTLRVSNTYLGAQFRRFRAKLDARVAVKAMAAKLARLVYRMMRYGMKYVDQGAKFYETQHRNLQVKHLKWRAAKLGYQLVQAPST

SEQ ID NO: 507823 - protein, 455 aa, unidentified
MLMKGGSQGFSIVHPHAAGIDIGATFHIVAVSPDCDPSPVRRFQSFTTDLHKLSKWLHEVGVTSVAMESTGVYWVPVFEILESDGFEVILVNAREVKQVPGRKTDYNDAQWLQKLHQFGLLKASFRPSERLASLRAYLRHRERLIEYSAAHIQHMQKALMQMNVQLHHVVSDITGATGMKIIRDMINGERCAATLAAHRDIRCKQSEETITAALTGNYRDEHVFALKQAVELWDFYQERIRECDAQIEKVMAKLNQNKTSSDVPIPKARHRTKQPHEPDFAVRSALYTLTGVDLTQINGFGPYTALRLIGECGDDMAKWPTEKHFVSWLSLSPGNKKSGGKILSNKTGRTKNRATTLLRIAAVNVGKTETALGAFYRRLAARVGKAKAVTATARKMAVLFYSIMKHGKEYVEPGAAYYETLYRNRVLANLKKRAKRLGYELVANPVPERLYAEVS

SEQ ID NO: 507824 - protein, 530 aa, unidentified
MTGNISTNRRKRRKSNSRSNACTRQNVQKPNGVIGPRVKAAGGAQFAIVCVDPAKHRSEWMMADYFGNLLIEPQTVEHQAADFKLAVERIRQTQQQHNIQDTIVVVERTGNYYLPPKRAFASAGFETRVVHPFATKQYRLPADPGIKTDATDLYAQHRAAVAGFGLCEFELESPYRELQLRARHRRNLVENATAIACQIREHLHLAMPGYANLFDRLFDHQTAMAIARRCDSPTKLIELGQAGLSQHLREKNIRHQIRTLDKVLAWAAQAAREQIQDGPMHHAIWTDLHQLYEHFQQQIAALERELAHGLVQTPYVRLLAIPGINAVSAAELAAEMGPISRYANANAITGRCGLYPSRYQSDQTDRDSGPIIRQTNRRLRCVLMRIADNLACHCAYYRGQADLDDAHGVDKRASRVKIAKRFSRLAFACVAGDEPMRHPCFQQPDSILEKLRQFHLTHQTPMDLLLADLEAAVGQLPYNTRNREAEIVANVLRQQADRRRGVTAIGDLLPAVLARLGITTTTENENGDRP

SEQ ID NO: 507825 - protein, 344 aa, unidentified
MQHYVGLDVSVKETSVCIVDKAGKVVREVKVATKPQAILAVLTEEALAIERIGLEAGPLSQWLYGALAEAGLPVICVETRHMKAALSAQINKSDRSDARGIAQMMRVGLYRSVHVKTRASQKVRMLLTSRQLLQAKALDIENELRGTLRNFGLKVGMVGAVKFEARICELVAEHPDLAAIVQPLLIARRVLREQFGVLHRQLLEIVRHDEVCCRLMTTPGVGPVVALTFRATVDVPSRFTSSKAVGAAFGLTPRRQQSGEIDRMGHISKCGDAMMREMLFEAALVLMTHSRKWSWLKAWGMKIARHRGMKRAIVAVARRLAVIMHRMWMDGTEFRWSREEAAAA

SEQ ID NO: 507826 - protein, 361 aa, unidentified
MHDSITWVGMDVHKESIVVAVVNGAGGTAARWETPNTAKGKERLAKRLSEFGTIRCAYEAGPCGYDLRRFLEAKGIPCDVIAPSLIPKKPGDRVKTDKKDAEKIARMHRMGELTAICVPTPAQEALRDLLRAREDANEDLVRRRHRLQKFLLRQGRRHEGKNWTRDHWRWIRAQKFEDRNSETVLSEYTAAIDQEIERIGRLDAQIEQESKNPEIAPSIARLMTLRGVKTLTAMTILSELIDLSRFPSARKLMDFVGLVPGEYSSGQKQWRGSITKSGNSHVRRVLVEAAWHYRHSPRKTGEAIRKRREGQPPEVIETARKAELRLYKKFTRMVMRGKKTTVAATAVARELAGFVWAIGRI

SEQ ID NO: 507827 - protein, 414 aa, unidentified
MFYVGIDIAKRSHVACVMREDNSLEIKPFEFSSTKSGFDKLRAQLTSLACDVSEVLIGMEATGLLFDNLYRFLRSLEYRVVLLNPYQSAKFREMDTMKRVKNDNIDAQMIAALIKSGRFSEGYVNDDQLQSLRTLYRHRASLDDQLKSIKRQTQTILTVVFPELEQVLCDPFNITGLALLEKYPTAKHYEYASEKRILKTFRGIKGNNFNEAKAKKLLTLAKESIYSGAAKEGYAATIRSNITLMRLLKEQMQSVEEAMLALFETKELSKEVQEEMSKLIDNLRTIPGVSDKTILALLAECGNIERFHNAKALVGYLGLYPTLEQSGDTHKNGRLAKRGARLAKKAIYLAAIAAIRHNKELRQIYMNYRSKGRAKKECIIITARKLLAIIYAIYTHNTPYNPNRVFVAQPNNKT

SEQ ID NO: 507828 - protein, 380 aa, unidentified
MPEAVIGLDVGKSSHWACVATRDGEVLLSTPVANREDDLDSLFGRFPDALVVVDQSRNIGALALARARAAGMSAAYLPGLAAHGAARLFAGDAKTDERDAMVIAKTALGIPDALLPVGDPGPTIAAARALAAQRNFLTCENTRNKNRLRSILLESCPAFEALVDLSDGCQLRLMASLGGAWSVADAGPRRAAALTRGAARGKIEALVRSTTSSTRPDASVVAAEDRAVKLLARRISENSAEIEAITAEISALLEGDDTYRCLLTVPGIGPKTASELAISIDIEDFPSHDRLASYCGLAPRNRQSGTSISSVTASRQGNKRLKNLLIFSCNCLTRTEGRWGDYYTRCRERGMSHGKALKALARKRLKVIYAVMRDRVPYAA

SEQ ID NO: 507829 - protein, 319 aa, unidentified
MMAQNDLVVVGIDVAKDKVDACIRALALRQTFPNTAQGHRKLVGWLRKHKVNKAVMEASGGYERVWAKVLREAGIEVRIVDPKRVRSFALSAGRLAKNDAIDAEMIAWFAATFGEAPSQAHDAAHEELRTLVKARLGLIDFRMRLVSQSEHAAPGLVQKAHAHLMKSLASEIAKLEAAISAKIKSTPDFAERAEIIESVPGLAETSSANLVAGMPELGQVSDGIAAALIGVAPYDDSGKRRGERHIKGGRRWVRNAIYMPCVGAATQNNPVLKAYYQRLLAKGKEPKVALVACMRKLIIILNTLIARRQKWDPSRYVVS

SEQ ID NO: 507830 - protein, 387 aa, unidentified
MPQPNDLSRSLVALDQNSTVIAVVELSQSSWLVAGVLPGIERQPRKKLEPSPERLLAVLHRWRDEAVKADRTITRIALAFEAGRDGFWLARWLEARGVEAHVIHPSSVAVSREHRRAKTDRLDTELLKRGFLGWLRGERGHCNMARVPTIAEEDAKRPNRERDCLVGERTRIVNRIKSTLARLGIRNFKPTLRKAADRLATVHTPEGMPLPPNTFAELQREIARLGFVVSQIREIEEARQRRLGQQHETGPHAMVRLLARIVGVGVETADMLVHEVLSRQMRDRRAVARYAGLTGSPDESGAQRREQGLARAGNARVRRGMIQLAWRFLMFQKDSALALWYRARTADSRIGTRKTMIVALARKLIIALWRLVTTGEALEGVVLRPAS

SEQ ID NO: 507831 - protein, 424 aa, unidentified
MEKALEDNRIAASTFCGIDWAEDHHDVAVVDGDGTMLARLRIGDHAAGFAQLLSLLAEHGDTAGQPIPIAIETPRGLLVACLRATGRKVFAINPMAVARYRERFSVSRKKSDAIDAAALANILRTDMHLHRPLPADSELAQAIMALARAQQDAVWDRTQAHNKLRSVLREYYPAILAAFADKRDGIMRPEARTLLAAAPTPAAAAKLTKAQLRALLTRAGRKRGIDAEAERLQAILRAEYLHQPELVERAYGQQALALLRHLDAACTNADELDAAVTASFLQHPDADIITSFPGLGPLNGARVLAELGDDRSRFTDARSVKAYAGSAPVTKASGKSLFVMTRKVKNQRLAAAGYVWAFCALTASPGARAHYDRRRQANDRHTAAQRNLFNRMIGMLYHCLQTRQCYDEQKAFPSHQTQPADAAA

SEQ ID NO: 507832 - protein, 379 aa, unidentified
MEAKRKDPLSIRHRCARVEMSSNHSQDRGSDMQVTTYGVDLAKQVFQVHWVDTDSGEVKRKMLTRGQMQAFFARRAAGVVAMEACGSAHHWGRALSALGHRVQLISAQFVRPFVKSNKTDAADAQAIWEAAQRPEMRFVALKSKQQQALMGLHRIRAQLVKQRTMQANQVRGLLYEFGVVVPKSWRALLAQAGPILADASRGELPDLIRGELQQQLLGVRELTGRIEQLQSSIGAYRAQDEQCRRIEAIPGVGPLSSTAIVASVGDARTFRSGREFAAFLGLVPRQSGTGGRVKLLGISKRGDPYLRTLLIHGARAVVNHSSRPGRTMPRWLRELLSRRPKNVVIVALANKIARTIWALLAHERTFDDRWGQAMSAPVL

SEQ ID NO: 507833 - protein, 335 aa, unidentified
MRYIGLDVHYSTSTYCVLDANGQELQCETVRGHWPRLLERLRTVAGPWTICFEATCGYGYLYRELSRLARRVVVAHPGQLRLIFRAKRKNDRIDARKLAKLLYLDEVPAAYVPSQDVQSWRELIEHRRHMMDRQTTCKNAIRSLLRSHGKVAPQGLWTKKGLAWLRQEEMPTTAARLKRDLLLDELNEAKRRVRTVTKALDEIGERHPAVLVLRTIPGVGIRTAETVVAYMDKAQRFLRSSQVGAYFGLVPCQDASAGVNRLGHITRQGPATARKYLVEAAWQGVYRSPTIRAYFERVRHGRPERRKIALVATAHYLLRCMHAMLVRNQPWHEAA

SEQ ID NO: 507834 - protein, 448 aa, unidentified
MRKPQVIDDQEHERVFDRVAAVDVAKRDGVVCTRLPHPSRPGGRQSAVWTVQATTGAVAELAGRLAQDGVQMVTLESTSDYWRVWYYVLEAAGLAVQLVSAHQARQLSGRPKTDKLDAMWLARLTENGLLRPSFVPPAPVRVLRHYARARTHLVQDRTRCWQRLEKLLEDALVKVSSVASKMTTLSVQDMIRAMISGERDPLVLAGLARGRMRARHAALAEALAGMFSDHHAEIAGLLLDQIAFLDTRVARLDVLVSEQLAGLPEAWGADADGTTGPGAGTGPDAPVLNAVARLDEVPGITPGLAASIIAETGLDMTRFPTAGHLVSWAGLCPRTLQSGTRTRHGRKPGNTYLRGYLGQAAAGAAGTATFIGERHARIARRRGPARAQVAVARSILVIIWHLLADPGARYADLGPAHYQHRIDKTRKARNHIRQLEALGYQVTITQAA

SEQ ID NO: 507835 - protein, 370 aa, unidentified
MSSITYIGLDVHTTNYTICSYNGYDGNYFGEVTVKPEYQQIEKYVRRLQKQYEPGHRFLCGYEAGYLGYSLFHELASVGIECVILAPSTMCDTKTNRQIKTDPRDARNIANCLAYGLYSAVHVPTEQDDAVKEYMRMRDSAAAEFKAIKQQILAFCVRHGKRFEGKSTWTKKHLDWLDKLDFGNPILQNAFWEYLRRYYHAQEMQDIYDTQIAEYAQMEEYRQKVSELRCLIGIETHTALALITEVSDFRRFGKADQFAAYLGLIPGEHSSAEKTNRLGITKTGNKHLRRLLVEAAQHYGRGAVGRKSVSLKKKQEGNRREVIEYADRCNTRLRRKFYRIASHSPRNVAKTAAARELACFVWGIMTEHIT

SEQ ID NO: 507836 - protein, 358 aa, unidentified
MNTPNSDTLRSPEFAAYVGLDWGDKNHALAWTAGASKTAPQTGTLVNSPEVLHAWLQELGQRLEGRPVALAVETSRGPLIHLFGAYPWLTVYPIHPMTSARYRSAFKPSGAKDDLPDALLLLELVRDLRHKLRPLQMPEAATRQLAALVELRRDLVDRRTQVLLQLMALLKSYFPQALELVGQDLTTGLALAFLRRWPDPLALKAARPATLKSFYYQHSVRSEALVTQRLALVQQLRPLTTDEAVLMPAHFHLAALLEELRTLAKHIDLVEQKSHTLFKAHSEAYLFRELPGAGKALQPRLLVAFGEDRSLYPDPGSLQKYGGLAPVVERSGRQAWVHWRWHAPRFLRQTFIEWAGQT

SEQ ID NO: 507837 - protein, 416 aa, unidentified
MSDKKSVELRVSVDVGYRRHSVAIGLPDGEVLEEFEIAHRPEGFEQFFSRIEKHQKVRDCEVAVAMEGFNGCARPLDAMVRRRGYRLYNINNLKLARFKEIFPGAAKSDRIDARKGLELFQLSDHLPLAKEVLQEVKGTPRENEVLKRLTRRRRRLVDERVRVISNLQTDLQAVCPGLLEITKNAGNQWFLNFLLSAATLPQLARLRPSTLLKISAVGRKYAVLIEDWQKRAHFSEEVEWVSEMIQEDAQRCLELDENIKALRAKIKEVAKDSKMAKILLSIPGFGTICTAELAGEIGTIERFSKEGSLALYLGMSTLDNSSGKHQGSKQPKHVNTRAKAAMMVALDRHRKYVPESQRYYEKKRSEGKKHNQAIRALGRHLSRIIYKMLTEEREYEMRPERGNTKSKVSPRSLIKT

SEQ ID NO: 507838 - protein, 386 aa, unidentified
MRQFNGSEQAAVDYSSTIIGALELSSKKWVLAVQLPGVDRHSRHVLDACGDGLLSFVARLKARCAAAGREITRVILTHEAGRDGFWLARFLARQGIEVHVMQSSSLPVDRRARRAKTDKIDVEMLLRTLMAWLRGEPRVCSMVPIPSEPDEEARRANREREDLTRERRSIVNKIDGILATLGVKGYKALRRDRREQLNGVRQPDGDPIPQKAKARIERLLDRLELVLKLIDQVESARDAVLKKDAPADEAEGMIRSLTALRSIGPDIATLLVREAFVRQFRNRRALAGYVGLGGTPFSSGGSEREQGIGKDGNRRVRATMVELAWTWLRWQPDSVLSAWFRARVGAKGGGRIRKIMIVALARKLLVALWRYVKDGVIPDGAKMKPA

SEQ ID NO: 507839 - protein, 405 aa, unidentified
MKVFIGVDPHKLSATIEVVDDRETVLATGRFGTDKAGYTAMRKVVARWPDRTWAVEGSNGAGRPLAQRLLADGERVVDVPAKLSARARQFDTGHNRKTDAHDAHAVAAVAVRTAGLRVLSYDVQLETLRMLVDRRQELTRTRIQTVNRLQRLLAELTPGKAKKDITTLQAKAILGSVRPRDLAGRTRRRLAAEQLAELVVVDKKIKALTKELKIMVLARGSTLMDLRGVGPVVAARTLADVGDVARFADRNRFASWTGTAPLDASSGEQIRHRLSRAGNRKVNHMLHIAATSQIRLDTPGRVYYRQKLAVGKTPMEAMRCLKRRISNAVFRQLVTDARTAQNTAATSFGTGPGGHCGATLQSSAVDLPPRIDTSDQPLPGPATATLRPSTLSRKTVTGKALEPAG

SEQ ID NO: 507840 - protein, 359 aa, unidentified
MSSMALSREDVIVGVDTHKNQHVAVVIDGLGGRLGELMFAANPAGYSSMVAWSGKFGAVARFGVEGTGSYGSGLARFLRRNGHTVLEVSRPPRKGERRLSGKSDSIDAEHAAREVLAGKARSTPKLADGAIEAIRLIKIARDTAVKAHSQAIITLKATLVTASDALRAELEPLTDFCLIQACAALQSQGDIADPGLAMRHVLRALARRWLDLHEEIKVHSSHLKKLTKAAAPELVAAFGIGPDIAAELLVTAGDNTDRIRSEAALAKLCGVCPIPASSGKTNGRYRLNRGGNRQANAALYRAVVVRMRWHPPTIAYVDRRTAEGLSKKDIIRCLKRYVAREIYRLLPAPSSLTTTASVD

SEQ ID NO: 507841 - protein, 371 aa, unidentified
MEHTRFVGLDIHKERISIAVAESGRSCAVEYLGEISNDPVAIGRLCDRLERPGKTLAFCYEAGPCGYGVHRQLISLGHRCDVVAPSLIPTRPGDRVKTNRRDATMLARLHRAGELTPVWVPDADHEAMRDLIRLRSVVRQIVSRARQHLQGFLLRHGRKHGRGTAWRMAYRRWLSTLAFEHPAQQIAFQDYVDAVMDAERRLQRVEKQISGLLPEWNLRPVVDALQAMRGIALITAVVLVAEVGDFTRFANPRQLMAYFGLIPGEQSSGETIRRGGITKTGNAHARRALVEGAWAYRMKARIGRHKVDRIEALPKVVRDIAWRAQLRLCTRYRRLSARGKTANVVNVAIAREMVGFIWSIACTVQSAPKTA

SEQ ID NO: 507842 - protein, 333 aa, unidentified
MVEGTVGSHHKEGSTKMMQISTIAAGIDVAKEYLDVAVHGSKQVWRVANTPEGFGGLVRLMRQHQVERIGLEASGGYERDVVEHLRAAGFTVIVLQPLQVRAYAVMKLRRAKTDRIDAQLIAAFTAEYAVVRDAPDPRITALAEHLTCLEQTEEDMVRLKVRLEHVRDPDMRLSWKADLARLKQRRARMIAKLVSTLRSHDDLAERYALVLSVDGIGPRTALALLIRMPELGRLSRGEAAALAGLAPFNNDSGKRVRQRSIAGGRTRLRTSLYAAALPAAFQWNAACKTLYARLREAGKPHKLALVACARKLILFANAVLARGTPWTKSAAAA

SEQ ID NO: 507843 - protein, 485 aa, unidentified
MKAQRAKAYRRSHRHQSGPIRPAASMPVVNPHAAGIDLGATEHWVCVPEDAVPEGQANVRAFGAFSADLDQLVEWLRACGIKTAAMEATGVYWVALVQKLEQAGIEVVLANARHLKHVPGRKSDVKDCQWIQQLHSYGLLNGSFRPTQDICALRSLLRHRQNLIQSCGREVQHMQKALQQMNVHLHHAVSDLVGATGLRILDAILGGERDPQQLVQLRDEQLCTKTTREELEKALAGDWREEHLFVLRQALATYRHLLNQVLECDAQIEQALVQVIIPQPAPLESPIPPNPKAKDGAPAQTKKKRFHRLKTGTSLKRDLTPELKRLCGVDLTQVIGLNVLSVLIIISEIGLDMSRWRSAKAFCAWLGLCPGNKISGGKVLDSRTAHVINRAAILLRTLAPRIGKTDTWLGIFHRRMRARLGPAGANTATARKLACLIYHLLKYKEDYIEVDHLVFLEKIRKQRIARLRKQAQELGMQLTELQQAA

SEQ ID NO: 507844 - protein, 370 aa, unidentified
MKHFITVVGMDVHKDSIEIVIAETTGTKEVRHYGKINGDMASLDKAVRKLKSTSRELHFVYEAGPCGYEIYRHLSSQGFTCVVVAPSKTPRRSGDRIKNDHRDAQTLARLYRAGELTPVYVPRQDDEAMRDLTRAREDAVKALRTAHQHLGAFLLRYGHRYPGKTSWTPAHMRWLSDVTMPHPAQQITLQEYIHTVNDGTLRVGRLVDQSLKLLPQWRLTPVVEALQALRGVAPIVAITTVSEIGDITRFENPRQFMAYLGLVPSEHSSGQSVKRGSITKTGNGHVRRVLVEAAHAYSYPARISRFLLKRQQGLPQPIRDIAWKAQVRLCCRFRRLMAQGKMKTKVVTAIARELSGFIWAIAREVHLQNV

SEQ ID NO: 507845 - protein, 459 aa, unidentified
MSKANKNKRKSLPQGGNEKKMERFGLLYPRSAGIDVGSMLMVVSYTDHRDMIRLQEFNSFTDSLYQLADLLKQEGVEVVAMEATGSYWTSLFSILEDRGLQVVVLNPSHYRNVAAQKTDVKDAQWLHQLLAHGLLRNSHIAPEPYRELRHYLHERNILQGQKSETLNRIQKHLTMMNIKFQHLISDIEGVAGMKLLRAISSGISEPEQLLQLIDFKKLKASPEDLLSSFKGDYRKHLINILSCNLKQYDFLKEQMLHYETYIEQTLNKLLPAVIQPDNRIAGKKGMVRKNEYHFNLKGYLQAIFGIDLTAVEGLDEIGLMTILSVTGTDMSKWPTAAHFASWLNLSPRPKISGGKVIGHEKRITNNPATQAFRLAANCLWQSKGPLGQQYRKIAASKGKAKAIKAVARKIAVIFYNMVLKQEAYDIKKVQQDVAQLEAKKIARLQKEAAKLGLIILKAA

SEQ ID NO: 507846 - protein, 307 aa, unidentified
MENYVGIDVSKYSFDVHHTIDKRDAHFDNTDIHIRSFAKLMAEIEPALIVMEATGGYERTLAAELHEAGVPLAVINPKRIRDFAKSVGQLAKTDTLDARIIARYAATVKPEAQSALDEISLEIKDLSARRKQLNAIRTAEICRTEHAQIESINRSIRAVIDTLEQEIESIGKRIDALVKQSDDLKRKAEFLRSAPGIGPKTVGMLIGELPEIGALNRRQIAALVGLAPINRDSGTLRGKRMTGFGRVSVRKQLYMPMLSAIQHNPVISKHYQHLLKNGKTKMVAIVACMRKLLTILNSMVKKNETWQ

SEQ ID NO: 507847 - protein, 427 aa, unidentified
MNVVDSIRLEEFRQFKKEIRGSREYELVGIDVAKEKHHVFFGTAMGKTLLKSLVVGNNLEGFEKLLTQAELLRVQAGLSKIAFGLEPTGDYHKALGEHLIKCAKLVVLVSGVALKRNRELLDGRWDKHDVKDAANVTDLMAQGKCMFYEYPDSNVRDLRVLLSLKMRLRKHEHGLRVRIRNHLVAQYFPELDRVWGQSETENLAIVRWCLDPSVVAGLDLEEFVRRVCTRDRGVRQHTRLERIWKTAVDSIGCQVPEAVEVECKVVVENLRRLREDIKEVSEEIHRICLRFPEYPFLLSIPGFGPEVSAQVLGAIGDPHRFEDAGEVLKMAGLDLGAHRSGKTAETAVPVISKRGKANLRYMLYQAALIASCPNRPLMKYFTKKLEGRQQERGIRTKMRVKLAAKLLVIAWTLMKKKEPFDPRRLRV

SEQ ID NO: 507848 - protein, 408 aa, unidentified
MTVVGIDVSKGKSMVAAMKPGGELVAAPYEVRHSDIELSRLALDVLCMEPDTRVVMEATGRYHEPVATLLHSEGIFVSILNPLLIKQSGAGSLRKVKSDPKDALKIAKYGLDNWSTLREYTPTEAIRQQLKLCERQCDLYSKNIVMLTNNLISLSDKTFPGVNELFSSPEKADGHLKWVDFYRTFWHCDCINRMSPDAFGERYKKWCKRKGYHFSAYAADALYAASCRLYTTLPRDNNARLLVTVAADQLIALRENQSKLEAEMLNLCKQLPEYETVMAMYGVGKSTGPHLMAELGDVRRFPHRSSIVAFAGVDPGVVGSGKMQLSSVATSKRGSPQLRKALFQVVSTYVKCKPENEAVYQFYVKKRNEGKPFYVCTTAAANKFLRIYYARVKECLNAAESAVQTEEG

SEQ ID NO: 507849 - protein, 385 aa, unidentified
MQRNDLSRSHIPFKQDSTLVSVVELSSKSWLLAGLVPGLKRQPRKTVSTDPDKLLAQLHRWREEAVKSGQTVDRIVVAFEAGRDGFWLARWLQARGIEVYVIHASSIPVPREHRRAKTDRLDSEMLMRALLGWLRGEPRHCHMAAIPTLAEEDAKRSSRERESLVGEQTRLTNRLQSILVQLGLPKVNITLRKTAKQLGDLRTPEGEPIPPHTLAELRRGLERLAVIKAQIKAIEQARLQRLKAKPEVGTHPMLLMLAKVLGLGIETADMLVHEVLSRKLRDHRAVARYAGLTGSPDESGTLRREQGLAKAGNARVRRGMLQLAWRWLLHQKDSDLAKWFRARTADGRKDTRKIMIVALARKLLIALWRYVNTGEVPGGVKLKQA

SEQ ID NO: 507850 - protein, 363 aa, unidentified
MKYSGIDLHSNNAVVAVIDDRDRVLYCKRLANDLQLIAAALEPYRDELQGVVVESTFNWYWLVDGLMAAGFAVHLANTAAIKQYEGLKYSGDEHDAVFLAHIFRLGLLPEGYIYPSHERGLRDLARKRMQLVQQRTLNILSIESLLARQLNLRINGEHVQRLDDAAVRALALPPHVERALMANLAVLHTLCAEIEALEVILHKEIKLRPQFDILKSAPGIGNILAATIMLETGTIARFASVGHFSSYCRCVDSKRISNGKKKGEGNVRNGNRYLAWAFVEAAAGALRCCPQARRFYDRKKSKRLPVVAMKALAHKLARAAYYMMREGKPFDLNTVEACQARRWRCIHASLAVFLVETHSHRPK

SEQ ID NO: 507851 - protein, 371 aa, unidentified
MPDVTSNAPADVRLWVALDVHKLSIVAATLPPAGGEPEVRQIETTRAAIRRFVERLGGPDGLAACYEAGPGGFELLRVLSELRVACDVVAPSLIPRRAGDRVKTDRRDAKKLVRLYRGGQLSFVEPPSPETEGLRDLMRCREDLRRARTAARHRVSKQLLRHGCIYRDGKSQWTKRHRMWVARQRLDDGLAHAALEQMLIHLDGLDRQIDQLDRDLEKIAGSQRWAPNVRILTRFRGISTRSALGLISEIGDFARFSHPRELSAWLGIVPSEYSSGQQRHRGHITKTGNDHARRLLVEAAWNYRHRPCRPDRGPQPDARAWQAQVRLYRRHKQLTEHGKRPTVANVAVARELAGFLWAAATDQPLTPETAG

SEQ ID NO: 507852 - protein, 411 aa, unidentified
MIKENYIYVGIDLHKETHTAVMIDCYNQKLGEITFPNRPADFPKLVAKVKKCNTDGKTIVFGLENAYGYGRALAVWLIDKGYLVKDVNTAISHRQAKHRGAMYRKSDSDDAEAIALATLNMLDKLPDAYPNDAYWSLGQLVHRRDNIMKQRTRLVNQLHEQLCIAYPSYKQFFNDISRPTALYFWEHYPSRKYLKGKSVEDLRAELVPVSHNKCSTRTCEKILDAIAGDKVKNNAYQDARDMVTLSIVSDLQHYDKQLAEVDKMLEQMYKMLGCTLTTIPGVNVITAVKILAEIGDIKRLSNANKLAQFAGIAPLHLSSSGKGKDLATKQGNRRLQATIYFLAIQMVHISSKGTPRNPVVRAYYEKRKAEGKTSQQALICISRRLISIIYGMLKSGTEYRMPVMENTGETV

SEQ ID NO: 507853 - protein, 510 aa, unidentified
MAVDFLVFREPVKKHGPGVASGLDIGDAVEAIPFRKVIFSAAPAPGFTHGGPTMQGKQKQARGRSAGQLLTLNEHAAGLDVGSTFHVVAVRSDQDEEPVRTFRSFSGDLHRMADWLGSVGIKTVAMESTGVYWIPVFEILEARGFEVLLVNARDVKNVPGRKTDVNDAQWLQQLHQHGLLRGSFRPRDEVVRLRAYLRHRERIVEYAASHVQHMQKALMQMNVQLHHVVSDITGVTGMRIIRAIVAGTRAPEELAQHRDVRCAASAETIRQALTGNYRPEHVFALKQALELWDVHQAKIAECDIEIETVLKSLNEKRAAPEAPLPPVRHAKARNEPKFDVRPALYTLLGTDLSQIHGFGPYTVLKLVAECGDDMTKWPTAKHFTSWLSLAPGNKISGGRVLSSHTRRSSNRAAVLLRIAAVNIGKTQTALGAFYRRLAARTGKAKAVTATARKLAVLFYRALRFGMTYADPGAEYYEERYKRRVIDSLQRRAHGLGFKLVENVAATEGVS

SEQ ID NO: 507854 - protein, 320 aa, unidentified
MQTPSAVLNIGADVAKKAIVVACSEGSFPVREVANRRTAVLTFLKSLPVGSRIGVESTGTYHEVFAEIAHQLGFLVFVLNPKDTRHYAKAVGLRGKTDRVDAQLIARMIAHEHTKLHAWIPPTPQQREIDRLIKRRATLISLREAVAMSLQELGGFADDLKALRTRFNQLIARIDLRVKALVEASPDRKQNLTRLCTITGVGPVVGTALVNTLERVPVKSADAFVAFTGLDPRPDDSGQHRGKRRLSKRGPAELRRLLYLAALSAVKTKPWRPLYEHYRARGLSSTAALVILARRIARTAWSIYTYKTEFDPTRLTNPLT

SEQ ID NO: 507855 - protein, 311 aa, unidentified
MYSVDWAVKKNFQICNVKTNKLVSISPSREAFDRFFDQLKDKHFFYLEESGGDTFKLMALKYGHRVFTILGKKVKEYREKLNLPENDENSAKVIGILVKVHPEEFHEYQKLDITTLKVSALFSEYYKIVEDRTRKKNQLHAFKHKLELLTPEKEVKKVINTRKSTIKSLDKEVSAIQKQLLKLLKESPLWVRYLKDIKGVGTVTAAGIIGSVRRFSRFPSKSSIRHFAGMIPKKGNYDYSRQLKQALYNFVQGIIKNKTPYWRELYDNIKVYYKKKHPDWKPGRVDAYAKKFVQTKFLYKLWIEGTKIESL

SEQ ID NO: 507856 - protein, 387 aa, unidentified
MTKVNDLSRSLAALDQDTTLIAVVELSSKSWLVAAAVPGIERHPLKKLDPDASALLKLIERWRGEAERRGRTIKRVVLAYEAGRDGFWLARWLKERDIEAYVIHPASVAVSRERKRAKTDRLDAAMLLRVLLGWLRGERGHCSMVAIPSMDEEDARRPSRERETLVGERARITNRIKGALVRFGIRSFNPLLRKAPQSLEKLQTAEGGPLPVNTLEEIKRDLARMAVVREQIAAIEKARVDRLKQAPKTGSNAMVQLLARVIGIGIETADMLVREVLSRTLRDRRAVGRYAGLTGSPDESGSRRREKGLTRAGNARVRRGLIQLAWRFLMFQKQSALTQWYRARTAGATPTQRKSLIVALARKLLIALWRLVTTGEVPHGVVLRPAI

SEQ ID NO: 507857 - protein, 318 aa, unidentified
MVTELKWIGIDVSQLRLDVHIHPGAEAFSAPNDAAGLKAIFKRLKQLEVAAIGLEASGGLERKAANALAGRGYAVHLLDPAQVKAYGKAMKQKAKTDTLDAAIIARYVKAAAEQGVLRPYRPDQVLAALAALLAVRRTLLDAVKLGKAQLGLAEEPLVKRIHKSRLAQTEAQLKQIDAEIRRQIEAEPELARRAEQLATIPGVGPVLTATLLADLKELGAISSREAASLTGVAPHARQSGKTERSGKCSGGRKAVRDVLYMATLSAIKAKKPHLYPFYKRLREAGKPFKVAIIAAARKFLTIINAIIRDNTVFRTSQT

SEQ ID NO: 507858 - protein, 337 aa, unidentified
MKQIKFFVGTDVSKGWLDMCIIVDDEILHRQRIDNKVAAIRKWLKQTQRQYGYLMENTLFSMEFTGIYNNHLLEVLHAAAANIWLIPAIEINASRGLQRSKNDQEDARLIAEYAAGNRKKIRLWNKPRIVLKQLACLLMMRDKLMLTKHQYETTFKESKGYSIKEEYQIIKGYSDPVLNTIHKELKKLEKQLAALIKGDENLKELNGYITSVDGVGIIISANTLVETNEFLDIKEGKKFSNHSGVVPHTDDSGKKIKKPRLSNKANKKLKKLLHLAAMSAVRMKGEMKNYYERKVAEGKNKMCVLNAIRNKIVLRIFACVNNKRKYEKNYVYSLPLP

SEQ ID NO: 507859 - protein, 346 aa, unidentified
MPPTDCLVTIGVDSHKDLHVAVALDQLGRVLATTRVPTTPRGFGQLERWAHRLGTIQRLGVEGTGSYAAGLARWLQGRGYQVVEVNRPNRQTRRRRGKSDPIDAEAAARATLAGDAVVRPKGADGVVEMLRVLRMARRSAMKARIQTIQQLDSLVVTAPDQLRARLRRLSLEQLVPVAAALRPGELVGPLAATKLALRELARRHQALSAEVARLDTEIVRLTATAAPRLLARGGVGPQVATALLIAAGDNPGRLRSDAAFSMLCGAAPIPASSGKVVRHRLNRGGDRQANNALWTIAVCRMSYDPRTIAYVRRRTQEGKSKLEIIRCLKRYIAREVHRDLKTALLT

SEQ ID NO: 507860 - protein, 412 aa, unidentified
MTVTNQFAAHVGLDWADKKHDVCIQFKNGERVFHVIEHTAEALDAWLTELHQKVKGRIGIALELKKGLVVYALQKYPFITVFPVHALSLARYRQAFSPSGAKDDPQDAELALELMLRYPQKIKAIEPNNADIRLLQQLVEQRRQLVEDKRRFVNRIINTLKQYYPQPLEWFSHRGSLLLCELIIRWPSLQQLKRARRETIRNFLNAKGGRAMALTEQRVVSIDNAIPLTTDSSVIEANALMATALATQIKVVSEIIKTYDERIEALFDTLPDAGLFKSLPGMGPCMGPRMLAALGDNRDRFNSAEEIQNYAGIAPVTERSGQKCWVHWRWQCAKFVRQTFVEWAAKMVNSSYWARLYYQGLREKGKSHQSAIRALAFKWIRIIYRCWKTRTQYDEAKYLLALEARHSPLLKP

SEQ ID NO: 507861 - protein, 405 aa, unidentified
MVRRGSGARGLTTGKRVRLVPGYTARRPVGRATGGSAGNETQRDFCLFDEAKQEVIGERRSLMELHAIGIDLGKTVFHLVGLDSSGAVVVRKRCSRTQLLAYTANTRVRLIGMEACSGSHFLGRALRAQGHDVRLMPAQYVKPYIKTNKSDYIDAEAIAEAVQRPTMRFVPIKTEEHLDLQAVHRVRERWVMRRTAVVNQIRGLLLERGLTLPKGRSHVDHALPEILTDPALRLSGSFRVLLGQLQMELEQLKARIDQMDAVIQQTARENEACQRLTAIPGVGPVTATALVAAIGNGAGFRRGKDLAAWVGMVPREYSTGGKQKLLGISKRGNAYLRRLFVQGARVVLQYRTKQTPGLSNWLSQLLARTHQNVVVVALANKLLRMAWAVLCKNETYRIPALASAP

SEQ ID NO: 507862 - protein, 372 aa, unidentified
MGAYDYTGKKVYMGIDVHKKTYACASICDGEIIKKDTMNANPTTLIKYIENQFKGAIVQTAYEAGFSGFHLHRELIKIGIDNKVVHPGAIEVASRDRVKTDKRDAKKIATQLAAGRLKCIYIPTLEQETKRSATRCRDSIVKLRNQIGQKIKSLLFTQGLIESTDRTVLGQRWLDKQLNNVKELNYPEGFYYTLKCYADQWTNFTKELTKIKKELMAMQTDKELALLMIYQSAPGIGELTALKLKDELSDMSQFSNEKQFFSYLGFTPTEHSSGEHIRQSHISRQGRPILRHMLVESAWIAIQKDPQLERVYQRLQKTRGGKRAIVGVARRLAGRLRSCVQRGVMYEIEFLQAEGTDVKTVSRDLVTPPVAL

SEQ ID NO: 507863 - protein, 368 aa, unidentified
MARLHAMIGDHLGEHADVGEVRIGIETDRGPWVRALVAAGYTVLAVNPLQAARHRDLLGVSGAKSDAADAHMLADMVRTGFHQLRPAAGDPDEAEAVKVVTRMHKTQIWERTRGVQRLRHALRDYFPAALEAFEDLDAPDALELLARAPDPASAAKLTLSQISASLKRARRDIPRKAAAIQASLRAEHLAQPEVVTAAYAASACALIAVLVTLNNQVTILQGQVEAHFGRHPDAEILLSQPGLGPVLGARVLAEFGDDHDRYASAKARKNYAATSPITRASGKKKTVTARFVHNDRLVDALMAQAFASLRASAGARAYYDQQRARGASYNAALRQLANRLVGILHGCLKTGTLYNEAAAWPQFQQQAA

SEQ ID NO: 507864 - protein, 377 aa, unidentified
MKAPSTRPAAVLGLDVGKSSHWACLIDRDGEVLASAPVRNREAELDALFASAPAGTLVVVDQFRNIGSLAVRRARAAGLGVAHLPGLAASRAAGLFAGEAKTDERDAAVIARTALGVPDSLSGVPGRGEALEAARALSSQRDHVVACATRDKNRLRAVLLESCPALEAAVDLSDRRWLELLAGFGGAWGIARSGAGGPRAEAAGEAAAASTAPPPALVEAENRQVMFLAARISEALDEAGALEAETAALLEGDETYACLLTVPGIGPRTAAQLAVSVDIGRFPDHDHLASYCGIAPRVRSSGTSVRSVRASRRGDARLKSLLIFSCNSLVRSSGRYGEYYRACRARGMGHGRALKAVARKRLRAIYAVMRDRVPYRE

SEQ ID NO: 507865 - protein, 363 aa, unidentified
MSVYVGIDVHRKRSQVAVVGEDGRVALNRNVVNGSQPMLGLLGGLPSGTPVAFEAAFGWGWLAGLLEDYGFEAHLVHPLRCKAIASARLKNDKVDAATLAQLLRADLLPEAWIAPPEVRALRALLRHRIQLVRLRTLLGNRIHAVAADHGYDRPAGYWSGPGRAWLASLDLPPAFRQVIGDDLALIDALAAPIAALDEQVHQRAKADPAVKVLTQLPGAGEFTALVILAETGDIARFGSARKLAAWAGLTPIVRSSDRTIRHGHISKQGSAWLRWALGQAAQTAKRSPEFAATYQAIAARRGKQIATTAIARKLLTRAWHLLTDAGLTGPQTSPLPRLSPGGAQAPGELAKVHEPAPPPRTSC

SEQ ID NO: 507866 - protein, 347 aa, unidentified
MNFYNNTHPYYCGIDLHARILYVCILDQEGNTCVHKEISADPEKLKQILEPYIGNIVVGVECMHCWYWVADFCNDIGVDFILGHALYMKAIHGGKAKNDRIDSFKIANLIRGGNFPLAYVYPKEMRATRDLLRRRMKIVRHGADLKAHVVNTTSQYNLPPNKVNLKNKDAREQLKSTFPERSVQKNIDLDMVILDCYAEQLSKVEWYIQQQAKQHKPNHLHLLKSVWGIGPILALTIIYEIGDIERFESVQKFASYSRLVKCKAESAGKTYGTQGNKIGNAHLKWAFSEAAVLYLRGNKKAQKYLLKLQKRMSKAKALSALAHKLGRCVYFMLKNETVFDENKFLKG

SEQ ID NO: 507867 - protein, 356 aa, unidentified
MREGMRLARGLDVFLGLDISKTSWHVTARSGGETVLSASFPPKREALNGLLSRLEGCRVHSAYETGPFGYGLHDWLRSRQVDSMVVSAAHVPGEIGNRVKTDRRDGLKLARTLEAGLLRPIFVPEARQRADRELVRQRHRVQRGRCAAMVRIKSFFLTYDIEVPEEAGVHWSGAFEAWLRGLRLGDLSLDRVLEELRGLYFDLDARVDGLTKELRQLARSPDYVSMVELLSTVPGIGWLTALTLVVEIVDFTRFPDGEALSSYAGLTPSEHSSGDRVRHGHITRQGNPVVRSVLVESSWILIGKDPEMRRFYDRIKVRRGGKRAIVAVARKLCHRLLAIAQSGQPYRVNFSHTKEK

SEQ ID NO: 507868 - protein, 341 aa, unidentified
MNQYIGLDVSLKDTSICVREDGNRVWRGKCPSDPKLLAEAIRKHAPEARRVVFETGPLSVWLYHELVSEGLPVICIDARHAKAGLDMARNKTDANDADGLAHLAEVGFYKEVRVKGYDSMLVRTLVTARAQMLKMQTQMSNQIRGLMKTFGLVVPKGAGRVFDGSVRSLLADNQALERIILPVLAAWHGVRARTAELSKQLMAAARQSKQCQILTSVPGVGVVTACAFVAAIEDPDNFAKSRSVGAWVGLTTRRYQSGEVDYDGHISRRGDSRLRGLLYEAATVILTRTAADSALRIWGLKLREKVGFKRAAVAVARKLAVIMHTMLKTGEFFDRSIPAAA

SEQ ID NO: 507869 - protein, 419 aa, unidentified
MNSSKTKKVKIINEKTMIAALDIGKGAHFAYFRGPNGKDIKPFSVYNFKKSFDTFWMRLCQFKTEQGLEEVVIGFESTGPYAEPLFHYLRKKPAMLVQINPMHSKRVKELTGNSPNKTDTKDPRVIADVISLGHALTLVVPEGAAAHLRRLTQARERAIKSRTAMVNQLQHLLFVIFPEFLKIFKKISTKSAMYLIKNHPSPESITSAGLESLTEILRKVSRYQLTHGRIKELFEAAKRSIGIDEGKESILMEIEHLASNIAHERCFIDKLEKQMAKHLDQIPYTHSILSIKGVGLITVAGLIGEVGDFKKFHTISEMMKLAGLDLFEVSSGKHRGKRRISKRGRSLMRKLLYFAAINVVKSHGIMHEQYQEMLNRGMVKMKALVAISRKLLGLIFALARDNTVYVENYSNIHHLKLAA

SEQ ID NO: 507870 - protein, 486 aa, unidentified
MKTKPFQSIVERSEGPIRPAASLPVINPHAAGIDIGASEHYVCVPADAVSAGQSPVRRFGAFTQDLDQLVEWLRSCGVRSAAMESTGVYWVALYEKLEAAGITPVLVNARHLGQVPGRKSDVKDCQWLQQLHSYGLLNGSFRPGPEFCRLRTLLRYRGNLVEQKTRQVQQMQSSLQQMNVLLHHVVSDLDGDTGFRIVDAILAGERNPARLVQLRDYRIKRSTEAQMEAALQGRWQDEHLLILSQARQAYQFFEQQMSQCDASIERVLKTLPSAEPSPVPAPTPQPEVAGAASQSAPVEAESTKKKRKRKAGGNAPKQDFLPELIRICGSDLSKVGGLNMLSILILISELGTDMSKWRSEKAFCSWLGLAPGNKISGGRVLSSRTPFVINRISTLLRTLAINIGRTDTWLGSHHRRMRARLGPAAAATATAHKLACVIYHLLKTREPYVDINRLVYEEKIRKHRLAKLRKQAEELGLQIVEIQKAA

SEQ ID NO: 507871 - protein, 317 aa, unidentified
MSETLFVGVDVAKDSLAVASAPAGLTLSVPNSLEGRRDLIKALKNHSVAIVVLEATGGYERPVALDLLEAGFNTVVANPRQVRDFARGLGELAKTDPIDAQVLARFAQVVRPKPRPAKDPEEADLAELVSRRRQLVNTLTQESNRLAMARLRDVRRSIKRHVRMLEQEIARLDDAIAQLIRADETLSRKDEILRSTPGVGPQTSAMLLSHLPELGSLNRQQVAALAGVAPWDFKSGRWTDKSSIWGGRAEVRSALFMAAVAARQFNPVIRAFAQRLEAQGKAFKIVITACMRKLLVILNSMLRSDSQWRTSNAQKKS

SEQ ID NO: 507872 - protein, 335 aa, unidentified
MKKASVGIDVSKDDFHACLKIRFDTGKTKIAATRSFRSSDKGFGEFLQWVGKNNKEKHPLTFIMEATGVYYENLAYFLHFHGQKTAVVLPNKMKNYFKSLNIKTKTDKVDSRIIALYGIERSVDLWEPMSENFKNLRDLCRELLSMKKELQRAKNQLHAIKYAHNKSPEIKKLKESQISFFEKSIQKLRKTIEKMVKNDTPLEKKIQKIVTIPGMGFETAVILASETNGFLMFENIRQIVSYSGLDVSHNESGNFKGRSKISKKGNSKIRQALYMPALSATSANEPIKALYQRIIEKNPKTKRVGVVAAMRKLLVLAFSLWKKDEVYDKAYVWNA

SEQ ID NO: 507873 - protein, 399 aa, unidentified
MKNRQILRQNIGIDVGMFHFYVRHTIMDIEGNIKHSKAVKFSNKASGFKTFLKWAKKISYPDLPLRFTMEATGVYYEGLAYFLYEQGEHISVLLPNMAKKFAESLNIKSKTDKIDARTLGQLGVERNLPKWKLGSKIYRDLKKLSRERQRPIKQRTAVKNRLHSEEHSGDPLKIITKHHKEQIEFLNRQIEKIEKTMKEMIARDHFLSEKFKKITTIPGVSFITAVTIVAETQGFENFRSLKQLWSYAGYDVRQRQSGKFRGRTRISKKGNKHIRRAMYMPVITLIQHSQTYRKFFSHLKKRKEKGMIALTAVQRKLLGLIYTLWKNDEEFIDNYEEIKQDKKVKQEKHVQNGIDDNKEKSSGSQSPTTQDRQSFQKETCLPSAYTKVITLKNTTMKIT

SEQ ID NO: 507874 - protein, 392 aa, unidentified
MIYAGVDIAKMDHVIGAVDETGAEVARPMPFKNSEAGFDRCVAWLESVAESEDGVFVGMEATGHYWMACFAYLTAAGYRVCVVNPMRVRAMRSLKGMPGVKNDRVDAWLIAETLRQGDYDETRLATDEVQALKQLTRYHQGLKQELAVVKTQAICVLDAYFPEYAGLFSDMFGSASLKVLAECPTPSEVERKRAATIAKLLSEGSRGRFGEAKAAQVKAAAKSSVGIRLGEDAASFQLKTMVSQIEFLNRTIAKVEREVAALLEGIEPNITTIPGVSTTTGAQIVAEIGDVRRFGSAASIVKYAGLNSGVDESGKFSAQGVPITKHGSPYLRRSLWLAANRARQHDDRLREFYEKKRREGKPHRVAVTAVARKLCHIVYAVMRDGEPYDPAK

SEQ ID NO: 507875 - protein, 343 aa, unidentified
MKIYALGIDLGKTVFHLVGLDASGQVVVRKRCSRRQLLAFTANLEVQLIGMEACGGAHFLGWALRGQGHEVRLMPAQYVKPYVKTNKNDYIDAEAIAEAVQRPRMRFVPIKTEEQLDLQALHRVRERWVMRRTAVVNQIRSLLLERGLTLPKGRRHLHEQLPRILEDAELNLSGSFRVLLAQLKLELEQLAGRIEQMDRVIQKTAKENEDCQRLTEIPGVGPVTATALIGAIGNGSAFGKGRALSAWMGIVPGEHSSGGKQKLLGISKRGNKYLRRLFVQGARSVLQQRQKQAPGLRDWLAQLLARTHQNVVVVALANKLVRMAWAVLCKNECYRAPVLAVTT

SEQ ID NO: 507876 - protein, 338 aa, unidentified
MAPRQPCPRNPNGHQGQQARIQRNRVMDKALTFVGIDVSKRRLDIHSRPSGESSTFGYDDESVAALIERLVAVAPALIVLEATGGMEVRLAAALAAAGLPVAIVNPRQVRAFARAMGQLAKTDRLDAAVIAHFAEAVRPPVRPLPDEATRHLGALVARRRQLLEMLVAERNRRHAADPVLHERIDAHLRWLEEALAEIEQDLDGAVQESSIWQAKEELLRSVPGIGQVSARTLLAELPELGSLTRRQAAALVGVAPFSRDSGKMRGRRTVWGGRARLRACLYMAAVAAARGSNPVIAGFYKRLRLAGKPAKLALTACMRKLVVTLNAMLRTNTAWKQA

SEQ ID NO: 507877 - protein, 599 aa, unidentified
MLPLHAPAPQSPAANPSQRVGVGIDTSRYGHYAVFLRHDLQPAADELAFAESAVGYQHLRQRLERIARQHPRVHFDIRLDAAGQYADNLLHFLHSLTSASGSNLSAGTTVAISCGDPQRNKNYRAALFGNNKSDPVEARAAARFALSEHPASDRQLSLEFRTLRQVAGRLHAAVRQRTRAINQFHHLLALTFPELALLLKDISVGWVLELVQRYPTARLLAQATSADLAAIPYLPHGQIDTLLQHARSSVASLDGPTLEELVRDQVRQLRDVRARQRRLENTLVAAYRRLPVPNYLDTIDGIGAVTASILTAFIVDIERFATPGKLVAYFGVRPIEIGSGIDRNGQPRGPRRYVMSQRGNDLVRRYLWMAALAAVRFNPAVRALYRRVVAKNPQRKSVAIGHGMRKLLHLVFAVWHGGRPFDPNHYPWDKPVEKRDNVVSLVDAAVLSDNALSQSEQAAGLTQTAEPAQSEVAAACADTVATATPNGQDAALDFAHLKRHLSMAQLFAHLGLTARLRGTGPQRRCACPIHRGDGRGRTMSVNLDANVFQCFEATCGAKGDVIDLWAALHALSLRDAALDLVQTFDLEPTPRTGTGKRKG

SEQ ID NO: 507878 - protein, 310 aa, unidentified
MDGIFVGIDVSKDRLDVHVRPHGEAFAVSRDGKGLEQLVDRLRTLAPMLIAVEATGGFETIVAAMLAGAALPLVVVNPAQVRHFAQAVGKRAKTDPLDAAMIARFIEAVKPPLRAVPDAQARLLGELVARRRQIIEMIVAERQREKRVENSRVRKSITRTIKTLEKELPEIDGDIDTMVRGSPAWREKEDLLVSFPGVSNTLARTLLAEVPELGTLSRREIASLAGLAPFTRQSGCWKGKSMIGGGRAALRAALYMAALSAIRCNQPLKTFYQRLLSIGKPKMAALIAVARKIITILNAMIRDRKQWQPA

SEQ ID NO: 507879 - protein, 373 aa, unidentified
MDEDRAVCVGLDTHKAKVAVAVAEPGRSGEVRFRGEIANRPEAVRQLIEQLAEKHGQLRVCYEAGPCGYGLYRQITALGHDCTVVAPSLVPRKPGDRVKTNRRDALTLVRLLRAGELTAVWVPDPTHEAMRDLVRARTAAMEAVRRARQQLQGAPAAPRPGLRRPQGVVARPPTLAGRAALRAPRPADRAAGAARRDRRGRTSPRPLGRADPGAGAALVAGAGGRGLAGAMRGVAFLSAVVLAAEVGDFRRFATPRQLMAWLGLVPSERSSGSKVERGGITKAGNGRARRVLVEGAWSYRFPARVTGELRARLEGVPEAVRTIAWKAQLRLCARYRRLVAAGKNANLVTAAVAREMAAFAWAIACQVRPAAAA

SEQ ID NO: 507880 - protein, 397 aa, unidentified
MEALLVGIDVGCRRHRVAVGRPDGKLIDQFDLEHKPASFSSFFTRIEKQAAQLGLPVSVAMEGYGGWARPLDEMVLGKGWKLLNVNNLKLARFKEIFPAPAKTDAIDARKIVELMRLRPLLPQAKEILNEVIPAPQANHDMKLLTRRRRQLVDERSMVINRMHSDLQAIAPGLLEITGSVDNQWFLNLLTARDSFDQLVRMHRSSIQKIKGVGQKYAALIRQWQQSALLSSDVLIMGDMVIEDAKRVLDLTGKIKRLESRLSALVPQSRLARTIESITGFGLVCACEMAGEIGAIERFSSESALARYIGMAPLDNSSGTYTGAKGGKQVNRRAKAAMMTAVARHYWHTPQSKAYYERKRAEGKRHNQAVRSLGRHISRVIWSLMKNDNLYEERKKTD

SEQ ID NO: 507881 - protein, 343 aa, unidentified
MKINRVGVDLAKNVFQLHGVDRKGKALWKRRLTRGKWLAVLCDTVEPGTEIGMEACAGAHHWARQLIQKGYVVKIIPPQFVKPFIKGNKNDANDATAICEAMGRPNMYPVRVKTVGQQDLQAMHRIRDEIKGHRVAKANQIRGLVTEYGLVAPQQLPSLRRAIPGWLEEADNGLTFLFRQLLQGLWGDLYALDQRMTELDKQIAVIAQEDPTARRLQQLRGVGPLIATALVATVGDARQYRKGRDMAAALGLTPRQHSSGGKDRLLGISKRGDAYLRCLLVHGARSAVRTAKDKDDRLSRWITNLQARRHSNVVAVAMANKIARMAWAMMTKGTDYDPDFTAC

SEQ ID NO: 507882 - protein, 369 aa, unidentified
MEKSITYVGLDVHKNTIDVALADGGRKDEVRHYGTITSDMGSLDKLVRKLMSQGRTPQFVYEAGPCGYEIYRHLTRQGYECVVAAPSLIPRKSGDRIKNDRRDSMMLARLHRAGELTPVYVPHSEDEAMRDLCRAREDAKGAERKARQQLNAFLLRNGFRYTGRSRWSLAHWRWISDIKMAHTAQQFTLQEYVDSVRSGTERVERITGQIRELVGEWRLGPVVEALQALRGVSLVVAVTVVAELGDLTRFDHPGKVMAYLGLIPSEHSSGENTKRGGITKTGNGHARRMLTEAAWSYRLPARVSRRLRDRQQGLPEKVWEIAWKAQVRLCSRYRRLVAKGKRAQVAITAVARELAGFIWAIARAVEIAA

SEQ ID NO: 507883 - protein, 455 aa, unidentified
MYLPDWKWIPIRKELLLMSNKVIFNLDDLFISVGIDVGADFSWMSIALPNQQFVGKPYKILHSSIDSLTTAVSKIKEAEELYSLESRIFLESTGIYHYPLFCYLRDKGFNCSVINPIITKNSTNINIRKVHNDRFDSKKAALVGLKPDLKVSLMPSDLALNCRNLCREYYDLMDNRGAYVNKLQGELRMAFPQYLGIFSKVTINTSLTLLETYTSPSAFLEADKQEIIDIIKSTARFGLTYAQNKYNAIIQAATDANQFGYIIDSNIKRIRLYISFIRKYDEEINNILESLHELVDANEDADFVKQIHLIETFKGAGFLSAVSIMGEIGDFSAFSKPKQLFAYFGLDPAVKQSGKFEGTKVQMSKRGSAIARRVIHTLTLQSISISRNGEAKNPVLREYYLKKCDSKPKLVAMGAVSHKVCNMIFAILRDNKSFEIITPQEHIKQYNASKCDMAA

SEQ ID NO: 507884 - protein, 338 aa, unidentified
MAIVMGLDQHRAQIAAEWIDTDSGELGRGRISPALRGDVRRFFERFAGQRLEVALEATTGWRFVVEELRAIGAEVHLAEPAETAARRGNKKRAKTDRADARHLRELLMIGRLPESWIPPDHLLDLRAQVRLRHTLVDQRGEWQQRIQAVLYHHGFPQRNGLLTGENRAWLGGLSLPESAREQVAVALGVVDALDAQSAPITRELRLYARRQPGCRALMKHYGIGELTAVTILAELGDARRFSSSRHAVRYAGLDITVYQSDQRRAAGHLSRQGPPALRWALFEAAQAARRPGSPDRSYYDQAAERLGGNRACLALARKLLKRSYHTLRELGDEALQPA

SEQ ID NO: 507885 - protein, 353 aa, unidentified
MDNGSRYVGLDVHRDTISVAVRDSRGKLMLERVIPTSAAAVLELLELLRGKLHVAFEEGTSAQWLAGLLQPRVAQVLVCDPRKNDRRGSKNDRIDARELADLLRCGRLWPVFHQDCGLTALQQLARTYLVLTKDQTRVMNRIKALYRSWAISCAGKSCYSPRQREAWLAQLPNSAVRGRAQIYYQQMDSLQALRQQVRTQLLREGRKHPALRLLCQIPYIGPMRATLLIVFIQSPHRFRTKRQLWAYCGLGIETHDSGEYRFRQGQLERKRQPTVRGLNRNHHHLLKYVLKSVAARCCSGSGPVHKFAQNLLDQGMRPEMVRLTVARKIAAIILVLWKKGVSFDAHYLKSQAA

SEQ ID NO: 507886 - protein, 317 aa, unidentified
MERGHRSMKVAGIDVGKRRLDAAVHGVSDELQVENGPRGFSELIAWLHAREVGRVGLEATGGYERAVRAALESAGFEVVLHQPIEVRLFARLKRRLAKNDRLDAQLIAAATAQVDTVKAAQDPRLRDLSERLTAYEQISDQAAELKTFLESVSLKDVAAAIRAQIRSLERLKARLAAEVLRRIKAEPDLLARFRLLLSLPGVGPVVAATLVVRMPELGHMHRGQAAAHVGVAPFDRDSGQMKGMRFIAGGRRRPRRMLYLAASAAKRWDPNFKGFAERLLARGKPKMVVVVAVMRKLIEAANLVLARGQPWVRNPAT

SEQ ID NO: 507887 - protein, 453 aa, unidentified
MVVVFVRGADQAEFVSRLRGVSGERVLLVPIDVGKRSAMSLVANQLGEVIADPFEFLIDRPGVDALLGRVTDAERAADAVVVRFGIEAAGHYHRTLMTALQAEPVEVVELHPGAVHKARAEMGQRRLKSDLRDLAAMVELMARGAGRTSRWGDGPLAIQAVWSTHRRRKVKARVTMSMQLVSQLDLVFPGLGDCFKDVLRAKGGHTILHHCPDPVRVARMGPEGLRALMKHRGVRMARSKAALIVATAQRALLVPNAERKARMRVLQADLAIYDKICAEIDRAEAELATVINNTPAAVLLSLPGVGIARASAYGAALGDPWRFASADTAWRYSGLVPVEHNSAGTKRPGLRISREGSVALREAIVEIGKGLSDHHPEFKAYKRRKVASGKKKTVAAVAVAHRAHRLAFAMMRTQTLFDPDKWHQSVVDGSVTAAVGDRHDVTRPPVSTMTGAG

SEQ ID NO: 507888 - protein, 344 aa, unidentified
MDHFAGLDVSVKETSICIVDDAGKIVREVKVASEPEALLAVLKNLAYHFKRIGLEAGPLSQWLYSVLAEAGLPVICVETRHMRAMLKAQINKTDRNDARGIAQMMRAGLYRPVHVKTLRSQKLRMLLTHRKLLQSKAIAIENDLRATLRNFGLKVGMIGTVKFETRIRELVENLPDLAVLVEPLLIVRRVVREQLGILHRRLLAIVRDDEVCRRLMTTPGVGPVVALTYRATVDVPARFRKSKAVGAVFGLTCAKYQSGEVDRNGRISRCGDEMMRVMLYEAAQSMLRSKKWSWLKAWAMQIARRRGMKKAIVALARRLAVIMHRIWVDGTEFRWTRERATAAA

SEQ ID NO: 507889 - protein, 427 aa, unidentified
MPYRIAGIDVHKKMLAVVVADVEVEGDYHFERLKVGTSPAQLRALADWLVEREVDEVVMESTAQYWRPVWEALELHWRPKRRTREGASPICGTLHLAQAQSNRGAGGRKKDFPDAERLVKRLVAQELTLSFVPDAEQRLWRTVMRRKYQITRNRVQLHSRLESLLEEAHIKLSSLVSDLLGTSARRMLQALADGETDPATVASLADQRLRATAAQLSDALSAGMTLHPVYRRLLKLTLEELRLIEEHLGQLDQQMADLLAEHHEAVQRLAEVPGLGVDSAQQIIAEVGATAATFPSPKHLASWMGACPGTEESAGKNYSHRCPKGNRQMRRVLNQAANAAVKAKGTIFAIVYRRLVPRLGHAQAIGAIAHRLCRLIWKILHQSIRYEERGPAVSEEAKKVRARKMIRELRSLGYHVELLSAPSGSPA

SEQ ID NO: 507890 - protein, 418 aa, unidentified
MLVAGIDIGAESHHVAVVDRAEAVVVKATAFAENAAGYQELFALLARAGARGGADLPLAAASAEQERTLVVMEATGHYWQNLFAALVAQGYAVALVNPLRTHRFAGEELARTKTDSIDCLQLARFGAQKRPAVTCLPEAAVGELRELVRLRARLMQDVVDRVNQLHRLVDLGFPEFTRYLKNLNTQLATAILRQYPTAAAFRGLSYKRLARLSYDGRHRVGEELARQLIAAAAVSVGSQHTTAHQTGVRYACEDLETLRQRLKRLDGDITAGLQQHQVGKLLTTIAGIGDNTAAMLIAELGDPARFHSAASLAAYVGLCPGHRHSGKHQPKSSSLTPIGNRRIRQALWMPTLSAATCSNPWLMAFYRRLIERGKPHKLALIAAMRKLLAAIYSVAKHRRPFVPFLHSQPLNNEVPAPL

SEQ ID NO: 507891 - protein, 339 aa, unidentified
MKKRYMGVDLHRNCFTVYTRQEDGSGESREWSIHHLKAFAKTLKASDEVAVEATGNVRMFCTALKERGCRVVVVNPHQFEVISRSVKKTDEHDAQVLAEFLSKGMLPEVRMKDELHARVASLAQTRDKLVKLRTTLKNKVNNLLAARGILLRKESLASEKGLAQVLANPVSELERVELEVLVGEIRHLNESIEKLEGLLREQGPKLPGWRNLTSIKGIGDTSASILLSTIGNIEDFADEGKLAAYFGIVPRVSNSNETKRSGRITKQGCKLGRTALVQCALIAARYSPYLQKYYRRIATSRGTGKAIIALARKFLGIIYKTLKNNWVFEDFPSFKLLES

SEQ ID NO: 507892 - protein, 370 aa, unidentified
MKEFSKYVGLDVHKETIAVSVAEAKGGEVRYFGEIANTPEAIEKLVKQLRKGDAELSFCYESGPCGYGIYRQLTDLGWDCKVVATSLIPKKAGDRVKTDRRDSLMLARLLRAGELTAVWVPDGLQEALRDLTRAREDMKHLQRQAKQRLLAFLLRHGKCYSGKSNWTQAHFRWFETVKFEQPIQQIVLQEYIDTVKACGKRVDSMDHQIEQSAQASATWPVIEALMALRGVSLLTATTVVAEIGDLQRFATAPQLMAYLGLVPSEHSSGGSVRRGGITKTGNSHVRRVLVESAWTYRHAARKTAILQRRAEQTSEVVQEIAWNAQKRLCGRYQSLEGRGKLKVQVCTAIARELVGFIWAVGQAVPAPASN

SEQ ID NO: 507893 - protein, 361 aa, unidentified
MVEATRWVGLDVHAAQTTVAVLDKDSGELTRAKLRGSPERVAVEFLAGFEGRVIAVYEAGPTGMKLARVARERGIDMRVCAPGLIPRKPTDRIKTDARDAERLVRQLAAGGLSFVRVPSEEEEALRDLVRAREDARQDLSRARHRLSKMLLRRGLRYETGSTWTDRHIDWIVRLRFDDLASRMVVGEYVNAVQQLHRRRKDLEATIEELLLSAPFAQTAYRLRCFRGLATLSAVGLCCEVGDFQRFAKPSQLAAFLGIVPAEYTTDSKRRLGAITKAGSSHARRLLVEAAWHYRRLPATGTTLARRQEGIDPRVVAVAWRAQVRLHKRYAQMKARNKPAGVITIANARELACFCWEAATLN

SEQ ID NO: 507894 - protein, 417 aa, unidentified
MKDDSNASPIRYIALDIHKYYSVVAGVNRDGEEILPPCRVEHMNLEEWLGKHLLASDRVVIESTTNAWHVYDLLEPLVAEVLVANPIKVKQIACARVKTDNKDTLILARLLAANLVPTVWVPPQPVRELRQFVSHRRRLANMHTQVVNRMHSVAHRHHLNHPKGKDFQPKNTAWQQDASLSQLEKLQLELDMATRAHLEKQIEQMTRELGRMSHKEPWASDMLYLMQIPGCGVVTGMTIMAAIGDITRFENPKALASYSGLTPGLEQSGVKLRGKGITKEGRRELRWALVEVAWRAVRADPHWKRLFEELKKRMHPNQAIVTIAHHLLVVMWHVLTKREPYRHYSPERIAYKYLTWSWALDEEQRGGMTRPQFARYYLMRLGIGDELKRVALNPEFPYRLASVEEVLAIRPELLRSE

SEQ ID NO: 507895 - protein, 323 aa, unidentified
MPSSIGIDVSKNKFDVALITAQGKYRCKVFDNDASGFRAFRDWIKAHEPEGQAKACMEATGVYHEALANFLFDSQVTVSVVNPLRVKRFAESEGLRNKTDEGDAKALARFVAKNDLEAWEAPSKSVRELQALAVRLEALQTMRQAELNRLDIAHPSVRSSIEAMVAALDKEIEAVRSLIRKTIDDDPDLKQRNDLLDTIPGLGVATLPSLLAYIGRPERFKTVKALIAYAGLTPAIRQSGTSLDKRKGLHPAGHRDLRKALFYPAMAAGRFNPIVKAFWQRLKAQNKPGKVIVVACMHKLLAIAYGVLKSRQPFNPDLALKGA

SEQ ID NO: 507896 - protein, 452 aa, unidentified
MEHESISMEVVNPHAAGIDVGSRSHWVAVGQSQQDVKEYGVFNEDLFALSDWLKEKKVKTIAMESTGTYWQNLYAVLTAKGFHVILCNGKFTKNIKGKKSDVMDCQWIQKLHTLGLLTSSFLPDEKTEQLRTYCRHRSNLLHAAASTSKKMQKYLRLLNLRLDVVVNDICGLTGLLIIRAICDGESNPKKLGALRHGNCRKSEEEIARALQSNGRSDYLFALKQELETYDHLQTKIEQCDKEIEKMLDEIINSDDDKRQHHIEPKPHKRINKNTPKDIDLNLKSYQMFEGTDFLAIEGMSYSTVLALMSEVGMEGIKKFPSGKHFASWLRLAPNNKVSGGKVLSSKVAKGSNRLKIALRNAANAIGNLKESTPLRDFFQRINFRKGRVSAISATARKLAVIIWNMVVKKVAYVNPEGYLFLDQKRKLGLVKRIKKQIDKFGLTNEELGISSC

SEQ ID NO: 507897 - protein, 316 aa, unidentified
MNGKRVIGVDVGKSWLDAAVEGCHRVRRYDNDAAGIAALIEHFDPARDVVVFERTGGWERNLEAALAERAITWSIVHSQGVRAFRQAQGIKAKTDRIDAQLLRGYGRDRLDAGKLRPGHREDVTLDCLMARQRQLKAMRHAESCRLATAALEAVRSSIERMIAALDAALAAIAAELARHEKEHTDLVFKEEILCGQIGVAEQTARGILAELPELGRLDRKAVTALGGLAPRVHESGSIRKRRGLAPGRTSIKVILFNPARTAMRFDPQIKEFCGRLRARGKPGKVIMVAVMRKMLVRLNAQMRDAMAQASTGAAVQ

SEQ ID NO: 507898 - protein, 344 aa, unidentified
MNITTIGIDLAKNVFQVHGVNERGKAVLKKALKRDQMANFFAQLPPCLIGMEACASAHYWARKLQGFGHTVRLMPPQFVKPYVKTNKNDAADAEAICEAVARPNMRFVPVKSVEQQAVLSLHRVRQGFVKARTAQANQIRGLLGEFGLVIPQGLHHIAKRAPELLEDAENELPGAFRLLIDRLLENLKELDRQVRELELQIRAWHRDNALSQKLERIPGIGPITASALVASVGNAKEFANGRQLAAWLGLVPRQHSSGGRSLLLGISKRGDTYLRTLLVHGARAVILASQRKLEQAGWLAELLRRRNPNVAAVALANKNARIVWALLAHDREFRSDYTREIPAT

SEQ ID NO: 507899 - protein, 424 aa, unidentified
MILAGKVERDAMGRAARRLHPSFVVADPIVEQLMSKLNDLSRSLVPLNPDTTLIAVIEMSQSSWLVAGIVPGIERQPLKKLDVDKDALLKLLHRWRDEAVRAGRDITRIAVAYEAGRDGFWLARWLRAQDIEAHVIHASSVAVSREHRRAKTDRLDTELLKRSFLGWLRGERDHCNVVAIPTLEQEDAKRPNRERESLVAEHSRIVNRMKSVFALLGIRGFNPKLKSAADRLQSLRTPEGEPIPPHAIAALKRDMERRQLIRDQIRQIEQTRLESLQLTPKTGPHAMVCLLASVVGLGVGTADMLVHEVFARNMRDRRAVARYSGLTGSPDESGAKRREKGLSRSGNARVRRGMVELAWRFLRFQKDSALAQWFRTRTEHAHNTRKTMIVAMARKLIIALWHFAKEGVVPDGVVLRSPNLRPAR

SEQ ID NO: 507900 - protein, 421 aa, unidentified
MNQLAEIPFTLYVGIDWADAKHDICVQAAGSEEREFDRIVHKPEEIEVWAQALFQRFGGPIAVALELTKGPIVSALQKYDFFVIVPIDPIRLASYRKTFTPSGAKDDPTDAEFALDYMMRHPEQLKVLKPQSVPMRKLTYLVEARDRLKGDQSRFVNRLIQALKQYYPQTLDWFSDRNTVLFCDFLVQWPTLEKAKRARKKKLEAFFKNHNVRFAHLIEARIDAIKAATPLTHDEAIITAHRLQVEALVEQLRLTIQAMKRFDKEIVATAEQLSDYKLLFTPLPGAGKVLAPRLLAAFGEDRERYPCAEELQRRTGIAPVTKRSGQSEWVHWRWQCSKFLRQTFIDWSAQTINKSAWAGAYYRQQRAKGSSHQAAVRALAFKWIRILYRCWQDRSPYDESKYLEALRRSGSPLLKQLAQAA

SEQ ID NO: 507901 - protein, 384 aa, unidentified
MSKHNIVFIGLDTHKVSTEVAHIEDQRGAKTVHQGKIKTTKAAITKLASQYQSKYPNATLHFVYEAGPCGYWIYRLLTSLGHCCYVVAPSLIPKKPGDKVKTDKRDAMKLAKLLKSEDLTPIYVPEPEDEAIRDLSRARETAMKDLKDAKYQLKGLFLRNNISTKVKDNWSNQHLRWLTELVLPHPSQQIVLQEMIQTITERIKRVERLVNELAHQAKLWRYYPVVQALQAMRGIRFLVAVGTIAELGDLRRFDHPRKLMAYLGLVPKENSSGDNRKQGAITKCGNGRARRLLIEGAQTYKHNANVSTELQKRQETLPKVVIDIAWKAQLRLCRRYKRLMQRGKHRNIVVAAIAREMLAYIWAISREVILVPVDPSTRISRVPA

SEQ ID NO: 507902 - protein, 339 aa, unidentified
MELYAGIDLHSNNSYLGISDAEDRRLYKRRLPNRSDVILAELEPYREELKGIVVESTFNWYWLVDILMDNSYTVHLANPAAIQQYKGTKHSDDKDDAFWLAHLLRLGILPEGYIYPKEERPVRDLLRKRGHLVRLRTSLINSLQGIISRNCGCSLSGNKIKLFREDYVTPLLAGQEDLRLSGAVSKETIDYLTRQIRKVEGAVQDRIKLKKPFLGLQSIPGIGRILGLTIMLETGVIERFPTVGDFSSYCRKVPSKWMSNDKKKGKGNSKNGNRYLAWAFSEAAELARRHDQAARSFYNRKAAKANFMVAHAALAHKLCRAAYYIMRDGVEYDGKKLFA

SEQ ID NO: 507903 - protein, 340 aa, unidentified
MRQLYVASDLHSNNNLVGIIDGEGKRIFKKKLPNDPLLISDVLKPFKEEIIGIVVESTFNWYWLVDALMEEGYKVHLANPAAIQQYSGLKHADDQHDAFWLAEMLRLGILPEGYIYPREERPVRDLLRKRGHLVRLRTSLIISLGNIISRNFGSKLHVNQVKGLRKDRVTPLFEGNEDLALAGKVSKETIDFLTHQIRQIEGVVENRITLKEPYRYLLTIHGVGKILGLTIMLETGPIGRFETVGDYVSYCRKVPSQWTSNGKRKGSGNKKNGNKYLAWAYAEASDFARRYHPEPRAYYNRKMQKSNPAVAHSALSHKLARAAYYIMRDQVAFRPETLFG

SEQ ID NO: 507904 - protein, 349 aa, unidentified
MPEIATIGLDIAKNVFQLHGVDRSGKIVLRRTLRRSQVPGFFRALSPCLIGMEACATAHHWARTLMAFGHDVRLIPPAYVKPYLRRQKNDAADAAAICEAVTRPSMRFVPVKSPQQQSTLMLHRARDLLIGQRTALINALRGHFAELGIVVAQGSRNTRQLIAFLHEEANPDFPAAARTALQPLATMLLGIETQIAKLDKAILAAHRSDPVSTRLAGIPGIGPIVASCLSASIPDASLFQGSREFAAYLGLVPRQHSTGAKARLGSISKMGNRHLRKLLVVGAHAALYSMKSGKTRTVLADWARSLLAKKPFKVVAVALANKMARIAWAVMARGTAYEPGNTGAAVSAT

SEQ ID NO: 507905 - protein, 352 aa, unidentified
MSSQELFPNVTVGLDLGDKVSRTCEIDAGGKIVKRAAVATTPGAIERYFGGRPRCRVVLEASTHSPWVSRQLEALGHEAVVANTSEVYGKGRRKRRNDRLDAEFLARQGRADVELLHPIRHRSAEAQEDLALLRARDQLVQARTKLINHVRGAVKSLGGRISKCSAEVFARRAAQQLPTSLRPCLSPLLEVIAELTKRIGAMEQQVERIAEAHPEATHLQQAQGIGLLTAVAYVRAVEDPHRFKRSRQAGAFFGLVPKLDDSSDSSPQLRITKAGDPLVRRYLVGAARYILGPHAEDSDLRRYGEAIAARGGKNARKRAAIAVARKLAVLLHHLWVTNATYDPNWMQRPRAA

SEQ ID NO: 507906 - protein, 338 aa, unidentified
MKTHVGVDLHQRFCYLTAVNASGKVFKQGQVVNDGAALRAWLGSLSGPRQVVVEASGFWPAFARAAAPEFERLVMVHPLRVKAIASAKLKNDRVDSETLAHLSRYDLLPEAWMADEATQQLRLRVRLRMTLGRQRARAKNQLQAVLHQEGFKKPVTDVFGKRGRAWLKGLELSAAGGLVVDTWLREVDHLDVELAAQTGELERMARADARARFLQTVPGIGPYAAMVILAEVGDVRRFGNKRALASYAGLTPVVRESAGKRKRGGITHQGSNRLRWIMLQVAQVAVRCSPGARSYYAGLRARKPAQVAKIALARKLLTVVWALLHHGVCYDEELFIRG

SEQ ID NO: 507907 - protein, 519 aa, unidentified
MHQTKYRGIITEAGLLTMPPWEPAFRLVKPPIKSVSPFGGDLCFGWLGSPRLYLYKPLGCVSAFWKWIPARKDKTMQYQKVLKMLESIPYLSVGLDVGADFSWMSIMLPNGTLAGKPFKIVHSDPQSRVLAVAKIKEAQEAYSLKSRCFLESTGIYHIPLLCFLRDKGFDCSVINPIITKNSTNLNVRKLHNDKFDSKKAAKVGLDASLKTSIIPDDEVIDLRNLVRDYYYFKDLQSAVVLKLTAELKVSFPAYRKVFSKVTTQTSLKLLDACPLAEDLLAAPKDMVVEMIRSTARFGEKYALAKYDALRTAAEDAAIFGRALKSNSVRIRLYIDSYREYQKRLDTIMEAIHASVDGLKDRPVYDHILLLQSLRGVGFMSAVVLVAEMGSFNLFPSPKKLYAYFGLDPAVKQSGKFNGEKVHMSKRGSSLARRILHMVALNNLKVDKGSGIPVNPVIHSYYTDKCKAKKKNVAVGAVMHKICNIIFAMLRDNKPFEVITPQEHCKRYLAAHPDKVQRTA

SEQ ID NO: 507908 - protein, 315 aa, unidentified
MIIGIDVSKSSFDSAWAVSEKASHKVYDYSDKGIAELLSDTPATSHYVMEATGVYHSKLALTLHEAGRVVTVVNPLVIKRFCQMQLTRVKSDKADAETIRQYGEQSDLTVWKPSADEIDALRQAHGWLDDLIRDRTRLLNRQEAHQHQAKPNNFVTRQMRGAYTRLTNQIVLCEGQLSVIVKKCFPELYEHLVSIPSIGKKTAIELIVITEAFSKFAEVKGLTAYTGISPTTYSSGSSIKGKGAIAKMGNGRIRQLLYLCSLTAMRSNKDCKALYERMKEAGKPGKVIQVAIAHKLLRQAFAVATKGVYYTEKTA

SEQ ID NO: 507909 - protein, 343 aa, unidentified
MEYYVGLDVSLKQTSICVVDQAGLVVREGVVNTDPETISAYVRSKAPNAVRIGLETGPTSTWLWTELKRLGLPAICIDARHAKAVLKMQINKSDRNDAIGIARIMQTGWFKEVHVKDIDSHSVRALLASRALLVKIKRDLENHVRGLLKNLGLVIGRAKFNVFAVRAEELIEGRPELVAAIRPLLEARDAVGHQVSELDRKVMTLARHDAQIRRFMTVPGVGPITALCFKATIDDPARFARSRSVGAYVGLTSRRYASGEVDWTGRISKCGDAMLRSYLFEAAGVLLTRVPKWSAVKAWGAKLAKRSGLRKAKVAVARKLAVILHRMWIDGTEFNWSKKEIAA

SEQ ID NO: 507910 - protein, 372 aa, unidentified
MLIVGCDFHPSWQQIAVFDSETGEVNEYKLSNGDGEAEQFYRQLPAPARVGLEACGNSQWFVNLLQELGHAVWIGDAAQIRASYVRKQKTDKRDALHILQLLLEDRFPRLWTPTPEIRNQRQLLVHRHKLVRLRAQVKNQLQHLAMNQGVQKKARLWSQAGQKLLRELPLAGWAASRRANLLELMKLMDRQIAELDRALQQAAEENPQARLLMTQPGVGPVTALAFVLTIGDVSRFPRGKQVASYLGLIPREHSSGGRQRLGAISKQGNRFLRQTLVEAAHSVVRLDEGFRKQYQHRCHRKPKGVAKVAAARKLAVRLYWMLRTEVKYPEIVHIESRSLVPLVDHGQTETLNGRSRIQTTGAKDGPAGLGKP

SEQ ID NO: 507911 - protein, 422 aa, unidentified
MKNEQTIPVGRVIGFDSHPDTFTAAVVRGPTPAAAIVEKTFDKVPMAQLASWAKKHTTAQDLFVLEASGNSFQVVRTLAALDRKALVLESCQMGKLKEAHANNDKISAVRIAKAYLAGTAKTVWAPDAKTQERRDWHHAHRKAVKRTTQMRNRLRSYLSDNGVRLKKGAPLAKGKGAEELLRKTRPWSPRQWQVIEGMLMELRHADEQRSHWRSLIAQEVLSDPPLLSMVRLCGVREMVAFALGAIIGDIRRFVSPKKLVKYIGLNPAFDDSGQGQWSGGIAGHGRKDLRCLLVEAAQAILRCSKNPLAQWGKKLLRRKSSVNLTVGAMARKLAVAVWYLLMGRWTPLEEIDERLTIKVSKMITSVGAKGLKELGKTRKTFRQEIYQSLQTTRIYVLDYPKKFAPKPVVHRPLTLAQEYGLQ

SEQ ID NO: 507912 - protein, 334 aa, unidentified
MGLDQHRAQIAADWLDTETGEVKRGRVAPADRAGVRRFLERFDGQDLEVALEATTGWRFVVEELRRAGAVVHLAEPAETADLRGSKKRAKNDRGDARHLRELLMIRRLPESWIPPDHILDLRARVRLRHGLGEQRSEWQQRIHATLYHHGCPQRRQLMVADGRDWLAAQPLPATAREQVTVGVAMIDALDSQMLPIEKELRAYARRQAGCKALMTHYGIGELTAVTILAELGDCTRFSSSRQAVRYAGMDITVYQSDRYRSPGHISRQGPPALRWALYEAAQVARRPGSPDREYYTQAAERVGGNRACLSVARKLLKRSYHTLRELGEEALAPA

SEQ ID NO: 507913 - protein, 349 aa, unidentified
MEIAVLGIDLGKTSCSVVGLDGAGRVVLRRRMHRDGVGKLAAGLPACVAAMEACCGAHHLGRLLRGMGHEVRLMPPEYVRPYVKAQKNDERDAEAIAEAATRPTMRFVALKSAEQLDMQSLHRVRDRLVGERTALLNQLRAVLLERGITAPQGRRKLEQALAALLDEAGAEDGRAAAALSPRVLALLEDMRAEWAGLDRRIGAFDDEFAARAKADDAARRLATIPGIGVLNATALTAAVGDGAAFARGRDLAAWLGLVPRQATTGGKPKLLGISKRGNKYLRKLLIHGARSAMAPLLASATPLGAWLRGLVTRVHKNAATVALANKLARIAWAVLRRGGTFDAAKPAAA

SEQ ID NO: 507914 - protein, 358 aa, unidentified
MAGKVTEAAVVGGVDTHKDLHVAAVVDQNNKVLGTQFFSTTRQGYRQMLAWMTSFGALKRIGVECTGTYGSGLLRYLQNAGLEVLEVTAPDRMERRKRGKSDTIDAECAAHAAFSGIRTVTPKTRNGMIESLRVLKTCRKTAISARRVAFQIIHSNIISVPDELREQIRNMTCIQLIRTLGSWRPDASEYRNVTNVYRISLKSLARRYLELHDEIADLDVMIAAIVDELAPELIKRNAIGYESASQLLITAGDNPQRLRSESGFAALYGVSPVPVSSGKTNRYRLNWGGDRAANSALHIIAIGRLRTDDKTKEYVARRVAEGHTKMEAIRCLKRYISREVYTLQHNQNRQINSIPITT

SEQ ID NO: 507915 - protein, 335 aa, unidentified
MSQKTDAVVASTIGIDTGKNTLHLIGLDDQGTIVLREKLSRSRIVSRLANVPRCLIGIEAGMGTHYVARELIALGHDVRQVPPVYARPFRQTHKNDFRDAYAIAEAVRRPSTRCVPVKTDDQLDLQALHRVRSRLISERTAVINQIRGFLLERGIPVRQGLRFLRQQLPEILAKRIDVLSPRMIRIIEDLSGDWRHLDQRIEHVTEEIEVLAHGTESCRQLMTVPGIGPIIASAMVAAIGNGVAFAKGREFAAWLGLVPKQMSTGDRTILGRISKRGNRYLRMLFMQGARVILLRPANWAKHSFGSWLTAARNGCITMFWQLRSPISWRASLGRF

SEQ ID NO: 507916 - protein, 355 aa, unidentified
MKQEKYIGLDVHQATISAAVMDCGGKLLMECLLETKAATILEFIQGLRGTLSLTFEEGTSAAWLHDLVKPHVSRLVVCDPRKAALLKEGNKSDRIDARKLAELLRTNQLKPVYHGEHGLRTLKELGRSYLSVSKDVTRTMNRIKSLYRSWAIPCSGSSVYAPRHRAEWLAKLLEPGVRMRAEHLYQQLDSLQPLRLEARCQLLRESQKHAAVRRLRQIPSIGPIRAALLVALLQTPHRFRTKRQLWAYSGFAIETRDSGEYRIVRGKVQRNRERITVRGLNDNHNKDLKSLFKSAAISASTRPGPLRDFYLARVGKGMRPTMARLTLARKIATIALTMWKKGVSFDPKQLQPQAA

SEQ ID NO: 507917 - protein, 370 aa, unidentified
MLDTTTFVGLDVHARSIKAVSLDVMTGEVRAATFGYDAGAVAEWVRSVDPGARCVYESGVTGFDLQKRLSGLGVDCVVGAVSKMIKPSADRRRKNDRNDAEFLARMLSVGNVVEVWVPDDECEAARDLTRALEDARDDLSRSKQRLSKFLLRHGLVFDERTPTGRRKGNWTRAHWFWIESIRFAEGADNDALAYYVDAVRRAAEEKARLEGLVEAEARKPRWRKRVDSLRCLKGVDTASAADLVFEAGEFSRFRNARSFAAWVGLTPSEHSSGESDRRGAITKAGNKHLRKTLVEAAWHYLTCSGRPKDLAKGQAPDRGARRHAAKGVRRLVERREALLARGVHGNKANVATARELACWVWAVGLMAEEA

SEQ ID NO: 507918 - protein, 351 aa, unidentified
MKKIFVGIDVSKKILDVSVIAPALTEDKPVVISYGKFDNRPCGYRKIVSMARKAAKAVDDAEILFCCETTGGYDHALCDYMSDKHLDIWREHAARIAKTRPDHGKDDRKDSILIAEYAWRNRDRAQMYVPSSRSVRDLRQLLLYRRQLVEMRKQLNVRMTDLKATMQSDPTMSFIYSESEKQVKILTDCIEKCESMIRETIDSDNEMLKNFGHIMTIKGIGLVSAVAIIAYTGNFKTIDVYKSFACYCGTVPFYEDSGTSIHKREYIGHKSNRMVRSYLIQAAHIATIYNEEMVAYKQRMQSKGKPAGIIVNNVANKLLRLVFSLVANDCDYEREHEFKREERLKKKTMSA

SEQ ID NO: 507919 - protein, 385 aa, unidentified
MTTQARVSTFVPRNYEIFSGLDVDKGSIAVTFSDHDGLINSVRLPYSSQQLLDYVRKHFSQQRVAFVYEAGPTGFGLYDAITAEGHPCLVVAPSMVPTAPGNRVKTNRLDSRKLSQGLRAGDLHSIHVPARPYRELRHLVQLRDTHIRQLSATKCRIKSLLLYEGISFPDPSGRWSARVLAELQALPCTEAVHFKLEHLIGTLHFHFNSAAVVQKQIRRFCQADPELRQSITFLKSLPGIGWIVAAHLVARLGDWREIDNVRSIAGFLGLVSSEHSTGDKQNRGPITRAGDSRLRNKLIQSAWTSIKKDPELREFYRRVYQRHAKKVAARKAIVAVARKLTTRIYAVLKQQRPFVLRLDSSTAPLTAEETAALRERLDGAQNEQP

SEQ ID NO: 507920 - protein, 335 aa, unidentified
MTTYVGVDVHSSQSTIAVITSGQPKPSIITVRGGPEEVKKQLLRIEAPFDLCFEASCGYGKWFETLSGVARSVTVAHPGHLRLIYASKRKNDRVDASKLAKLLSVGAVPAVYVPNVRVREWRGLIRHRGRTVAKCTAVKNSIRALLREQAIKAPRGLWTKKGILWLTQLDLPETTRWRMDEHLEDLELLKQRVSRFTRQLDQIAARHPGVALLRTIPGVGTRTAEAFVAWVDDARRFARTSQIGDYFGLVPRQDASARRNHLGHITKDGPGCVRQLLVEAAWQGIRRSGVIRAKYEQFRRGDKERTKKAIVATAHWLARVMLSMLRSGEVWRQAE

SEQ ID NO: 507921 - protein, 345 aa, unidentified
MSTRLLRSIVSEITQLYFLTHFTMYFIGVDVSKDKLNAACIDMQGEVIFETEAINNLLGFRKILSLLGKHTGGDPYRIGFESTGVCHLKFLKFCLDNRLNAFIINPVLSAQAVRLSVRPRKTDRIDAVLIAQLVMGGQGRLIASYDLPQGRKAILNAIDQYQECLQKLKGHLHNMRAEDPVVLSAVQHSLKESIRQMAGEVKALKKMLDSMNTRETELLCSLVGISTFSAHKILDQIGTIDRFARGEQLVAFTGLEPKPIKSGSSIDYRGKITKRGSRKLRQIIYQCAGVARIYDCELKEFFEKRRSGGLHHTAAVCAVGRKLLLRIYAVLKRGTPYIPQKVLTC

SEQ ID NO: 507922 - protein, 344 aa, unidentified
MTYYTGIDVSLRSVSICVIDDKGEVRLEAKVAADVDAIVDRLRRFSADVTTVGFEAGTLTQYLTYGLQAAGFEVICLEARRVSLSLAAMRNKTDRNDARGLAQILRTGWYRRVHVKSLHSHQVRALLASRKAILKKCVDLENELRGLLKVFGIRLPSRVGHGSFDAELRETVSSDEMLACALVPLLDARTVLYKTYLKLDNAVKALVRVDPICQRLMSIPGIGPVTALTFKAAVDDPSRFKSSRTVAAHFGLTPRRFQSGELDNPGHISRAGDADVRSTLYIAAHSLLTRNAQWSTLKAWGVRLAKTRGHRRAVIAVARKLAVILHRMWVDGSEFRWGAAETPA

SEQ ID NO: 507923 - protein, 356 aa, unidentified
MDSTKYIGMDVHKEATTIAVMNAAGKLVMESIVETNAATILQFIKGLRGELYVTFEEGTWAAWLYDLLKPHVTKEVVCNPRKNALLKAGNKGDQIDARKLAELLRGGFLSAVYHGETGLRTLKELCRSYLALSKDLTRTMNRIKAVYRSWSIPCGGASVYAPRHRAEWLSKITEPGVRRRAELFYLELDGLQKLRQQARRDLLAESRQHDATKLLEGIPYIGPIRAALLIALLQTPHRFRTKRQLWAYSGLALETHSSGEYHYVEGQLQRSKRPVLLRGLNQNHNHELKSIFKGAATKAGSAPGPFHDFYSALLAQGMKPTMARLTLARKIAAITLLVWKKGVCFDAQQLKRQMPA

SEQ ID NO: 507924 - protein, 410 aa, unidentified
MTKEDFIYVGIDLHKETHTAVMIDCYNNKLGEITFPNRPADFPKLVTKVKKCNTDAKEVVYGLENAYGYGRALAVWLIDKGYLVKDVNTAISHRQAKHRGAMYRKSDSDDAKAIALATLNMLDKLPDACPNDAYWSLGQLVHRRDNIMKQRTRLVNQLHEQLCIAYPSYKSFFNDISRPTALYFWEHYPSKKYLKGKSVEDLREELVPVSHNKCSTKTCEKILDAVASDKVKNNAYQDARDMVTLSIVSDLQHYGSQLTEVDKMLEQMYKMLGCTLTTIPGVNVITAVKILAEIGDIKRFANANKLAQFAGIAPLHLSSSGKGKDLATKQGNRRLQATIYFLAIQMVQLSSKGTPRNPVVRAYYEKRKAEGKTSQQALICISRRLISIIYGMLKHGTEYRMPVVESAGEK

SEQ ID NO: 507925 - protein, 323 aa, unidentified
MTVYLGIDIASKKFDVAELCDGNYRCKAFENTSAGFLALYKWLGQSTMPDIHACLEATGDYGTSLATFLYENKIKVSVVNPARIKGFGASELSRTKTDKADSKLIARFCKAAVPDGWKPTPAPVRKLQALVRRISALNGMLRMECNRRENADANIQASLDRIISLLKTEIEVVRQEIKDHVRSNDELKKQDALIQSVPGIGAVSSNLILSFMSGKGFRKAKEVTAYLGLNPRHHQSGSSVRGKTRMSKMGDARLRSALYMPALVALRYNPDIKAFGQRLLLAGKPRMLVVGAVMRKLIHIVFGVLKSGTAFSSRIAVHSVVTS

SEQ ID NO: 507926 - protein, 357 aa, unidentified
MTNDKYVGLDVHQASTSIVVLDCNGKVISEAVVRTRADAIRDFIKGLSGTIHVTLEEGTQASWLYEVIRRLVFELVVCDPRQNKVLGAGNKGDRIDAKKLAELLRAGMLKPVYHSNQDTKALKQLTHNYDSLVSDTTRVMSRIKAVFRGQGIPCSGRDVYYKRNREQWITRLGEPSLRIRAQFLFDELEPLKALRRAAKKVMLKEARRHKAFKILSEVPTLGPIRIAQIIAAVGAPHRFRTRRQFWAYCGFAVVTRSTDDYRFDENGPLRRSRPPATRGLNRNFNRRLKHVFKSAALQAASKEPFKSYYQARVDAGMRPEMVRLTLARKIANITLTLWKNGGQFNEHKLSEPPDRTT

SEQ ID NO: 507927 - protein, 345 aa, unidentified
MQAVTTIGLDIAKSVFQVHGVDAEGIVVIRRQLRRRQVLPFFKKLSTCLIGIEACATSHHWSRELQALGHTVRLMPPAYVKPYLKRQKNDAADAEAICEAVTRPSMRFVETKTPEQQSCLMLHRTRHLFIRQQTAVINAIRAHLAEFGIVAPVGRNGVEELLDVVADPDDNRVPEVARECLAALGAQLRMLKAQILEFDRRILAWHRSNEMSKRLDELPGVGPALATALVASVADPRAFRSGRDFSAWVGLVPKQNSSGGKEKLGSITKRGDRYLRSLFTAGALAVIRYAKIHGTKHRPWLTTLLARRPTKVAAIALANKIARMAWAMMAKGERYKEPVALAACR

SEQ ID NO: 507928 - protein, 352 aa, unidentified
MPQQIVAVDLAKNVFEVAVADGLGTKPQHRRLSRGQFERFIGEQPPSVFVLEGCGMAHHWGRRLGAQGHEVRLLPAQYVASYRRRNKTDRADTLALLEAHRAPDIHAIRVKSAEQQAVQQLHRVREQLIRNRTAWINQARGLLREHGVTLPQGAHAARRRTPGVLEDAEQPVPDKIRQILHNLIENIQRMDDQVADIDAQLQATQREDQDAARISQLPGIGAITSTALVSAVGDLRQFISARQFPGWLGLTPKEYSSGSRRCLGGITRSGDPYVRKQLIHGARSALYRMRRRAAQQAELTPLEAWAMNTEARIGRNKATIALANKLARRAYALCRDQGTYAPFDHPAPAHAA

SEQ ID NO: 507929 - protein, 426 aa, unidentified
MEVLFPRCAGIDVHKRTVVACRIVLTDDGEWLRETRTYGTTTEDLLHLSDWLAAAECTHVGLESTGEFWKPVFNILEGNFTVWLLNAQRVRAIPGRKTDVRDAEWIAELLRHGLVQPSFIPPRHQRELRELTRQRTSFVRGRATLVNRVQKVLEGTNLKLTAVVSNIAGVSGRAILAALLEGEEDVAVLADLAKGKLRKKRDELERALSGRLQPHHRFLLTELLAQIDGLDDTIARFDAEIARLCAVNEEEQVVALLDTIPGIGRAMGELLVAEIGVDMTKFPTPAHLAAWAGVAPGSNESAGRQRSGRTRKGNAWLKTALVQAAHGAARMKGTALAAKYQRVAARRGAKRAIMAVAHRLLIIAYHVIARREPYHELGADYLERRRPAAVVDRLLQRLRQLGVDVTVTSGAPSDGPPAGAVLATTP

SEQ ID NO: 507930 - protein, 381 aa, unidentified
MLYVGIDVAKNKHDVTVIDNTGKMVLKPITITNRKQGFELLHNTLKQLRQDCLIAMEDTGHYALNLLTFLHQKNYTIYTYNPLLIKEFTKSLSLRKTKTDKKDARTIALKLLSDPSRDLFKHDNKQEELKIMTRHMNRLKKHQSDWKVQYTKCLDIIFPELHQVVTKHSDYVYELLKRFPSPEKMVTAGFDKLIEIKRLTAKHALDILELAPNSIGTTSFAREFELVEIIENIQHYEKLIKQAEKKIDELMAELNSVITTVPGISNRLGSVILAEIRNINTFTNPAQLQAFAGLEPSIYQSGQLDTQGKMVKRGSSHLRWALIQAAIKVARYSPTFKAYLRIKLEQGKHFNVAISHVAKKLIRVLFRLLQNNEAFEEDKLR

SEQ ID NO: 507931 - protein, 345 aa, unidentified
MKKVMAGIDLHSNNVVIAIMDMDGKRLSNQKLPCDLGHIVKFLAPYKKRLAKVAVESTYNWYWLVDGLQALKFPVVLANPAGMQQYSGIKHADDTNDAFFLAELLRLNILPTGHIYDVQLRPVRDLLRRRLLLVHQRTALILSFKSLYTRTTGLQMSLGYLKKLEVKKAEELYEHPANQMVAGMQVQHIEQLSESISKIEKSVLSSARELPCYARLTTLPGVGNILGMTISLEVGDIKRFASAGTFASYCRTVAAECTSNNKKKGENNSKCGNKYLAWAFVEAANFARRYDEQCRRWFERKAAKTNSIVATKALACKLAKAAWFLMSQGTDYEGQRMFGQAAKNK

SEQ ID NO: 507932 - protein, 409 aa, unidentified
MEVLYARCAGLDVHQKTVVACVRIHGPDGRAQTETRTFGTDTGALLELSAWLEQSGCTHAVMEATGVYWKPVWHILEESCALVLANAHYVRNVPGRKTDVSDAAWLADLLAHGLVRSSFVPERPTQELRDLTRTRKQLVRQRAQHVNRLHKVLEDANLKLGSYVTDITGVTGRAILAAIIAGETDATKLASLRNPRLKTPPDELAKALRGKITPHHRFLLQMHLDQIEAADRSVALLDSQIEEQTRPLAEELRLLEDMPGMSRTSASVVLAEIGADMSRFPSQRHLVSFAGLCPGLNQSAGKSRSSKLKKGSNWLKTVMVNCAWAAARSKNTYARAQFHRLKARRGSKKAVVAVAASMLTAIYFVLRDRTPYRDLGVSYFDRRDQTKIANRLRRRLESLGFSVQMQPAA

SEQ ID NO: 507933 - protein, 360 aa, unidentified
MTTSTSSKSSPSYEAIKLGIDAHAKYYWVSRQVDGATPQPVQKMTYDELLLFVVKQQKLTNKVVTCYEAGAFGFHLHRRFEELGIKNYVVQPQDWDERGKGVKNDRLDAAALCQRLDRYERGNHKAFSVVRIPTVDEERERAITRQRQQLVRERQRLAAMGRSLLATHNIHVTGKWWKGKAWTAIKVQAPAWVIERLEVFIVILGPLEEQEVKLMRAIQEAAQEQKIPRGVGPLTFEILRREVGDWSRFHNRRQVSSYTGLCPREHSSGGKRRAGSVSKSGNPRVRAMLVEMVWRMIRWQPGYTALLKWAPVLNSPTPNPAAKKKAVVAIARQLAVDLWRVFTGQVEAEKFGLVYLPEAA

SEQ ID NO: 507934 - protein, 425 aa, unidentified
MNSISNKKINQVTDQTLVVGMDIAKKKHYACFVDERGRVLKKPFPVLQSREGLEWLYQCIVEAMKEFEKTEVIVGIEPTGHYWLNLAYFLDEKGIPLVMTNPMHVKRSKELDDNLPTKHDAKDALVIARLVKDGRFSYPRILKGMEAELRVGATFRSKLVEERGAIRNQMIRWLDRYFPEFSQVFPSFGKMALAVLEYTPFPSDLAGKELEEVLALYRQSEGLQSPQKPKAKKLMELAQHSIGVTEGQQMARIEIATLVRRYRQLEEEIEALTQQLTELVQTSVEYEWLKTVPGLGDATIVELLSEIGSFSHYQDPRQLLKLAGLTLREHSSGQHKGQKRISKRGRRRLRALLFRVMMPMIRHNEAFRQLHEYYTTRPDNPLRKKQSIVVLCGKLLKVLHAVCTKHQAFDAKRMMQDIFGLETAA

SEQ ID NO: 507935 - protein, 384 aa, unidentified
MGHQTFIPRDYDVFAGLDVDKRSISVTFTDHQGLLKSLRMPYNVEHLVNHVRKHFPNQKVAFAYEAGPTGYGLYDGLVAQDFRCLIASPSMIPKAPGQRVKTNRLDSVGLSENLRGGQLKGIHVPSPLYRELRHLTQLRDTFVSEMVGMKQRIKSLLLMEGMEFPPAPAGSQWSFMVKNKLRKLPCSGTVRFKLDQWLDSLEFNEKQVLKTTREIRRFCHNDPELSQCIEYTMSVSGIGWIVASQLLARIGDWRELRNIRQLGGFLGLVPTEHSTGERTDRGSITHTGDERLRSKMIQASWSAIRKDAELREFFRLICHRHPRRQGPRVAIVAVARKLSVRISVVLMKQRPYVVREKVHSAPLTQEETSSQGTTRRQAEPGDNS

SEQ ID NO: 507936 - protein, 427 aa, unidentified
MISAAIERCAGIDVGKKFLAVCVMVGPLEGEPRVEIRKFGTIRVELEGLRDWLKQQEVTHVVMESTGSYWKPVFNALEDAVKVYLANPQEVKNRKGHKTDNKDGWWLAHLLRHAMIHPSFIPPRTIRELRDLTRRRKRLLGAGTSERNRVQKVLEDANVKLGNVLSDLFGVSGQLMLEALLQGQAKPEEIAHFAKGRAKKKIPEMIAALEGHQMSDHHRRMIRYSVDHMGFLEGQIEQLDQDIVARIREAGLEPQWQLLQSVPGVQETSAAEILAETGTDMTQFPSEKHISSWAGICPGNNRSAGRNKSSHTTGGNRWLRGTLTECAWAASAKKNGFIKDKFWRIITKSGGKKPPAVVAIAHTLLILIYQALLTGQPYQDKRAPVLDQRQKQRLIRHHIRRLGKLGVAVCSARPGSSATAAKTPTGT

SEQ ID NO: 507937 - protein, 369 aa, unidentified
MTDVTLFVGLDVHKKTISVALVDAAASATVRFYGTIVNTPDALLGLSKKLSKDGQALHFCYEAGPCGYGVQRQLTRLGHRCDVVAPALIPRKVGDKVKTDRRDAMMLAQTLRAGQLTAVWVPDEAHEAMRDLVRLRAQAMRDLRKTRQQLLSFLLRHGLVSPYGHWTKMHRRWLGELVFAHPAQHLAHEEMLQRIERAEALCDRLKGAILDLVPQWSLAPVVQAIQALRGVSLIVASVIVAEVGCFTRFDNPRQLMAYLGLNPSEHSSGSTIRRGAITKTGNALARTCLVEAAWTYRFPARVTQIIRDRLAGLPEPVRNVAWKAQVRLSARYRKLVAAGKPTPKVVVAIARELVGFIWAIARMVEPKFA

SEQ ID NO: 507938 - protein, 351 aa, unidentified
MVIIGVDYHPSDQYIAFVDSETGEGGERRLNHSEGEAEKFYRELAARGVSVRVGMEATGYSRWFERLLAELEIEVWIGDAAEIRTKRVRKQKTDRNDAQLLLKLLLEDAFPRIWVPSPENRDLRQLLWHRHRMVQMRTRIMNQLQALAMNEGQRRKKKLWNDQGRAQLEKLPLALWASRRRRDLLELLDRMNPTIEELTVVVEQEAKKRPEVLRLMSHPGVGPLTALAFVLIIGTPQRFKCGKQVGSYVGLIPSEDSSAGHQRLGHITKQGSSLMRFLLAEAAQAAARCDADWRRRYMHLAMRRQRNIAKVAMARKLAVRLYWMWRNGWEYAQWAQFGSNAGQLGTGHGVR

SEQ ID NO: 507939 - protein, 419 aa, unidentified
MSFKIIKNNCCGLDVHKTWIFACIGITDSNNRTEYKQARFSSFTKGLNELCDWLAKYNCNDVCMESTGKYWIPVFNILEQRSLWVTLSHPKYTKPMKGNKTDRKDAKWICDLYMCGMVKPSFIPPADIRELRDLVRYRFKLTCMITGEKNRAQNCLTVSNLKLDDVFSDVFGKSSRSITEQILQHPGETFDVAPFVNSRCKTPIVEIQAAIDGAISKEQAVKLRQCLDHIDELNKHISEVEQEILRLSDKYETALNLIRTVPGFDKNPLTAIQVLSEIGGDMSVFPTAKHLVSWAGCCPRNDQSNQKIKSTRISRAGSYFKPVLVQVANALIKSKKHPEFTTRYKRIKARRGHKKAIIAICRMILTAIWHILSDLKPYTPEGFLESRPVKEEKVLSTSQALNLLKQRGYIIKDKPLAVS

SEQ ID NO: 507940 - protein, 390 aa, unidentified
MIYVGIDVAKDKHDCHIISSNGEILCDNFQFQNSLDGFNSLMDLLTQTVGENLINVKVGLESTGHYSTNLVNYLKRQNLPVFALNPLSVNRFRKSLTLRATKTDKSDARYIAEKMITEDSSSYLDISYHIQSLKSLTRYRYRLIKIVQPLKNRFRRILHLVFPEFEKIFNVSLLSSYELLEKFPGPSSICGARRSSLEKHLKNISHGRLVRKLDSLIDAAKHSIGSNLDGDIFELKHICSQIIFLSKELEDIESKLKEIMSLINSPITSIPGIGVTMGATILAEIGDINNFDYPEKLQAFAGLAPQIYESGKFKATITPMDKKGSVYLRNALYQVTKSAYVTSNFMRSYVDRKRAQGKHFYTAMSHGMKKMVRIIFAVLKKNSNFVEPII

SEQ ID NO: 507941 - protein, 394 aa, unidentified
MIVGIDVGSEKHYFRAFNWRGIELTGKPVAFSNSMEGFNSFYNTIVELMQKSELEEALVGIEPTGHYWFDLGQFMGEKSIKFVMVNPHHVHKSKELDDNSPSKNDRKDPRVIAGLVRDGRYFYSYMPTGVYAELRNASNRRFVLVEEQTRAKNRLQKWIAVYFPEYKGIYTHIDAKGGLLVLKQAPTPEEIVKLGEEGIIKIWKDAKLPRNGNKKALKILNAAMRSIGLKVGLTEARMEIQDLIEDYELQTKRLERVNDLIKELCQQIRYADKLLEIKGIGITTVAGFIAEVGDITRFDSTKELQKLAGLELVADSSGKHNGKTKISKRGRKRLRYLLFEAAISVVGKNEEFKEIHRYYTTREKNPLKKMQSLIAVACKLIRVFHVILTIICTI

SEQ ID NO: 507942 - protein, 470 aa, unidentified
MDARPRAYCGIDWAEGHHDLAVVNPDGKLIAKRRIADNAQGFAELIAILAEAGDTPEQTIPVAIETPRGLMVAALRETGRRIYPINPLAVARYRERHSVSRKKSDHVDAMTLANILRTDAHVHRPLPADTELARAVAVLARAAQDAIWRRTKATQELRSLLREFYPGFLEAFAHNGSTNLASREARAVLRLAPTPAKGAVVSKARIAAALRRAGRQRGIDALATTIHRALRTKHLRHPHTVEEAMGRHAAALLATLDTECNNADELSAAASEAFGQHPDYAIITSFDGLGDLTGARLLAEIGDDPTRFADARALKAFAGSAPVTRASGRSISVTRRTVKNNRLAAVGFVWAFAAIPDPAPPSVTTTGDELEETGTQQRCATSTTANSASSTTACRPARPTTRSRPSPSQRPTSWNTRLDSLTRSEVYQRSLAPSGRGDNTPQIIERQGQRVIPRPAACKPSPSLIKKAPL

SEQ ID NO: 507943 - protein, 372 aa, unidentified
MGHHTEAFVGIDASKLRNAVAIADGGRGAEVRYLGEFPATEAAIQKLVAKLAAKYRHLTFCYEAGPTGYGLYRLLKSLGYESLVVAPSLVPKKAGDRVKTNRRDAVSLAKLLRAGELTAVWVPDERHEAMRDLSRARLAVKKDLQGKRQQISSLMLRLGRIYPGKTTWGPAHMKWLMAQKIEHREQRIALEELLEGIRQESERMERLENAIREVVPEWSLAEVVTALQAVRGIDLIAAVGVLAEIGDLSRFQNPRELMGYLGLVPSESSTGDKVKRGGITKAGNGRARRILVEAAWSYRYPPRVSRDKQPKVEAAPRRVREIAWKAQTRLCGRFRSLERKGKRRTLIATAIARELSAFIWAINRELMAHRQA

SEQ ID NO: 507944 - protein, 406 aa, unidentified
MKQIVSVGIDVSKGKSTVCAMIHPNTIIKESFEVLHTVEEMSMLADYIGSLDGEIRIVMESTGHYHLPVAQFLYQKGFFVCVENAYIIRQFSRIMLHGAKTDPLDAKKLAKYGLAYWSELKPYKFHPSCYTELSLLSKQYQTYIKLLIAAKQNVIHLMDEMLPGFKEALDTASSVQFSKVKYVDFAKEFYHVDMIKTMGKEIFRENYKQWCKEKGYRFQSEKADELFHLAEDGIPTLPTEFPSTRLCMEVATEQVSQLGYALEQILSQMQNLAKTLPEYQTIRQMGGMGEKLCVRFIADIGDVRRFHNGKALVAYAGIDAPPYQSGQYTGTKRRISKRGNSALRKTGYEVMKSLKSHPPKTDTRVYDFIIKKENEGKSKKKAKIAGLNKFLQIYYARVIEIYKNIV

SEQ ID NO: 507945 - protein, 474 aa, unidentified
MARTRSRPASPPVPGDAGAEVTDEPVQVISRAAAIDVAKGSGMVCMRLPYESRAGRRTQKAWEVTATFAAVVALMDHLVCQGVERLVLESTSDYWRIWYYLAEAAGLEVWLVNARDVKHLPGRSKTDRLDCVWLCKLNEWGMLRRSFVPPEPVRDLRALTRLRANLTHDRVRHQNRIEKILEDALLKVSSVISDLMGGSGRRFLQALADGERSPAALAALGDYRLHASKAELQEALTGRFRDIHGFEIGMLLKLIDDLSAKITELDERIEAQLENVPGLGGVCTSCGQPGPDGPCTGCGEPVLGVIARLDEITGIGRGAAQVIVAELGTDMTQFPTPGHAASWAKLTPRAIQSGATSKAGRTGKGDPYLRGATGVAVMTAARTDTFLGARYRRHARRRGKQKAIVAGSRTIIEIAWRVIADPGFRYIELGPDYHDQLDPGRKTRDKIRQLEKLNPGMTVTLTPRPEPGGQAPAA

SEQ ID NO: 507946 - protein, 410 aa, unidentified
MESLIERGCGLDVHQATVVACLLISLAKGKVKKVIRTFGTTTRELLTLRDWLLSEGCTHVAMESTGVYWKPVYALLEGSFEIVVANAQQIKKVPGRKTDVKDAEWIADLLRHGLLRPSFVPPQPIRELRDLLRYRRKLVESQTGERNRLLKLLEGANIKLASVATDVFGVSGQLMLDALLEGTQTPQEMAELAKGRMREKIPQLELALEGRLQEHHRFLLRLQRRRLQQVEKDLAELEQRIFEKLQPYAPQHTLLLEIPGVDRILAAVIIAELGIDMSVFGSASQAASWAGVCPGNDESAGKRRSGRTSPGNIYLKTALVEAANAAARAKGTYLREKFYRLKARRGHKRAAIGIAHKILVAAYHMLSDQVSYNDLGDAYLDKLSKTQLTRSLVRRLDRLGYQVSIRPKAA

SEQ ID NO: 507947 - protein, 335 aa, unidentified
MQEEFTFQNNPEGLEELVKHLKAYPEVQVAIESTGNLWTTIYDRLEAEQIHVILTNPKKTKAIAEAKIKTDRLDARMLADLLRGNLISASYVPPPEIRIQRSIIRERARLVQLRTIIKNRIHTLLDRYQLKAPCTDLFGKHGLAWLNQQQLQPGDRTLLEVNLEQLNSLNHSINRLTEDIASSAIENPEVKLLMGFTGIDYYSAMLLINEIGPITRFPSPKNLVSYAGLAPSTHQSGNRTFHGSITKEGNSHIRWILIEAAQHASRHDPRFNQFYQRITKRRGHQKAIVAVARKMLVTIYHVLNHRNDYRGLRPELYENKIKRLQRITKPSLQVP

SEQ ID NO: 507948 - protein, 320 aa, unidentified
MSESIERFVGIDVSKGSLDVFADPSSPQLPAHLGYDDAALKALCNAVAQLAPTLVVMEASGGLEQRAAIELAARGVPLAVVNPRQVRNFARASGELAKTDAIDARILCAFARAIRPAARTPKDTDTRALADLLSRRRQLVDMRVQELQRQHTASSRAMTKSLAEHLTWLDKRIARLDKDMGQRLRESDAWRTKDDLLQRIPGVGPVLSRTMLGMCPELGELNRREISKLVGLAPLANDSGKYRGRRRIWGGRADVRRVLYMATQAAIRHNPDIAAFAQRLKAAGKLPKVVIVACMRKLLTIMNIMLKTGQTWHASHAAQT

SEQ ID NO: 507949 - protein, 313 aa, unidentified
MAEACFIGIDVSKHSLDLHALPAGDSCRFPNDDEGINQTLAWTRDHKPSLVVLEATGGYQSRIAAQLAAHDIPVAVVNPRQVRDFARATGQLAKTDALDAAIIARFARDVRPHPRPLPNDAERAIKALVTRRGQLIGIRTAELNRLHQSPTKRVAASLKQSIAFLDRQIESLDDDIDNHIKQSPLWRENEDLLKSVPGVGDQTARTLLTQLPELGKLSRREIAALVGVAPLNRDSGAFRGRRVISGGRSQVRAALYMAALVASRFNPRIRAFYLRLRAAGKSGKVALTACMRKLLTILNVMLKTRTRFSHVTP

SEQ ID NO: 507950 - protein, 409 aa, unidentified
MTAYRFYVGIDWATEAHRVVVLDADRRALHDRTVRHEGVALETFAHWLAEDVAAGAASDVAVALEVPRGAIVDTLLARGVHVFALNPKQLDRFRDRFTVAGAKDDRRDAQVLASALASDQPAFRRLAPEDPLILELRELSRLEDDLRQERGRLTSRLREQLHRYFPQLLQLVPAADEPWLWALLERAPTPSVAQQLPRATVRTILTRHRIRRVDADAVRALLRAPALPVAPGTVQAAQRHLAVLLPRLRLVHQQQADCATLIEGLLERLGESPEHRDVPILRSVVGVGRVVAATMLAEASRLLAARDYHGLRAQAGVAPVTRQSGRRTLVVMRYACNPRLRHAAYHWGQSAARHDPVSRVHYERLRARGHSHARAVRGIVDRLLRVLIAMLTAGTLYDPARRRVVADAA

SEQ ID NO: 507951 - protein, 405 aa, unidentified
MLFVGDDWAEDHHDVEVQDERGRTLRAVRLPEGVDGVARFHDLVAGFLPEDASPAQVLVCIETDRGPWVRALVAAGYQVYGVNPKQAARHRELMSISGAKSDKADARTLADMVRTRRHQLRQVAADSDIAEAVKVVARAHQTLIWERTRHTLRLREYFPAALQAYEVLTLTGSDTLELLAKAPTPAAAAKLTVAQISAALKRARRRDIPTKAAAIRQALRTAHLGQSEIVTGAYAATVRATVAILQTLNTEIRTMEGQVEAHFGQHPDAEVYLSQPGIGAILGARVLAEFGDAPGRYTDARSRKNYAGTAPITRQSGKTKTVHARFVHNDRLVDALHMQAGAAILHDTAVRAYYDELRARDVSHPAALRQIGNRLVGILHGCLKTNTHYDQATAWSHRTALPTAA

SEQ ID NO: 507952 - protein, 310 aa, unidentified
MGVFVGVDVSKQHLDWVAGEQGEVAREPNTPAGVRRLVAKLVRLDLELVVFESTGGYERRLAEKLGEAGLPIAFVNPWRVRRFGEGLGVLAKTDPLDARMLAAYGERARPDRRPVPGPTQRLLADLVRRRRQLMTMIVAEKNRLDTTAAVVRRDVKSMIRLLERRVEKLDAKIDAAIEADPERCETKERLQSVPSVGPGVARTLVVDLPELGALGRREIASLVGLAPFARDSGRKSGARRIRAGRSGPRTALYLAAMNAARFNPKLKPVYERMVAAGKPPKVALVAVARKLLTILNAMVRDGTTWAEARV

SEQ ID NO: 507953 - protein, 445 aa, unidentified
MFIQSQDDSQCCYSLFIKVVILMMKLKYSICCGLDVHKNVIVATIVTTNKDGISEYLQKSFSTINSDIQRFHNWLIENNCYHVCMESTGKYWIPIFNYLENDIDVCLTHPKYVKAIKGKKTDKKDSKWIADLYKFDLVRCSFIPPKDFRQLRELSRYRFKLVCMKSSEKNRIQNCMTVSNVGIASVLSDPFGKTATEIISYLLEHTADSMDEKAVRKLIKKGAKSKSDEIIEAIKGYTIETDQAKKLELARGHLEYLDDMITQTEVELYVRIKPYYEFVEFVSTMPGMTELSSTIVLAETGVDMDIFDDAKHLCSWCGLSPANNESAGKKKSVRIAKAGDYLKPMMVQCALAAIKSKKQPYFAIKYGRIKKRRGHKKAIIAIARMMMVCIYHMVSEKKPFTPTDYEELMNPQNHVERVVLNENNVFAYLESLGYDSSKLVKRNDN

SEQ ID NO: 507954 - protein, 339 aa, unidentified
MRLYAGFDLHSSNTYLGIVDEDGKRVFKKKLSNDRDVILSTLAPYKDNIAGIVVESTYNWYWLVDLLTEEGYKVHLANTTKIQKYSGLKYADDQHDAFWLAEMLRLGILPEGYIYPKEDRPVRDLLRKRSHLVRLRTSLILSLQNILSRNNGARLKANQVKALTIDHVTPSLAGNEDLALAGKVSKESIDFLTLQIKSIESVVGECLELREPSNKLLTEPGIGKVLGLTIMLETGPINRFADVGNFVSYCRKVSTAWISNEMQKGKGNRKCGNKYLGWAFSEAAELARRFDVDARAYYNRKVQKTNRMVAHNALAHKLARAAYYIMRDGVPFVPEKCFG

SEQ ID NO: 507955 - protein, 358 aa, unidentified
MESTITESTQPQVTVGVDTHKQFHVAHAVDQLGRPLGTHRVAATPAGYRGFVSWAHTLGQLVAVGIEGPGHFGAGLARHLRAEGIAVSEVGRPKRQRRARFGKSDDADAAGAAAMVLAGDALGEPKSADGAAEMVRVLRVARTSVVRARAKAYNALQDLVVTAPAALREQLAGLYKDRLIDACEQLPEPETLTTPTDAVIVAIKSLAARCRELDTEAARLGRHVDTITATAAPELRAIYGVGPDTAATLLTALGDNPNRIGSDAAFAKLCGVSPLEASSGKTIRHRLNRGGNRDANRALHVILVVRMRRHGPTRDYFARRLAEGKTKNEIMRCIKRYIAREVYHAVREPSKRTNELIA

SEQ ID NO: 507956 - protein, 328 aa, unidentified
MSKSSFYIGVDVGASELVAVLEGRKPRCFKHSRSGIKAIVKWAKKMALDAPLHFCLEATGVYGYSVACCLHQEHHISVSVINPAQIASYAKAQLRRTKTDSVDSQVILSFAQSQNPSLWKPESSTIRQLYYLVVEADRIGKAQGQWSNRKHGQKYLKDIPKVIKQTQKALERTMHRQLEKIEQAIVELCGQDKELKQDVKLLCSIPGISNHSAVRVLAYGKNALRDYSRNALTAHAGLAPAQKQSGTSIHGKARIAKQGDRRLRTTLFMPALVAAYHNPILKTFYQKLLKKGKPKMLALVAVMKKLLIMIQAILKNKIPFNSKYQFDN

SEQ ID NO: 507957 - protein, 458 aa, unidentified
MSKNSKKKKRAAAIPAAKKMERFELLNPHSAGVDIGSMLMVVSYTDGEGMINVREFDSFTSSLYELAELLQKEGVEKVVMEATGPYWESLYNLLEKHGMEMFLVNPSHYRNVSAQKTDINDAQWLHQLLAHGLIRNSHIAPELYRELRQYLHEREIYQNHKSDSLNRMQKTLTLMNVKFQHLISDVEGVSGMKLLRAISSGISDPQTLLARIDVKKLKASPEELLSSLQGDYKQHYIHILSNTLKSYDFFKEQMLAYESHIEKTLQELLACNGEYRTAIPKKTRKIRKNQYSFNLKDYLLGIFGVDLTEVEGLDEIGLLTILAVTGTNMKKWPTAEHFASWLNLSPRPKISGGKVIGYETRNSNNPATQAFRLAAHCLWQSKGPMGQQYKRLAATKGSKKAIKAIARKLAVIFYHMVLNKQAFDASRVQPDIAQQKARKIARLQKEAAKLGLTIQKAA

SEQ ID NO: 507958 - protein, 360 aa, unidentified
MSDGKASVALDAACAALQGAIVAGFDVHRRQITFDAIDTESGEVLRGKFDSTPAAVEQWIARFPGRVVHVAVEACTGWLFVARALERAGAVTHLAEPIETSALRGRKRRAKTDRADARWLRQLLFEGRLPESWMPPEHVRQWRSRARLRNTLAGERTSWVQRIRAVLYHHGIAGAPDDLRTLAGREFLATLELPVDASERIAVALEIIDLLEIQIATIERELRALARRQTGCRALMDELYGIGELSSLVTLCELGDVTRLHASRQAVRLAGIDIGVHRSDRTARLGKLTRQGSAELRWALYEAAQSACRPTSPDYQDYHALKDRGLSHTRASLTIARKLARRSYHVLRELGPAALEPITD

SEQ ID NO: 507959 - protein, 429 aa, unidentified
MAKNVNAKIQRITEGTLIVGVDIAKHTHVARSVDWRGIELGKPLSFENTRSGLESLERWLEELKRSHAKDELLVGMEPTGHYWMALAQYLRQRDIPAVHVNPSHVKKSKELDDNSPTKNDVKDALTIARLVKDGRYAEPIIPFGVYAELRGGMNQRERLVEDMHRAKGRIHNWLDRFFPEFVPTVFKEWDGKAALAILRKAWLPVDISEMEPEQVVHMWRAADIKRGVGLKAARKLVNAAQGSIGLREGSTMARQELQILMSQYDLIQQQLDQLEVQIAELLTEIPGAMQMLRIPGLGLSTVAGFLAEVGDLSLFTSWHQIRKLAGLNLKEDSSGMHKGKTIISKRGRSRLRALLYRGVFFLVATNPEFKLLHKHFKTRVGNPLKPKQSLVALCGKLIRILFTMGTRHVDYNPVRALGPAYRPLTNQVA

SEQ ID NO: 507960 - protein, 332 aa, unidentified
MSVYVGIDVHRKRSQVAVINQDGEVLANRNVPNGVEPILRVIGGLPSGTPAAFEAAFGWGWLVELLEDYGFEPHLVHPLQCKAIASARLKNDKVDAAILAQLLRADLLPEAWIAPPAVRQLRALLRHRIQLVRLRTLLRNRIHAVLAGHGHDRPAGYWSGPGRDWLASLDLPAVSAEVIADALALIDALESVTGRLDAEIRGHARSDPRVTVLTALPGVGPFTALVLLAEIGDITRFGSARKLAARAGLTPTVRGSDRMVRHGHISEQGSVWVRWILCEAAQTAKRSPEFAARYQAIARRRGKKIATTAIARKLLTRACHLLTDASSDGAPR

SEQ ID NO: 507961 - protein, 392 aa, unidentified
MIYVGIDVAKDKHDCFITNSDGEVLFKAFTFPNSREGFESLFRKIKSVSDDFNNVKVGLEATRHYSYNLLGFLLDKGLPTYVINPLHTNLFRKCLSLRKTKTDKVDSRTIATMMMSDMNLKSYSDISYRTEELKSLTLYRFNKVKERAKLKSSVSRLVCILFPELEKLVPTLHMASIYALLSEFPSANAVANAHLTRLSNLLSETSKGRYGKDTAVKFREAAKSSIGSHMPAKSLELKHTIKLILELTIEINEIEVAIKRIMDEEIQSPILTIPGISYRMGAMIIAEIGDFSRFDSADKILAYAGMSPSTYQSGHVDNCYSHMEKRGSKYLRYALYNATKYVCHWDDSFAAYLAKKRSEGKHYNVALSHATKKLVRLIYAMEKSGQAYLPTN

SEQ ID NO: 507962 - protein, 347 aa, unidentified
MALTIVETPITGGVDTHADVHVAAALDPVGGLLGVAEVPVTPAGYARLLSWLGGFGTVCLAGIEGTGSYGAGLARHLATAGVRVVEAGRSDRQDRRRQGKSDPLDAVSAARAAQSGRARGAPKGRDGSVEAIRALMVAKRSARAERTQTIGQARSLIVTGPDDLRTRFARHTVAALVAETASLRPRPGSTVGYATRIALRELGRRAQFPGGQLERLDELIVPLVTARAPGLLALYGVGPGTAALLLIAAGDHPERLRSEAAWAHLCAAAPIPASSGKRTRHRLNPGGDRQASHALWRIVITRMSSHPPTRAYAGRRTAEGLSKTEIIRCLKRYVAREIYPRLRAAAD

SEQ ID NO: 507963 - protein, 367 aa, unidentified
MKKINTVTAKKDEKVAIQKLTIGLDLGDRWSWYCVLDEMGEVVLEQKVATTPKAMKEVFGGMPRSRLALETGTHSPWVSRVLSELGHEVIVAHARNVRLIGESRKKDDRLDARMLARLVRIDPKLLAPVKHRSAQAQADLMAIRARAGLVRARTSLINTARGVTKSYGERLRGCNPRNMNPVKAQELSPELQAALEPLLGAIESLSERIVEYNERIEQIAKQSYPEVARLKQVKGVGTLIALTYVLTLEDAHRFSKSRDAGCYVGLQPGRRNSGQSEPQLHISKEGDRYLRTLLVQGAHHILGPFGGDSDLRRWGLKLAERGGKNGKKRAVIAVARKLAVLLHRLWVSGEAYEPLRNQRGVVLPVAA

SEQ ID NO: 507964 - protein, 342 aa, unidentified
MNIVYVGVDLGSSNFHQVADNEAGVRKVNREFATSEANLIKAFADQRGEIHVHLEAGELAPWAISIIRPLVSRVVCSHPQSNAWIAKDADKSDRIDAFKLADLLRLNRFKEVHYPQQQSRRDFKTLVQHYDELTQQQARLKTKIKARLRMQGVIVRGEQLFSATGRKVVLAAVKSVAVRTAIKQLYAVLDQSIESQTEARLLMRRAAQAFPEIRILQTAPGVGPIGACRFSAYIHTPNRFSSKRKLWKYCRLSVSHRSSNGKPLRRPRLDRSGCGRLKDVSRKAFEVAVRSRQDNGFKRAYQRALETTHDATHARLTVQRKIVSTLRAMWLNQTPYCDELIP

SEQ ID NO: 507965 - protein, 407 aa, unidentified
MISVGMDISKEKITVCALKEGCKIIWKPFDVYLNKSKVEGLIEKLEKIKEEVKIIMEATGKYHLPILYELKERGYFVTVINPLKMKQYCRALNFRKAKNDKIDAKQIAEYGLMYWKELEEYKVDEENYRVLKELNRSYQHYMDLRINQMNYIDQTIHQTFPGIKKLILHNSGDFSKDKLIDFLEKWWHKDLVLEKTEEEFVEEYKTWAKEKRYHPNANKAKAIYSLAEDSISTQPSLNPKIETNIREGINLIKQINQILNRILSQMIEISEPLEEYQEAKKFSGISEKLAVQIVAEFGNLSKFKNKKSLISFIGIDAPPYESGNFKADQRKISKRGNAILRKVGYQAMKCMMSAKNPENEIYNYMIKKEKEGKAKKVCKFAGLNKFLRIYYARVMEAKAKKKELKVA

SEQ ID NO: 507966 - protein, 439 aa, unidentified
MEVVYRRSCGLDVHKDSITACVLVLDEQGQRDVRIKEFRTYWKELQRLKLWLYASHVECVAMESTGVYWKPVWNVLEGHFRLLLANPYHMHNIPGRKTDQKDSEWIADLLAHGLLRASFVPPRPIQELRDLTRYRVKLTGEYNRVHNRIAKVLEDANIKLGSVASDILGGTGRAIIRALIAGEDRPDWLADKAISRLRSKRDELRLVLRGQVSDHHRYMLRELMEDVTRIEEQIGRIEGQIVQRLQPYEKALERLNTIPGVDWITAWTIVAELGTDMSAFPDADHAASWAGLVPGNFESAGKRKSNRTRHGNCWLRRALCQSAWAVSRKKDCYLTAHFYRRAARSGVKKAVVATAHQILVIAYYVLRDGVPYREQGGDYFDRLNPHKTRRRLTQRLERLGFEVVLKPLAPALAPEAGPPPRRGRPCKCAERGIDCKHRR

SEQ ID NO: 507967 - protein, 409 aa, unidentified
MEPFAWTVGIDQGPGEHFVVVMDSEGSVVGEHRFAHDGQGLLDLAEWVGERIGGAWERTAVGSETPWGSVIDTLLHRGAQAFSLNPKQLDRLRDRFSVAGSKDDRRDAFVITHGLRNDAHLFRPVRRPDSARLELRELGRLRDQLHKDRVRATNQLHALLSQVWPSLLKLSPGADERWLWSLLERAPLPGPARRLRRGTLEKLLREHRIRRFDVERLQEVLHEPLLELAPGLLEVTAYQLAVWLPRLRLLDQQCRQVEADLNQLLKAEKLCGGDDEPSDAAILASHPGIGTLTAAALLGEAGDELREYGHLRALAGVAPVSKISGRKRIVHRRYACNPRLARTVYLWVEAARKNYPEIQARYARLRARGHTHGRALRQLADARLRILAATLRNRTLYDAMHPQALAHNH

SEQ ID NO: 507968 - protein, 410 aa, unidentified
MGRIFGLDISKHSAEVAILEPGSSACKRRRFAARPASIQAFADRLGPDDSVALESCTNAFAFHKLLCQHAGRVIVSNPLKTRVIAEAKVKTDKVDAEILARLLAADFLPPVWVPDPFTDQLRHWVNHRQGLVTQRTQAKNRIHAILHRNLVTASVSDLFGKAGRAFLADVDLPPSERQLLEADLRTIDFLEVEVLAAEKTLAQAVHEDEQIRRLLTIPGVALTSAAGLKAAIGDIRRFRSPANLVSYFGLNPSVYQSGLKAYTGHISRRGRSHARTVCIEAAHQLVRVPGPFHAFFLRLKRRKPHNVAITAVARKLVVLIWHMLTKGEDYRYASPDLTRQKINRLHRLATGERAPRKPRASSGSRHQAGQDGENDYQHFLQERFGSQGPQGVDHPNQSPKKNLKNSRRSP

SEQ ID NO: 507969 - protein, 346 aa, unidentified
MEIHTLGIDLGKTIFHLVGLSASGETVVRKKFSRNQLLHFTVNLRVRLIGMEACGGAHFLGRALREQGHDVRLMPAQYVKPYVKTNKNDYIDAQAIAEAVGRPTMRFVPIKSDDQLDMQSLHRVRERWVGRRTAVVNQIRGLLLERGITVRKGRRHAEAALPGILEDPESNLSGPLRMLLVQLQRELKQLQSQIEEVDAVILKAAHEHEACQRLMAIPGIGPVIATAIVSAIGNGTDFKKGRGFAAWLGLVPGQFSTGGKQKLLSISRRGNCYLRSLLVHGARAVMQCRKKQSSGLSAWLGKLVSRVHCNVAVVALANKLARMAWALLAKGETYRPPLLAANPVTV

SEQ ID NO: 507970 - protein, 347 aa, unidentified
MVTLGGDCHKRTHTLVAVDDNGQQLGAKMVSAVSAGHLEALDWARQWAERRWALENCRHLSRRLEADLLLAGEVVVQVSPKLMAGARRSAREWGKSDPIDALAVARAALRESDLPVAQLEGKSREVKLLLDHRDDLVGERTRVQNRLRWLLHELDPNLNVPDRSLDREVVLKRVAKVLAVHRGVAADIAVEQLERVRQLTERINELEGQIRAVVSHLAPNLLELDGCAALGAAKLIGETAGITRFKTPARFAMHNGSAPIPVWSGNSARHRLNRGGNRQLNVVLHRIALTQMRLGGRGYDYIQHRRACGDTKKEAMRALRRRISDEVYRRMWQDSMKATSDQACAAA

SEQ ID NO: 507971 - protein, 319 aa, unidentified
MENKNYVGIDVSKDTLDVAIHESSQHWSFPNDHNGVSNLITLLKNHSPELVVLEATGSYEIPLAAELGIAGIPTAVVNPRQVRDFAKSVGILAKTDILDARIIARFAATVQPIPRAMVDEDSQELGAIIARRRQIVEMITVEKNRMATAKKVVRPRIQVHVDWLSEELANTNNDLQQKVKDSPIWREKDDLLKSVPGIGPTVATTLLAELPELGTLNRKRIAALVGVAPFNRDSGTLRGKRTIWGGRATVRSALYMGTLVATKYNPIIRRFYERLLAAGKAKKVALTACMRKLLTILNAMLKYHTRWNIKVAQLIGPCS

SEQ ID NO: 507972 - protein, 332 aa, unidentified
MVAGTHGSLNKAGSTKMTQISTTAGIDTSRAKLDIAVHGGVEHWQVENTSVGWRRLAVGLSQAGVTRVGIEASGGYERGVVGYLRDKGLTVLVLQPIQVKAYARVHLRRAKNDKLDAVLIAACAATIDQPRIEPDERLAKLAQHLTFVEQIEEDIARFKVRLEHIDNPRLRRMVLADIARLKTRRSAELSRIVMALRAHEDLGRRLDLVLSIPGLGERTAIALIVRMPELGRVSREEAAALAGLAPYDDDSGKHKGQRHIAGGRGRLRRSLFAAALPAAFRWNKALIELYTRLTARGKAHNAALIACARMLLIYANTVVHRGKPWVERPATI

SEQ ID NO: 507973 - protein, 313 aa, unidentified
MEKSLFVGIDVSKDILDVGIIPTEEVKRFTNDDNGCRELASWLSGSPPNLIVLESTGGLEMQAAGVLSSAGLPVVIVNPRQVRNFARALGKLAKTDAIDAMVIARFAQAVQPKVRPLKDDQTLELKALVTRRKQLSDMLVAEQNRLKGSHHRVKKSVTATISWLKSQIEDTDKDISDSISNNDIWRDKEEILTSVKGVGPVLSASLLCLLPELGTLCRKKISALVGVCPYNRDSGQYKGKRSISGGRADIRCVLYMATLSATRYNPIIKAFFERLKAAGKPPKVALVACMRKLLTTLNAMLKTNQKWNPAVAS

SEQ ID NO: 507974 - protein, 338 aa, unidentified
MTILTVGIDLAKNVFAVHGVNEAGKAELIRPAVPRDKLHELIASLPPCVIGMEACSGAHHWARLFQASGHTVRLIAPKFVTPYRMTGKRGKNDAADAAAICEAIQRPHMRFVPLKTLEQQSRLMVHRARQGFVEQRTATINRIRGLLSEFGIVLPLKAATVRRRACECLEDLPGHANTVIGDLLSEVTHLDERIAQYDAHIQAMAKDDERARRLMQLGGVGPTTATCLLAMIGNGHDFDCGRQFAAWLGLTPGQYSSGGKTRLGRITKAGDAYLRSLLVLGAKALLAAAKNKADPVSRWAIALAERRGYWRAVVAIAAKNARMAWAVLRRGDEFVLPA

SEQ ID NO: 507975 - protein, 347 aa, unidentified
MRFYTQQHPFYCGIDLHARTMYLCILDQAGETRLHRNMPATPEALLKAITPYRDQIVLAAECMFTWYWLADLCADHGIPFVLGHALYMKAIHGGKAKNDKIDAHKIAVLLRGGMLPQAYVYPAEMRATRDLLRRRMHLARKRGELLAHVHNTNSQYNLPAIGTKIAYKANRDGVAERFADPAVQKSIEVDLALITYYDELLRDVELTIVKTAKHHDAQTLYLLQTVPGIGKILSLVLLYEIHDIERFPRVQDFASYCRLVKCAKESAGKRSGTSGSKIGNAHLKWAFSEAAVLFLRDNPAAQKFLARLEHKHSKGKALTILAHKLARAVYYMLERQTAFDLDTFLRG

SEQ ID NO: 507976 - protein, 419 aa, unidentified
MNYVGFDWASRAHDVTVLDEAGGVLDRWAFPHSETGWVTTLDRLARHGSAAEVPVIIERTSGLIVDRLLAAGHPVVPVHPTAFYAARPRWGASGAKSDPGDSYKLADYLRTDGHRLRRLTPTDPGLHELQALVRLRDDQVRARTAATNQLTAILDNYWPGPKQLFMSLASQIALAFLTDYPTPTSAAHLGEARMAAFCRRHAYRGGKSPAELLSRLRAAPVAPVGLPPATLAAMVTAQVTLLKTLQTVISDVERLIAVRVVAHPRSNLFENLPGVGMINLAQLLAEVGPILDRVDSAEQAATECGAAPVTRSSGQTRGVYFRWAANTRARKAITSFAHNARMQDDWAAALYADARARGKRNPHATRILARAWLRVIWACWTSGQPYNLDRHHSSRFLHRCHPAGAQARSRWSPPPEERS

SEQ ID NO: 507977 - protein, 401 aa, unidentified
MSINGAPAATVVAVDVGKNTAVLSVTDSARHRLLGPVEFAMTAPAVAAAVGRVCAVLPGAAVKVGVEAAGHYHRPLLESTLWPAGWELLELSPARVSEQRRVQGRRRVKTDAIDLEAITELVLAGHGVPVTARSATITELSGWAVHRSRRIWTRTATKNQLLAQLDRCFAGVTLALPDVLGTQIGRLVAAEFADPHRLAALGVTRFVRFAANRGLRVRRSAAERLVAAARTALPAPEAVVARQVLADDLGLLACLDGQIAAAEAKIAKLLPDTPFAVLLTVPGWGTIRAGNYGAAVGDPRRWPGASQLYRASGLSPAQYESAGKRRDGSISREGSVQLRRALIDLGIGLWRSDPAARRYGQQLRARGKKGRVIGCAMAHRANKIAYALVRDQSGYDPNRWA

SEQ ID NO: 507978 - protein, 434 aa, unidentified
MNQTKLNRIASGQGDFAALIGLDWASQKHALCLCDCATAKRENSILEHTPEAIAHWARGLEQRFGGKKIALCLEQAKGPLIYALLEYSFFVLYPVNPATVARYRQAFKTSRAKDDPADAQVCLELLLHHREKLTPWLGNDGATRELSRLLEARRSLIDLRTLLTNMLRDALKSYYPQALELAGQDLFAALGCQFLLKWPSLEQLQKARTESVRKFYYAHNCRRMDVIEKRLQAIAQMKPLCRDRALIEPALIQVKMLVRQLLQLRTALKEYDSSIEHLFAQHQDATIWQSFPGAGPTLAPRLCCAFGSERSRYQSVLAIQQYSGIAPVQEKSGKNQHWVHRRWARPHFVHQSFFEYASQSALHCPWAKLFLKEQIARGKTHPTAVRALAFKWQRIMFVCWRDRVLYHETIYLDSLKHRGSYLARKLDQELPKAA

SEQ ID NO: 507979 - protein, 428 aa, unidentified
MAEGVCAGVDWAKDAHEVFVADGDGQRLWAESVSHDEAGITKLCRTLVTLKVDRVAVERPDGLLVERLLDAGLTVIVMHPNQVAAARPRFRPAGGKTDRFDAFVLCELARTDSHRFRTLVPDSDQTKALRALTRGREVLVEQRVALCNQLRAELERFWPGATMIFADLDSPISLAFLARYPSPVDARGLAEKRLGQFLARHHYCGRRSASELLERLRDAPTSRAGDTEAEARRGIALALVAALRPIVEQIRLLTSEIAHTVRTHPDGEIFLSVFRDPKSVITAATLLAEIGDCRARYPTPEHLAADAGMSPVAVESGRKKVACFRRGCDHRLRDATSTLADATRHWHPWAQDRYADARGRGHDHPRAIRTLGRAWCRVLWRCWQDSIPYDPARHHGLQQHCTITTPTPSGPQPDPTAAQPILENTLRG

SEQ ID NO: 507980 - protein, 372 aa, unidentified
MNNSIVYIGMDVHKESYTVCCYTFDYDRIEYLQKMNADYKNILKYIESIRKRYPEDAEYVCGYEAGCLGYALYHQLTDHGVKCIILAPTTMATTNNKRVKTDRRDAGSIARCLAFHTYSEVYVPTDEDNAIKEYIRMRDDQKKMLKGTKQQILALVLRHGKRFDGGKTYWTIAHIKWLKALKLDGVIQESLDEYLITYEYLVDKIERLDRRIEELATGERYEEKVSKLKCFIGVKTHTALSLVVEVGDFERFAKAGNFSAFLGLVPSEDSSAEKQNKYAITKAGNSHLRRLLVEAAQAYTRGAIGHKSIALKKRQEGNSPENIAYADKANERLRRRFYRMTLKNGTKRNVATTAIARELACFVWGMMTENIA

SEQ ID NO: 507981 - protein, 319 aa, unidentified
MSEVTIIGIDLAKRVFQLHGASEDGSVVFRKKLSRGQVLAFIAQQSRCVFAMEVCATAHGLGLEFEKLGHDVRLIPPVYVKPFVKRQKNDAADAEAIVEAALRPTMRFVAVKTEDQQARAMLFRNRRMFVGQRTQMINALRGHLAEHGLVAATGTAQLKRLADVIEDSDTALPEGVRDLGQMYLAQIEGVNARIAELDQKMKCAAKEADVARRPQTMSGVGLITALAIGTFDPDLATFRRGHDFAAWLGLVPKQHSTGGKARLGKTSKMGQRDTIADAILDRIIHNAHRIDLKGDSMRRKSTKPELTTTENAEIISQDQ

SEQ ID NO: 507982 - protein, 343 aa, unidentified
MDHFAGLDVSVKKTSVCIVDDMGKIVREVKVASEPEALLAVLKNPAYQFKRIGLEAGPLSQWLYSALAEAGMPVICVETRHMRAVLKAQINKTDRNDARGMAQMMRVGLYRPVHVKTLRSQKLRMLLTHRQLLLSKAIALENDLRGTLRNFGLKVGMVGKVKFEARIRELVETLPDLAVLVEPMLIVRRVLREQIVILHRRLLAVVRDDEVCQRLMTTPGVGPVVSLTYRATVDIPARFRKSKSVGAVFGLTCAKYQSGEVDWDGRISRCGDEMMRTMLYEAAQAMLRSKKWSWLKAWAMQIARRRGIKKAIVALARRLAVILHRIWVDGTEFRWTREQAVAA

SEQ ID NO: 507983 - protein, 370 aa, unidentified
MVKRFHGIDRHRQSATVSILNREGIEEKFIGSIKDFGGYVETLGPEDAVVMETGAGSFYWADKIEARGAQCFIIDPYRFRIIKDSWNKTDKRDSRNMAKALWVYMVTGEFGLPTVYKPSALIRELRKLYTEYQVLNKQIRVFKNNIQSVLADKLRVLPRLEKNHLLSVKHGKERLKELDISDASEISIRINLELLWVVLEKKEELVKEILRIGEPLKDEVDLLISIRGITPLTALAFLADVGDIRRFKTLRKMSAYLGLVPKMRESGEKSRSGHINRASRKLTKTFLTQSLVQITDASAYFRDFYDALKLRRGAGRARIALIRKLCGIMRRMLLNEEEFRHIETALYEKKRLQYEKELMQIKEERERKSA

SEQ ID NO: 507984 - protein, 402 aa, unidentified
MNCVGIDVSKGKSMIAVMRPFGEVVVSPFEVLHTASELSELARLLKSLDGETRVVMESTGNYHAPVAWLLHDAGLYVSVVNAMLVHDYGNNSLRRAKTDKKDAVKLANYGLDHWLTLPRYVPVEDTRLMLKACYRQYQQYSKVQTMLKNNLISLLDIAFPNANRLFTSPPRADGSEKWVDFVAAFWHCECVCGLSEKAFTAKYQKWCKKHGYNFSEDKALDIYAFAGSRLGVMPKTDTTKLLVEQAISQLRATSAALAALKQEMQSLATSLPEYPVVMEMFGVGPTLGPQLMAEIGDVRRFHSKKALVAFAGIDAPPYQSGQMDVRSRSISKRGSASLRRTLFLVMGVLLQCAPADEPVYQFMNKKRSEGKPYRVYMMASANKFLRIYYASVKTHLDSLEHD

SEQ ID NO: 507985 - protein, 423 aa, unidentified
MMRLVYPICCGLDVHKNVIVATIVTTNSQGISEYLQKSFSTINSDIQKFHDWLIENNCYHVCMESTGKYWIPIFNYLENDIEVCLTHPKYVKAIKGKKTDKKDSKWIADLYKFDLVRCSFIPPKDFRQLRELARYRFKLVCMKSSEKNRIQNCMTVSNIGIASILSDPFGKTATEIMSYLLEHTSESMDEKAVRKLIKKGAKAKSDEIIEAIKGYNIETDQAKKLELARAHLDYLDDMITQTEVELYVRIKPYYEFVEFVSSMPGMTELSSTIILAEIGINMDIFDDVKHLCSWCGLSPANNESAGKKKSVRIAKAGAYLKPMMVQCALAAIKNKKEPYFAIKYGRIKKRRGHKKAIIAIARMMMVCIYHMVSEKKPFSPTDYEELMDPQNHVERVVLNENNVFAYLESLGYDSSQLVKRNDY

SEQ ID NO: 507986 - protein, 339 aa, unidentified
MERQYVGIDLHRRTSTIHRMNADGEMLGSVRIPSQPFELAQAMAEAGEQPEVVLESTYGWYWAADLLKELGANVHLAHPLGNNWGNRKVKNDAIDAKDLAAMLRLGRLAEGWIAPPEVRELREVVRYRFRLVGHRTSVKTQIHGVMAKNGVLPVRKEMWHTSGPAQLDELCETLPEAYVLRLQSLRDLLEVYDAEIVTVDDYLHRQLKDDPGYRAILKIDGVGKVIGAIFVAEIGDVSRFPSAKKLCSWAGLTPKHRESDAKVWRGSITHQGSPLVRWAAIEAISKYRGGEKLRDDYFRIADHAGKYKARVAVARKLLTLVYYGLRDGEIRSLQAPEAA

SEQ ID NO: 507987 - protein, 355 aa, unidentified
MKQLEKVLKEVAGIDVAQKELVVSLGRLLESLSIEIFAYKVFVNSDKGIQSMIEWVSSCCENAAQMRYVMEATGVYHERLAYALESMNIDLSVILPNKISNYARSLDIKTVTDKTASQAIAQFGLERKLDNWVRPKDIYRELKQLTRERDQIVEERAMVKNQRHAEKSEAMPNQKSLVRIEDRIKFLNRQEKEIKLDITTLLKSHPELKQRVDNICTIPGVGELTAVTVLAETNGFELIRNKKQLTSYAGFDVKEKQSGTSIKGKPRISKRGNRHLRKSMHLPSLSSVKYNQSHKDLYVRLVSKSGIKMKALIAVQRKMLELIFVIDKNQNPYENDYHQKRVHHTNAEVPLQANL

SEQ ID NO: 507988 - protein, 338 aa, unidentified
MEQKLPTTPEAMKETFSRIPRCRIALETGTHSPWVSRLLTPLGHEVIVAHAQRVQLITKSSWKDDRHDAQTLARLARVDPELLGPVRHRSVQAQIHLTVIRARAELVSARTALVNAARGLVKSYGERLPQCGTYQVSGKLAEGLSAELREVLVPLLREIESLNERIKEYDERMEKIAKEVYPQVSLLKQVKGVGTQIALTYVLTIEDPYRFPKSREVGCFLGLRPGRRNSGKSAPQKHIRKEGDRYLRTMMVQGAHYILGPFGEDGDLPRWGLQLAERGGKNARKRAVVAVARKLAILLHRLWVSGEVYEPLRNSQKRCGQWPRELRSGQLSSTAESG

SEQ ID NO: 507989 - protein, 400 aa, unidentified
MISVGVDVSKGKSTVCILKPYGEVVSSPFEIHHVEKDMEDLDNLLSKLDGEVRIVMEATGIYHLPVVTFLHDKGYFVSVVNPFAMKKYAKDNSIRGAKTDRLDSIMIANYGIEKWFKLQRYEGTEETYAELKLLGRRYRYYMELHVKALQELTHVLDYVLPGIKKMFNSWNEANGKDKLSDFVERFWHFDLITSMSLEKFTEEYIAWAREKKYHRSRSKAEAVYELASSGIPTLSSSTPSTKMLVQEAVSVLRAVDSSLSLILTRMQELAKSLPEYSVVREMGGVGNVLAVKLIAEIGEVRKLHNAKALIAWAGIDPPPYESGQFIGSKRRITKRGSSTLRKVGYEVMRVLKSHSAPKDDAVYNYILKKESEGKSKKHAKIAGLNKFLRIYYARVMEVYQ

SEQ ID NO: 507990 - protein, 393 aa, unidentified
MRLAIGVDVAKDMHWVTALTELGDVVLDQRVANTPDELTALAAELVALGGERTVGIDVVGGIASLVTAVLLDAGERVVHVPGLAVNRARQGTTGGEAKSDPRDARVIAEQVRTRRDLRPIDAESETMVELRLLVGRRRDLVVEQTRRLARLHDLLVTIHPGLERRLDLTTKGALYLLTRYVTPTELRRAGRARLVSFLRTCPHLQRLEALAAAALEAAHEQRLALPGEAVAATLCRELASDALRTRERLGTLDQQLTELLARHPDGTLILSLPGMGVILACEFFVEAGSLARFASPDALAAAAGLAPVLRQSGKVRFLRRPLGGNKNLKRVLYQSAFCSLQHPVSRAFYDRKRREGKRHHQALIALARRRVNVLWAMLRDRHPYQVRPAGQAA

SEQ ID NO: 507991 - protein, 410 aa, unidentified
MKKHNYRTKKVNEINWPELGQQLGGEAVTFAVDVAKAQQYALLTNDTQSLSIIVKWELLETKGLIHELKQLNCPVTVVMESTGTYGDAMRHQFRQAGFILYQASAKRVHDAKEIFDGVPSLHDAKAACLIAKLHKEGLTKPWHELDEAGRELNAVRREYDMHQSQYERNQNRLEAYLSRHWPEVLGLFDLDSVTLEKLLITYGSPQAIAADAEQAAKDMKAWGGHFLSAEKIACVIDSAVGTIGQPCIDAERRYLQALATEMQHSRCQRQAAKQLLEASVEADAGLKEMAALIGKLTTAILIGLHLDPRNFSSAHSFLKALGLNLTEKSSGQYHGQLKLSKRGSATARKYLYLAALRLIQKDPVIGEWYRAKADPKVKMKTVIACLRKLAKALWHVARGERFDARKLVTI

SEQ ID NO: 507992 - protein, 339 aa, unidentified
MKLYSAIDLHSNNSVLVVLDEKDKTVYERRLPNQLPMILAELAPYKKRIQAIAVESTYNWYWLVDGLVEEGYEIKLVNTAAVKVYEGLKYTGDEHDARHLAHLLRLGVLPTGHIHPKEDRAVRDLLRKRGQLVRYRTMQILSIQATVSRNVGHGLSTDEVRKLDDATIDRFCGGNVARALAIKSNLVMLRCFDTQIAEVEALALQKAKLKPEFKKLLTVDGIWEILGMTIMYEAGDMDRFAKVGHFASYARCVGSSRWSNGKKKGEGNRKNGNKYLAWAFIEAAHYAIRYNERIRGFYQRKLAKTNKIVAAKAVAHKLARACYHVLKEQTPFDEARAFA

SEQ ID NO: 507993 - protein, 349 aa, unidentified
MSQNLNSAVAVIGIDIGKNSFHVVGLDDRGAIVLRQKWSRGQIEARLANMPPCLIGMEACVGAHHLSRKLKALGHDARLMPAKYVRPYSKGQKNDFRDAEAIAEAVQRPTMKFVATKTADQLDLQALHRVRERLVSQRTGIINQIRAFLLERGVAVRQGLRFLRAELPRILATPPDVLSARMVQVISDLAEDWRRLDHRIDDLSNQIAVLARQDAGCERLMSVPGIGPIISSAMVAAIGTGDAFSKGRDFAAWLGLVPKQISTGDRTILGKISKRGNRYLRVLFVQAAWVVLIKPMSWDRHGLKPWIEAAKKRLHRNVLAIALANKLARIAWGVLSGSRTFEVSKLQAA

SEQ ID NO: 507994 - protein, 374 aa, unidentified
MESSITYVAMDTHKKDHKIALHYPGEEQIVQFTVKNNARDIKKMVTKIKKQAPGEVVFCYEAGVCGFTLKRRIEGLDCACLVIAPSLTPVKPGDRVKTDRRDAKKLLALLQAGLLTEVHAPDIEQEAARELTRCRQTAQENLKRVRHQLLKFLTRHGYVYTDGNHWTLKHLRWLRTLAFEQPLLRDVFDSYCTEMQHGLQRLDSLDKDVEKLAQSEPYQEVVGLLRCFHGIDTLTAITVITEIFEFGRFSTPGELMSYPGLTCSEESSGQKERKGSITKAGNKRVRRLLVEASWHYRHPYSATSKALKQRRTDQPQWAIDIADKAGQRLRKRYWYLVNNGKMPCKAAVAVAREFAGFIWSLFNEYQTRNQDQAA

SEQ ID NO: 507995 - protein, 366 aa, unidentified
MKKISTVQIFESEIFKEQRLTIGMDLGDRSSCYCVLDETGRILLEQKVAMTPEAMKQTFSKIPRSLIALETGTHSPWVSRLLTELGHEVIVAHAQKVQLITKSNRKDDRHDARTLARLARIDPELLGPVRHRSAQAQIHLTVIRARAELVRARTAMVNAARGLVKSYGQRLPKCGTRKVSRELGAGLPAELGEVLEPLLKEIESLNERIKEYDERMEKIARESYPHVELLKQVKGVGTQIALTYVLTLDDPQRFAKSREVGCFLGLKPGRRDSGESQPQLHISKEGDRYLRTMLVQGAHYILGPFGEDSDLRRWGLRLAGRGGKSAKKRAVVAVARKLAVLLHRLWVSGEVYEPLRNSQKAMRAVA

SEQ ID NO: 507996 - protein, 346 aa, unidentified
MALAAISVLGVDLGKNVCSVVGLDSAGAVVMRRKMRRETLVALAEKLPACVVAMEACCGAHHLGRLLAARGHDIRLMSPEYVRPYVKAHKNDDRDAEGIAEAATRPTMRFVELKSQDQLDMQTLHRSRDRLVGERTALINQLRAILLERGLVAPQGKRKLEQFLAVLMDEQGGAGLSPRMILLVADARAQWAELDRRIAAFDAEFVRWAKENEDARRLATIPGVGALIASALVAAVGRAESFERGRDLAAWLGLVPRQFSTGGKPKLLGISKRGDRYLRRQLIHGARSALPSVAERDTPLGRWAKGLLGRAHRNIAVVAFANKLARIAWAVLQRRERFAAAPIVAA

SEQ ID NO: 507997 - protein, 319 aa, unidentified
MAQNGLVVAGIDIAKDKADVSIRALSQRRTFASTAEGRRQLITWLRKHKVTKAVMEASGGYEREWAMALREKDIEVRIVDPKRVRHFAQSAGRLAKNDAIDADTIAWFAETFGEAPSQAHDAAREKLRQLVNARQGLLDIRTVLSNKAEHDVPEPVQKSHTRLLKAIAVELAKLEAAITAMIKATPQFAERAEIIESVPGLAGTTSAGLIAALPELGQVSNEAISALLGVAPYDDDSGKRRGERQIKGGRRKVRNLFYMACLGAATRHNPALKAFYRRLIAKGKKAKVALVACMRKLVVILNIMVARGEKWDASRYAVD

SEQ ID NO: 507998 - protein, 321 aa, unidentified
MVYIGIDISKSSFIAAYPSTNGYRTKTYPNTIAGIRKFIATLSVAEHHCIMEATGNYCFLLLYLLHQSGIVVSLVNPKQIKHFARMMMAVTKTDEKDACMIAMYGEKMNPPVYKMPSQAIILLRQKKTVIRQLRKQLVASKNLRESLVVLPYRDKDCVRALDKTIDFLTKQIEQLEAELADIASAEFDKQLKALTSTKGIGITLATALILTTGGFTYFDNAKQLSRFIGICPTYQQSGTSVNIKGHINRNGDEHLRSLLYVASWSALRSNAACRESYLRLKANGKPSKVALIAVANKLVRQAFAIATTDSTYIDGFVSTKK

SEQ ID NO: 507999 - protein, 382 aa, unidentified
MGKAITGVRRFVGLDVHAETIAAAIAEKDQAARDVGTIPNREESIRKLAKKLTEGGAWAACYEAGPTGYALYWQLTKLGIPCVVIAPTLVPTKAGDRVKTDRRDAQRLASSFRAGELTPVWVPDAEHEALRDLVRAREAAKQDQLRARHRLGKYLLRHGKKPPQQMRAWTENYLQWIKGKVSFDQRSQQVTLEDYLNEVDHAGTRLVRLEKAIDEAVEQAPANMRELIRALQALRGVAKVGAVTIVAEVGTLTRFEHPRQLMGYSGAVSSENSSGGKIRRGAITKTGNAHLRRVIVEAAWSQRHKPVLSLAMRKRQEGVSAEVQELASKARHRLHHRYMHLLGKGKTKQEVVTAVAREMLGFIWAIGVCVERAQAQKGKDVA

SEQ ID NO: 508000 - protein, 341 aa, unidentified
MLYIGLDVHDKYTQIQAIDEAGFLAMTETLPTTAESLGSFLNQLPGSAAVSIEAGRNYWWITQLLNSHSSVNEVKVVDPRRSRILAEEFSVRSGYGRAKNDRIDAEMLAEIHRQGMSPAIYLPTEEQLEWRTLVRHRMGLVQQSTSAASRLQGLLSMHGVRISTSSLVDDFQAQLESLQSLPDYARSVLQHLLVQIHLYQKQIKHCERRLAKCLPPSHPKIKLLMSAPGIGIVLARIILTEILSISYFKAPNYLMSYAGLAPVENVSGGKKGVIQLNHHCNYYLKYAFIQAAHTARHHPKYRKKYNQDVKRHGKTRAKTNLARRIIKAVYWMLTRQEPFHS

SEQ ID NO: 508001 - protein, 320 aa, unidentified
MAQKKSRSVIGIDVSKDWLEVAVHESDYHFRSPNKVSALAKLIAELVDLRPTVIVVEATGGLERPVVYALHAVGLPVALVNPRQVRDFAKSTGQFAKTDRLDACVLAHFGAAIKPPVRPLKSEAEQELDALRGRRDQLVEILADEKNRRASAPTPKIREQIEAHIDWLEEHLAELGEQLKALLKTSEHWQLKDQILQSTPGIGAVISSALIAELPELGTLSRQQISKLVGVAPLNDDSGKKRGTRHIHGGRAQVRRLLYMAAFNAIRCNPVIKEFFARLTAQHKPYKVALTACMRKLLAILNFLLRTNAKWIDKTIPTSA

SEQ ID NO: 508002 - protein, 343 aa, unidentified
MRLTRVGVDLAKQVFQVHGVDRAERPVWCQRLKRGRWIAEFERSVEPGCEIGMEACGGAHHWARLLQSKGYVVKLIAPQFVKPYVKSNKNDATDAQAICEAMSRPSMRYVAVKTVEQQDIQAVHRVRASLIGERTAKANQLRGLVYEYGLVAPREIASLRRAVPVWLEDATNGLSARFRALLAALYRDLRWLDERVHELDREIAAIVRENQAVQRIEQLRGIGPLTASALVAMVGDGRQFKNGRQLAVALGLTPRQHSTGGKEKLLGISKRGDKYIRTLLIHGARSALRTAPGKTDRLSRWALALAERSHPNVAATALANKMARVAWAMLRHGTNYEPERMAA

SEQ ID NO: 508003 - protein, 360 aa, unidentified
MAKKSVAELAAIVRGEVGGRVWLGIDVHKSSYQVAMMTRDGREATWSSVACPHSLVTQVRGLGVKVALAVYEAGPTGFGLARALRSAGIAVCVAAPSRVVRPVSAGAKTDRLDCLKLAEYGAKGMVKSIAIPSESEEAERSLLRRRHQLVDELRRTKQRIKSHLLCLGVEEPSGLKGWSRRGVAELKELSLPREAKWTLESLVRELEYVMGEQAVVERQLACVMETPRHQEVFEALRSVPGVGPVVATSWCLELFRPQRFLCGEELASYLGLAPVVRQSGSGKARARIRPVGKRRLRSLLVEAAWLWRAWDPWAAQWYRRCLARTGVFQKAITALARKLAIILWRLSVERRPYRPGLANA

SEQ ID NO: 508004 - protein, 344 aa, unidentified
MQTMYYIGLDVHKRTISYCVKDASGRVYAEGSLPATRFDLDRWMKTLPQPWTAAMEATVFTGWIYDHLQPHAAALKVAHPLMLRAIAAAKKKNDRIDASKICDCLRCDFLPECYMASTAIRERRRTLRYRNLLVRQMVQMKNKISGLLMEAGVSYNKQRLHRAGYFRELLATNSGIDEGLCSLLRLCRETVVRLQKTESAVVLSLERDSLLMDRVERLMTIPAVGPITALTWALEVGDAKRFSSIKKAISYCGLCGAEKSSANTVQRTPLSKQRNKHLQTTLIEAAKMAPRYSPNLAMLYDKEKQKGNANRATLAVARKLVAYLMAIDRGQRNFQAVETNCIAA

SEQ ID NO: 508005 - protein, 421 aa, unidentified
MTPTSHDTFAAFIGIDWADAKHDLCLQAAGTAKRERFQLEHTPEAIDAWVTTLRTRFNGQPVAVCLELDKGPLVSALRKYDFLVLFPINPLTLARYREAFTPSRAKDDPTDAELQLELLLTHRDKLQPLQPQSPTMRALAQLVEHRRRVVGDKVRITNRLTSALKNYFPQVLQWFQDKDTRIFCDFLSRWPTLKAAQLARRSTLETFFRDHHVRTADVLATRMHAIKTATPLTTDEGVIAPNALLVQTLVSQLRVTLDAIEAFDHAIAQRAQHHPDFPLFQALPGAGPVFASRLLVAFGEQRERYASAAALQKYAGIAPVTERSGKKAWVHWRLQCPKFLRQTFVEWTAESIRHSFWAQVYYQQQRDKGNTHQAAVRALAFKWIRILYRCWQERTPYDESTYLQALTRRGSSLLQNLAKVS

SEQ ID NO: 508006 - protein, 342 aa, unidentified
MDHYAGIDVSLERSSVCVVDATGRIIRETKVASEPEALVRFFRELGLPLTRVGLEAGPLSQWLHAGLTGAGLEAVLLETRHVKAALSAMIVKTDRKDARGIAQLLRMGWYRPVHRKSPDAQEARALLAGRKLLQAKLRDVELSIRGILRGFGLKVGEVSKGRFAARIGELIAGHEMLEAVIGAMLRAREGLRAEFVRLHRRMLAIVRGDAVCRRLMTVPGVGALVALTFKTAVDDPERFRRAKAVGAHFGLTPKRYQSGETDVSGGISKVGDASVRTALYEAANAMLTRVSGISALKRWAMGVAKRRGMKRAKVALARKLAGVLHRMWANGADFRWGEEAVA

SEQ ID NO: 508007 - protein, 477 aa, unidentified
MAKTNSTQKQSTPKSSSNFKSSRHRKSKNRAPLKPQDWTLGLEVVHPKAAGIDVGNTEHWVAVPPHMDPEPVRVFGCYTRDLIAMADWLQSLGIQTVAMQSTGVYWIPLADILAERGIRVFVVNARDTKNLPGRKSDFQECQWLLKLHVYGLLHNSFRPEEEILRMRTYWRQRQQHVEDAARCMQRMQKALTQMNVQLANAISDISGATGQAILGAILEGERDVRVLAELRDPGIQASEEEVMQSLEGNWREELLFILRQEFETYHTFQKKIGECDQQLQAHYQGMESKADPKKLPPCRREKRPHGNVPKCFDLRSELFRTTGVDLTAIDGINVLTAQTVISEVGYHMGRFDTEAQFVSFLNLAPNNKISGGKVVGREKRKKRSRAGLALQQSATSLLRSDSYLGAQYRRLRTKLGTPKAKKAMANRLARITYRMLKYGEAYVDKGKEFYEQRYRQIQLRMLHRKAAELGLQVIEAA

SEQ ID NO: 508008 - protein, 315 aa, unidentified
MNQSTDSVKFLGVDVAKDTLQLFSRTLKVPAQIENTPKAIAAWLKALGRHHSQLHIACESTGGYENALLRACWKVGVRVSRLNPARVRDFARCRGLLAKTDAIDAEAIAEFASTFPPQPTPEPSAQQVLLTELVARREDLKTQRAAESNRTRDIQDKSLCRMLEKHLKFLDAQIKQIDQLIEDTISQDQEMSRKRDILVRTKGVGKTSAAILLSCLPELGTISGAAISALAGVAPFNRDSGTLRGKRSIRAGRATARKALYMCALVGSRTNSILKEIYQRLTSKGKPPKVALTALMRKLVVHLNSSLKTLQSTTA

SEQ ID NO: 508009 - protein, 351 aa, unidentified
MLIIGCDFHTRFQKIAMMDTTTGELVTRRLEHGTGEAEKFYAALAAPVRVGIEATLATQWFEKMLRHYGHELWIGDAAEIRAAMVRKQKTDDRDALHILDLLMQNRFPRIWVPSPAERDVRQLVRHRHKLVRFRTSVMNQLHALAMGQGLCLRKKLWTTVGRQKLESLTLDPWASRRRRELLELLDQLDPSIGELDRAVISEAESRPTAVCLMQQVGVGPVTALAFVLTIGPVSRFPNSKKLVSYLGLNPSEESTGGRQRLGAISKQGNTMLRCLLVEAAQTSARLDPELRRNYQRLKLRRGNSGVAKVAIARKLAVRLYWKLREADRPNTAARMQGSPASPVVGESLSAN

SEQ ID NO: 508010 - protein, 411 aa, unidentified
MDKIYDKCCGIDVHKKLIVACFRCGKKQEIREFGATTRELLQLADWLKDGDCEMVAMESTASYWKPLYNILESSDLNAIVVNVRHMKAVPGRKTDVKDAEWIADLLQHGLLQPSYIPDKDQRELRELVRYRKSLVGERTRELNRLQKMLEGANIKLSGTVSDINGKSARSILEYLLTGKSIDGAKYDEMYEQKIIAHNLKATKEQIVDDLNGVMSPLQRRMMKELLVHLDELNVHIKNLNDEIDNFMKPEEKQASQAIQDVTGIGNTSAQAIISVIGSDMSRFPTDRHISSWAGLCPGDNESAKKRKSCKTRKGNALLRTTLITCAHAAVKNKKSYFYAQYMRISAHRGSKRAYVAIAHSMLISIYHILKDGVVFKDLGANYYNQFNKERKINAYLKKLKALGWEAPIVDA

SEQ ID NO: 508011 - protein, 377 aa, unidentified
MKKVRFIGLDVHADTIAVAAAEPSGEVRSVGVIPNRPESIRKLVKKLGPPAQLRVCYEAGPTGYVIYWQLTSLGVRCEVVAPTLVPVKAGDRVKTDRRDATKLARSYRAGDLTPVWVPDAAHEALRDLVRAREAAKKDQLRARHRLGKFLLRHGRRPATATTPWTQRHLTWVRQMQFEQPAQEATRLDYLHEVDHVADRIERLERAIDDAVKTAPPCMRAVIEGLQALRGIALVSAVTIVAEVGELSRFTRAPQIMGYGGMGAREDSSGTRTRRGGITKTGNAHLRRIAIEAAWAYRHRPAVGGALRKRQVSLSEEVKAIGWKAQLRLHARYRKLLGRGKCRQHVVTAVGRELLGFIWAIGVTVERQQRQTPSSAAA

SEQ ID NO: 508012 - protein, 443 aa, unidentified
MGRPQVIDDEERERVYEKVAAVDVAKDSGMVCTRLPHPSRAGTRQSTVWTVQARMGAIRELGRQLARGGIQTVTLESTSDYWRIWFFVLEGCGLAVQLVNSSQAKNLPGRPKTDKLDAMWLARLTEMGLLRASFVPPAPIRALRDYTRARTRLTQERTRCWQRLEKLLESALIKLSSVASKLTTLSAQDMVRALIAGERDPQVLAALARGKMKAKHDDLVEALDGMFGDHHGELAQLLDSKIAELTARIEEQAAAQPGAWGVNADGTTGPGAGTSPGDPVLPVVQRLAQVPGISEDLARSIIAETGLDMSRFPDAAHLVSWAGLCPRAHQSGPRARNGKKGRGNGYLRGYLGQAAIGAAATATFLGERYHRIARRRGKAKAQVAVARSILVIIWHLLASPEARFTDLGYGYYQARTDKDKRIKNHIRQIEALLGHPVTIAKAA

SEQ ID NO: 508013 - protein, 370 aa, unidentified
MEKYKFVGLDVHKETIAVAIAEADGGEVRYLGEIPNTPDAVVKLVRRLRKEGARLSFCYEAGPCGYGLHRQLRDLGQDCQVVAPSLIPKKPGDRVKTDRRDSLNLARLHRAGELTAVWVPDGAQEALRDLTRAREDMKHLQRQAKQRLLGFLLRHSKRFEGKDNWTQAHFRWFETVKFEQPVQQIVFQEYVDSVQAMTRRVEAFDEQLERAASESVFWPVIEGLMALRGVKLITATTTVAEIGDLRRFATAPQLMAYLGVVPSEHSSGESKSRGGITKTGNGHVRRVLVEAAWQYRYPARKTAVLQRRAERASEQVQEIAWKAQKRLCARYRLLEARGKLKVQVCIAVARELAGFIWAIGQTLPQPAARG

SEQ ID NO: 508014 - protein, 511 aa, unidentified
MPGSVMRRAHRRCRRVGEPTMTNEAHTKKTHVIQVRHRLGAGIDVHNEYLTACIAVQRGPVIERVAVQEFKRTPQGLGEMCRFLGKHIIETIVMEATGVYTPVVLDVLEAFKGWSSIMPRIVVINPTIIRKFPGEVHEDKRDALGLARLGLSGLATGSYIPQGFQRVLRTLTREMRFIDRDCTRAKNRIKRILSLHGLPLKDFSLDSKWATYVFEALLKARGHFGKTMDLITSGTMNIPSTSKSAIERRVKDFQQYVTISIPLPLLSVLESYYLQLAFNATIMERIRPKIEELVSSDPVVLRQVRQLATIPGLTEAAATSLVAEVGNVARFRNRRAFLNYVGCASAQYISGKTALAGRLSPRANKFARYVFIMAGKAIVDNVTKDSELKEYARKQLNENWNDKKLAYTNTGIKVARVTYAMLRNGQPFDQYRETRPAAPTESNENEGIVPGAPDKLVLKTIRQKTRSLVKFMERHLDGDKGPHFARLEEIFKQLQQGKDDEEESDNQEKTK

SEQ ID NO: 508015 - protein, 403 aa, unidentified
MNSVGIDISKGRSTVAVMRPFGEVVISPFEVRHTDSELSELARQLKSLDGETRVVMEATGNYHTPVAKLLHDAGLYVSVVNAKLVHGYGNNDLRRVKTDKKDAVKLANYGLDRWLTLPRYIPEEDTRLLLKNCYRQYRQYSKVQTVLKNNLISLLDTVFPNVNRLFSSPIRGDGSEKWVDFVAEFWHCRCVSEKSQKAFTSKYQRWCRKHGYNFSEEKAHTIHAEASGYIGVMPKSETTKLLVEQAVAQLRATSAALTALKHEMLALAAQLPEYPVVMGMFGVGPTLGPQLIAEIGDVRRFYSKKALVAYAGLDAPPNDSGDVTGKHKSMSKIGASSLRRTLFLVMSVYLQNAPLDEPIFRFMDKKRAEGKPYRVYMMASANKFLRIYYATVKAYLESLEHTA

SEQ ID NO: 508016 - protein, 361 aa, unidentified
MIVIGTDTHKATHTGGAVDAATGRALAELTARARTGGFEELLMWARTLAPERVWAIEDCRQVSGAFERFLVKRGERTVRIAPKHMAGARKSARERGKSDSIDAFAIARAALREGIETLPTAHLDERALEIRLLCDHREDLVSDRSDDQQRLRWHLHDLWPELEIPAGALDRDKWLAKVSARLARAEQGARVRIARELVRQIKERTRKVRALERELGQLVCAYAPQLLAERGCGPLTAAKLVGEIAGAERFGSDAKLARAGGVAPIPASSGATNRHRLDRGGNRQLNAALHRLAVNKGNHCPESAAYLARKQAEGKSRKEALRCFKRFLARRAWKLLRAPSSTDPDPLSTKVEQPISVVALT

SEQ ID NO: 508017 - protein, 339 aa, unidentified
MKLYAAFDLHSSNSYLAVIDEEGKRHLEKKLGNDPEAIVRVLSPYRKKIAGIAVESTYNWYWLVDLLMAKGYEVHLANPAAIQKYKGLKHADDRHDANWLAEMLRLNILPEGYIYPKEERALRDLLRKRGHLVRLRTSLIISLQHIITRNCGIMVRVNDVKRLREDRISPLLDSNEDILMAGTVSKETIDYMTRKIKSIEKIVEGKVELSLPYQQLLSIPGVGKILALTIMLETGSISRFQKVGNYVSYCRKVGSTWMSNGKAKGKGNEKNGNRYLAWAYSEASELARRFDEQARAYFQRKAQRSNRMVAHQALAHKLARAAYYIMRDDVPFMAEKLFA

SEQ ID NO: 508018 - protein, 448 aa, unidentified
MQSHPSETAVPVKYPNCAGIDVGKKELFVAVSPRVAAEPIRTFPTVTAGLKAIVRWLQACQVEHVAMEATGVYWIPIYELLEKSGFTVRLADPRRTKRPDRKKTDVQDCQWIRQLMSFGFLEGAYRTPEDFLALRSYVRQRARLIRGRSRQVLPMQKALTQMNIQLSNFLSDLMGKSGSTILRAIVAGERNPEVLASLGSSRVKASPEQLAASLEGNWREEHLHELAVALRHYDFIVQEIEQLEQQIHQQLLRLRLAAKDAADPSRTLQKPGKNAAERQRQFRLWEIVGVDLTAIEGVGIETALLMVSELGGEVAAFPTVRHFCSWLGLAPNNQLSGTSLQRSKPRQANRLGQAFRQGAVTIRRSDTWLGAKHRRRLARMEKAKAVKATAHELARIVYAMINNGAEYVKRTLAIYEREHHQRKLDNLTRQAKAMGLQLIPENLVSAAA

SEQ ID NO: 508019 - protein, 330 aa, unidentified
MMYVCITDETGTILVHKNLRTNPDDFTRAIEPFREDLAVAVECVFVWYWIADLCEQLGVTFVLGHALYMKAIHGGKVKNDRVDSEKIAQLLRSGMLPEAYAYHQAMRSTRDLLRRRMYLVRRQAELQGHIQNTRHQYNLPAFEKRIDRAVNREGIANHFNDPMVAASIQIDANLLDSLHQQILFVERQITEQVRDHDPVGVQLLRTIPGIGKILALTILYEIGDITRFPKVGNFISYSRLVKCAHESAGKRVAGRNNKIGNAHLKWAFGEAACLFLRESDQAKAWHQKLVSKYGKAKALSIIAQRLGRTAYTILKRRTPFDREKFFASLR

SEQ ID NO: 508020 - protein, 343 aa, unidentified
MDYFAGLDVSVKETSICIVDDTGRIVREAKVASEPDALLEVLKNPTYSFKRIGLEAGPLSQWLYSAFAEVHLPVICVETRHMRAVLKAQINKTDRNDARGMAQMMRAGLYRPVHVKTLRSQKLRMLLTLRKLLQSKAIAIENDLRGTLRNFDLKAGIVSKLKFEARIRELVKDLPDIAILVEPLLVVRRVLREQIAVLHRRLLGIVRDDAVCRRLMTVPGVGPVVALTFRATIDVPARFRNSKAVGAVLGLTPCKHQSGESERTGAISKCGDEMMRVMLYEAAQILLVRSTRWSWLKAWAMQIARRRGLKKAIVALARRLAVIMHRIWVDGTEFCWTREIAAA

SEQ ID NO: 508021 - protein, 387 aa, unidentified
MPQPNDLSRSLVALDQNSTIIAVVELSQSSWLVGGVVPGIERQPCKKLDPSPERLLAMLHRWRDEAVRAGRTITRIALAFEAGRDGFWLARWLEARGVEAHVIHPSSVAVSREHRRAKTDRLDTELLKRGFLGWLRGERGHCSMARVPTIAEEDAKRPNRERECLVGERTRIVNRIKSTLARLGIRNFKPTLRKAAERLATVHTPEGMPLPPNTLAELQRDMARLGFVVSQIREIEAARQKRLEQQPETGPHAMVRLLARIVGVGVETADMLVHEVLSRPLRDRRAVARYAGLTGAPDESGAQRREQGLARAGNARVRRGMIQLAWRFLMFQKESALAVWYRARTADSRRGTRKTMIVALARKLVIALWRFVTTGEPLEGVVLRPAS

SEQ ID NO: 508022 - protein, 389 aa, unidentified
MPSVSERPEAPTAIQTHLAASFVSLELSRSIWLITSLSPGSGEKMSKHSVRAGDVAALLARFSELKRKASERTGKSFPIVVIQEAGLDGFWLHRVLQSEGVESHVVDPSSIATSRRRRRAKTDRIDGEALLRALLAYKRGEPRVCAMVKAPTPEEEDRRRLCRERKVLIAERVKHVNRVKGLLFSQGISGYEPLRRDRRQRLDELTTGDGRPLPVHLKTQIRRELDRLELLLDQIKEAETERDALLAAPQPAAPAPAGRMLLEFKGIGAELAAVLWLEALFRHFDNRRQLASYAGLAPTPWQSGSVDHEQGVSKAGNPRLRTSLIQLAWLWLRHQPQSALTLWFKERVSGNGGHFKKSTIVALARKLLVALWKYVTAGVVIDGAVMKDA

SEQ ID NO: 508023 - protein, 355 aa, unidentified
MESTKYVGLDVHQEATTVAVMNSAGKLIMESIIETKAITIREFIQGLRGDLRVTFEEGTWAAWLYDLLKPYVTKVVVCDPRKNTLLKVGNKSDRIDPKKLAELLRNGALSEVYHGENGVRTLKELARSYLTISKDLGRVMNRVKALYRSWAIPCAGTQVYALCHRSEWLSKITEAGVRRRAEHYYQQLDALQTLRREVRKDLLRESQKHNATKLLRQVPSIGPIRAAQLVALMQTPHRFRTKRQLWTYSGLGLETRDSSQYRYVEGQLQRSKKPQQLRGLNSNHNHDLKNIFKGAATTASVSAGPFHDFYEALLTKGMRPAMARLTLARKIAAITLIVWKKGARFDPQHLKQQAA

SEQ ID NO: 508024 - protein, 340 aa, unidentified
MGEITTVGLDLAKHVFQVHGVDAEGSTVLRKQLRRAQVLAFFSKLPRCLVGLEACATAHYWARELRALGHEVRLMPAQYVKAYVKRNKNDAADAEAICEAVVRPTMRFVPAKTADQQAAVLLHRGRERLVRQRTMLVNALRAHLAEFGIVAPQGLRNVGKLIAIIRDDKDTRLPNLARQVLQVLAVQIEQIEAAVMVLEKQLMAWHKSNPVSQRLATIPGIGPIIATAIAAMVAEPSGFRSGREFAAWLGLVPRQNSTGGKTRLGGISKRGNQYLRRLLINGASANLLRSKATNADPWVIGLRRRRPSMVVAVALANKTARIAWAVMHRQENYQRTALAA

SEQ ID NO: 508025 - protein, 338 aa, unidentified
MPLYGGIDLHANNSVVVLLNEQDQVIYQRRFANHLPEILEPFALYQADIQGIVVESTYNWYWLVDGLMEAGYRVHLANPTAIQQYSGLKYTDDHSDARWLAHLLRLGVLPEGYIYPKAERAVRDVLRKRAHLVRQQTANVLSLQNIIVRNTGVRLSAKRIHALTVEELERLLPVPEHVLAVTSSLVVVHCLAQQITTLEKTVQKHLKHTSAYAQLQTVAGIGPILAQTIVLETGDIGRFPTVGNYASYCRCVGSTKISNGKRKGQGNVKNGNPYLAWAYMEAAQFAIRFNPMVQRFYQRKQAKSHLMIARKAVAHKLARACYYIMRDLVPFDVHKAFG

SEQ ID NO: 508026 - protein, 355 aa, unidentified
MTIAKYVGMDVHKESISIAVMNSTGKFVMECVIETKASMLLQFIDGLRGDVHVTFEEGTWAAWLYDLLKPHVSEVLVCNPRKNALLKDGSKSDQIDARKLAELLRGNHLKPVYHGEQGLRTLKELARSYLIISKDVTRVMNRLKALYRSWGIACAGTQVYAPRHRSEWLGRISEAGVRRRAEHCYQQLDALRLLHQQVRRDLLLESKKHQAWRLLGLIPGIGPIRAALLIALIQTPHRFRTKRQLWTYSGLGLETHDSAQYRVVEGQLQRSKKPVTLRGLNQDHNHDLKDIFKGAATRASSSRGPFHDFYEHLLAQGRKPTMARLTLARKIAAITLIVWKKEVRFDASYLKSQAA

SEQ ID NO: 508027 - protein, 468 aa, unidentified
MGHNRSRSRQPGGKKFKHPSLLKRINRNAAGIDCGSEAHYVAVPLERDPELVRSFKTFTADLHRLADWLGACKIKTVAMESTGVYWIPIFEILEARGFDVVLVNAQHIKNVPGRKSDVLDCQWIQELHSVGLLRGSFRPTAEIVSLRAYLRHREKLVQSAASHIQRMQKALVQMNLQLHNVISDITGVTGMHILRDIVAGVTDPMALAAHRDPRCRASQDEIAASLTGNYRAEHLFVLRQHLELFDTFQRQIQLCDAEIESLLHKLAARQRKPKTPVPSPRCKLRFYDNEPRFEIRDPLYRLAGADLTQIDSIGPFTALKLIAEIGTDMSRWPTYKHFTSWLTLAPKNKITGGRLISSRTQPSANRAATVLRMCAMVVGRTSTALGAYYRRIAYRIGKPKAITATARKLAILVYRTLKGELDYADLGASAYEEQHRERTLRNVRSRAKRLGFGLVDLETGELLQGAVS

SEQ ID NO: 508028 - protein, 391 aa, unidentified
MTATTQREESTAPGGDRLLMAIELGRRQWKVGFTTQQGQRIRRRTLPADAWDRLPEEVAAAKKRLDLPADAPVTSCDEAGRDGFWIHRYLVGAGVDNLVVDSSSIEVNRRARRAKTDAIDLTKLLSMLRRHVGGENKVWRVVHIPSAQDEERRQPHRELWALKRDRTRVTNRMTSLLATVGVSVTVDAKLVQRLDRLMQWNGKPIPGTLRARVAREWEKVALFTTQIQALERARRLELRQEADAAVAQVRQLLQLRGIGHQTAWLFVTELFAWRQFRNRREVGGITGMVGTPYRSGLLNHEQGISKAGNKPVRAMAIQIAWGWLLHQPQSALAQWYTRRFARGGPVARKIGIVAVARRLVIDLWRYLDAGVIPDGAVFKDPALATNGGASE

SEQ ID NO: 508029 - protein, 425 aa, unidentified
MNLLILKGVPMSLKIVYKICCGIDVHKTFVVACIASTNDKGVTSYESHRFSTYTSGLKTLLQWLLNRNCKDVCMESTGKYWIPVYNILENDCSIVLAHPKYVKAIRGKKTDKKDAKWIADLFKHDLVAGSFMPPADIRQLRDLMRYRFKLTCFQSSEKNRLQNCLTVSNIQLGNVVSDTFGKSAQAILDKLLENPADTSFDLEPLVYKSLKKKLPELRDAIDGYITPEQAGKLKVIKSHYENLESRKAELEELILALAAPYQQELAILQTAPGIRSDFTAIGIISEIGTNMEAFPSAKHLCSWAGLTPTNNESAGKKKSVRVSKAGCYIKPLLVQCANAVVTSKKHPEIRNRYLRLKKRRGHKKAIIAIARMLLTALYHMLKNGENYNAELYRKSYLPPVDREITVEQAIIIARNQGYKIKSATA

SEQ ID NO: 508030 - protein, 358 aa, unidentified
MEECTAIARGLTIGLDLGDKYSYLYATDSRGQIVEEGRLATTVGAFRRRFGSCERAVIAIEVGTHSPWVSRLLRECGHEVLVANSRKLRMIYTNDRKTDRVDAEWLARLARLDPKLLAPIQHRGASAQTDLAQIRSRDALVASRTQLVNQVRGTVRSFGGRVPKCSTASFPKKSMEGIPAEIRPALSPVVEMISSLTSQIRDFDRRIEEMARTRYPETAVLRQVKGVGPVTSLAYMLILEDPHRFKKSRSVGPYLGLRTRKSQTGERDPQLRITKAGDQLLRRLLVGSAHYILGPFGPDCNLRRFGLARAQRGGKNGKKRAAVAVARKLAVLLHHLWVTGEIYEPLRKPRKENTTQSR

SEQ ID NO: 508031 - protein, 320 aa, unidentified
MAKKKSKSFVGIDVCKQQLEGAVHESDYHFRCPNKASAFGELIAELIVLRPALIVLEATGGLEIPVVSALHAAGLPVVVVNPRQVRDFAKALGQLAKTDRLDARVLAHFAAAIKPPLRPIKSKDERELEVLTSRRGQLIEMLTDEKNRRGSAASDTVRDKIKEHIDWLEEGIAELDKQLKALLQRSARWQAKDEILQSVPGIGPVVSFTMIADLPELGELNRQKISKLVGVAPLNRDSGQQRGTRHIYGGRARLRSVLYMAALTASRHNAVIKEFYERLRANQKPFKVAITACMRKLLAIINIMVRDSTPWKFRDETVSA

SEQ ID NO: 508032 - protein, 313 aa, unidentified
MMDQVVVGIDVSKDRLDVCLLPGGELFVVSRNAAGLSELAERLKGLSVRVIAIEATGGFETVVAASLASSGLPVAVVNPAQIRHFAQALGKRAKTDPIDAFVIARFAEATKPDVRPLDDEATQLLSALITRRRQIIDMIVAETHRERSVTDKMLKKSIAQLKMALERALSDIDTKIDEQIRSSPLWKAKEDLLSSVPGVGPITARTLIADLPELGRLSPKQIAALAGLAPYTRQSGKWRGKAFTSGGRSSVRGVLFLAAMAACRYNPVLKAFRKRLLDAGKPPKVAIIAMARKLLTILNAMIRENQPWQPKTT

SEQ ID NO: 508033 - protein, 361 aa, unidentified
MNYIFVGCDSHDKTLVNRIALNREAAERKGFAATGAGRRKMIEYLKERSRLAGGATVVVAYEASGNGFILCEELKKAGFECHVLAPTKIERSTKQRRNKNDDRDADRLLEILRGHYLAGNKIPSVWIPDPQTRDDREPVRGRQDLSQKQTAVKTQIQMLVKRHGFEKPAIAGNSWSKPYRRWLKSLTEDGHPGWGMQKALGSLLRQLEFLEKEVEQLDEAMTELADTPRWKPIVQAMRKEKGVGLMTAMKYATDIGDFSRFRRGRQVGAFYGLVPSSHESGENDDRKGHITREGSPSGRQVLCQSTWSRVQHDPHEREVYLRLVDKNPKKKKIALVACMRRLTVKLWHVGLEAQVKLKAAV

SEQ ID NO: 508034 - protein, 340 aa, unidentified
MTITTVGIDLAKNVFAVHCIDQNGKAVLVKPKVSRAALSELIAGLPPCVIGMEACSGAHYWARLFRQYGHDVRLMAPKFVSPYRMAGKTGKNDAADAIAICEAVQRPHMRFVPVKDESQQAMQCLHRTRQGFIQERTATYNRLRGLISEFGVIAPQSTDALRHVVSDQKETLPVQVRLYIDDLLTHVTNIEEKIAEYDRVLSRVAKTDHRSQQLMELKGVGPTTASALVASIGNAHDFKNGRQLAAWLGLTPSQYSSGGKSKLGRITKAGDAYLRTLLVQGARSVMVGAENRTDPFSRWVCSLIGRRGYWRAVVAIAAKNARLCWASLHYGDDFRLYSTT

SEQ ID NO: 508035 - protein, 346 aa, unidentified
MLYAGLDLSRQRLDVHVLDEEGRTLEVTAVHPDADALRTLATHVLLQGQEVTAAIESMTGARFVHDQLERWGWDVAIADAVKVKGLAPLAAKTDKIDAWVLAELARRDLVPAIWLPDPTIRAERERARFRLHLVHHRTSLKNRIHATLMTFGYSVPVSDLFGTQGREILGRLTLPEPWADTLTTSMRIIDDLNVEIAAAEADLRGLGPDHPYIPLLLSVPGVGPLLAYTIASEIGDIARFATPKKLTGYTGLCPIVRQSGPKDRRGPLAKNGPKYLRWALIEAATHAARDVRYRDRYERTKHRLGRQRGAKVARVDIARRLSEAIWHVLTKNEPFAPAGPAITLVA

SEQ ID NO: 508036 - protein, 417 aa, unidentified
MDTLFLKVAGLDVHLKTVQTAVRCQQEPGKLLKQVRCFGTMTRDLRALADYLAALGVTHVALEATGVLWKPVWNILEDRFTLILVNPRHLKRVPGRKTDVSDAEWIAQLLQCGLLRGSFVPPRVVRNLRDLTRHRAQLQGERTRVANRIHKLLEDTNIKLGTVATDALGKSGRAMLRALLRGDSDVAEVAELAEGLLRKKIPQLKLALEGHCTEHHRYVLGRLLSHLGYLERQVDHLSSRIALRLGEILNADDFARLDRIHGVNRLTIENVIAEIGVEMSVFPDEHHLASWCGICPGNEESAGRRLRSRTRKGNCWLRRALSQAAWGASRAKKSYLSAHFRRIAARRGRKRALIAVGHTLLVIIFHVLKHKVEYTDLGPDYFDRLEPARLQRYLVKRLERMGYHVTISPSTPDDRAA

SEQ ID NO: 508037 - protein, 312 aa, unidentified
MNECFIGIDVSKSSLDCQAVPETEGTRFGNDAKGIETLIPWLKARQPKLVVLEATAGYETQAASALASAGIAVVVVNPKQVRDFARAMGILAKTDRIDARVLALFAERIRPQVRALPSQEQRELAELMDRRAQLVAMRAQEQARLSTVLPVARPSLIEHIQWLTERIKGLDIELTHRLRTSEVWKVKADLLQGVPGVGKVTVMMLLSRLPELGSLNRRAIASLVGVAPFAADSGKHKGQRFIWGGRAEVRGVLYMATLTATRHNHTIKAFYERLISKGKPFKVVMVACMRKLLTILNIMLKNNQPWQSIAHT

SEQ ID NO: 508038 - protein, 343 aa, unidentified
MAYFAGLDVSVKETSVCIVDDAGKIVREARVASEPEALLQVLTNTIYRFTRVGLEAGPLSQWLYSVLAEAGFPVICVETRHMRAMLKAQINKTDRNDARGIAQMMRVGLYRPVHVKTLRSQKLRVLLTHRKLLQSKAIAIENDLRATLRNFGLKVGMVGTLKFEVRIKELVEDLRDLAVLVEPLLLVRRVVREQLGILHRRLLAIVRDDDVCRRLMTIPGVGPVVALTYRVTVDVPARFRNSKAVGAVFGLTPAKYQSGENDRTGAISRCGDEMMRMMLYEAAQIMLVRSTKWSWLKAWAMKIARHRGMKKAIVALARRLAVIMHRIWVDGTDFRWTREVAPA

SEQ ID NO: 508039 - protein, 382 aa, unidentified
MDKSITVYVGLDVHKDSIDIAVAEAGREGEVRHVGSIGGDLAGLDKALRKLLSKGCELHVVYEAGPCGFVIWRHLSAKGIKCEVVAPSSIPRRSGDRIKTDRRDAMLLARLARSGDLTAVRVPGAADEAVRDLVRAREDAVRECRNARHRLKALLLRNGKPYAGKSSWTAAHLRWLATIKLEHTAQQIGFQEYLHAITEASARIDRLEQAMRDTLPEWSLMPLVQALQAMRGVQLIAAMTLVGELQDFLRFESPRQLMAYVGLVPGEHSSGAKRRQGSITKAGNSTARRMLVEVAWHYQHSARVSPIIATRQDGLPKAVTDIAWKAQLRLNAKFKRLLARRVMKNKAVVGVARELAGFVWAIGCEVQSSGWQGIPAAQTTPG

SEQ ID NO: 508040 - protein, 391 aa, unidentified
MIYVGIDVAKDKHDCHIFDSDGVVHHDNFSFPNSKDGFDRFLALITELAKKQRDKLKIGLEDTGHYSSNLLDFLYANALDVVRFNPLSVSRTRTASTLRKTKNDKGDARQIAALLVAATTKHSNKPAQTILVLKSLTRARYRLVKEMQPLKNRFRRLLHLLFPEFQGFFTSHYANTALSLFTVLPGAQPIAACDIRKLTTLLKSFSHGKHGRTKAEKLKELAKNTIAFHNAGSACELALMAERILFLEKQCGKLEAEITVVMKELNSPIVSIPGIGIVLGATILAEIGDIHAFANPAKLLAFAGAEPSTYQSGKFTATRTPMVKRGSRYLRNALYLATNTCFLHNPVIRDYVKKKRAEGKHHFTAMSHGMKKITRIVFAILTKNIAYSNAI

SEQ ID NO: 508041 - protein, 330 aa, unidentified
MTGLLGHFKTLQAKTQARTGNTFPIVVIHEAGLDGFWIHRVLEREGIESHVVDAASVLTSRRRRKAKTDRIDGEALLRTLLAYKRGEPRVCAMVRPPTPDEEDRRRLCRERKTLVCERIVHVNRIKGLLFAQGIPDYEPCRRDRRERLEQLVTGDGRPLPAYLKAQLGRELDRLELTLQQIKAVEAERDALLAPKGEAAPAPVAALAGLRGIGPEFATVLWLECFFRSFGNRRQVAAYAGLAPTPWQSGSVDHEQGVSKSGNSKLRSTMVQLAWLWVQHQPTSALSRWFKERVKQNGGRGKKAAIVALARKLLVALWKFVSNGVVIEGPR

SEQ ID NO: 508042 - protein, 316 aa, unidentified
MESQRPFVGIDISSQRLDVDTLPASQCFSKPNTEEGIASLVLQLKPLNPRIVLLEATGGYEIPVAYALYEAGLPVVVMNPKVLRHFAKAIGKLAKTDKLDAQVLALYAQKIQPPVRPLQEQEQLELSNLMSRRRQLRDMIVMEENRRRTCTPRVRGNIDRSLAHLRQLLKDLDREIHDSIRRTPLWHENSEILQSFTGVGPKVSASLIADMPELGTLTRGKASALAGLAPMNRDSGQFRGKRMIQGGRPAVRQALYMAALVASRHNPVIRDFYQRLRLAGKPAKVALTACMRKLLVILNAMLKNRTHWNPQLPLAA

SEQ ID NO: 508043 - protein, 412 aa, unidentified
MSHGHVMWVSREAAFRSTDDWKDTTMPSAISPPKAVLGIDVGKSSHWACLVTREGEVALNRRVRNSEGDLDGLFSQVACDTIVVVDQCRNIGLLAISRARLAGLGVAYLPGLAAHQAARLFAGDAKTDERDALVIAKTALGIPDALLPVPEPDEALEAARSLAAQRSHMVTCATRDKNRLRSILLESCPAFEALADLGDRRWLNMLEKLGGPWGCIDAGKPAFGAVTKGANRARMDAAWNAAMASTRPSKRRVDAENPQVRMLARRIREALEEADGIDREITALLAGDGTYECLVTIPGIGPRTASELVIGINIEDFPDHDHLASYCGIAPRNRQSGTSISSVSASRQGNRRLKNLLIFSCNSLVRSENRFGEYYRACRGRGMCHGEALKAVARKRLKVIYAIMRDKVPYSA

SEQ ID NO: 508044 - protein, 368 aa, unidentified
MKKRSTTKGPSAKTRKRCGGVITVGLDLGDRNSRYCVLNEHGEAILERSLATTSKGLDQVFGSMCRCRVALEVGTHSPWVSRHLAKLGHEVIVANARRVRLISDSSRKNDKLDAKTLARLARIDPQLLSPVRHRSEQAQADLIMIRARAALVEARTALINSVRGLTKSYGERLPGCASYQICEELADSLSGPLQAALAPLLTEVESQTERIREYDQKLEELALERYPEVELLKQVRGVGTLIALTFVLTVEDPHRFRTSREAGCYAGLRPKRRESGQSRPQLGISKEGDPYLRKLLVQGAHCILGRFGQDSDLRRWGLKLAARGGKNAKKRAIVAVARKLAVLLHKLWISGERYEPLRIANRPQTAVA

SEQ ID NO: 508045 - protein, 487 aa, unidentified
MRSFTMKKRNIFQNQSQEILTLFKMAQDRSKVMCIPIDYAKKDHVAMFCDGNGDIIRKPFSIKNSPEGKDYLIDQVRKSCRHHGISLQHVFYGGEDCGSYTDNFIAALRLENCLVAGVNALDAKKHRENVQASTDRLDLLGISKVLINCRGNCSPAQSGIYWNLRTLIRERRKLVNIATGVRNRIHNIVDRIFPGFLNEKKSGIVPFSRGSLSLMENRFSVNQIRRRRRSTLAKFLASQLVHHSDRCAEKLQQYASQVLQPPTDRIATSQISLKHQVKLFNCLQESILHLNKEIAEHLAQTSGAFLTSIRGIGITLAAGVSAEIGDPNKQGSLSNLASYAGIIPRVKQTGGVQGKTHVKKVGKRCNRILKDYVVQSASHIGLSGPDDLKMDYKRRDAQGQHADFGIARRYLRMAICLMRTDQTYLPKNLRSTENNMKERAEYYITSWPTLHTKWKRAGALDIAFDKDMRLGQWRNMIQELYGIELTL

SEQ ID NO: 508046 - protein, 319 aa, unidentified
MQSNPMICGVDVAMDELVVQRLEHTAFQRLHNSAGEIRSWLRQLPKGSIVAMESTGQYHQLLARLAHEAGMRVFVLNARRVYFYAKSLEVRGKTDRVDAGVIARYVSEHGDKLHEWRPPCATHSRIDELMRRRAVVVVKRESLRQSMRGCKDLQTEFKKLDRAVESFVRCIDRKIDELIKADETLRASRRVIDTVPGFGPQGSALLTVLLERLPFASSDSLVAYSGWDPRPDDSGRKHGRRKLTKCGPSYLRKQWFMVGFSAAHAKAIKPLYEALLARGLASTEACVILARKLLRAAFAVWKSKKPFDLDIFLRRPQSA

SEQ ID NO: 508047 - protein, 347 aa, unidentified
MRFYNQQHKFYCGIDLHARKMYVCILDKDGKTKVHENINTDPELLFDLIFPFIEDVVICVECMFSWYWVADFCTEHNIAFVLGHALYMKAIHGGKTKNDKIDSYKIAKLLRGGNLPVAYAYPAKMRATRDLLRRRSYMVNQCSLLVGHILNTNTQYNLPGFNKKLSRKFNHEGVVERFDVPAVRSAVQADLTMIEAFNNLIKPLEWQIEKSACHHDRNSLYLLRTVPGIGQILALTILYEVHDIKRFGSVQQFSSYARLIRPEKQSDGKWAGKSNKKIGNAHLKWAIRTASMISLRESDQAKNYVDRLSRKYNKGKALGIYTHKLGRAIYFMLKNKRAFDMNHFFSH

SEQ ID NO: 508048 - protein, 400 aa, unidentified
MNAVGIDVSKGKSTVAVLRPFGEVVASPFDVIHNDNDLKQLVKLIRSLPGESKVVMEYTGTYFEPIAQFLHNNGIFVSVVNALLVHDYGGNSLRKVKTDKKDALKLASYALDRWTELDEYVPADEQRKTLKLLNRQYNQSIKIQTTMKNNLISLTDSVFPGINRLFTSLERQSDGHEKWVDFLHAFPHKDCVAKLYLSAFKAKYKSWCSRNKYRYSESKAEKIHSYAKSVIAVLPLNESVKLIVTQVVSQLNTILETAFSIRTEMDRIASSLPEYDTVMSMFGVGKVYGPQLIAEIGDTRRFRNRRAITAFAGLDAPPYQSGQLDVSSRHISKRGSAALRKVLFQITEIFILSKPENEPVYQFIIKKRSEGKHYYSYRIAAANKFLRIYYAKVNQILNAT

SEQ ID NO: 508049 - protein, 358 aa, unidentified
MRIIGCDLHARQQTIAMLDTDTGELEEKTLGHEGETVREFYSALSGPILVGIEATGSMQWFVEMMEELGIECRVGDPAKIRKAETRKQKHDRRDARLLLTLLAENRFPTIWMPSTEQRDLRTLLRHRHQWVRLRSRVQHTLQSMALNHGLRRGPSLWNQAGQHALRVLPLAPHASERRAALLSLYPRLQESIDELDQQVGQQVQQHPQARRLMTHPGVGPITALATEVFLGDPLRFIDGKALASYIGMIPSEHSSGRRQRLGAMSKQGNALLRYLWCEAAMHAVERDPELKRFYRRKLVQKGLGKARVAAARKLGIRLWIMMRDQIDYQEFCRRGKARQENGSVCAGMPDITSGPAEA

SEQ ID NO: 508050 - protein, 355 aa, unidentified
MDQKKYIGLDVHQASISVAVRDAAGKLVTESIIETKATTILEFVRGIRGSLWITFEEGTSAAWLYDLLKPHVTRVIVCNPRKNALLNAGSKSDRVDARKLSDLLRAGMLAPVYHGENGVRTLRELGRSYITVTKDLTRVMNRVKAVYRSWAIPCAGAKVYSPRRRHAWLEKLSEPGVRRRAEQLYQQLDALRKIRREVRAELLAESQRHPAHQLLRQIPRLGPVRVALLIGLIQTPHRFRTKRQLWAYCGLALQTRASGEYRFSGGELQAAKKSPALRGLNVNHNHDLKNLFKGAAMHVSISTDPLGDFYRNLLAKGMKPSMARLTLARKMAAIVLTVWKKGARFDPQELKHQAA

SEQ ID NO: 508051 - protein, 354 aa, unidentified
MKKLLKQAVGIDVAQDELVATFGKKYDDLSYQLISTSVFKNTKSGMMQLLKWSNKFKELDSPIVYVMEATGVYHELFAYFLVDNLQKVNIVLPSKISNYVKTLELKTVNDITSSSAIAQFGLDRKLDEWQKPKPIFKNLRQLTRERDQIVEERTIVKNKLHADSKEAEPNESGLKRMNARISLLNIQEAQIKIEIDILIASDESLTESISNMSSIKGVSNMVAAIILAETNGFELIRNKKQLVSYAGLDIIDKSSGTSVKSKPRISKRENKYIRKALFFPSMVAVRHSKVHKELHERICEKSGVKKKGLTAVQRKILELSFILFKTKTKYNEDYEMNQKQKKESEKNQLSLQST

SEQ ID NO: 508052 - protein, 275 aa, unidentified
MNIPVRIGMDTSKSVFQLPGVDENEVVVVRRQFRRAEMIRYFERLPPVLVAIESCGSSHHWGRLLQLFGHEVKLIPPQYVKAYVKRGKNDAADAEALCEAVTRPSMRFVPVKSKERQAACMLMTVRERLVSVKSQLSNAFRSYAAEFGIVGPAGRQNVAALIKRVLEDDSLPEMARDLFRLQADEYAAVQARLAKIEAMLMKWHREDDTSRRIATIPGIGPIGSSMLSMKAPPPETFRAGRDFAAWLGLTPKDHSSGGRQRLGGITKEILHCDRR

SEQ ID NO: 508053 - protein, 413 aa, unidentified
MTDANKSSANQVLIAIDIAKQSHDAVIAWPSGRTKAVKIANSLAGYERLISCADTDPHSLCVAFEPTADYHRNIAYWLQAHGVRCCLVSSLACARAREMLFKTWDKHDRKDAHVILYLMQQGLMQPFYDPLVAETMDIQELSNTYHQISLARTRCQHSLVNHYLTLYFPEMERYLHNSRSEWFCRLLLRYPTPRAITRYKPAAFVKHAWDVVGRKVNKQRFLEELHETAASSIGLPVDPTGLAVRTFKLQLERYLTLSLQRSELEKTADNILLQRDDYRLLRTLPGVGPVIALMIIAESGDLKRFRHYRQYLNFCGFNLSAVQSGQQQGRYQLSKRGNARLRYAYWLAAVSATRQRENSFRYKYERYIRNDPDNADLKRKARVAVATKMARVAHALVKQNTDYRGFYEFGHGT

SEQ ID NO: 508054 - protein, 369 aa, unidentified
MAAELEGKDDMTLLTEKAAAVLVTVGVDTHLDEHVAVALDHLGRRLDVLSVPTTEAGYARLLRWAEGLGELERVGIEGAGSFGAGLSRFLTGSGIRVVEVGRPKRRDQHRSGKSDPIDAELAARAVLSGTAIGETKGTEGRVEMVRVLRAARRSAVKARAQAANQLKAMLITAPDGLRAQLRKLSTAKLVRRAASFRPGDAPDDVASATKFALRSIARRYQALSEEIRELEGQMKRQVTETAPALVAVHGVGIDTAATLLVAAGEDPKRLRSEAAFAHMCGVAPIPASSGKVVRHRLNRRGNRDANRALHVVAAERMSRDERTRSYVAKRTSEGKSKREIMRCLKRYIAREIYGILVSTIAPTAPFAEP

SEQ ID NO: 508055 - protein, 433 aa, unidentified
MRKELDSALEESGEIWFAGVDWGSQVHQVRVSDRCGRSLGDRGFAHSGEGLAELAAWILQKTGASPDAVHIAIEVPHGPVVESLMERGFQLYSINPKQLDRFRDRFSPSGSKDDSRDALVLADSLRTDRRSFRALRAVDPLVVELREWSRIAEELGQDQLRLANRIQNQLWRYFPQLLKLSDGTIEPWLLALWQLAPIPAKAARLRESTIARLLKNHRIRRVSAADIIQALRAPAIPMAPGAVESAVAHIKILIGQIEPIRRQIRQANAQLEARLEHFLSKEETAEGQEVEQRDVTILRSLPGVGKIVLATLLAEASDALHRRDYHALRCLSGVAPVTKRSGKSRQVLMRRAVLVRLRNAIYYWSRIAVKLDPRSRARYEALRANGHNYSRALRGVGDRLLRVACTMLERQTTFDPNTVSRSAVGQAPSASIA

SEQ ID NO: 508056 - protein, 344 aa, unidentified
MYFIGVDHHKQVSVMTVLDEDGQERKNGRVANLRSHVERFLEGYRPFTAVVEAGRASYVMADLLRELGGEVKMANPLQVKAIAHARIKTDKRDSRTLAQLLRADLIPEVYQRGEWNRRAQRVMRMRAYWVSKQTEVKNKVRALLAQQGEEIRLEVEKREGKLFSSSGMEFLSRLTLEGQDKMVLDDLLQGHREIQAHVKMSDGLVKALYGELEEAARIDTVPGFATTLSVLMAVEIADIRRFARPADLHSYAGVIPSTYSSGGRTVHGHITKQGSTWLRWAVVEAVYPAIRKDLALGALYKRLARRKGPNVAKIAVARRLLTIVYRVLSEKRDYIPGLMKQSAA

SEQ ID NO: 508057 - protein, 329 aa, unidentified
MFKKMYTCGVDIGSEEHEVALHNSEGEELLIKKIIHSFSSFNEIILEFKEIEKKNDIKIEIGMEGKNGYGKPFDRILLENGFTLYNVDSTKLRKFREVYGADNKTDERDASMIAILLRNRPLLENSKEKPFEEMKCGPIINEKLRLLSRHQQTIIEERVRLSNSLIQQLLSFCPMLLKLGSLKGLRVLGFLKKYPDPSKYNKLTIEKFMKINQIGIAKAKEINNQIKNIEYDKKLVKEYAYIIKSKASRIMELVNEEKEVEKQLEQLGDKSEDVIILRSLDGAAIKNASRLIGEISNINNFSKESKLAAYFGVICVNNNSGKKKSLKKN

SEQ ID NO: 508058 - protein, 505 aa, unidentified
MAPPLRFPERGLAALENSERIAEVPIADSKEVCAVLGPVKGRLRRPRRKASAAAPLTIPARRRAGAATSAMGTTASGNSKAIPSPSAIAEGSPHAFRDAFRRGSKEGTALRSVGLDLGKKEVAYCEVQDGKVVARRTARGIEELDDLLGPQSPATVAIEACREAWHVHDRLTKYGHKLLLIDTTRVKQLGVGHHGRKRDNIDAEVIAFAVDRQQIPQAHLLSPHRRELREKIHARRALVETRATYVTMMRGIIRARGEKLASCDTEHFRATLERAVLTREARGAIAPLMAVLETIDIQLSSVEAELEELAAKDATIAHLTSAPGVDLIVASVFVSVIDEAKRFPDAHKVASYLGLVPREDTTGGRDKQKLGSITKCGNPHARAMLVQAAWCILRGRGGDPLRTWARQIEKRRGRRITAVAVARRLAGVLWAMWRDGQTYDPSRLGTASARGLKAAARDTEAAAGAMRTIAMKAAKRMHRIGARLKADPTKLKPTAATTATKEVAR

SEQ ID NO: 508059 - protein, 287 aa, unidentified
MNQEKYIGMDVHQATISVAVMDGRGKLIMECIVETKAATILEFIQGLHGSLSVTFEEGTSAAWLHDLLKPHVAQLIVCDPRKNALLKDGSKSDRIDAHKLAELLRLNKLNPVYHGEHGVRTLKELGRSYLTITQDLTRVMSRIKALYRSWAIPCSGTTVYAPRHRAEWLAKIVEPGVRMRAERLYQQLDLLQPVRQQARHDLLLESHKHPAVKLLRQIPAIGPIRAALLVALLQTPHRFRTKRQLWAYSGFALETHDSGEYRMVRGKLRRNRERLTVLGLNDNTITI

SEQ ID NO: 508060 - protein, 351 aa, unidentified
MEKVVKQVAGIDVAQKELVVSLGRMYDDWSPEVYAYKTFPNTQAGFTALIAWVKKQMNQDVPVRFVMEATGVYHESLAYHLTEKDFEVSIVLPNKISNYFRTLEVKTVTDKTASVAIAQFGLERKLDIWQQPKGLFKTLRQLTRERGQLVEERTAIKNQLHAEQAEARPNKKTIGRIKKRIDLLNKQEKEIRSEIEGLIKEDSEMKDLLVIICSLPGIGILTAVTVMAETNGFDLIRNKRQLASYAGFDVKEKQSGTSVKGKARISKKGNKYLRKAMHFPALTAIRHDERFKAIFARLVSKHGLKMKAAVAVQRKLLEMIYTLFRTRTVYDKAYLKKTGQEAMAETIEAVI

SEQ ID NO: 508061 - protein, 371 aa, unidentified
MKSILSVGMDVHKNSFSLCAYDGYTGEIVSESTFASDVKLVIKFIETLKSRYENDVEIKCGYEAGCLGYSLYKSLTSRGVDCVILAPTTMQVSAKNKMVKNDRMDALNIAKNLASGSYKAVYVPDEEDAEIKEYIRMIHDFKKELKRVKQEIYAFVLRHGYQYDGKSKWTIRYMNWIRELEMSEIQRETLDEYLAEMDNLNDKIERFMNRIDEMYQSDRYNEKVSELRCFKGIDTFAAMTIQVETADFERFPNAKAYASYTGLTTGEHSSGDKNNRIGITKQGNTVIRKTLVECAQSLVKGNVYTPKSKRLKSRQKGMDVNIIAYADKATERLKKKYQKLIERNVPRNKAIVAVARELACFIWGMETGNIH

SEQ ID NO: 508062 - protein, 347 aa, unidentified
MRFYTKQHQFYCGIDLHARTMYVCILDQHGTILVHRNMKASPEMFLKAIAPYRADLVVCVECIFTWYWLADLCAQEGIPFVLGHALYMKAIHGGKAKNDKIDSQKIAALLRGGMLPEAYVYPAEMRATRDLLRRRTHLMRKRAELLAHVQNTNSQYNLPEIGKKITYKANRDGVAERFEDVAVQKTIEVDLALITYYDDLLKDLELYILKTAKQHDANTLYLLQTIPGIGKILSLVLLYAIHDIRRFPRVQDFASYARLVICSKESAGKRLGTSGKKIGNAHLKWAFSEAATLFLRQNPAGQKLLGRLEKKHDKGKALSILAHKLGRAVYHMLKRKVAFDMDLFLRP

SEQ ID NO: 508063 - protein, 355 aa, unidentified
MNDAKYIGMDVHQATISVAVRDSRGNLVMEAILETKADTILEFIHGLRGSLSVTFEEGTWAAWLHGLLHPHVTRVVACDPRKNALLKVGNHNDRMDARKLSELLYLNKLSPVYHGEQSIRTLKELARSYITITRDLTRVMSRLKAIYRSWGIPCAGQQVYAPRYRAEWLAKISEAGVRRRAELYYQQFDALAALRQGTRRELLAEARKHPAMRLLRQIPAIGPIRAALLIALIQTPNRFRTKRQLWAYCGLALRTYTSGEYRFVAGQLKRSKKVLAVRGLNINHNHDLKNIFKGAATRAAATAGPLQDCYQACVARGVKPHLARLTLARKIAAITLLVWKKGVRFDAEHLKQQAA

SEQ ID NO: 508064 - protein, 353 aa, unidentified
METIYIGVDFHARQQTICYLKTETGELVFHELKHQDKPKVRAFYAQFLGPVIVGLEASGYSPWFERLLEELGCEVWLGHATEIRRRARWRQKNDRRDAELILDLMLHDEFPRLHRPAVQSREVLRMLRYRQKLIKIRTMSKNSLQALAIQAGLARGSRLFTKEGQQQLGAAEMSPVMHWQREHWLQLMEPLNQQLLETMVWFKAHSKGDVSITRLRTHPGIGLLTSLCILHTLQPVSRFRNTRKVAAYAGFDPVERSSAERKCFLGISKAGSRLLRYLLVEAAQTAVRKDQDLKRFYQRLAERRGRPKAKVAAARKLLIRAYIMLRDEIDYAEFRHRAVAARLARRGHRPEHA

SEQ ID NO: 508065 - protein, 361 aa, unidentified
MPRIADAKRPVTGGVDTHADTNVAGVVDQVGRVLGAEEFPATTAGYRMTLAWMRGHGELVKVGVEGTGSYGAGLARHLAAEGVEVVEVIRPNRQARRRRGKSDTADAVAAALAALNGEASGGPKARDGAVESIRALRVVRRGAVKARTQAANQLRDLIVTAPARLRERLAPLPIAGRVELAARFRPGDLTDPAEGTKAAMATVARRHQALEAEIGGLDAALEALVEHVAPERFLTKQGVATQVASMLLTTVGDNPDRLRTEASFAALCGASPVDASSGKQRRHRLNRGGDRQANSALWRVALVRMAHDPRTKAYVARRTAEGKTTKEIIRCLKRYIAREVYKALTRHAQTPMQIAADHAAA

SEQ ID NO: 508066 - protein, 364 aa, unidentified
MAQEHLQAEAVLSVTIGIDPHKGSHTAAALDSRQCVIGQIRVLATPAGYRELRRWAAGWPERRWAVENVGGLGRPVTQWLLGDGETVIDVPPKLSARIRVLSTGHGRKTDPADAVSTALADCGPADLQAATLESHATTLRLLSDRRDDLVARRTQVLNRLHALLADLVPGTVPSRLSAETAAVLLRRSRPPAGPRRIRRLLASDLVREARRLDSEIAALEARIAEAVTASRTTLTELFGIGPILAAKILGRVGDPRRFPSAARFASYCGVAPIEASSGDVVRHRLSRAGDRQLNFALYMMALCQARQHSEGRAYFLRKRAAGHSDKEALRCLKRRLADVVYRQLVRDARPAQSTAPSAAPAPRA

SEQ ID NO: 508067 - protein, 376 aa, unidentified
MRKITRFVGMDVHAETIAVAVAEGRDGQARSLGTIANRPEAVRRLLGKLGDPAKLKVCYEAGPTGYALYWQLTRLGVHCDVIAPSLVPTKAGERIKTDRRDAEKLARSYRSGDLTPVWVPDAKHEALRDLVRTREAAKEDQLRAKHRLGKYLLRNGERPAEGCRAWTAPWWQWVRALEMPYADQNTTLLDYIMEVDHQAQRIERLEGAIDRAVAEAPAELRAIVDALQALRGVAKVTAVTLATEFGCFSRFERATQVMSYTGMVPSEHSSGPRTRRSGITKTGNSHLRRVLVEAAWHYRHRPRICQRQHELQKALDPKVAAIAWRAQERLHRRYWALSQKSKPTGKIVTAIARELVGFVWAIGTATEQQFQRRKAA

SEQ ID NO: 508068 - protein, 342 aa, unidentified
MKTFVGLDVSQKKTSVCVIDHNGNKIRMANVDTHPGVIADYLFSEGFDKSKIGLETGPLCVWLYHSLKSFGLDIDCIHARHVHAALSMQLNKTDQNDAFGIARLVLSGWYKPVHVKSLECHQQRLILTSREKLVQLRVAVTNQIRGLLKTFGVVLPLGKNSVFERAVLESSPSLETIKPAVMMLLDTWEHLSGQIRKFNYMLEKLARNDPVCQILQSVPGVGVLTALSFKTSIDDPSRFRRVSDAGAFLGLTPKKYQSGEVDRNGGISKQGNRMTRTLIYEAASCLLTRYGKDTSLAIWANELRHRMSYKKVIVALARKLTTLMLSMWKSETFYNERFKAVN

SEQ ID NO: 508069 - protein, 345 aa, unidentified
MKKTVKQVAGIDVAKGELVVTLGRMFEDFTIELFSYRVFKNSASGIKSLIDWATKLTDRQIPVRYVMEATGVYHQKLAYHLADNGYEVSIVLPNKISNYIRTLDLNTITDKSCSQAIAQFGLERKLDRWFKPKSIYKELQQLTRERDQIVQERTILKNQLHAEKSEAFPHQKSLERMRARIAFLNAQEKEIKGDLTALVKTNPEVKQIIKRIKSIPGVGELTATIVLAETNGFELIRNKSQLTSYAGLDVKEKQSGTSVKGKPKISKKGNKHLRRALHLPALSAVKWDDNFKNIYARLVSKHGIKMKALVAIQRKILELIYILYKNESVYDKAHQTKNSVQTQMV

SEQ ID NO: 508070 - protein, 406 aa, unidentified
MTAVMIGVDPHKGSHTAVAVSTAEQPLGKLRVRASADQAGRLVEWAAKWPERTWAVEGAGGLGHLLAQQLVAAGELVLDVQPKLAARVRLLDAGDSNKNDPNDAASVAVAALRSRARRPVRADDHAEVRKVWSRRHRDLGRAKNQAACRLHAVLCELVPGGVPEEITAAQATRILGSAEPYGAAGQARLDLAAEILADMRRLNQQMLESKKKLASAVRASGTSLTEVFGVGPVVAATVIGDVADVSRFASRDHFAAYNGTAPIEVSSGNRKIYRLSRRGNRRINHAIHMAAITQIRHAHSDGRAYYEKKVAEGKTHKEALRSLKRRISDAIYARLRADARQAASSTNKGPGGQQGNDTKSSAAGSHPKHRLFGQATPEPDPRLRPATPASPIMPPEPASKKLRRSP

SEQ ID NO: 508071 - protein, 388 aa, unidentified
MQVVADRAAAPSAIQTDLRAIFVSLELSRSTWLITSLSPGGGEKMSKHSVQAGDIAGLLKRFAQLKEKARARTGRDFPIITIQEAGLDGFWIHRVLQSEGIESHVVDPASIATSRRRRRAKTDKIDGETLVRTLLAYKRGEPRVCAMVKAPTPEEEDSRRLCRERKVLTAERVLHVNRIKGLLFCQGISGYEPLRRDRHERLEELRTGDGRPLPPHLKAQVNRELDRLELLLKQIKAVEAERDALLVAAHTPAAVPASMLLNIKGIGPEFAAVLWSEGLFRHFDNRRQVAAYAGLAPTPWQSGAVDREQGVSKAGNPRLRTTLIQLAWLWLRNQPHSALTLWFHERVNRNGGRLRKTTIVALARKLLVALWKYVTAGVVIEGAAMTTA

SEQ ID NO: 508072 - protein, 316 aa, unidentified
MNNITQVEINVGIDTSQSQLDIYVRPIGDYFSVENTPEGARQAVRKIQKYQPTRVLIEATGRLEMNLVCAAHNAELPVVVCNAGQVRQFARSTGRLAKTDKLDAQDIAHFGEALQPALTIIKPEKLRQISDLMTVRRQCLDMSTMQKNRLLRMPKSVHPPIQRILKAIQKEIERIDLKLDKLVDAIPQWREQRDLLMSVKGVGKVVAYTLMSELPELGKLNRKEIAALVGVAPMNRDSGSYRGKRRVSGGRSKVRTVLYMSIWSAIQYDPKIKSMYERLVAAGKPKKVALVACMRKQLTILNTMMKNGTHWDEKLA

SEQ ID NO: 508073 - protein, 337 aa, unidentified
MDTVFLNKATYVGIDSHPTTHTAMAINRFEDELGHLTFDNSREGINMLLLWLPTIDRQKDNVILGIEGGDGTRNTLLSYLLEKDYNIYEVNPLYTKRRRMFGTRRDKSDGKDAKLIAEVLTKKLKELPKIQSMQVTTHILVLRKTVWFYEDITLQGAKLKNQLKTIQREKGLVRSQEEKKLLSGIEKSIAKELTHIKKEQKELEKQLAIQLKGYGENLVSIPGISTILAAKIVSHSGDIRRFHSLNGYIRYAGIAPKERSSGKHKGFVKDKQTGNRKLTTTFWIAALNQIQHNKVVKEYYRKKITEGKTKKRALISVMKQTAATVYGMLRSGEEYRG

SEQ ID NO: 508074 - protein, 456 aa, unidentified
MRGEKKVVRELSLECIEPNAAGIDVGAREIYVAVGRDRAPEPVRCFSTFTEELRAIAAWLKQCGVVTVAMESTGVYWIPLYEVLEEAGLRVCLVNSRHVKHVPGRKSDVSDCQWLQYLHSVGLLRASFRPEASICALRALSRHRSNLVEIAAVHVQHMQKALTQMNLQIHHVLSDITGKSGLAIVAAILAGKRDPEQLAFLADRRIHAEKETVIKSLVGNYRSEHLFTLRQSLEAYRHYQKMLVDCDGEIEQHMSQLPTHPNGGQRPASLGSGAGGKRRKNQFHMDMGKELYRVLGTDLTLVPGLNALTAHTLVTEIGTDLARFPNVAAFSSWLALCPGSKKSGGKILSSRTRKSNSRVSHALRLAAQTLHRSHSYLGAYYRRMRARLGAPQAITAAAHKLARIVYHLISTRTAYDESVFAQEEQKQTIRNQHRLRKQALALGFQLVPITMPEVVH

SEQ ID NO: 508075 - protein, 349 aa, unidentified
MTLVGCDLHTRKQQVAVLHTDTGEVVEQELLHAGDAVEQFYQALPRPVTVGIESTGYALWFHELMQRLGHTLLVGEAAKIRAMVVRKTKTDRRDAQHLLDLLKHDRFPAVWIPDPATRDLRARVTHRMRLVRMRTMVKNGLHAIAMNRRLTLGPSLWSQRGLAQRQSLALAPHTRQRRDQSLELLTWLTARIEALDDRVAAAAQADPGARLLLTHPGVGPLTALTTVLVLGPVSRFPDSKHVVSYTGLAPAVHASADTCRLGQITKQGSPLLRFVLGQAGLIAAHSEVDLKRHYRTLLRRRGRPKAIVAMARKLLVRLYIRLRDQIDYEEFRRRGRTPQRQEVPPPALA

SEQ ID NO: 508076 - protein, 348 aa, unidentified
MKVKTIGIDLAKDVFGVHGVDARGKALVHRRVTRKHLLGLLAKLEPCLVGMEACGSAHHWAREIEQLGHTVKLMSPQFVKPYRKGNKNDPNDAEAICEAVTRPSMRFVPVKSAAQQDLQALHRVREQLLKSRTALVNQVRGLLGEHGIIAPRGIARARWLLLEILADPERHGLSELFREALQEIAERLRFLDERVGAYDDRIERVFKQDERCKRLAKIEGVGPLVATAMVAAVGNAREFKSGRELSAWLGLVPRQHSSGNRNVLLGISKRGDRYLRTLLIHGARSALCRVERRRDRRSIWACRLKLARGFNVAAVALANKNARIIWALLTRGDNYRPAVSADPGNQAA

SEQ ID NO: 508077 - protein, 409 aa, unidentified
MDKVNPRCAGLDVHKDSVWACARVDGGAKWVERFGTSSRELLRLGDWLEGLGVTAVAMESTGVFWKPVWNLLEGRVALLMLVNARHVKQVPGRKTDVTDCDWLCQLLEHGLLKPSFVPDRPQRELRDLTRQRTQLLGDRARVVNRVQKVLEDANVKLASVATDITGKSGRAILDALVEGRLSPGQMAELAHRRMEAKKPLLREALAGRVTPHHRFMLRQLLDQLDHLDRQIESFDARVEEVMGPLEREAVARLDAVPGFDVRSGQNVLAEIGTDMSRFPSPHHLASWAGLCPGNDESAGKRRSGRTRRANHWLKGALTQAAWGASRTRRSYYSAQHRRLAARRGARRATIAVAHSLLLTTHRLLSGPAPYADLGATYFDKVRSPEQQAQQMVRKLQRLGYHVEVTRPAA

SEQ ID NO: 508078 - protein, 329 aa, unidentified
MTAICIVDEAGQILLEKKVPTCPDAIADCLKIRGSAPNLERVGLETGPLAVWLWNELPIVCIDARHANAALKMRPIKTDRNDAAGLAQIMRIGWFKQVRIKSRDSYQIRSLLVARETLVRIRVKIENEIRGLLRTFGVLFGKRVGGFEGRADEIIAGELDVSPEMRLIAGALMKARSSVLDQIRLLDKRLMAIAKTTPTARLFMTAPGVGVITALSVASAFDNASRFKHSSSAGAYLGLTPRRYESGETSRNGRISKQGSCMTRKHLYEAATTLLTRNLKFSTLKAWGMKIAKASGFKKARIAVARKIAVILHAMWKTNTPFRWSQVTA

SEQ ID NO: 508079 - protein, 337 aa, unidentified
MEPTTIAIDLAKRVFQIHFVDPDGTIHRKVLTRVQMLPFFANRPAARIVMEACGSAHHWARQLIALGHEVRLIAAQFVRPFVKSNKNDAADAAAIWEASLRPGMRFVAVKSADQQAMLALHRMRQQLVRIGVMQVNQLRGLLYEFGVVLPQGRRPSIQAAQSAIATLTEQLPGMLIDSLRDQLSRLHLLDDQIQRIEQRIIEWRRGDEACRRISEIPGVGPLTATAAVSVIGQARTFRSGREFAAYLGLVPRQNGSGGKVKLGGISKRDDVYLRTLLIHGARAVISSSKHLPAHMRDLLARRPTNVVAVALANKMARTIWALLAYGRTYQPAAALPS

SEQ ID NO: 508080 - protein, 369 aa, unidentified
MEKSLKYGVGIDMGKEEFHVCISSIDSTQRIKIRGTSRFKNHQKGFLEFVKWVDKHCKEDLPIQYLMEATGVYYEQLALFLHHRSAYVIVILPQKAKHYVKALGIKTKTDNVDSQALSTMVCQQHLPSWTPISESMYKLRQLTRQQIELQEFKTQISNQLQALELGMYTSKEVQKQLKKLLKEIEKQLLECQSLIKTTIEENADWKRKLAQICEIKGVGLLTVANLIAETNEFVLFENHRQLVSYAGYDVVENQSGKRVGKTRISKRGNHRIRRALHMSALQVVRYEQRPFANLFERVYESTKIKMKGYVAVQRKLLTIIYALWKKDEAYDGNFELSKKKGVAPAQEATLHQSLETVLEEVNMVQLIES

SEQ ID NO: 508081 - protein, 352 aa, unidentified
MPMLAECIDAVIGVDTHRDTHHAEIAHPSGAVIAACSIPSTSVGYAQLLAWARGHAPGPRLVISIEGTRSYGAGLARAATAAGLMVTECEQPTRKTRRGKGKSDPIDAHLAVLAALQLDTAKLAIPRADGDREALRILLCARAELTTTATGQANRLRALLRDGDDHDRDLARGRLTSTTLAALARRRLPAAASRAQAVRHREIRRLVQALRDATRALKDNNAELDAIVSDLAPGLTSRPGIGPVTAAQAIVSFSHPGRCRHDAAFARLAGTSPLEASSGQTTRHRLNRGGDRALNKAIHIIATTRMRSDPTTRAYITRRRAQGKSDREIRRCLKRYITRQLYRALTAAMPPA

SEQ ID NO: 508082 - protein, 406 aa, unidentified
MYYVGIDVAKDKHYVCILDKDGEFATKPFWIYSDIVGLNELVKRLYSLSLTCDDFILAVESTGAFSENIYEYLTDLDFKVILLNSYQTAKYRDFSTMKKVKNDAIDAYVIAELLVSKKYKQSHISSEDYHTLKVLGRLKRSLDDKIKTIKREISTVMAIVNPEIEHVFSNIFTKTALAIIKEYPTAIDLQSTTPKKLTKIFRHIKGNNFNEDKAKYLIDLAKESIYLGRAKDARSLMITTNIRILELITQEKQLLEHEINILIEDNQDDSFNSSIQNLKTIPGVADKTISAILGECGDLKRFESAKAFIGYLGLYPTQYQSGNSLVIGKLAKRGIPIAKHALYMSAVSSVLHNEQLRKVFRDKVSAGKSKKEALIIIAKKIAAIMYSIFKYNKPYNPNRVLVPYRK

SEQ ID NO: 508083 - protein, 381 aa, unidentified
MIYVGIDVAKDKHDCFAMNSDGEILIENFSFQNNSDGFNLFFHSISQFNESSENIKVGLEATGHYSNNILNFLTSKGFNVFVINPLQTNLFRKGQSLRKTKTDKLDARFIATMLITDNLKPYSNLSYHISELKSLVRHRFRLVEERSKFKVSLSRLVTIVFPELEKIVWSISQNSVLYLLYELPSVKDISECNLKHLTNLLKKHSCGKYSRDKAIEIRDLAKKSIGTHSPSISFELRQVIQTILFLQSQVDDIDKELKRLVVELNSPILSIPGISYVTSAFILAEIGDINNFGSPSKLQAFAGLEPSTYQSGKFTSTHSVMVKRGSKYLRWALLTATRLVCMRDKNFNDYKNQKLAEGKHYFCNFQCTNYSNIFIFFHKIS

SEQ ID NO: 508084 - protein, 415 aa, unidentified
MKVVFPTCCGVDVHKTFVVATIITTPADSLQPHYQKKRFSTFNSDLNRFADWLLEHNCLDVCMESTGKYWVPVFNILEKRGIRVVIANPKWVKAVKGNKDDTKDSKWIGDLFRIGLVKSSFIPELNIRILREFLRYRYKLVSMKSSEKNRFQNAFTVCNVALDSVVSDMFGKSATAITDYLTSDESFDPDHCVSLLQRSLKKKAEKVLESIEGYSISDEQKARIKIIREHYDFIEKLIAKVDTCVNEMVEKYEGEINLLCTIPGIDRNSAITIISEIGTDMSQFGSSKRLCCWAGLTPGNNESAGKKKSVRISRAGVYLKPALVQVAHAAVKDKANPYYALKYERIAKRRGKKRAIIAIARMILTAIYTMLCTGEVWTPVDLFKIDIPEHLKEQQLAKAIKQATRFLEKQGLTVA

SEQ ID NO: 508085 - protein, 387 aa, unidentified
MPQLNDLSRSLIALDQNSTIIAVVELSHSSWLVGGVVPGIERQPHKKLEPSPERLLALLHRWRDEAVRAGSTITRIALAFEAGRDGFWLARWLAARGVEAHVIHASSLAVSREHRRAKTDRLDTELLKRGFLGWLRGERGHCSMARVPTIAEEDAKRPNRERDCLVGERTRIVNRIKSTLARLGIRNFKPTLRKAADRLATVHTPEGMPLPPNTLAELQRDMARLGVVISQIRQIEEARQKRLDQQHETGPHAMVRLLARIVGVGVETADMLVHEVLSRPMRDRRAVARYAGLTGSPDESGVQRREQGLARAGNARVRRGMIQLAWRFLMFQKESALTLWYRARTADRRSGTRKTMIVALARKLIIALWRFVTTGEPLEGVVLRPAT

SEQ ID NO: 508086 - protein, 425 aa, unidentified
MNVDSTDEPRFAAYVAIDWGDSKHVWSLQPADSDRRERGEIEHSPEAVAAWAAMLSARFGGQPVALAVEQSRGPLVFMLGKYEQLHVYPIHPRAAAQFRAALFPSGAKDDPSDAELLLDLLVHHRARLRRLKPDTEQTRLVQHLVEGRRKLVNERTRQTNRLTAQLKLYFPQMLDWFDAVDSPLVGALLKRWPTLETLQKARPDTVRSFFTAHNCRSQELIERRLDQIRAAIPAVHDKALIEAAQAMTKILVELIATLREGIASFDRQIAQAVAAHPDFAIFDSFPGAGPALAPRLLAAFGSQRERYQSAADLQTFSGIAPVTERSGKSQWVHVRWACPRFLRQTFHEWAAHSIGFCDWARAYYQQQRGRGKDHHAAVRALAFKWIRIAFRCWKHAVPYDDARYMQSLRRRGSPLIAALAKPELP

SEQ ID NO: 508087 - protein, 474 aa, unidentified
MRVDNRNSARVAEQFRKEAEESAKLAAMPVQHPHAAGIDVGDSTHWVCVVSTPDNSPTVREFPAHTPGLRELVGWLTWCGVTTIALEATGVYGHVLYLTLLEAGFHTITIPPQFARRIKGRPKTDKLDCQWIQRLHAIGLLPSIFQPDEVTHTLRDYVRQRSNMVRVSAQHIQRMQKSLELMNLKLTHVVRDITGVTGLKILRAILAGERDPQALAKLRDRRCKHAEPAIATALDGRYRREHLAELRDNLTMWDKFQEVIAGLDLEIAEHLRTMRKTTELPPLPSKTRVRGKKPHDPKFDVRTALYYATGVDLTQIEGIDEIHALTLVSELGSDLTKWPTVKHFTSWLGLCPNFKKTGGKVKSSRVRRGKNRAALALRLAAFSLIRSKSYLGAYLRRQRSRLGTPKAITAAAHKLARIVYYMMRFGVAYMKQTEDAYAEQVRGRMEKQLRRRAKELGYELKPIVPPPEPAMVGA

SEQ ID NO: 508088 - protein, 341 aa, unidentified
MYYIGLDVHKKTISYCVKDASGQEHREGTIGATRNELDCWVRTLPQPRIMAMEATIFTGWIYDHLLPHAEQVKVAHPLRLRAIAAAKKKNDRIDAGKIADCLRCDFLPECHMASTEIRDRRRTLRYRHLLVRQMVQMKNRISGLLMETGVSHNKQRLHKVGYFGELISNHEQVHENIRPLLRLSRETIVRCQRTEYALVSSLQRDPLLAERLKRLRTVPGVGPITALTWALEVGDVARFRSVKQAISYCGLCGEEKSSADKVLRTPLSKQRNKYIQRVLVEAAKLAPRQNHELALIHEREKQKGNRNRATLAVARKMVAYLLAVDRREREFVPAEGHGTAA

SEQ ID NO: 508089 - protein, 411 aa, unidentified
MEVVYERCAGLDVGKDEVVACVRVPDGAGGRRQEVRTYPTFSSGLESLADWLTEQRVTQVVMEATGQYWKPVWYVLEERGLELVLVNARHVKILPGRKTDVGDAAWLCELLEHGLLRGSFVPPPAIRQLRDLTRYRKRLIQTHTAECQRIHKTLEDASIRLGSVAADVLGVSGRAMLRALLAGERDPKVLAELARGRLRNKLPELREALRGRFCAHHALLVRLALDHVEQLERSITALDAEVDRVIAPFAQARDRLDTITGVGKRAAECMIAEVGVDMSVFPTAAHLASWAGRCPGNNVTGGKRRSGRTSKGNVWLGDVLVECAWAAARSRDTYLAAQFWRLARRIGKKKAAVAVGHSILVIAWHLLANDCDYADLGGDFFVRRDSDRARQRAVAQLQALGYRVTLEPLAA

SEQ ID NO: 508090 - protein, 335 aa, unidentified
MYYLGIDLHKDESHVAVLDDDAEVVEEIRVANANLDEVAEEYAGAKAAIEATSNYYTVYDTLDEHLDVVVADPSQTKAIGYAEVKNDRLDAKLLAQLRRADMIAESYVPSEDLRERRALVRGRKRLVEKRTDFKNEVHAVLDKHGITYDWDPFSVNGREILANEDFSLGVVGDQLMESFLSIIDELTAQIEELEEMIEETAASLEETQLLMTIPGVSFYSSLLITSEIGEIDRFDEANQVVSYAGLDPVVRESGDSRTEGSISKRGSGDLRWILVQCVQTAVHRCNDPYLGRFYARLKQRKNHQIAIVATARKLLVSIFHMLEREEVYDPPEVSA

SEQ ID NO: 508091 - protein, 482 aa, unidentified
MYNLFLKQVRLFTSLRVRLRRIHAIGRLPPASGRDLPDEVYRMLRSQSAGITLYMRSPLARFIQILSMKGERMNHKLKELAFVGVDTHKDEHAACMTDCFGQSLGVFTVENRPNRIEELLEEIDKTARSHNLKPIFGLEDVMGLGQHLARSLIAGGYQLKEVNPIETERKRLRKAHPDKSDPEDALAISKVLISDFDKLPTIQSLDEIYLAIHQLSNRRDSLVKEQTRIKNKLHILLHREYPYYQTMFKSTFSKAALAFWERFPIASFLKGVGVERLAQYLRANSNNTVSTKKALSILKLVDKDSVPSCLNLVHSGLIRNLVKHLRFIQEQITIVEKELEPLIDETGIKLSTLTGVDTAAAAKLIAEIGDVKRFASSDKLAKCAGIAPQQKSSGKKQRFKKSNRGRRQLNTAIYRIALCQIGCDRSGKSKNSKARDYFLRKISEGKTKKEALTCLQRRLCDIIYAMMKNKTEYRFERTTNPT

SEQ ID NO: 508092 - protein, 391 aa, unidentified
MIHMLFVGIDVAKHKHDVAVLDSEGEVILKHLLIQNNREGFTTLHKSLCQLVKVSNEDIRIALEDTGHYSFNILAFLRAKGYQVFSYNPLLIKDFAKSTTLRKTKTDKKDSVTLAKKILTDIEKNHFVADEKIYELKYLTRHRHRMMKKQTDLKVQYTRILDILFPELESILSKTGLHNQSTYELLKKYPSPLKINRAHQASIMKIKHLKAKKATLIHEASKQTVGSSSFALEFELRQTIQHIESFKKTISEINQEIKNIMDTIDSPLETIPGISTVLSSVILSEVRNIYNFRNPAQLLAFAGLEPSVNQSGQMNHDGKMVKRGSPQLRWALLQAAKSIARWSPTFANYLAKKLAQGKHYNVAISHVAKKLVRVIFYLLKSNRHFDEEKLT

SEQ ID NO: 508093 - protein, 336 aa, unidentified
MTLYCGIDLHSNNCFLSVINDKDKRLLEKRLDNDPVLIVQTLKRYRARLQAVAIESTYNWYWLADALQDAGFKVRLVNTAQIIQYQGLKQTDDRYDAFHLAHLMRLGILPTGHICPRDERGLRDLLRRRMFLVQDRSRHIISLKGQYQRQTGQTLSTNAIKGKRFVLPIVGDMNVQLAMTSNLNMVKVLTQQIRTLETVILRQVKRVPTFELLKSTSGIGDILAETILLETGDIRRFKRVGNYASYCRCVESKRISNDKKKGVGNRKNGNKYLAWAFIEAANFAKRHNPKARAFYERKKAETNNIIALKALAHKLSRACYHIMKNEVAFDSSKLFA

SEQ ID NO: 508094 - protein, 411 aa, unidentified
MITINTLYVGIDVSSKSNVVYLMLPNGDKHSNFSVANSHEGSTQLVKRILSALTSHSLDTVLIGLEATSVYGDNLVYFLREDATLAPFNRKIHVINPKQVKKFHDAYNDLPKNDYVDSFVIADCLRFGRINKEVYLGDYRYKALQNLTRARFFAVQNLVKEKQRFMNVLFKKYSTMTQEKVFSDTFSTTALAVYDEFESAEALANMDLHELTDFIIEKGKNRFPDPDAVAKAIQKAARSSYRLPKTVNDSVNQVLSISITSMKALESQIKEFDKAIKAQMELLPNVLISIPGIGPVYSAGIMAEIGDINRFNSQAALAKYAGLAWKQHQSGGFESEVTRLIPSGNRFLKYYLCEAAFSLVRCDKEYSDFYRLKYKEVNRCQHKRALALTARKFVRLVFRLLKDNRLHCPAK

SEQ ID NO: 508095 - protein, 316 aa, unidentified
MSVETWFVGIDVAKDRLDVALHPTDERWTGSNDPAGIEALSEQLVRLAPQLVVLEATGGFEVPLVGALGARGLPVVVVNPRHVRDFAKALGRLAKTDRIDATVLAECAARVRPVVRPLPDEEARELHAWLARRRQWVEMMTADENRRQQAAAPIRRQIEGHLRWRRCQLAALERELTTRVRRSPVWRESETLRRSTPAVGPVLARTLLADVPDLGRLNRQQIAALVGVAPFNRDSGPRQGHRSLWGGRAPVRGVLDLAALVATPHNPVIRAFSQRRVAAGKPWKVVLTACMRKLLTILNARMKHRTAWKPVPALGA

SEQ ID NO: 508096 - protein, 315 aa, unidentified
MTAPSFVGIDVSAQRLDVAVLPGGAHFTLANTDSGIASLVDRLGDLAPQIVVLEATGGYEVPVAYALSEAHLPVVIMNPRVLRHFAKSTGKLAKTDQLDALVLAHYAQAIQPPVRPLRDPEQAELATLMSRRRQLRDMIVMEENRRRTTTARVRGNIDRSLAHLRQLLKDLDQDIHEAIRRTPLWHEKAEILQSFGGVGPKVSAALIADLPELGSLPGAKASALAGLAPMNRDSGQYRGKRRIQGGRPAVRQALYMAALSAARHNPVIRAFYQRLRQAGKPAKLALTACMRKILVILNAMLKNRTYWNPKHALAA

SEQ ID NO: 508097 - protein, 372 aa, unidentified
MSQSNTLYVGMDVHKESIAVAYVAQDHGAEVISLGTIGTRQCDIDKLLRQLQSKSKQRVFVYEAGPCGYWLYRYLMKKGYVCWVVAPSLIPKKAGDRVKTDRRDAMQLARLMRSGDLTPVYVPAIDDEAIRDLSRAREDTLRDLKAAKLRLKAFLLRHDIRYTGRANWSPAHLRWLSEVVCPTPAQQLVFQEYVQTVTEQTERLQRLEQALREQVQTWRFQPVVEALQALRGVQFTVAVITVAELGDLTRFDNPRQLMNYLGLTPSEYSSGARRQQGSITKTGNTHARRALVEGAWAYRYPAKVSRHLQLRLEKLPPAIQAISWKAQVRLCKRYRQLMAKGKNAHQVVVAIARELSAFMWAIAKQIAVTPKA

SEQ ID NO: 508098 - protein, 305 aa, unidentified
MSAYAGIDVSKATLQVALFPKADELCVPNTEEGLARIAEYLNARQVERVLIEATGGYEKLSVKLLANAGFKVQRINPVRARQFALAMGKRAKTDPIDAQMLAMFAASLEAKGFAKPDEEREVLLELVNLLQQRDDNRRRIKQAMQPCVVDIYLALEASLKVQIKVVGQLVDAQARKVDSELLQRLHAVKGVGPVTIANLFCYLPELGDLSRGQIAALAGVAPYNNDSGSKAGKRRVYGGRTKLRRATYMCTLGMVRYNADFKKRYARLRAKGKCAKVALVASMRVLLIRLNAVVCDGTCWRDHAV

SEQ ID NO: 508099 - protein, 402 aa, unidentified
MVFVGIDWADKEHEICVISQDGTELARFRVPHTRQGLEALKKRVLQHINAPEGALCFLETSQGLLVQFLLEAGFPVYPLNPKVVDYRRKPSGAKSDAIDARLLADIGRSDWHQLRRLNPDSGHIQKLKMLCRDQDTLLEDATRLTNRLIACLKEYYPVALELFSRITLPVALDFLKTYPTLEAARSASVPELAAYLKAHRHPRPNLTAQRIYEKLHAPQLEAGRAITQAKSYFLLTTIAQLEPVLAGIKAYDEEITRLFKSHPDSLIFASLPGAGTRLAPRLLAGWGDDRGRYEKAAAVQALAGTSPVLYQSGKYRFARQRRACVKFLRRALHLLAFQSTRLVPWAQDYYQRKRAAGKTHHEALRALANIWVRIIFAMWLNRRPYDESVFLAAKAKHAPLAA

SEQ ID NO: 508100 - protein, 376 aa, unidentified
MDVLYQSCAGIDVHQANIVVCILHGPLTSTRPKREMATFDTTTKGLRACHDFLSQFHVEAVGMESTGVYWRPVWHALCDDFELILAQPAHMKAIPGQKTDKKDAHWIAKLTRIGLLPRSFVPDETIQELRELTRQRKHYVESRNRETNRIHKFLQSGGIKLTTYIEDIMGLSGRNLLQLLVDGTPITPRIVHQSVYTSLKKKVPQLLEALDGYFSDHHRFMLKQSLEIYDFYQKQIELLEERITVYLSQYENHVETLDSIPGIDVITASVIISEVGVDMSQFPTSGHLASWAGLCPGNNESAGKKRSTKIRHGNSYLKKCLCQAAFAARNQKGSTLADRFYQIQSRPAWLTKSNHCTCASTIKNSLYPFKRTDDLS

SEQ ID NO: 508101 - protein, 418 aa, unidentified
MKEGYRRCCGMDVHKDSIVICVLPAVGEAGKAIRKTYGSFRNDLIRLRVWLRQLRVNEIAMESTGVYWRPLWNVLEDQGFRLLLVNPVQVKALQGRKSDGRDAQRIAEFLQDGRLDASFVPPPEIRQLRVLLRHRIALLEQRNELHNQIRDLFETASLKLSSVVTDLMGVTGRGIIEALIRGEDSPEILSWKVRGRLRKKEKLVKESLKGYFSEFHRSMLESLYRHHQFLTAEIKLFEQRVAQQMIPYAADIERLVTIPGVDQLVAWHLIAELGADVTVFPDADHCASWAGLVPGENESAGQQKSTRCRKGNRTLRRVLTQAAWAASHCKQGYLRAFFHRVKARRGWAKAIVATAHKILLIAYHLLRHQQPYRDPGDDYFDRLNPARTAKRLIHRLEALGIQVQIPATPYIALKDLSG

SEQ ID NO: 508102 - protein, 401 aa, unidentified
MGYHVGLDWGGAAHAICVIDGNGRTLAQLEVKHTAEGISAMLARLARIAPPGELPVAIERPSGLIVDALIKAGHPVVPIHPNVVKACRPRYRAAGGKSDPGDAYMLADILRTDGHRFCPLEPCSDEIKALRALTRTRDDLVAERLALANRLRSLLDGFWPGAAAIFADIDSPIALAFLLRYPTPASAARLGEKRLASFLAQHSYCGRRAPAELLARLRTAPVGLSGEAEAEIGGELVRSLAAILSVIVTEIAKLTARLEHDVADLADGQIIMSFPRAGRVCAAQILAELGDVRGRFQTEQQLAAEAGACPVTHASGKSRAVVFRWACNHRLRRAVTCFADNSRHASDWAARIYRAARSRGCDHPHAIRILARAWIRILWRAWTERKSYDPLRHNAARQLCA

SEQ ID NO: 508103 - protein, 409 aa, unidentified
MKVIFGIDVSKSTSTVCELINDIKSITTITNDRPGFLELLNDLKTFTQHPQIIFEATGVYSKRLQTFLDDYGYEYVVLNPLKAKKKMNLGLRHNKTDKTDAYHLALIQKLYHHPVSQLQADQYHQLNALSRFYDQLTSDIVMAKNRLHKILQFTFPELESLFSTAKGFNYWSIVKMYPHCELVNSSTELEIYNKLIELPGFQDKKAKKFTSNLISSARKAYPVASCNSVESSEAKYYAQRLIDLNKKRKDLIDQMVKIAKSLPNRDLEILESIPGIAQTTAVRILGELGDLRRFSNPNKINAFIGIDQGRYQSGEIDASLSIIKHGNAVARKILYRAIGQIDQAAKTQHCHIADYYENKKLSSQTKGFKKIAIASIHKLIRTMYALISNDQLYDYDVAKHNQKRLLSYK

SEQ ID NO: 508104 - protein, 340 aa, unidentified
MDKVTTIAVDIAKRIFSVYWVNAETGEIGAKTMTRVKFEEFMRTREPGRVVLEAGGSAHYWGRWLAQQGHEVRLIAAQHVRPFVRTNKTDGADARAIWEAAQRPEVKWVAVKSEASQAVLGLHRVRAQLMDMRRMQSNQLKALLYEFGVVAPAKITEVQLKGWVAAGRVPELLASSFEEQIERIARLKREERELTRRIERHNETDALAMQLIAIPGIGVLSASALSAELAASARSYTNGRQFAACKGIAPRLSGTGGKVRAGAISKRGDPYVRTLLIHGARSVITHQRRAKRLSPWLSALLERRPLNVAVVALANKMARTAWALAAHGRSYQENYGAQAA

SEQ ID NO: 508105 - protein, 346 aa, unidentified
MKYSTTVGVDLAKNIIQVSVISARGKELSNRSLTRKKFAEFLAKQKPSLVAFEACATSHYWARAAQRHGHEVRIIPAKYVAPFRQGHKTDRNDALAVAEAARRPSIKEAPMKTVEQQGLQAIHRSRQLLIQECTALSNHLRGLLMEFGVVIPQGFASLLRAVPEVLEDGENELPDLYRPTLHRMYTRLLELREDIEAMTKEVEILVKQHPICSRLTALEGIGPIGALLLYATLGSGTAFSGGREFAAYLGLAPRQYSSGGKTNIVGLSKKVGNCRLRSILILGARAYTYRLKEPKSAKDRWLKNAIDRNGHSRAAIALANKNVRTAWAMVTQGTEYQRRGQLKVAA

SEQ ID NO: 508106 - protein, 360 aa, unidentified
MNKNKYVGLDVDQATTVVAIEDGRGNFLMESFLPTRAVELREFFKGLKGRIHVAFEEGTQATWLYDLIEPLVKEVIVCDPRRNKLIQSGNKGDRVDARKLARLLRLGELHAVYHGERGTRGLKELVHAYEQLVGDTARTKNRLKGAFRSRAIGCRGEKVYGATERKDWLAKVDTPAVRARISSLYEQLDCLKRLRDQAHKEMIKEARKHPAYKLIINVSGLGSVRTSQIIATVGSPHRFRTKRQFWPYCGLAVVTHMSSEYEVVDGKRRRKNKPLQTRGLNKNFNRTMKVVFKGASETAIKNAPFKQYYQRMIDNKMRPEMARLIVARKISAITLAVWKKGEEFDPEKVNQAARDSDDQR

SEQ ID NO: 508107 - protein, 352 aa, unidentified
MRFYTNQHQYYCGIDLHTKNMYVCILDQAGKILVHKNISTSPQVFLQIIEPFLPDIAITVECIFTWYWIADLCQEENIPFVLGHALYMKAIHGAKTKNDKIDSHKIAVLLRGGMIPMAYVYPAEMRSTRDLLRRRMHFMYKRSELLSHIQNTRSQYNLPEFNKCISRKRNRAGIREQFEDLSVRKSIELNLTLIKQYDSLLNDVELYLTRHAKEHDPNNLYLLHTIPGVGKILALVLLYEIHDINRFERVQNFTSYSRLIKPQKKSAGKVTGSGNRKIGNAYLKWAFSEATLLLIRERQEIKEYHMNLKNKHGKARALAIISHKIGRAVYYMLKNNQAFDMQYFLKIKDRAA

SEQ ID NO: 508108 - protein, 403 aa, unidentified
MFYCGIDIAKYRHEATVIDQAGAAVQESISFANSKEGCEKLLALFQRLDISKEGLLIGMEATGHYWLSVYGYLLEQGFEVKVINPIQSEAFRKMYIRQTKNDRKDSFIIAQIMRFGQFSATNLAEEGIVAMRQLSRYRLALVDTYGDCKRRVIALLDQVFPEYDSLFSDTFGVTSKEVLSQYPTPEGMLTVSIRKLTTLLEKASHGRFGKEKAEQLKAAAASSFGVNFAKDAFAFQIRQLIEQLEFLERQVAELEEQIFSLLKQTGSYITTIPGIGDTLGAIILSEIGDIHRFDAPNKLVAFAGLDVRVTQSGEFTGTRQKISKRGSPYLRRAIWLAASRAAFCDPILSEYYQGLRARGKHHLTAVGAVSRKLCNTIYTILKEDRPWQPIPPKGKKVSNYTEE

SEQ ID NO: 508109 - protein, 355 aa, unidentified
MGGLKHQKEKRSMDYFAGLDVSLKSTSVCIVDGTGKIVREVKVASEPEALLTVLRDSAYRFKRIGLEAGPLSQWLFSALAEADLPVICVETRHMRAVLKAQINKTDRNDARGIAQMMRVGLYRPVHVKTLRSQKLRMLLTHRKLLQAKAIAVENDLRATLRNFGLKVGAVGAVKFEARIKELIDNFPDLVALVEPLLVVRRVLREQISILHRRVLAAVRNDEVCRRLMTVPGVGPVVALTYRATVDVPARFRKSKSVGAVFGLTPARDQSGESDRPGAISRCGDEMMRTTLYEAAQVMLLRSAKWSWLKAWAMKIARHRGMKKAIVALARRLAVIMHRIWIDGTEFRWTRDAAAA

SEQ ID NO: 508110 - protein, 358 aa, unidentified
MAAHPAETHVIGGVDTHKDLHVAAIVDHRDRVLGTESFPATRHGYRLMLVWMKSFGDLQRIGVECSGSYGAGLLRYMQAAGIEILEVTAPDKLDRRRRGKNDDFDAESAAHAAFAKRHTVTPRSRDGMVESLRVIRVCRKTAVQARRVALQMIQMTIVCAPDKLRDPLRNMTRMQLIRTLAAWRPDLTGYRQVEEAYRISLKSLARRYLELHDEIADLDVMIEAIVKDLAPELLAQTAIGLNSAAQLLLTAGDNPDRLMSEASFAALCGVSPVPASSGKTVRHRLNRGGDRAANSAIHIIAIGRLRLDARTQDYVARRIAAGKSKLEAIRCLKRYIAREVFGIIMRRHREINQSQIAA

SEQ ID NO: 508111 - protein, 345 aa, unidentified
MKIVGCDLHTRYQQIAMLDTETGELIERRLEHANGEARAFYAGLQGPVRVGIEATGHTRWFERLLAELGHELWIGDAAQIRAAMVRKQKTDARDAAHLLQLLLDDRFPRIWRPTMAERDLRQLVWHRQKLVWMRNAVGNQLHALAMGEGVCRKKQLWTKQGRAELQALNLGAWASYRRQELLEMVDQLDGSLEKLDRAVEEQSQQNEAAVLLRTHPGVGPVTSLAFVLTLGPVERFKRSKQVVSYLGLNPREHSSGGKQRLGGISKQGNPMMRSLLVEAGHSAARLDAELHKDYQRLKLRRGSGVAKVAIARKLAVRMYWMLRQQANYAQLVRMQGSPWATLVEK

SEQ ID NO: 508112 - protein, 318 aa, unidentified
MLIHYIDIAKRNFVIAVSSLSKTKTETNNPKGIAHTIEYLKKHKVALVVTESTGGLEIPAAKAIRRAGIAVIIANPRQTHQFAQSQPLTKTDAKDAKMPAFFAQMTAQKEDSQTMPYQPPTEAEEVLEALVNRRNQPADMRTAEKNRLHQVHETQVGSVKQLIAHFDRLIDELDKQIDNHTHTHFDGKDQVAEQIKGIGSITTATLMAMLPELGRLSHKRIAGLAGIAPHPREGGETKFKSRCFGGRSAVRKALYMATVAATRFEPLIRDFHQRPLSEGKPYKVAVTACMRKLLTISNARMRDYFAENDTAENGIRTA

SEQ ID NO: 508113 - protein, 342 aa, unidentified
MRYIGLDVHKDNITACVLSDAGKVVFEKDFKKTDGTCDCLAELFDHVGKSGFCVLMETGTYAYPPYRFFSDRGCAVDCVHAQCLKMITQTDKKTDKKDAMTIARMLRLWKRHDIDLQIAYMPTREQCELKDLCRYREEISKKIGDETRRIKSQMSRNCQVLPEGMDSFQIRRNRRYVLEKYGTDVTLSRRMKALEQLFEERDTVQKQVESCLPDDPNVKLLEHIPGVGRQTAVQLMSMIVDIGRFEDSEKFCAYFGLVPRVRDSGGKEHHGRMTKNGDRMMRMLMERVTEAHVRNCDSFITDYYKRLCPQMGTKKALITTSRKMLMTVFAVLKKQQEFRTRP

SEQ ID NO: 508114 - protein, 486 aa, unidentified
MKRTNIYQNQSQALLHLFEEAGSNDKVMCVPMDYAKNDHLVMFLNGHGDILRKPFSVKNTPEGIAYIDDQVTRFCRRQGIKKKHVFFGGEDANSFAKNFVSTLRCKGFVVANVNAHDAKKQRSNVQASTDRIDLMGIATMLLSCRANCCAAQSGIYRNLRTLVRHRRRLVQMLTEVKNRVHGIVDELFPGFLNEKNSGIVPFTQSSLYLMQDRFSPKQIRRRRRQKLIEILKRSSTSKAEHTAAKLQQYAGKVLHAPVEHVDTMQLSLAQHIKHIRCLKESVAQMDKEIALNLAQTQGAFLTSVRGIGLVLAAGVTAEIGDPNEQKPLNNLASYSGIIPRVKQTGGLDGKTYTGPVAKRCNRILKDYVVKSAYHIGLHGPPDLMADYKRRDASGQHADFGIGRRYLRMAKSLMRTSQVYLPPNLRKADSTRQDRPGYYLMSWPYLREKWKKVGALEAAFANNRPLGRWRQIVQELYDISSVRLKLI

SEQ ID NO: 508115 - protein, 310 aa, unidentified
MDGCFVGIDVSKRRLDVHVLPQGEAFHVPRDEAGVAALCARLSGLGVSHVAVEATGGFETVAAAGLAGAGLPVVVVNPAQVRHFARALGARAKSDAIDAAVIARFVAATRPAIRPLADAAARLLADLVARRRQIVEMIAAERQRQTRATLDRVRKSLACLIAALEKELAEIDAEIDGHLRGSPAWRAAEDLLVSVPGVGPVTARTLIADLPELGRLDRHKIAALAGLAPHTRQSGQWSGKRFISGGRASVRTALFIAAQVAKRHNPVLKPFYQRLIAAGKPKMVATIAVARKLLTILNAILRSQTPWQNA

SEQ ID NO: 508116 - protein, 481 aa, unidentified
MAAGKKKDTGAAGSPAGVAAGDGGDGAEVSEDQVRVIERAAAIDVAKGSGMVCTRVPGSRPDRRRQRVWPVTATSREVIALMDHLRCEGIQRLVLESTSDYWRLWYYLAEAAGLEVWLVNARDVKHLPGRGKSDRADCVWLCKLNERGMLRRSFVPPQAVRDLRALTRTRARLAQDQARHQARVEKILEDALLKISVVISDLFGASGRRFLDALVAGERSPAALAALGDPRLKATRRELEEALTGKFRDIHAFEIKTHLRILDVINEEAARLDQAIGEQLALVPRTAPACTACGEAGGSHATGCAGEGTPLLGLAERIDEITGVGLCNAQVLIAELGTDPSQFPTPGHAAAWARLTARTLQSGQSARPGRTGKGNPYLRGALGQCAMAAAHTDTRLGVMYRRIARKRGKQKAIVAVARVICEIAWILICDPGARFEELGPDYYTPRSPARRTRDKIREIERLNPGKKVILAPNDAETDTAA

SEQ ID NO: 508117 - protein, 410 aa, unidentified
MQVVYERCCGLDVHKETVVACVIVPEAHGQPQKETRTFATLTENLTELGAWLQAKQVTHVAMESTGVYWKPVYNLLAGAFEILVVNAEHVKTLKGRKTDIQDAEWIADLLRHGLLKGSFIPSVELRALRDLTRYRTKLGDDRKSEINRLHKVLEDANLKLSSVATDLMGVSAQAILAELVQGNTNATLLAELAKGRLREKQAQLEKALVGNLKPHHRFMLAQHLSHIEFLDEAITRLDKQIADLMRPFEAELAAWDSLPGINQRIAEIVIAEIGADLKPFADAQQLASWAGMCPGNNESAGKRKSGRTRKGSKWLRRALVEAAHGAARKKNSYYKSLYHRIAARRGKQRAAVAVGHSLLTTGFYLITRNKTYSDLGENYFDERDREQVKRRAVRRLEKLGFQVSLKPVTA

SEQ ID NO: 508118 - protein, 355 aa, unidentified
MNDSKFIGLDVHKTSISAAVLDHDGKLVMQSIFATHAAAVLSFIHGVGGSLRVTFEEGTHSSWLYDLLRPQVSEVLVCNPRKNALLKSGNKSDQIDARKLAELLRAGLVSPVYHGQTSTVTVKELGRTYTALTEDTTRVMSRLKALYRSQAIATEGKKLCTKRRREQWLKELTQAGRRYRAERMFEQLDALQGFRRQARRDLFVECRKHAATAILTSIPFLGPIRAALLIARVQTPFRFRGKRQFWAYCGLALETRSSADYRLVEGELHRAKKPVFIRGLNLNHNHDLKNIFKGAATSASAMPGPFRDFYENLLGKGMEPEMARLTLARKIAAVSLTVWKKGERFDPEQLKSQAA

SEQ ID NO: 508119 - protein, 317 aa, unidentified
MENNAIKFKMIGVDVAKLKLDIAFDDKHIITIDNQKDSFKQLLKLIADATQVCFVMEATGGYEKPLSNFLLAQGIAVCIVNAKRVRDYAKAIGRHAKNDRIDAQVIRLYAEMAQPKQLEQRSTGAHQLEAQMKRRDQLIKQRTMEKQHLEAANDADSIRSIKKFIKAFDKEIERIEVNIKKLIETNKALQDLRKQLTQVDGIGEVTISILMAQLPELGQLSNKQISALVGVAPFCKDSGTMKGRRVVWGGRASIRSVLYMATLSAIRYNKPIRTFYQRLLANGKLKKVALVACMRKLLVILNAMVKKGSEWDPDYVN

SEQ ID NO: 508120 - protein, 383 aa, unidentified
MRIVCGLDVHKDSIYLCILRSTGEIFEKVFGVLTSLLEEMRDLMLTHHVQEVGMESTSIYWIPVWRILEPHFKLKLIDPYFIKQLPEHKSDVKDAQWIAECMIKDLVRGSFVPPERIQQLRLYDRRIYDLDDEIIRKLAKLDAAVQRCNIRLSNYVSNTDSVSYKSVIDKICDGVTDPKILVQEIHGRIINRHGKETIMASLKGCVTEADIDIMAQLKAEIDLAEAHKQKCMDKMQEICEKEYASQLANLQTIRGIKIRTATSLIAEIGTEMDHFETANHLASWAGLKPRNDQSNKTIKSRRITHGNRYLRRTIIQCTWGASRTKNCFFSRFSYHQTQIRKKNKMKVQVAIARKMLVCVWHILSKNVVYKDFNNKILTSETNG

SEQ ID NO: 508121 - protein, 457 aa, unidentified
MSAPQKVKTKSTRKTNVQLPTLHPHDAGIDIGATQIQVAVPCDADPRPVRTFRTFTDELHALRDWLKKCGVQTVAMESTSVYWIALFQILEAAGLEVCLVNARHCKNLPGRKTDISDCQWLQYLHSVGLLRASFRPPEQICAVRSLLRHRANLIRYAGSHVQHLQKALTQMNLQIHNVISDLTGVTGLAILDALLAGERDPQKLAALKDHRIKASRDTIARSLQGDWRPEHLFVIQQTLDTWRHYQRLIAQCDQQIELLLARFDSKVDLYQHPLSATRLQHKKPQRNEPHFDARSELYRLCGVDLTQVPGIQINTTLVLFTELGPDFVTRFPTAKSFASWLGLCPDNRITGGKIISVKTRDVKSRAAMALRLAAQSLWHAKDYLGDCFRRWKARLGTPKAITAMAHKLARIIWHLIKYRTPYDPAVWAQAEEKLKKKRLKFLQQTAAALGYTLLCAS

SEQ ID NO: 508122 - protein, 340 aa, unidentified
MGSVTTIGLDLAKNVFQVHGVDAEGIAVIRQRLTRSRMLKFFAKLPPCLVGIEACATSHHWARELVALGHDVKLMPAQYVKPYVKRGKNDAADAEAICEAVTRPTMRFVGIKSPEQQSAMMLHRVRLILNRQRTQLSNAMRAHLAEFGIAAPIGRNGIDQLLDVIADPTDERVPADARFCLEMLAVQLRIVKEQILENDRRILASARETELGRRLMEIPGVGPLLASAIVATVPDPAIFRSGRNLAAWIGLVPRQNSSGGKERLGGITKAGHQYLRQMLIVGAMAVVRYAERNGAKRPWLVQLLARRKTKVAAVALANKNARMIWAMMASGERYREPQVA

SEQ ID NO: 508123 - protein, 392 aa, unidentified
MYIVGIDIGKNHHEASIVSPKGKQIGRSLRFATTHKGADSLMSFIFKNIGNSPCVFGMEATGHYWYPIYSFLKAKGYTIYVINPIQSDSLRKMYIRQTKNDSIDSFLIAEVIRFGQFGTTSMADENILAMRQLCRYRDSVISSRTEIKLRIGTIMEQIFPEYEKQFSSLWVSTSMGILEKYLTPENIENTPIDELFEIIKDKSHNRLTRAKAISIKEAAADTFGIKIAQDAFSFQLKQLIDRMNFLDKQIEALDIEIMKYYEQFDCYLHTIPGIGIIGAATILAEIGDISRFKNSSSLIAFAGIDPTVRQSGEFNSTHNHMSKRGSPYLRHAIFLAATTCSFHNSPLNAYYKKKRDQGKHHLTATGAVARKLTTIIYAVLRDSKPYEPKKFC

SEQ ID NO: 508124 - protein, 348 aa, unidentified
MLFYQPVTRFYCGVDLHSSSMYICVFDKVNSEILMHRNIGNDPEYFLKLMAPWAKDLTVAVESTFNWYWLYDYCESEGIRFALAHSLYLKAVNGAKTKNDKIDSEKIARITAGGTLPLAYAYPREHRSIRDFIRRRNHFVQMRAELLGHIQCLNMQENNPPLGRATKKLSLRPTIPDNFIDPGVRLSVEANLEAIQHYDVIITKMEKEIRKIAYEKKQKEMSLLTTVPGIGDITALIIAYETHDINRFAGRQEFCSYSRLIGCEHESGGKKRRSPGSKIGNPHLKWAFSEAAIHSKLNNDRIRKYADKLETRHKKGVSNAILAHKIGRAVYYMLKNGTVFDLDKFLKN

SEQ ID NO: 508125 - protein, 398 aa, unidentified
MTESSDYESVQVFIGVDVGKDTHHAVAINRSGKRLFDKALPNDENKLRSLISDLKQHGQILLVVDQPATIGALPVAVARSEGVLVGYLPGLAMRRIADLHAGEAKTDARDAAIIAEAARTLPHALRTLKLADEQIAELSMLCGFDDDLAAQTTQASNRIRGLLTQIHPALERVLGPRLDHPAVLDLLQRYPSPEKLASLGENKLAAQLCKLAPRLGKRLAADIAQALAEQTVVVPGTNAAAVVLPRLALQLITLRKQRDEVALAVEQRVLAHPLYPVLTSMPGVGVRTAARLLTEVACRAFASAAHLAAYAGLAPVTRRSGSSIRGEHPSRRGNKALKRALFLSAFAALRDPLSKAYYTRKMSQGKRHNQALIALARRRCDVLFAMMRDGTFYTPQAS

SEQ ID NO: 508126 - protein, 355 aa, unidentified
MPSKTDTAVARTIGIDTGKNTLHMIGLDEKGAIVLREKVSRIRIAARFVNVPPCLIGIEAGMASHHIARELTALGHEVKQVPPAYSKPFRQGHKNDFRDAHAVAEAVERPSTLCVPIKTDGQLDLQALHRVRSRLVGNRTAVINQIRGFLLEHGIPVRQGHRFLRQQLPQILATRADVLSPRMIRIIGDLIEDWRYLDERIETVTDEIEALARADEGCQQLITVPGVGPIISSAMVAAIGNGAAFCKGRDFAAWLGLVPKQMSTGDRTILGRITKRGNRYLRTLFIQGARAVLLHPTSWARHSFGPWLTMATRRMHRNVLTVALANKLARIAWTVLAQGRRYEARVEPRIEPAAA

SEQ ID NO: 508127 - protein, 350 aa, unidentified
MLTDLIDHVLGVDPDRDRITVAVVAARTQGAIASNDFPTTPRGYRAALHWADEHTERGRRVWAIEGAGGYGAGLAATLAAQNERVIEFDHPTARPSKDGAKTDALDAIRAARETLGRTSWAAPRSRGAREGLRTLITARDSAKIARVSAINVLKALIVTCPVKLREELRRLSLGQLVTRCQRLRLDTATDPELAATKLSLRSTATRIHHLTVECRDLEKAMEPLVDALCPRLLTEPGVGVLVAAQLLVSWSHPGRCRSEAAFARLAGVAPLPATSGQTQTRHRLSRGGDRQLNRVIHTAVLTRVKTDAQTREYLARRIAQGKTKREAMRCLKRYYSRHLFRLLESASVPS

SEQ ID NO: 508128 - protein, 355 aa, unidentified
MNNTKYIGMDVHRESISIAVLNSAGKMVLECVVETKASIILQFINGLRGELQVTFEEGTWAAWLYDLLKPHVTRLVVCDPRKNASMKEGNKSDKIDARRLAELLRLDHLNPVYHGEHGLRSLKELVRSYLTITKDFGRVMSRVKAIYRSWGIACTGKQVYAPQHRAEWLAKITEPGVRRRAEFYYQQLDALRSLRREVRRELLEESKKHQAWKLLCQIPSIGPIRAAVLLGILQTPHRFRTKRQLWSFGGLGIETYSSADHRYVEGQLQRSKKPASIRGLNQNCNHDLKNLFKGAAIIASTKPGPLQEFYAALLGKGMRPEMARLTLARKIATIVLIVWKKGVYFDAQFLKPQTA

SEQ ID NO: 508129 - protein, 346 aa, unidentified
MEHYVGLDVSLKQTAICIVDRTGKIEREGVVPSDPEAIAVFIKTHAPHVARIGLETGATSTWLWTELKKKELPVICIDARHAKAALKMQINKNDRNDAVGIARIMQCGWYKEVRVKDLDSHAIKALLVSRALLVKMKRDLENQIRGLLKNLGLVIGRAKMTTFWARATELIADKPALAAAVEPLLKARDALERQIDDLDRKVLAMARNEPDVRRFMSVPGVGPITALCYFATIDDPTRFNKSRNVGAYVGLTTRRYASGEIDRTGRISKCGDAMLRSYLYEAANVLLTRVAKWSALKAWGMRVAKRSSLAKAKVAVARKLAVILHRMWIDGTEFNWSSKEAAAQTA

SEQ ID NO: 508130 - protein, 348 aa, unidentified
MEHYAGIDVSLKYSSVCVVDASGKIVREDKVASEPEALIAWFSSLGFGLSRIGLEAGPLSQWLYAAMAKVGLTVELLETRHVRDAFKAMPVKTDRNDARGIAQLMRLGWFRPVHCKSLGAQETRAMLTARKLVQSKRRDIENSLRGILRGFGLKVGETTEKQFAGRIRELVAGHPILETIAQGLLEAHAVLLREFDGFEKRVRSMARTDAKARLLMSTPGVGPIVALTYAAAIDDPNRFKSSKQAGAHFGLTPKRYQSGETDYTGRISKIGDAGVREALHQAAHVMLTKPVKGCAELKAWAMRIARRAGHRKAKVALARKLAVIMHRMLADGAPFNPTAKAGTMAAAA

SEQ ID NO: 508131 - protein, 410 aa, unidentified
MERVIERCCGLDVHKKTVVAGVRVPGGTGGRDQHVRTFGTTTAELLALRDWLEAYGVTHVAMESTGVYWKPIFYVLEDAFTCVLANAAQIAQVPGRKTDVRDCVWIAQLLEHGLVRGSFVPPVPIRELRDLTRYRKALIHEHTREANRLQKGLEDAGIKLASVASNVLGVSGRAMLEALLRGTTDPDVLADLARGKLRKKLPALRQALAGRFRPHHAFLVSQLLAHLDYLDEVIETLSTHIAEVIAPFAEEVSRLDTIPGVNRRTAEVLIAEIGVDMGVFPTAAHLASWAGLCPGNNESAGKHKSGKTRKGNRWLRGALIQAALAAGTRSTKGAFAARYRRVMRHRGHQKAVVAVAHAMLVTAYHLLARKTTYHDPGADYYEHRHAERVRHRAVQLLERQGYRVILEPAA

SEQ ID NO: 508132 - protein, 344 aa, unidentified
MTTKLMAGIDLHSNNLFCAIVDMKGKRVFEKKLPCDLESVLQALKPFQKRLEKVAVESTYNWYWLVDGLQDDGYPVVLANPAAMQQYDGLKHADDKSDGFFLAEMLRLDILPTGHICDRQVRPVRDLLRRRMGLVHKRTSLILSLKSLHTRMTGRDLGTGRIKAMEPAEAEKLFEHPADQLITRLDLQLVEQLGRSIQQIESAILARVKSLPHYRVLQTMPGVGKVLGLTITLETVDPRRFASPGDYASYCRCVDSRRMSNGKKKGENNGKCGNKYLAWAFVEAANFAQRHDAACRKFYDRKKAQVNGVVATKALACKLAKAAWHMMSGNKPYDTARIFPAARK

SEQ ID NO: 508133 - protein, 371 aa, unidentified
MKSLGPVRAAFAYEFWFNAPFRQYQKFSLFVAMNEDGEYGRAIRVGHDREVFRTFLEDLPPGSQIALETSGSYYWLVDEMERAGHRPQLAHALTAKRRMEGRHKTDERDARGLAMLLRNGTLPRVWIPPAELRDQREMLRLRMSLVRMKTQLKNRIHGVLLRYNLCIQASDLFGDQGRAELFSRQGELPAWSRESVREQLQMVDSVQSQIVDCEKQLEAILYPNAERDLLKTLPCVGKVLSAVIALEMGDVRRFGEAKYLVSYAGLVPSAQESAERKRQGRCPRDCNVYLKWAFVEAANLIASKQKTGPERHAVQLYQRVKHNTKMHGKAAMAVARHLAEASYWILTKQEVYREPKSKAASSFVDARVSAN

SEQ ID NO: 508134 - protein, 423 aa, unidentified
MKVTFLTCCGVDVHKSFLVATIIKTTGGIEPSYLKKRFSTFNNSILEFKQWLLDNDCHDVCMESTGKYWIPVFNLLEDEINVTIANPKWVKAVKGNKDDTKDSKWIGDLFRLGLVKGSYVPCKAIRILREYTRYRYKLVSCRSSEKNRYQNALTVCNVALDSVVSDIFGKSSTSIIDYLLEQPGTSVNHEEIASKLLKSLKSKEDAVIESIEGYQMTDSQKYRMRLIRTHMDYITAEINDIDSSIEKMISSNPDYENAVWLLCTIPGVKRDSAIAIISEIGTDMTQFCNSKRLCCWAGLTPGCNETGGKKKSVRIMRAGVYLKPALVQCAHAAVKSSKSPYYKKKYESLVKRRGKKRAIIAIARMILTAIYQMLSTGEEWNPCDLYKVDMPAPLIEKQKTKAIKQAKKLLLREGIISESQLVS

SEQ ID NO: 508135 - protein, 471 aa, unidentified
MSCKECNTRNQSKQYRKRKGRAMPKNLSVVNPDAAGIDLGAKTHYVSVPEDRDPEHVRHFGCYTPDLEAMAQWLLACDIKTVVMEATGVYWSPVFRMLESKGLEVLLVNPRHVKYVPGRKTDVSDCQWLRQLHTFGLLRGAFVPPQIIAEMRTFWRQRRMLVDSAARSIQHMQKALTQMNLQLHVAISDISGVSGMRIIRAIVDGEHDPAVLSRMADPRIKASQKELVAALSGHYCQAQLFALKQALECYNMHQKQIYECDKQLEQFLGQFESKANPVDLGAHPKRSKGTKRRKSDPHFDLRTELWRITAVDFSRIDGIDCNTAFCVLSEIGFTVDAFPTEDQFVSWLGLCPNNQITGGKVKQRRTRKVANRAAAALRVAAQSLWHSESYLGAYYRRLASRIGSAKTITACAHKLARILYRCLKYGFEYVDKGQEHLEQQHKERTLKILKKQAAKHGFMLVDIETGECLCT

SEQ ID NO: 508136 - protein, 393 aa, unidentified
MYLVGIDIGKLKHSFCLLEKETGEILVEPVFFKNNRDGFNALLSSFKHLPQKDILIGMEDTGHYNLALLKFLLDRNYQVALINPVATNLTRKMQGGISKNDKLDTLTICDVLSSNQRVKSYRISKYSSFDLYEQKLLTREHHNLKEEENQLSNRLQKCIDVVFPEFNSLFKSKYGIVYMNILKEFGSADAIAHADIRTLRKCFDTGRGKHISLTAEELKEAARNSIGFPSSSEATQIKHLVARIELIKEQIAEIDKKIEEFSIQNNSPILSIPGISHFSGTSILAELGDIHNYSKPSQIIKFAGVAPLTYESSQFTAQHTAITKKGCKYLRKTLYQIITPVIQYNPVFRKFYLLKIAQGKGHRCAQGHCVRKLMRVIYHLLSTGTQFDPALLR

SEQ ID NO: 508137 - protein, 441 aa, unidentified
MASLSKIIPNSAGIDIGATKIFIAVEDCEVKSFNTFTDDYLKAIVYLKEHNVTSVAMEATGVYWIPLFEMLEASGIEVCLVNGRDVKNVPGRKSDVADCQWIQQLHSYGLLRPCFIPDDAIRQLRTYVRLRNDHISMASQHIQHMQKSLDLMNIKLHNVISQIHGKSGMRVLNAIISGEQNPETLASLCEESILKNKRTEVIASLKGNFRSEHIFALQQAVDAYQFYQQQILKCDKQIEALLKQFTDDKPVPPNINKPKQIRHNPPRVEELHTKLMIITKGKDPTAITGMNDKTLLEVISATGLELEKSWRTKKHFTSWLALCPNMHRSGKSNKKRKVKKHSTAGQIFLEAAMSITNSKYSALSAFYKRIQAKKGRRVALKATARKIAERYYDLMTKGIDYVEIGLERYEQKFKEQQLKRLYKQAKLFNLQLSPINVEGCQ

SEQ ID NO: 508138 - protein, 402 aa, unidentified
MNCVGIDISKGKSMIAVMRPFGEVVVSPFEVLHTDSELSKLARLLKSLDGETRVVMESTGNYHAPVAWLLHDAGLYVSVVNAMLVHDYGNNSLRRAKTDKKDAVKLANYGLDHWLTLPRYVPEEDTRLMLKSCYRQYQQYSKVRTMLKNNLISLLDTAFPDANRLFTSPPRADGSEKWVDFVAAFWHCECVCGLSEKAFTAKYQKWCKKHGYNFSEDKALDIYASACGHFGVMPKTDTAKLLVEQAISQLRATSAALAALKQEMQSLAASLPEYPVVMEMFGVGPALGPQLMAEIGDVRRFHSKKALVAFAGIDAPPYQSGQMDIRSRSISKRGSASLRRTLFLVMGVLLQCAPMDEPVYQFMDKKRSEGKPYRVYMMASANKFLRIYYASVKAYLESLEHD

SEQ ID NO: 508139 - protein, 343 aa, unidentified
MSMVTLRVVFVGLDYHASSVQVCVMDKDGDVLLNRKCANDWRAVMAAVRERCGNEVPVQAAIESCCGAANLADELISRGWTVQLAHPGYVARMKHNPDKTDYSDARMLADLQAHGFLPRVWLAPEEVRELRRLVHHRQTLTKERKNLKLQIGATLREARQKAPANANSWTKAWLAWLESSAELSPNARYITSRRLRRLRALQEELRQVDKRLERQTREDPLVQKLLTIKGIGLVTATTLRAEIGRFDRFRTGKQLARFCGLSPRNASSGQRQADAGLIKAGNNEMRALLMETAHRLIRCDERWTALAARLSGRGKAKSLIVAAVANRWVRWLYHQAQPGCLAA

SEQ ID NO: 508140 - protein, 326 aa, unidentified
MTRTICGVDISSQSLDARIGREGAFAQFPNTTEGIHALRAFCQAHQVELVAMEATGGYEQLAFAELSEHDLSVAILNPRSVRQFAQSMGSLEKTDRIDAGMIAWYAEVKKSPPACLAPKSQQHLRALVTRLRQLTDIRTAQLNQQRLVTDRAVQKLFTRLLAEITRQIHALEKKIAALLDQDPLWRELNLAFRTIKGVADRTVARLMAEMPEIGVLSNKSISKLAGVAPLANDSGQHQGKRAVRGGRASVREILFIVASVVGRYEPDFIAFQQRLRAAGKPPKVVRIALAHKLLVRLNAKAREVRQRMQALESDHMLSRLDPCKAY

SEQ ID NO: 508141 - protein, 350 aa, unidentified
MSTTILAIDLGKFNSVLCWYEPTTKDTAFRAVRTSADELRKELTRQAVAQVVFEACSQAGWVHDLCVELQLKPLVASTTGAAWQWKRVKRKTDRDDALKLARLAAVGEIDGVPVAARPVRQWKSLIGLRKRLVSERIRGQNRIRGVLVCQGLAAPMGAKAWTALGLAGIGEFARPIADCSADDLWRGELHLLLERLRFLDTQTRQVEARLDAIAKSDSRVSLLESVPGIGVRTAEVIAAYLFDPHRFASAAEVSAYAGLVPRQYQSGETDRRGRITRRGPRVLRAALVECAWCSLRYNRWARDTWLRLQANGLSKKKAVVALSRKILVRAWAILRSGKPWQSPVLVETAA

SEQ ID NO: 508142 - protein, 401 aa, unidentified
MNAVGIDVSKGKSTVCVMRPFGEVVLEPFEVLHTAQNLHDLAEKLKALDGETRVVLEATGNYHKPVAFVLHDAGLFVSVVNPVLIHDYDNNSLRRVKTDKKDAVKIANYTLDKWTRLRQYLPEDDTRLALKNCYRQYQQAVAIRTMLKNNLISSLDLTFPDANKLFSSPVKNNGCEKWVDFIGDFWHSECVSSLSANAFAKKYLKWCQKHGYVFTRSKSDEIYACAVNSASLPKSPTSKLLIQQQVAQLKAVSQSVAAFRQEMLRLSQQLPEFDTVMEMYGVGPSLGPQLMAEIGDVRRFSSKKSLIAFAGIEPQPNDSGKVVGNDKGISKVGSAVLRRTLFLIMTVILQTQPQDEPVFQFMNKKRSEGKPYKVYMMASANKFLRIYYAKVKAVMDSERSQ

SEQ ID NO: 508143 - protein, 408 aa, unidentified
MNAVGIDVSKGKSMVAALRPMGEVALLPQEFLHTEVGLEQMAYAIIALGEDTRVIMEATGRYHEPVAAALHEYGIYVCVLNPLFIKQSGGGSIRKVKTDKADAMKIAKYGLDNWVELREYTPMDTVRQQLKLCSRQYNLYMKTVVSLQNNLISLTDKTFPGVNELFSSPERADGHQKWVDFVMTFWHCDCICRVSEKAFTDRYQKWCKRKGYHFSTEKALDLYAGSCGHFTTLPKNDNTKLLITTAAQQLLAGKTTLAALRTEMTRLAKQLPEYDTVRAMYGVGETTAAQLMAEIGDVRRFPRRSSIVGFAGVDPAVDQSGKHSAKSVPTTKRGSPHLRKTLYQIVCTYLKRSPADEPVYQFLDKKRAEGKPYFVYMTAAQNKFLRIYYARVKECLEAFDERQDTVQN

SEQ ID NO: 508144 - protein, 316 aa, unidentified
MTLYKNFIGVDIGKSTFVVSLYGQKTTLDYENSSGGIAQFMQDHGETLSQALCVVETTGGYELAFVYTLMAQGYKVHRADTRKVKNFIRSFGGSAKTDALDAKALARYGFERHDKLDIFKPLSQESVELFQLVQRRRDLKAMVVAEKNRLQSPSGALIQDTIIQVIDVINQQAHIITDKIQALIEANPCLKQKKEILKTIPGIGEIIAFEVLILLPELGTLSRRKIASLAGVAPRANESGKFFGYRRTGHGRQGIKPILFLAAMAARNSKISLKAFYEKLIQKGKKKMVALTALMRKILIIANARIKELNLQKKHS

SEQ ID NO: 508145 - protein, 387 aa, unidentified
MTEYFDAHRPATAFDHDSTLVVAMELSGKSWQLGAVIPGVSRRPKTGVKARDMNEVMRVVDRWKAEAVRAGKTIARIVVAYEAGRDGFWIARELTERGIEAHVMQPASIPVERKGRRAKTDRIDLDMLLRTLLAWLRGEPRVCTMVRVPSVEEEDARRPGRERDKLVRERVGLENQIQSLLCLQGIGDFRPRLKKAAEKLEKLRARSGAALPAQTMAQLRRLMKRHSVASEQIAEIDAARVAEVDAPDPDRGIGMIRLLVAICGMGLETATRLVREVFSRPFRDRRGIAAFVGLTGTPFQSGGMEREQGISKNGNTRVRCLLLQLTWRWLRFQPDSALSRWFFGRVGEGKGRIRKVMAVALARKLLVALWRYLETGVIPEGVRLADA

SEQ ID NO: 508146 - protein, 422 aa, unidentified
MSYCPVAGIDVSKRFSDMCILSPDNKIFAQEKIYHDETSINRANALLQKAERLFFRKPVIVMESTSHYHLILFQFFSEHGYDVIVVNPLQSNSMKDFSIRKRKTDRVDAFKLAMMYRTKTLRPSQIPQTATRALRQLCRHRAELLNDVSSYKNRLTALLDQTFPGYDKVFSDVGGVTSCAVLVRFPTPTILLVEEESELVEVIASASKSGYSFAKKKAGLLISAAQKAQTLGIHSCADETLIVCTIQMLRTLSESVLQIETAIDNLLAQIKEMRNNVSLLQSIPGVGSHSAALLLGEIGDISLFKKPKQLVAYFGLDPTERQSGSFRGTKNKLSKRGSPYARVALHMGVVNSICKRGKDSAANPVLLSYYEKKCKNKPAKVAQAASMHKLVFIVFAVLRDQKPFELKTPEQHAVEQGFVKAA

SEQ ID NO: 508147 - protein, 353 aa, unidentified
MNSRGCLYVPGIIVGVDTHKDEHVAVVVDKLGVRIGQRSLPTTNMGYVSLERWASGLGEIDAFGVEGTGSYGAGLARFLRGQGHKVVEVNRPDRSTRRRLGKSDPTDAEMAARSVLAGVARDQPKSGIDKVEMIRMLKRTKDSAMKSRIQAINQMKALIVTAPVELRAVLRGLITNQVVARCARWRHGQLGTPAAAAKYTLRSLARRHIQLTQEIEALDAQLARLTTAFAPALMESFGIGPDTAAALLVTAGSNPERLKSEAAFAALCGVSPVPASSGKTNRHRLNRGGDRKANAALYRIVIVRLRYHDRTKTYFQRRMEEGKTKTEVIRCLKRYVAREVFSILHDIGKRCMA

SEQ ID NO: 508148 - protein, 394 aa, unidentified
MNDLNLLAIDTSKKSFALHMNDYRGKFLFRKEIKREKLLEKIAQISKCLIVMEACGGSHHWAREFMKLGHEVKLIAVQHVVPYRKSNKNDKNDAAAIAEAAARPSMHFVSVKQIWQQDIQSLHRIRQRLVNNQTSLVNEARGLLAEYGVVVNEGINNIRAILPEIVQGKLENLSFCLRKSLGRMHEELLNTTENIEEIDAELMEFCRENELCRNLDEIEGVGHLTATALIAYCGDPHSYKNGRQFAASLGLVPGHSQTGGKNSAATMHGITKRGNPYLRTLMVQGGMSLVRATQSTIKAQQRKENSEDPQLDAMEVKTCRGGQSPTRKRKKCKSEQEKFHRSQARRDWLTRIMDERGVQKAAVAMANKNARIAWVLLTKKVKYNPDMRFGKAAS

SEQ ID NO: 508149 - protein, 421 aa, unidentified
MMHMHGIRAQQLSARTVGVGLDRLVAVPVDVGKSAAMAMVVDFSGRRLAAPFEFALDRSGVAGFVARVERVLPAETALVRVGVEACGHYHRPLVASRVLPGHWQLVEHNPAWVSAQRRVNGTGRTKTDPIDLTAIADLLLAGRGYEVAVGDELLVELSAWAAHRRRRVQARSAVKNQLTGQLDRCFPGLGASLSSVLGTKVGRLVAAEFSDPDRLARLGVARFRAFAARRDVRVSVALAERLVAAARDALPTPDAAVARQVLAADLALLDGLDGQLAEVDARIDALVPATRYRVLTSGPGWGAVRAAGYAAGVGDPARWPSHRQVYRAAGLNPAQYESAGRRRDSGISREGSVPLRRAILDLGVGLWHQDPAARRYAAGLRERGKPGAIIATALARRANKIAFAMVRDQTLYDPACWASKE

SEQ ID NO: 508150 - protein, 336 aa, unidentified
MLYIGIDLHKKSITLCGMDQARAIVIRRNFYCCETDAIRTFFAELGPFQAVVEATASYEWLWQLLEPLAQKLVLAHPKKLRVIAESARKSDRVDAQVLAEFLALDMIPAAYRPTSRQRQHRALVRQREYVRRGITAVKNKLRRILSDYNADRPELFSVEGQKHLRQVRVSPADRFVLEQLRRHWEYLEKQLKAVDKALREFAKTAPAAEAEARAVLASIPEVGPVTVDIVVSELGDVGRFRSAKKVIAYAGLAPGQRESAGRKKELGITKEGSRRLRWALVEAAWRVVRKTRHWATVFEGIRKRRGKKKAIVAVARRLLGVMVALLRTGQRYRAAA

SEQ ID NO: 508151 - protein, 413 aa, unidentified
MTQLNPLYVGIDVASHSNVAYLMKPDGSKHSVFPIANSKAGCQQLVKRIVSAMTGNGLSEMKIGMEATSIYGSHLVYTLKEDFSLSAYTKEIHVLNPKQVAKFKESYDDLPKNDYVDAYVIADCLRFGRINNEVYLGDYRHEALKKLTRARYTAVVNLSREKQRFLNTLFLKYSTFAQEKVFSDTFSTTALAVYEEFESADQLALMDLHELTEFIKEKGKNRFPDPDAVAKAIQKAARSSYRLPKTVNDSVNQVLSISISSMRALEASIKQYDKAIAEQMNAISNPLISIKGIGPVYSAGIIAEIGDIHRFKNQASLAKYAGLAWKQHQSGGFEAENTPLIHTGNRYLKYYLCEAVMSLVRCDTEYNSYYHLKYKEVNRAQHKRALVLTARKFVRLVYCLLSENRMYIAPEER

SEQ ID NO: 508152 - protein, 403 aa, unidentified
MNSVGIDISKGRSTVAVMRPFGEVVISPFEVRHTDSELSKLARQLKSLDGETRVVMEATGNYHASVAKLLHDAGLYVSVVNAKLVHGYGNNELRRVKTDRKDAVKLANYGLDRWLTLPRYVPEENTRLLLKNCYRQYRQYSKVQTVLKNNLISLLDTVFPNVNRLFSSPVRGDGSEKWVDFVAEFWHCRCVTEKSEKAFTNKYQRWCKTHGYNFSEAKAHTIHAKASGHIGIMPKSETTKLLVEQAVVQLRTTSTTLTALKREMLTLAAQLPEYPAVMGMFGVGPTLGPQLIAEIGDVRRFYSKKALVAYAGLDAPPNDSGDVTGKHKSMSKIGASSLRRTLFLVMSVYLQNAPLDEPIYQFMDRKRAEGKPYRVYMMASANKFLRIYYATCLLYTSPSPRDA

SEQ ID NO: 508153 - protein, 337 aa, unidentified
MNYCGIDLHSNNCVVIVSDDNDRIVYQKRLPNELAQIAAALEPYRHELVGVVVESTYNWYWLVDGLMDSGYRVHLAHPAAIRKYDGLKHSGDFADAAYLAQLLRLGLLPEGYVYPREERGARDLARKRMQLVRYRTAQILSIEGILMRQTGSRMSGETVKRLTAEQVDEFAFTPDVTLAVEANRAVSQALGQQIEALEKRLRERVSLRAEYHLLRTVPGIGDTLATTIMLETGSISRFAQVGNFSSYCRCVDSLRESNGRKKGEGNTKNGNKYLAWAFVEAANFAMRYCPQARSFYDRKKSRTNRVLAIKALAHKLARACYHMLRDQKPFDVHLCFG

SEQ ID NO: 508154 - protein, 409 aa, unidentified
MNTLFVGIDVSLKSNAVCVMSPAGETFCAFSVPNNTDGARLIVEKVLSYWAAAQAEQVRFGLEATASYGDLLAGFLKQDPSIPSSRKSIQILNAKQVSKFKKAYGDLPKTDRIDAFVIADCLRFGRIGRETYMDEKGKALQQLTRARYTLANDLSREKNRYLHHLYLKFSEMTQSPLFSNNFGAAAMALVEEFESVDQIAYTSIEDLTAFLCQKGKNHFADPAGLAQTIQKAARSSYRLPKTVEGSVNQILAVSAQTIRFYQRQLKEYDLVISSQIDNLPNPLTSIKGIGLVYSAGILAEIGDVHRFKDQAALAKYIGLSWTRYQSGEYEADHTHMIPSGNRYLKYYIIEAANLVRQHDAEFKRFYQQKYAETPKTPHKRALVLTARKFVRLIYALLRDNRLYTPPAVE

SEQ ID NO: 508155 - protein, 430 aa, unidentified
MEVVHRSCAGIDIGKRSLTVCVISSDPSGEPVKETRTFRTLTRDLLALADWLDEHGVTAVAMEATGSYWKPIWNLLEDRFELLLANAAHLRAVPGRKTDVRDAEWIAELFRHGLLRASFIPPRPERELRELVRYRTSLIRERASEINRLAKVLEGANIKLGSVSTNLGGVSGRAILTALTEGTDDPEALAGLAKGRLRNKHEVLVEALAGSVGPHQRFLLAAQLRHLADLDALIESLDAEIKERLQPAAELIELVSTIPGVGGRTAEVILVEIELVSTIPGVGGRTAEVILVEIGQDMTRFGSARQLASWAGMCPGNRESAGVQRSGRTRRGSPWLRTALIGAARSASRTKTYLGAQYRRLAARRGAKRAFVAVGHTILGIVHAVLISGRPFDDLGVTYFDRRDADHVRRRLTKRLEAMGYVVTVAPRAA

SEQ ID NO: 508156 - protein, 446 aa, unidentified
MDAGDWCHANEAGTARPREGISVIDTGDVDVFLGLDVGKGEHHGTAVTRVGKRVFDKRLPNSEPRLRDVLDKLTARHGTVLVVVDQPASIGALPLAVTRDVGCRVAYLPGLTMRRIADLYPGEAKTDARDAAVIADAARTMPHTLRGIELTDETIAELEMIVGFDDDLAGEATRIVNRLRGLLTQIHPHLERVLGPKLDHPAVLALLERFSSPTALRKAGRRRLLGVARPVAPRMFERLVEDILTALDDQTVVVPGTDAATLIVPSLAGSLRAALDQRNLLNKRIQELLDEHPLSQILTSMPGIGTRTGARVLIDVGDAAAFPTAAHLASYAGLAPATRSSGSSIRGEQPSRRGNKQLKRPLFLSAFAALGDPASRTYHDRKISQGKRHTQALLCLARRRVDVLIAMLRDGTLYQTRPAQRGQLSRGSASSTTRSAAGTNPSTGFP

SEQ ID NO: 508157 - protein, 337 aa, unidentified
MLDFSTVGVDLAKNVIQVHGVDADGKTVVRHQLRRRQFLQFFEGRPRCLIGMEACSGAHHWGRQLQEMGHDVRLMPPSYVKPYVKRGKTDAADAAAICEAVTRPSMRFVPVKSEADSAALVLHRARDFLVGQVTQTGNAIRAHMAEFGIVAPKGSKRVEDLASELSALPEAARLPLQALFDQFAETRIRIDRLTDEIEEVHRRNEVSRRLASIPGVGVLTATAIAATTPDVSNFGSARDYAAWLGLTPKQHSTGGKTRSGGISKMGNRYIRRLLYLGAMSQIMVRRRSRRPGTDWLSRKLAAKETKVVAIALANRMARTVYALLRDGTSYRPQVSAA

SEQ ID NO: 508158 - protein, 409 aa, unidentified
MDVTITRVAGLDVHQASVVATVRMPDGAGGRTMVTATFGTMPPDLVALRDWLQRYQVTHVALASTGVYWKPVYYMLEDGFTLLLINMLALKHVPGRKTDVNDSEWLAQLLECGLLRASFVPPPAIRELRDLTRYRTQQVRDRAQEVNRLCKVLEDAGLKLTTVMSDIMGASGRAMLTALLEGTTDPTRLADLARGRLRQKLPLLQRALAGQFRSHHAFLIRQILTKIDFLEETISQLTDEVDQRLRPFEPILAALDTIPGVDRIGAMTLVAETGADMTRFATAGHLCSWAAVCPGHNESAGKRRSGRTRQGNRYLRGALIQAGLGAMRTKDSALQAMYYRVKRQRGHKKAVVAVAHQILEIAYYLMRDGVTYRELGPDYFSARSKDRAVRRHVKQLEALGFHVTIEKAA

SEQ ID NO: 508159 - protein, 426 aa, unidentified
MSHSQKLEIITPNTLIIGVDIAKKLQWARFTDYRGLELGKALKFQNDKPGFERILSSIQTVCKLKKLDNVIVGMEPTGHYWKPLANYLILNEIKVVMVNPYHTKRAKELDDNSPTKSDKKDALTIARLVRDGRYYRVYMPQDIFAELRVLSNSRISLMKRHNALKNTITAVIDEYFPEIVTVFKNPLKGKASLQIMKACPFPSLILEMGVEGVLAEIKKAVEKTVGLKKAQQLVETAKDSIGVNYGVASAKLRLGLLIEELELLTKQLEQIESAMELALAETGLKEIILGIPGIGVVTAASFLGEIGDPLRFDHPRQISKIAGYNLVEDSSGKNVSGTSISKRGRKNLRNVLYQMARTMVAVNPEMKELYQYLKTRPNNPLKKKQALVVISKKTVTVIYNLVKKQTAYKAELVLGEFRKNQIKQAA

SEQ ID NO: 508160 - protein, 337 aa, unidentified
MDRQYVGIDFHRRRSVVVRMSATGERLSGVRVANDPVAIAAAVAEAGPDPEVVVEATYGWYWVVDLLPANGARVHLANPQGLNWGQRRVKNDERDAIDLADMLRLGRLPEAWIAPPATRELRELVRYRAKLVALRSGLKAQVHAVMAKEGVLPVQGRMFGPGGNAQLDAIVMADNYTTRVASLRDLIERYDREVGMLEGEIHRQLRHHRGYHTIQAINGIGPTIAAILVAEIGDVARFRSAQALCSWAGLTPKHRQSDTKTTRGSITKQGSKLVRWALIEAVSRYHGGPGLAPGFRRIAERRGTNKARVAVARKVLTLVYYGLRDNEIRCLAQAQAA

SEQ ID NO: 508161 - protein, 495 aa, unidentified
MKAKAAKGKGKHSNWSKRGAKIAAKRGPEGMEIVNPHAGGIDCGAQEHYVAVPPQSVEPGEPVVRCFSAFTEGLDALVEWLKACGVTTVAIESTGVYWIALCQKLEAAGIEVFLVNARHVRHVPGRKTDVKDCQWLQRLHSFGLLSASFRPDDAICRLRSLQRHRLNLISTAGAEIQHMQKALQQMNLHLHHVVSDITGVSGLRILDAILAGQRDAGQLAKLRDHRVYKSTLTQMEAALVGDYRPEHLFVLGQSLQAYRFYQARTQECDAEIESHLQQLAQRFESSSALGAELSQPEVLNDAQSQNPQKPAKRKVKRKPQANEPKIDLADYLRRICGVDLTQVIGLNVLSVLLIVSEIGVDMSKWRSAKAFSAWLGLCPRNKISGRKVLDTRTCKVISRVATTLRLAAQSVGRTNTALGIFYRRKKAHLGPAKATTATARKLACLVYHLLKYKEQYREPDPATYQLKVQKTILAKIQKQAAALGYKLLPTALVPA

SEQ ID NO: 508162 - protein, 345 aa, unidentified
MHYIGMDCHIKTLDFAVVNEAGRLVKAHSVATSVNGFMEFVKTVPAPRIIYMEEGTLAAWALETCVRFRERLVITDAKKNHWIGSSGQKGDAIDALKLAQLGRGGYIKEIHHPVGQRRRFRELMIAYHDTVRSTTRIKNKIKARFRQNGIQCRGVTVYSKTYRAEWRGKLPQEATLLLIMDGLWRQQEQSEQTEKDLLAAARRQAKYYPEIKHFEDLPGIGFISAATISAMLETPYRFADKRKVWMYAGLGIMTRSSGGKLYSEKLSKDYNRLLKYTLKQAAEAAIREDNPFRRKYLDMTLLRGIRPHRAKLTIARGMLTIMWAMWQKGEKYNPEIREEAARKQA

SEQ ID NO: 508163 - protein, 378 aa, unidentified
MRIVCGLDVHKDSVYLCILSSTGEIVEKVFGVLTFQLAKMRDLMLKHHVQEVGMESTSVYWIPIWRILEPHFKLKLVNPYFIKQLPGHKSDVKDAQWIAECMLKELVRGSFVPPERIQQLRQYDRRIFDLDDEINRKLSKLDAALQRCNIRLSNYVSNTDSKSYKEVVARISEGITDPKVLVEEIHGRIINRHGRKTIIAALTGVITQADSDMMRQIREEIDIAERHKQECIDKMQEICEKEYLDQLRNLQTIPGVKLRAATSLIAEIGIDMSHFETANHLASWSGLKPRNDESNKVIKSKRITHGNRYLRRTIIECSWAASRTQGCFFSRFSYHQTQVRKKTKMKVQVAISRKLLICAWHILSKNVPYQDFYERGIS

SEQ ID NO: 508164 - protein, 318 aa, unidentified
MHILGIDIAKAKFDVCLLGEIEPQRHQFANTPAGFEQLAAWLKEQGVEQVHACMEATNIYYEALAYTLVEQGQKVSVVNPLQIKAFRESRLRRTKNDRQDAWLIALFCQQQAPPAWRPLTPAQRTLQALVRHWDTLEQDHRQQSNRLDSCRDEAVAASLRRIIALLEAEMKTVEAQIQTHIDQHPDLKNQHDLLLSIPGYGAKTVAKLMGNLPHLAEYASAKEAAADVGLTPLEFQSGQSILGKPRLSKMGKARLRKSLYFPAMVALRYNPIIRALGERLEARGKAKMVIIGAAMRKLIHLAYGVLKNNRPFDPNYAQ

SEQ ID NO: 508165 - protein, 390 aa, unidentified
MLYLAIDQHRKQLTVNLRNEQGDVILKRQVSTEWKRVREFMEDVRNRSVPEGGFVAIVEVCGFNLAEYGCREVVLVQPEKRTKNKTDRRDANALGELLWTNRQRLLEGKKVQNVRRVVPPSQRDAEDRQLTIMRHRLGRLRTRTINRVQHLLLKHNLQQECPTKGLKSQSARNWLAKLPLGVVDRAELDQLLAQWELWDRQIEELEPKIRERQAENTTAAIVATVPGAAAYSSLALACRIGSIERFPHARSLPHYWGLTPGCRNSGDATRRLGSITKQGSAMARFILTQMVVHVLRRDARMKEWYQRIKRRRGSKIARVAVMRRLATILWHMLKHQQPYRPGGTSTAGNDPGCGCKPPDRNAFFEAQQGRSRGRKQKGCHSSVTAAAACP

SEQ ID NO: 508166 - protein, 387 aa, unidentified
MLKQENENGERTAVGIDPCKEFLQLAILSHKKEPVYRKVPLLPSITAEIARSTDPENTQIAIESYGSNGKLFVFELMKRGYDIREVNPYVSNRLTDLFTEEHSDRRDAESLAKALFLLPDLPKVSFTERKLWLGKLSRLREKVIKDLNAYVNRLHVALTESYGVVYKSLFRSVFSEKALKFFESYPTINDTFSHKRKVKTLLAQEKWELLRQAGQWERSFYLELLGVEIRCLITVIRVLIDTKKKVERQIRDIGEEDKEMKILRSIPGVDYVTASSLLSGIGNVERFEQESSLASYCGVGPVLWQSGTSRIKTKRRKRFSRRLKGNLYLISLTQIRVNHESRAYYWRKRKEGKTHWQAMNALSRQLIKIIYYMLKNHECYQREKVMH

SEQ ID NO: 508167 - protein, 328 aa, unidentified
MKENDSPPVVAGIDVSKDRLDVHLWPSGQNLSLDNTPAGAAELVGRLRPHGVALVVIEATGHYERRAALALMDAGFEVAVVNPRQPRDFAKSTGQLAKTDALDARILAQFGAVIGPRPSERPAENQLVLDELVARRRQLVEMITMERNRIEHALHLRLRRQIEHVVKALEKQLDQIEAEILALIDRDDDWHRRFEVLKSAPGVGDATAATLVAELPELGQLNRQAIAALVGVAPINRDSGRERGQRHVAGGRHSVRRMLYMATLTARSWNPTIKAFAQRLTRAGKPFKVVMTACMRKLLTILNAMVRNNQLWRTPCLKPSTDRILQPT

SEQ ID NO: 508168 - protein, 463 aa, unidentified
MAARKQKRMSAQTVEDEDYQLRYERVAGIDVAKDSAVVCLRLPPGPGKTRRTSRTWEVTARVPDIEALAAELKACRVERVSMESTSDYWRIWFVVLEGAGLEVQLVNSSQAKNLPGRPKTDKADAAWIARLTEMGLLRGSFVPPPQIRALRQYTRQLVHLTGDRTRYWQRLEKLLESALCKLTSVASGLAGSKSCLAMLEAMIAGERDPQVLAGYALGPMKNKHAALVAAFTGMQFGPEHAFSASSDLRMIKMLDAEIAGLEQQVRDHLAAIPAAWGVDADGTTGPGAGTGPDAAVLPAVARLAEIPGVSPGIAAGLIAEIGLDMTRFPTPDALASWAGLAPVPNQSGSRKGRGKKGTGSSYARRYAGQAGHGAAHTDTFLGERHRRIRRRPGGGGWKKATIAVGRSILVIVWHLLADPAARYRDLGPDHYARHTDTNRKARGHKRQLESLGYDVVLTPREAA

SEQ ID NO: 508169 - protein, 401 aa, unidentified
MKEFNAEPAQVKTASALNTVQETSTAKEYAVYIGLDVHKETISVAIARPGRDAPEYREEISHTRKTVEKLIGRLSREFDGALMLFCYEAGPCGYGLHRQILGAGHDCEVVAPSLIPKKSGERIKTDRRDALKLARLQRAGELTGIWVPDEEQEAMRDLCRARNDMKSQERKASQQLNAFVLRHGHHWPSGKTRWTAAHYNWLESLKFTHDWQQVVLQEYIDAVKAASTRVAEMMGQMLRVLPQWRMAPVVDALTALRGIDKLSAMTLLAELGDISRFQSPKQLMAYLGLVPGEHSSGGRRRQGAITLTGNAHARRTLVESAWSYRFPARQTAHLKRKAAAASDEAKAIAWRAQKRLCGRYRTLTQAGKNTKLACVAIARELAGFIWDIVCTEMPRLRAMAA

SEQ ID NO: 508170 - protein, 389 aa, unidentified
MTFFVGVDIAKYEHVATILDDSTGEFLVDSLHFDNNSKGFKLLLSNLSKLDRNDVVIGFESTAHYHQTLFSYLSGKKYRCFLINPFMTSRFRSLSLRNAKNDNIDSRAIASYLSFEYRHLLEENFFLNELKELCIHRDAIMKRSSRLKIQLLSYLDRVFPELESVVDKHGIHSKAIRAIFKERPTAASISSTRIDHLLKLAKDASHNRFPQAKIKAVKEAAISSVGISSDAIGLKIRQSVQMLESLEKQIDEVEAAITSSPTVIDSPLHKVKGLNSIEIAYIMSAIINIDRFASPDKLIAYAGLDPIIRQSGTWQATQTRMSKRGNKLLRYALIWSANNIRKHPSKMKDYYDRKIAEGKSHYNALGHCASKLCRYIFFILNHPDDDFIN

SEQ ID NO: 508171 - protein, 403 aa, unidentified
MKNLLCQNVGVDVSKDSLEVTFSTLEMDRRVKVKATRKFANTPAGFKQLQRWLESKRAAQVELRLLMEATGVYYEQLAWFLFQQGYQVSVVLPTKAKRYLQALGHRSKNDKIDARGLAQMGLEQRLELWQPLSPNIYQLRLLTRQLEEFTNQRTVCLNQLHALHHGALVVKQVERNLQKMVRVLENSLQELEEAIGELLYQDPLLAERVDKMLSIKGVGLKTVAVLLAETNGFATFERQGQLVSYAGYDVVEHQSGLRAGRTRISKKGNAHIRRAMHMPALSAVRFQEPRFVALYERLVKRGKTKMQAYVAVQRKLLVLLWTLWRKNEAYDPRYGQQPAEPKNNIQIQEAGASLSGVSAADKDAITQETQPETAEKEIAPAQARATQDELPVPVGPGALFQVE

SEQ ID NO: 508172 - protein, 421 aa, unidentified
MDSAKLPAKVFCGVDWAEGHHDIALVSIEGEQLARQRIGDGVSGLAQLVNLLAEHGDTGENPIPVAIETSRGLLVSCLRATGRPVFAINPLSVARYRDRHSVARKKSDAVDAAALANILRTDMAMHRPLPQDSELAQAIAVLARAQQDAVWDRNQAQNKLRSQLREFYPAILDAFANHKHGLSSNEARTILAAAPTPTQAAQLTRRQLRALLKHAGRVRGIDAEADRLHEVFHREYLHHLPLVEEALGQQTTALLRQLESACINAENLEISCTDAFQQHPDAEIIVSFPGLGSLTGARVLAEIGDDRSRFSTAQGLKAYAGSAPVTRASGKSHFVMHRKVMNKRLAAVGYLWAFSSLRNSPGARAHYDRRREGGDRHVSAQRHLFNRFVGMLFHCLQHEEHYAESRAFPNQQPTKSILTAA

SEQ ID NO: 508173 - protein, 355 aa, unidentified
MQRYNISFKGQNIYVGIDVHLKTWHVTTLTESGYKYSFAQHADAKELFERLNKKFPEAHFKSAYESGFCGFSVHYALTELGFENIVVHAADIPTTGKEKAMKTDAVDSEKIAWALKRDELTGIYVKDKRFMDDTNLMRLRQRFIIDLSRQKNRIKHLLYTQGVTYPKCFQKNGTHWSRNFMKWLREEVELLSEEKRTLMLLCDQVEHIREDILAVTREIRRISNTDKYKENFNLLRSVPGFGLITSMSMLTELDNNPMRFPNERKFVAILGLIPTCHDSGDKKVSGEKTFRGNKHLGPLIVEASWTAIHRDYTLGAYYTNCCQSMKPQKAIIKVARKLACKAYAVMKTKKAYVLA

SEQ ID NO: 508174 - protein, 463 aa, unidentified
MTKKNKKQSGPRRQPVKVRRALPLLNPNAAGIDVGAREHYVAVPADRDEQPVRRFGAFTEELHALARWLLQCGVKTVALESTGVYWIPLFQILESYGLAVKLVNARHVKNVPGRKSDVQDCQWLQQLESFGLVSGSFRPEAKICILRSYMRQREMLIQSAGRYVQQMQKALTQMNIKLHHVISDLSGQTGLAIVRAILAGERDRLKLAAMKDRRVHSDVLTIAKSLEGDYRAEHLFALKQALELYDYYQQKIAECDAEICKEMRTLETRATAPAAALKRKPRSKHNPLPFDSQAELYRILGVDLTRIDGLNESTAQLIISELGLDICQKWPTEAQFTSWLGLCPNNKISGGKVLHRGTRKVVNRVANALRMCAQSLLNSKSALGAYARRLRAKRDSRVAITATAHKLARLIYRTIKYGQEYIDVGQQQYEAKYKAGILKSLHRKARQLGYQLVSCQSPEVVVP

SEQ ID NO: 508175 - protein, 451 aa, unidentified
MSKKRRSENQLPILQPDAAGVDIGADEIFIAVPADRDPEPVRRFRTFTPDLYELADWLTQCHIRSVAMESTSVYWIPLHQILEERGFEIYLVNAHYLKNVPGRKSDASDCQWIQYLHSVGLLRASFRPPADICAIRSLWRHRENLLQMASQQTLHMQKALDQMNLQLHRVLSSITGLSGLTILDAILAGERDPIQLAALCHSQVKNSRGTIAKALQGDYRREHLFALQQSLDAYRYFRHLITQLDAELKSCLQELPTSSAAQPDLPKGTKLRQKERNDPAFDLRSELYRVLGVDLTNVPGISVMTAQTILSEIGPTVARFPNASAFASWLGLCPEKQVSGGRVLYTRTRKVKNRIANALRMGATCLYHAKNYLGEFYRRMKRKLGAPKAVTATAHKLARIIYHLLRSREPYDESVFAQQEQSNLRQAELRLRKQAAKLGFQLTPAEANDMP

SEQ ID NO: 508176 - protein, 421 aa, unidentified
MKRLRAKKANIMKEGTLIVAIDIGMATNHGCCVAADGRSTKTFRFDNTREGLDTLWTMVLASKTRFQCNEVIIGYESTGPYGEPLIHYLRQKQATIVQVNPLHTKRMREINDNSPLKTDRKDPRVIADVIRIGHALSVVVPEGDAAYLRRINNARERHVRERTALLNQLQQFVFLIFPEFTRIIKTIFCKTALHILKKYTTPAKIGSAKIEKLGEEMRRRSMGKFGAEHAAALINYAKTTIGIQEGLDGLVMDIQHALVQLEMVDSLMAELEHEMETTLQRIPYSRKLRSIKGLGIVTVAGLIGEIGDFTKFTTQSEIAKLAGLDLYEVSSGKRRGQRRISKRGRSLLRKILYYAAMQTIRKNGIMHDYYQRLIGRGMKSMMALVAVSRKLLRIIFAIVRDDTEFIMNHEFQRKEEMRRAA

SEQ ID NO: 508177 - protein, 421 aa, unidentified
MDVLLERCAGIDIGKNEVVACVRTPGPGGKGRTKRTRTFLSFTGDVEAMADWFAAEGVTDVVMEATGSYWKPVWYVLEERAFELKLVNAAHVKILPGRKSDVLDAEWLAELLEHGLLRGSFVPPPAIRELRDLTRYRKRLVQAHNSECQRIQKTLEDAGIKLDSVASDVLGVSGRLMLAALVAGERDPEVLAEMAKQRLRSKIPELRRALVGRFRDHHALLIGLCLEHIAHLEAAVAKLDERVDALFAANQSEAGVPFAQARDRLDTITGIGKRAAECIIAEIGVDMGRFPTAGHLASWAGMAPGNNITGGKRHSGKTTKGDVWLRDILSQCAWAAAHTRDTYLSAQFWRLARRIGKKKAAVAVGHSILVICWYLLTDDCDYEDLGGDYFARRVDPDRARDRLVEQLQHLGYQVALRKAAA

SEQ ID NO: 508178 - protein, 406 aa, unidentified
MFAGIDWASEDHAVCVVEDTGKKVSSFAIKHSRSGLDELIAKLRKLGDPKDLPVAIERPDGRLVDRLLEAGHPVVVVQPIAIKAWREAEVISGAKSDPGDAHVIAEYLRLCFHRLRPLDPFSDATRALRAAVRGREDLVHQRTAASNQLQATLEAFWPGANALFGDICSQISLAFLKRYPTAAAANKLSEKQMEAFLKKNRYSGKQKPADLVDKLRSAPAGITSGAEMAARRTVVSAFVSLVTTLNVGIKDLDKEIATQLGEHPDGEIFTSLPRSGNVNAAQMLAEWGDSRQAYDGAEAVAALAGMSPVTKKSGKHHGVSCRWACNKGFRNAMATFASNSRHESEWAADIYDRARARGADHPHAVRILARAWIRVIYRCWTDGVPYSEQNHKGATRLAIQESKAAA

SEQ ID NO: 508179 - protein, 417 aa, unidentified
MSEYAALVAVDWADQQHAVCLLDPSTGEREQSIVKHTPAALQEWALSLHQRFAGQPIAVCLEQSRGPLIYALLQYDFFVLYPINPATLAKYRQAFSTARGKDDPTDADYLLDLLEHHRNRLRPWHPDDEKTRTLRLLVEQRRRLTGDRTRVSNRLTALLKGYFPQVLDWFEDIRTQLVCDFLERWPQLSLLQQARPATIDKFLRSHHSTSKPTNLRRLTEIKTALPLTTDATVMTSSVINVKALVAQMKTVIAAISEYDRHLEALCQTHDDYHLFAALPGAGPIHAARLTAALGSDRSRWQSADELVTFAGIAPIIERSGKQFRIRWRYFCPKFFRQTFHEFAAQSIQDSFWARAYYSMQRAKGKDHHAAVRALAFKWIRVIWKCWHTRTPYNEVIYLESLRKKGSSLLKFAVDYQQ

SEQ ID NO: 508180 - protein, 428 aa, unidentified
MTQSIYNMGSVVLVAIDIAKARNDVLVQFPDGAKRKFKVANKLADYQEFTSYLKSLDLPCLIGFEATGNYHRPLAYYLESEGFALRQVSSLAAAKTREALYNSWDKNDSKDAQVILHMLKTGVSQTYCDPMIHNFNEIQELSKAYYQVSLRKVRVQHSMMTHYLPLYFPEAQKYFHSSRAEWFSNFLLRFPVPASVIKHSKGQFISDAWDTVGRKVSKTAWLTDFYETAHHSIGLPVVEDSEAVRMFRLILQEHIDLCKMRQQIEQQADRYMGDNEDYHRLQTIPGIGPITALTVLAETGDIRRFSHHKKFLKYCGLNLSTERSGRFRGITKLSKRGNSRLRLAFWLAATVAIRMRENTFRQKYENYIKSDPSNKDLKRKAYTAVAAKMARVAYSVIKTNIDYRCFYEAAIPSGKIPSPRAVEASLTS

SEQ ID NO: 508181 - protein, 427 aa, unidentified
MNYTQNEKIMSITERTLVIGIDIAKNVQYARAFDYRGIELGKVRSFENTAEGFRIFEDWMKSLANQKQKNNIVVGMEPTGHYWFNLGHFLKDLGVKLVLVNPFHVKRSKELDDNSQTKNDIKDPKTIAKLVIEGRYFEPYIPEGIYSELRVAMDMREGLGKNLSKIKNKVTQWLDKYFPEFNDVFADWEGKAALITLKEFPTPEKVLSTGVQQIILAWRKEVKRAVGNQRAVRLIEAAKISIGIKEGLRMAEKDLIVNLEQYDLYSRQLDLLELEIEELALQIPGAKEVITIKGVGIITAAGFIAEVGDIKRFTHPSQIQKLAGLNLIENSSGKHKGKTSISKRGRSRLRALLFRVMMPLVAKNPEFKMLHEHYKNRKDNPLKKKQSLILLCCKLIRILFTIMTKQVEYNPQKLILDISNLQLKEAV

SEQ ID NO: 508182 - protein, 398 aa, unidentified
MSRIWAGIDSGKGHHHGLALDSDGKTLLSRRVTNDEPELLKLIGDVLDLADGRQVTWAIDMTGGEPALLLALLVSHGQEVLYLPGRLVNRASDGYRGEGKTDARDAYVIADQARMRRDLRPIRPGDEAAIELKLLTGRRSDLVEDRTRSVNRLRGTLLSMFPALERALDVTNLGPLKLLTGFQTPAAIRRAGVTRLTKWLANRSVRNARTLAEAAVEAAGRQYTAIPGEKTIAKLVHTLAEEVMTLNEHIAEIDKLIEGRFREHELAEIVQSVPGIGPTLGAEFLAAVGGGLDEFTSPDALAAFAGVAPAPRDSAKVSGNLHRPVAYHRRLQRVFYTSALVSVRCDPNSRKFYDRKRGEGKKHVQAVLALARRRVNVLWALIRDRRCYEVTPPVAATA

SEQ ID NO: 508183 - protein, 372 aa, unidentified
MKEDSVIFIGLDTSKLKISVAIADGSRNGEVRFFGDISSEPTSVASMVSKLSKRGAKLHFCYEAGPTGYGLYRQIVELGHDCVVVAPSLVPKRAGDRVKTNRRDAMSLARLHRAGELTAVWVPDEGHEAIRDLVRAREAASDALKQARQQLQSFLLRHGRIYAGREPWTRAHRRWLTCQAFDHPAHQILLAEYSQAVADASVRLDRLTKLVVETAASWSMAPVVAAYQAMRGVAFMTAVTFVVEIGDVRRFDNPRQLMAYLGLVPSESSTGERVKRGGITKAGNTRARRVLIEGAWTYRFPARVSPKIQARLDDLPRTVREIAWKAQVRLCTRYRKLIAAGKPKVVAVTAIAREMAAFLWAIRQEVAPTAKG

SEQ ID NO: 508184 - protein, 341 aa, unidentified
MQGSRTVVGVDIAKRVFQLHWVDVETGEITERRLTRAKFLEHFANRAACLVGMEACGGAQHWARRLQELGHEVCLLPAKVVRPFVGGNKNDAHDARGIWTAVQQPGVRTVAVKSEEQQAVLALHRMRQQLVKFRTAQINGLRGLLAEYGEVMPRGRAGMKRDMAGALERVSERLPMLVVETLRDQWARVAELDTEIGTIEQRLDVWHRQNAASQRIAAIPGVGLLGATAAVATMGDPGAFRSGREFAAWLGLVPRHTGTGGRVRMLGISKRGDTYLRTLLIHGARAMLARGKAPSGWQLELAKRRPPNVVAVAMAHKTARTIWALLAHDREYEPNFVSQPA

SEQ ID NO: 508185 - protein, 361 aa, unidentified
MTIVAHAYDFVVGVDTHASKHAFSIVESRTQTEVDCGEFPVTPAGFARSISWLRRRTNHSCRVLVSMEGVSSFGRSLRLDLQREGILVTEAPKPPHRAGRIAKNDFIDARRAATSVMGWDVTSLQIPRSGGVREALRILVQARHGLTVENTAQINRLTALVRTNALGIDARRALGRIQIKAIAKWRVRAETIDLQVARSEAVRLAKLIIANREALTDNKNAIETLVQQVAPALLTMRGIGPVTAAQFYLAWSHHDRIRSAAAFVALAGANPIPASSGNNQRYRLNRGGDRSLNNALHTVVLVRMRYDQETQEYVQKRTAEGKSKQEIMRCLKRYVARQVYRTLQAATIPVTAESETHKIPA

SEQ ID NO: 508186 - protein, 330 aa, unidentified
MQAVTTIGLDIAKSVFQIHGVDAAGNVIVRRQLKRRYVLPFFQRLPPCLVGIEACASSHHWSRELKALGHTVRLMPPAYVKPYVKRQKNDAADAEAICEAVTRANMRFVETKTLEQQSCLMLHRTRHLFIRQQTAVINAIRAHLAEYGIVAAVGRNGVEELLGVVADPSDKRVPEIARACLAALGAQLRMLKAQILEFDRMITAWHRSNETSKRLDAIPGVGPALATALVASVPDIGLVPKQHSSGGKDKLGSISKQGDRYLRSLFTAGALAVIRYAKIHGSKHRPWLTALLARRPAKVAAIALANKIARMAWAMMAKGERYKEPVALAV

SEQ ID NO: 508187 - protein, 344 aa, unidentified
MAHVATVATVGIDLAKSVFQVHGVDATGQVVLRRKLRRSEIERFFRELPPVLIGMEACGGAHFWARTLTSLGHTVRLMPPSYVKPYVKRGKTDALDAEAICEAVTRPTMRFVAIKTELHQAATIELKTRELLVRQRSQAVSALRSHMAEYGVVAPKGLPRFEDLVLIVRDAEDRRLPAAAREVLVELVEHVKGLHERIERLDARMVRRTREDETAQRLATIPGVGAVTVTALQALVPDPNGFASARHFAAWLGLTPRSHSSGGKERLGRISKQGNPLLRRLLVLGASARLLHRQRREPSGDWMGRLLERRPFKIAAVALANKMARIAWALLTKGGTFRNTVAAA

SEQ ID NO: 508188 - protein, 333 aa, unidentified
MYYSGIDLHSDNCYITTLDDAGAVVKRQRVENDNERVLGYFNSLPGSHQAVVESTTGWYWLNDLLQDNGIELVLAHAKYLKAISYAKVKTDKVDSQTLAILLRQELIPRAHKISRDLCGLRDTMRIRLRLVQQRSACLLRLNSIQMKFNGSVPDPYRFQLAVLEHTKDTFTSQILALEKSLHPVLIPNDDIQRLLNIPGIGKLSAFIIYLEIDGIERFASDKHFVSYCRLVPAADNSNRSVHHRSSKDGNKYLKIAFSDAAVHAIQYYPEYKRFYQKLARRSNEATARTVVAKELAKIVYYILMNKSQYKGLKGQPISRIKSLQWPRLASSFA

SEQ ID NO: 508189 - protein, 339 aa, unidentified
MRLYVGMDLHSSNCYTGIIDENSKKLLGRKITNDKRKIMSALSPYKEDITGIAVESTYNWYWLVDALMEEGYKLHLANPSAMKQYEGIKYLDDRHDAFWLANMLRLGILPEGYIYPRETRGIRDLLRQRSRFVVQKTSLKHTLQQIYCNNTGVILGNNTMYGLSEEEIRNALHDEYLSSNGVSILSTIRFIEGQIKTIETQILNKLKGELPYTLLTTVPGIGIVLGMAIILESGQIDRFASAGNYASYSRCVPTAYWSNSKQKGGGNKKNGNKYLSWAFAEAANFAIRYCKEAKAFYQRKCAKTNQPSAYRAVANKLSKACYYIMKDQTPFDAQRLFQK

SEQ ID NO: 508190 - protein, 334 aa, unidentified
MWHVGIDLHRMTVVLAAVNDAGEAMNPITIPCSDTATIVNTVKALGSFRAVIEACGTYRWLYDLLRPHGTVLLAHPLRLRAMIQRRTKTDKLDAQLLANLLRINQIPLAYIPPEPYQQLRDLTRCRARLGRQLAEVKIQLRALLARQNRESPYRTPFGPRGLGWFRGQDFGPVASMVRDELLERFRHYAQQMTLFDQRLEEMRQAFPQVESLLDMHGIGLYSALLIVAEIGEVERFHTAQQVGAYAGLTSRVHQSGGHCYQGSITRQGSPWLRWVLVQAAMKAVHKDAALKNFYSRIRKRSSAKIARVAAARKLAEICWKRLRQWQREHAGQAA

SEQ ID NO: 508191 - protein, 472 aa, unidentified
MSTEGFLGADVSKGYADFILVDSQRNVLEKTFQLDDNKQGRKTLTELLNQWLSSGLSKIYCGVESTGGYEDNWYYHLQQLSTTLDVEVARVNPKGVKSISEAVLTRTVNDAVSARNIALYLLCFPEKVVYSGDHPEVDRVFREERQALSFQRMLKKQKVQLNNQLEKLLYRHFSEMMVYCRHGVPAWLLHLLVKYPSAKQVVRSGEKMLVRIKGITPKKAAALVKKARQSDQNVSKFTKEIISQTAREILHKTKLIDKQTKSCNSRYKDHSDVKLIKSIKGIGLSSAVRIFLEIEDVSRFESAKKLCSYFGLHPTYKQSGDGAWKAKLSKKGRSDIRAVLYMCSMTAIRSDATFKQLYARFRSTGMNHYQAMGVVMHKMLRTIYGVLKNQKPYDPQIDMQNRETAKRKEQEVEAKYLQKLQERKRSFQRYKEDETDAPISRRTAQRRRKKQEKSQSSQKDVCTGSIPADTNL

SEQ ID NO: 508192 - protein, 386 aa, unidentified
MVNGSVRREVRSFKTTTKELLALSDWLAGEGCTHVAMEATGVYWKPVWHVLSDGDFTLVLANAAHVKNVPGRKTDVNDATWLADLLAHGLIRSSFVPDGQTQEMRTLLRTRKQLVRECSRHVQRLQKTLEDANIKLDSVISDIVGLSGRRMIEALIAGETEPGALAAMAHRRIKATPDELEAALRGRVTRHHRFLLQLHLQQIDAVNAAIDQIDQEVDAYVEPFRATVRLLTTIPGIDELSACVILAEIGRDMSRFPTAGHLISWAGLCPKNDESAGKRRSTRMRKGAPWLKTTLVQCAAAAARKKASYLQAQFHRLRARRGAKKALGALAASILTSVYHMLISGELYRDLGPHHFDQRAKAVNTRRLVVRLQNLGYDVQITPLAA

SEQ ID NO: 508193 - protein, 419 aa, unidentified
MDSSKTQRVKRINPRTMIVAVDIGKGFHVGYFRAPNGEEGKPFLFANSAKSFNEFWHSAQEFSRKHDLEEIVVGFESSGPYAEPLFHYLRKKPVTLVQVNPFHTKRVKELTGNSPNKTDRKDPRVIADVISLGHALTLVVPKGPAAHLRRLTQARERAIKRRTAALNQIQDLIFVIFPEFLKIMKGISTKTALDLIQKHPTAESVVALGLESLATIIKTTSRGKLGLQRAQELFHAAQSCVGVQEGKRSILLEIEYLVSQIGADNRFVGSLEKQMEEHLEEIAYSESILSIKGIGKVTTAGLIGEVGDFRQFGTISEITKLAGLDLFEISSGQHRGRRRISKRGRPLLRKLLYFAAINVVKTNGILHEPYQWMHRRGMPKVKALVAIARKLLRIVFALARDNTVYKEDHCHGHHLKLAA

SEQ ID NO: 508194 - protein, 405 aa, unidentified
MPYIIALDVSMGHSYSVLYKDDTCLFEDEIEHTQRGFHALLEEIQHLPERPLIVFEATGIYSRPVEKFFQDHHFSYCLLNPLEAKKQMEESTLRSWKTDKSDAHRLAQTHLKNQRQPKEVQSNFYLEMRDLARFYQEIEKKITRLRMDLHNCLQLTFPELEQFFSNRLTPYALTLIRLFPHPDFVLASTRTKIKNKLINETRKKISANRAEQKADQIIHYAQCAYPAVEKDSIHCQKTIYYAELLQDLLEQKKALATQMIKKAEGSPCFLLYQTFPGIGALTAALLLGELGDITRFKTHKQLNAFVGIDIRRYHSGKYTGQDRINKRGNPKARKIIFFTIRNMIRQQRAAPNHIVDYYYKLKKQPIPKKEKVATVACMNKLLKCMHAMVRAHTEYDYAYAVSVDH

SEQ ID NO: 508195 - protein, 341 aa, unidentified
MDIIKQVVGIDVSKDTLAVSYGSVNLNQEHQITKPITLDNNLKGFKELISFVKKNKEESKAPLYFVMEATGVYYENLAYFLTEKHQKVIVVLPNKTKNFSKTLDIKSKTDKLDAQMITQFGLERQMQLWQVPSPTMKAMKSLTREYNAIKRMAAQIKNQLHAKEHSFEPLKESLKRSKATLTVFQKQLKEIEKQLKELVQKDSDLNDRINKIDKIEGVGFMTIVSIIAETNGFALIENTKQLASYAGLDVIYNESGLKKHKTSISKKGNRFLRQAVYMPAISACRYNPKLKQTYIRLVIKKNIKKVAVVAVARKLLILIYTIFKKNIDYIPNYNQALAVNI

SEQ ID NO: 508196 - protein, 338 aa, unidentified
MKTYAGIDLHSSNNYIGVINAKDKRLYSKRHDNRIEDVLKVLGKFKASLQGVVIESTYNWYWLVDGLMDQGYTVHLANPNAIQTYNGLKHTDDKWDSFWLAHMLRLGILPEGYIYPKHQRPIRDLLRRRLMFVRQRTSQILSLQSMITRNRGLNFSGAQIKRFRDEFIDKLFSDRHLVFTAKKNMATIRFLDQIVSEIEIEVGSQIKLKKEFISLLTTPGIGNILGLTIMLEVGNIGRFPKAGNYSSYCRCVESKKISNGKKKGENNKKNGNRYLAWAYVEAANHAIRCCPKAQKFFQRKMAKSERVLATKALANKLTKATYYIMRDQVAFDEDKLFG

SEQ ID NO: 508197 - protein, 362 aa, unidentified
MKTQIMKTQNKDLDFCNQDFYLGIDVHKNSWNVSIRSNNIKLKTFSMNPKPIELVNYMNKHYPNGNYFSVYEAGFCGFSADRCLRDHGFNNIIVSPTNLPSSSKERLSKTDKVDSGKLARFLESKTIKGIYIPSFFQQELRSLSRLRFQLIKKQTRIKNQIKCYLYFYGHSLPDNSLLQHWSRNFIEHLSKIEFKYDMGKQQLDIYIDELLSIRNRLLQIMKLLKFYSNKYRLYDNIKLLSSIPGIAFTTAITIITEIMDINRFSNFDQFNSFVGFVPSTDSTGENDKVLGTSFLFNKFLRSLIIEAAWIAIRKDPALTSAFNNYLKRMSKQKAIIRIAKKLSSRIYFVLKNNKQYYCGVVN

SEQ ID NO: 508198 - protein, 378 aa, unidentified
MKKNTTAKKSQKALSKNDKKQLWKLASTKGLTIGIDLGDRQSRYCILNADGEVISEGTLPTTKTGLSSLFEKMPSSRVALEVGTHSPWASRQLAGYGHQVIVANPHQVKLISQSLRKNDRIDARQLARLARVDPQLLAPIRHRGEQAQADLAVIRARAGLVEARTGLINCARGLVKPMGERLNQCDADYVGEALGEGLSKRTQAAIKPLLKSIEAVSEQIRVYDQQIHEIAKRYPHIELLTQVYGVGTLIALTFVLTLEDAERFAHSRDVGPFLGLQPKQRDSGNHQPQLGISKAGDRLLRSLLVQAAHCMLRKGAPDSDLQAWGLSKAEKGGKNAKRRALVGMARKLAVLLHRLWVTGEVYDPQYNRKQQAVGEAAA

SEQ ID NO: 508199 - protein, 343 aa, unidentified
MKLIRVGVDLAKNVFQLHGVGRDERIVWRRRLARDRWLETLLEKLEPGCEIGMEACTGAHHWARQLQREGFTVRLIAPQFVKPYVKSNKNDATDAEAVCEAMARPSMRFVAVKTLEQQDIQAVHRIRSGLIEQRTAKANQIRGLVAEYGLVAPRELGQLRIALPRWLENAENGLSSRFRRLLSGLWDDLKVLDDRVCELDREIAAIARNDPTAKRLQRLRGVGPIIASALVAAVGDARQFANGRQMAASLGLTPKQHSSGGKERLLGISKRGDRYLRSVLIHGARAVIRTAKGKNDRLSLWITGLAARRHPNVAAVALANKTARIAWAMLRNGTDYQPELVRG

SEQ ID NO: 508200 - protein, 324 aa, unidentified
MTDAILGIDVSKETLDASCARGQRRQSRTFSNSPEGWKMMLAWLKAMGSKRAHACMEATGRHSLGLALALHDAGHIVSVVNPAQIRDFGRTKLGRNKTDKVDAALIREYAELLKPGPWTPPSSAMRTLNELQTVRAGIVGSRTEWKNRIGSGLGDSTATKLAAATIEHFTIQLQAIDKAISETIDGDAELRGRCDLLLSVVGVGETLAALLLAEMPEPGILRQGGELVAYAGLNPSHHRSGTSIDRPTRISKIGNATLRSSLYMPALSAMRYNPAIAALVARLKSAGRLKPKQIVVAAMRKLLVICFGVLKTGQRFDPALAMPA

SEQ ID NO: 508201 - protein, 336 aa, unidentified
MTLYCGIDLHSNNHVIVITDEEDNKVLDKRVPNDLETSLLLLSPYKNRLKAVAVESTFNWYWLVDGLMEAGYAVDLVNTAAVKQYDGLKYSGDHQDAFHLAHLMRLGILPTGHVYPKERRAIRDLLRRRFQLVKQASTHQISIQNQIWRSMGYRVSCNLIKKSDFELPFEKESYLYFSANSNLLLLRQLQQQISQIEKLVLKVIEPEGAYKLLTDITGIGPILSLTIMLETGSIERFDQVGNYASYCRCVNSIRESNGKKKGTGNRKAGNKYLSWAFSEVAHYMVRFNDKAKRFYERKKAKRNGIVAIRAIAHKLARAVYYVLKNKQPFDINRVFV

SEQ ID NO: 508202 - protein, 331 aa, unidentified
MKIKDTIGIDISKLTFDVRIHSNQDYRIFENSIKDFKELTRWVFKSSKFSRDEILFVFEHTGLYSFELSVYLSKKNIPFVLVPGLEIKRSLGITRGKDDKVDATKIALYAYRLRNEIKPTELPLENIMALKRLLSLRERLVKQRAGYKSSLKEQERVLVKNENKILFDLQEKTISFLSKQIDKVEKEMNDIIKKNAQLCQIYDLIMSIKGVGTQTALFMIAYTNAFTKFKNARKFASYCGIAPFPNSSGTSIRGKTKVSHLANKKVKCLLDLCAKSAIQFNPEMKEYYEKRIKIGKNKMSTINIIRNKLLARIFAVVERKTNYINLMKYAA

SEQ ID NO: 508203 - protein, 376 aa, unidentified
MGWTPPHPNRHQCAKLRLMFQLMRKEESTMEIISRVGVDLAKNVFQLHGADRKGKTVWKRKLSRDKWLTVLFATVKPGAVIGMEACAGSHHWSRILMSKGYEVKIIPPQFVKPFVKSNKNDANDAQAICEAMVRPDMYPVNVKTIEQQDIQAIHRVRNEIKSHRIAKGNQIRGLVAEYGLVAPKELSSLRRAIPEWLEDASNGLTIFFRQLLQGLYEDLCSLDKRMTELDKQIALIAQQNPIAKRLQQLRGVGPLIATALVATMGDGKQYRKGRDMAAAIGLTPRQHSSGGKDRLLGISKRGDAYLRCLLVHGARSAMRTAKDKDDRLSRWITSLQDRRHANVAACAMANKMVRMAWAMMTRGVDYDPNFNVVSAN

SEQ ID NO: 508204 - protein, 406 aa, unidentified
MLTLFVGVDVSLKNNVVYIMKPDGDKYGSLHVPNTKSGATVLVDRIVSALNALNLKKVVIGLEATSIYGEPFVMYLREDGKLTSFDRAIHVLNPKQVKEFKKSYPDLPKNDDVDSFIIADKLRFNRGIPPAFEPDYRYTALQTLTRQRFCIVQNLTREKVRFGNYLFLKCSGLAQDKDFKNTSATTIALMEQFDTVDDLANADLDQLAAVVIKASKNHYIDPECIAKTIQATAKGSYRLPKTVNDSINQAMSVSIANMRFLEKQVKTLDAVILKQFEIIPNTIISIPGIGKVYSAGIIAEIGNVCRFKSQASIAKYAGLVWNEHDSGNFEGEITRMIKSGNRYLRYYLLEAADSVRRYDSEYKAYYDRKFKEVNRFQHKRALALTARKLVRLIFRLMKDNRLYVTE

SEQ ID NO: 508205 - protein, 450 aa, unidentified
MSKSTVNVTNGLPVIHDRAAGIDIGSRFHVAAVPTALTDEPVQTFQAFTADIQRMAAWLLSLGIQTVAMESTGVYWVPVFEVLESAGINVIVANARETRSVPGRKSDINDAQWLQRLHACGLLRASFRPGRDIAALRTYLRHRERLLDYAAAHIQHMQKALTYMNLQLHHVVQDITGVTGMKIIRAIVKGERNPDTLIEFRDVRCKSSPETIRSALVGNYQPEHLFALTQSLAIYDFYQAQIDECDRQIEQTLALLNADKPLPEQPIPQIRTRTKQPNAVNFDVRLALYQLVGADLRQIHGIGPFLALRLIAECGTDLSKWRTAKHFTSWLTLSPGCKISGGKVLSAHSRKSTNRLTAHLRLAAVTVGRTNTALGAFYRRLAARIGKAKAVTATARKIAVLFYNAMRFGMDYRDPGADQYEQKYRDRVIKQLHRRAAEFGFELHEIESVS

SEQ ID NO: 508206 - protein, 412 aa, unidentified
MTVFCGIDWAENHHDVALVDDAGQLLAKRRITDDASGYQLLLDLLAEHGDTADEPISVAIETGRGLLVAVLNNGTRPIYAINPLAAARYRDRHSVSRKKSDPGDALVLANILRTDRHAHRRLHTDSDLAQAIAVLARAQQDAVWARQQLVNQVRSLLREYFPAALDAFLGKQFGLARPEARAVLAAAPTPARASKLTTPQLRAALKRAGRTRGIDAEADRLRTIFRGNYAHHSQAVEDAMGHQLLALIRQLDAACLAATDLGTAVEEHFHRHPDAEILLSFPGLGVQLAARVLAEIGDDRTRFADARALKAYAGSAPITRASGKKRYVGRRFIKNDRLITAGFLWAFSALRASSGADAHYRGRRERGDWHAQAQRHLFNRMIGQLYHCLQTGQLFDEQHAFTSSAADLAVAA

SEQ ID NO: 508207 - protein, 310 aa, unidentified
METTIVGIDVSKDRLDVHLHPVGERFVVSRNAEGLDALIARIVPLGVQAVAVEATGGFETVVAASLGAAGLPVIVVNPARVRAFAQSLGKRAKTDPIDAAIIARFVEGTKPEIRPLPDADTRLLADLVARRRQIIQMIVAERQRERQLPTRYLKKSAARLIKALEKELNVLDEGIDESVRGSPVWCEKEDLLKSVPGVGSVVARTLLAEMPELGTLNRHEIASLAGLAPWTRQSGMWKGKSFTGGGRTTARTALFMAALVATRHNPLLKAFYQRLTAAGKPKMVAIIAVARKLVTILNAILRDNTPWQTA

SEQ ID NO: 508208 - protein, 346 aa, unidentified
MNYIGIDVHKSICTAVVMNDDEKVIDQIIDFGTNDEGYSFIVDHYSPEDSYILFENLTTAHRVYHFFKDKGYRVEGLHTGHGCVTEISKTDFKTDLEDATKLARMCKDHFTGRREYSLAHFADIDSMKAKELCRVMNDCSEQRDKLNLRIQAYMDMFDIRLPKGLKTVYSDKAMKYLKSLDHLALTIMVEDMASAMAHIEKARKGLESLFKDNEDVRNLMSIKGIAIQTAATIYTVIDGIERFGTPESLVSYFGLKITRHESGGDRDLHGHINKRGDPLVRKYLANVVVKHPIYYPDSDLARFYKRKKEIMPHWKAVTASMRKLVCIIWAMLARHQVYRFSSLVKA

SEQ ID NO: 508209 - protein, 305 aa, unidentified
MLYLGVDHHKQYSQLVLLNQAGELLAERRVANRLESLEEFLGDWEEPVAAVLEASRSWGNMYDLLEQVGEQVVLAHPWKVRAIPEAQVKTDRVDARVLAHLLRLDWVPGAYIPPRETREKRNLLRQRIFLVRLRTMVKNRIHVLLDRNHVPEEERPQVSDLFGRRGLKFLREVTLSEREGWLLRQELQLLEELNAHIARSDEAVKRLAQEDPRSAWLQSIPGIGPFFALLLLLEIDTIERFANPAKLVAYAGLIPSTSASGGKVYHGRLVYQANRHLRWAFIEIALLAIRSDPDLRAYYEGLRRR

SEQ ID NO: 508210 - protein, 406 aa, unidentified
MLLVGIDWAERHHDVCLMATDGSVLARERITDGMAGVARLHELIASWVEEPAEVVVGIETDRGLLVGALVAAGYQVIAVNPLAASRYRERHTISRAKSDRGDARMLADLVRTDRHHHHRPVRGDSGLAEAVKVLARGHQQLVWARQRQANIVRSALRAFYPAALAAFGSDPGGRDAVAVLGLAPTPELGRRLSEAELVAALRCAGRRRQVDARAAAIRAALVGQQLEAPPVLAAAYGQVVAAAVAVIANLSEQLAGLEAALMAAFTAHPDAGIVRSQPGLGVVLAARVLAEFGDDPNRYASARARKAYAGTAPITRASGLRQVVLARAVGNRRLSTACHPWPFAALTGSPGARRSYDAHRARGATHHQALRALANRLVGILHGCLRHPQPYDEQLAWPTSTASAAA

SEQ ID NO: 508211 - protein, 357 aa, unidentified
MAALSIADVPANVTVGVDTHKHSHIARAKDGLGRHLGQLEIETDPRGYARLLAWAQGFGPVVTFGIEGTSSYGAGLTRFLRAQGQAVIEVLRPVRRDRRFGGKSDPIDADAAAGAVLSGRATAVPKAGDAGVEMVRALKIAKQTAIKARTQAVNAVKGLYVMAPDPIREQLRNLKTPALVRTCSAYRVDGASDPTSAIKLSLRSMCRRYVVLDQEVRSLEKELDALTVRLVPQLRQLFGVGQDVAATLVLAAGDSGDRLRSEASFSMLCGASPIPASSGMVQRHRLNRGGDRQANAALHHIVIVRLRHDQATKAYFAKRKAEGKSKKEIFRCLKRYVAREVYRTLVGPREEVIHSAA

SEQ ID NO: 508212 - protein, 325 aa, unidentified
MVFENTIGIDVSKETIDVHNHLTGAKKEFTNDNAGFKQLIKWSDPTGKLIFCFEHTGMYSLPLAVFLSTSKQPFAMVPGLEVKRSLGLVRGKNDRIDAQRLARYAYLRREEITPTTLPSKSINKLKSLLNLRAKMVRQKAGYQATLRELRTFAKIPKKDILYASQDKLIEELNKQIKRVEDEMKDIIKGDKELNRLFSLITSVKGVGLILGTSFLVYTNCFATFDNWRKFASYSGIAPFEYQSGSSTRAPRRVHHFANRRLKTLLSNAATTSIQFNPEMKLYYQRRLQEGKNKMSTINIIRNKIVARVFATVKRGTPYVQTLAYA

SEQ ID NO: 508213 - protein, 441 aa, unidentified
MRVMYERCCGLDIHKASITVCALITEKGKTQEERRRFGTMTADLRELAGWLQQKGIRHVAMESTGVYWKPVWNILEPAGFELLLANAQEVKVVPGRKTDQKDSQWIADLHKHGLLRNSFVPPRAIRDLRDLTRARAILTQEHTSVCNRIQKVLEDANIKLRSVASDVFGASGRAILRALMKEENDPEALAKLSKGKLRNKIPRLRRALEGQVTAHHRALITGHWHRMEFLERQIADLETQIAERMKPTPAEMAPTMQNASEDAPVPLSPREEAIQLWMEIPGLGWTSACSMVAELGVNMDQFPSAAHAASWAALCPGNNESAGKRLSGKTRKGNIWLRRTMCEVAWAASHTNDSYFAAQFRRIASRRGRKRALMAVAHSILVTAYSMLKHKRHYKDLGADFFDGINRDKVRERLVQRLAKLGFDVTLKSKGTAESAADVTE

SEQ ID NO: 508214 - protein, 332 aa, unidentified
MDNFYFIGVDVSKKKLDFCVLFEGKVLREEQVSNHQQAVARLIGELKNDLEMDNEQFLICAEHTGQYTFPLVCACKSVECKLWLENPSQIKYSSGMQRGKNDKVDAKRIAIYASRFGDKVKYYDRPPEEIERLKQLERERALYVTDLAKYKGQMYDQKDFMPAALYRKKTKRMKGLIQELQAAIDAITAEMEKIIGSTEVLARQMELLMSIDGVGKVVALNVIIETEAFSRFDNPRKFCCHAGVAPFSYTSGSSQHSKNKVSHRANKNIKKLLHMAAVSVTHRKEGELKAYYMRKVEEGKNKMSVINALRAKIVARMFAVIKRNEFYTPIYS

SEQ ID NO: 508215 - protein, 350 aa, unidentified
MQITTIGLDIAKNMFQIHGIDAAEEVIVRKQLRRGQVMAFFEALAPCLVGMEACATSHHWARELTKLGHEVRLMPAKDVKAYVKRNKNDAADAEAICEAVRRPTMRFVRIKSAEQQGQLMLHRARDLLMRQRTQVINALRAHLAEFGITAAQGREGIRELLAIVAQEEGSRLPSDAHASLTVLATQLQAVQTMIGSLEKRIVAQHRSNEASKRLETIPGIGVLGATTITAVVPDPKAFRSGRDFAAWIGIVPRQDSTGGKQKLGPISKQGDQYLRRILIVGAHAVLRRARQQPEKYPWLTQLLARRPFKVVAVALAQQDGAGRLGVAGQGRDLSGAPTRGSLTRSSAMGG

SEQ ID NO: 508216 - protein, 319 aa, unidentified
MKRSDDSTAIAGVDVSKERLDVAVLVSAEHCRIANRPAAFAELVTWLSARGIVRVGMEATGGYERDLRIALEAAGFAVVVHQPAEVHHFARFKRIRHKNDKSDALVIARATALSERASRPREAVLEDLAAMMTFYEHVSDQLAQCRAFGEHAADCVKAHNDTLIESLKAKKREIEAHMIERIAAEPALAARYDILRSIPGIGKVVGLSLLIRMPELGTLRRGQAASLLGVAPFDQDSGKYKGRRTVFGGRRRPRRHVYMAALGAIRTKASPFKTFARRLSDTGKPRKVAIVAVMRKIIELANSLLMQNRSWTAQHQTSS

SEQ ID NO: 508217 - protein, 345 aa, unidentified
MIHVGVDLHQRFCYLTAVKASGELVARGSVVNEAESLRQWLSKLPALRQVVVEACGFWPAFARAVEAQSEQLVMVHPGRVKAIASAKLKNDRVDSAILAHLSRCDLLPLAWMADGETQQLRLRVRLRIMLGRQRTEAKNRVHAILHQEGLRKPVTDVFGKRGRQWLRQVELTPAGRLTVDTWLKVVEGFDQLIRAQEKQLAEAAAKDARARWLQTIPGVGAYSAMVILAEIGDIQRFANKKSLASYAGLVPRVRESAGKRSYGGITHAGSESLRWILLQVAQIAAQHSPAAQGYYQHLRRKKRPQVAKVALARKLLTCMWALLRHGVCYEDAVFAAPQGGAKAGA

SEQ ID NO: 508218 - protein, 331 aa, unidentified
MTEYIGIDVSKQSLELWDGTHEEEVPNEKGLKTLKKLLKKRYGTNWNKGGFIYEPTGPYSNYLRAFAAEHEVQVYEVNPKKSANFAKVLGNRSKTDVVDAKMLSTFHALLAEEDFCIPAMDERAEQLGAFIGSYEIIQKTRTMLSNHLQSLEYKSGVTKKLKESLEKELGRLGTMEDELEKEMEAVAEDHEETREDLHNLLSIKGIGVISAINLLYLFRKYPGANRNEITALAGLDPVRRQSGSSLNGGRKISRAGDPMLRKVLYLACMNCIQHNECIQAFYKHLVSDNHKKPKVALVACMRKLLLIAHHLYVTKSPYRTLEHDANLCLTS

SEQ ID NO: 508219 - protein, 356 aa, unidentified
MSQKLNSEVAVIGIDIGKNSFHIVGQDRRGALVLRQKWSRGQVEARLANLPPCLIGMEACTGAHHLSRTLQALGHDARLMPAKFVRPYSRGEKNDYRDAEAIAEAVQRPTMKFVATKTDDQLDLQALHRVRERLVSQRTGIINQIRAFLLERGIAVRQGLHFLRAELPGILAKRTDVLSPRMLRVIEDLAGDWRRLDERIEGLSGEIDALARHDKGCERLMTVPGIGPIISSAIVAAIGTGDAFSKGRDFGAWLGLVPKQMSTGDRTILGSISRRGNRYLRKLFVQAAWVVLVKVGPEQWERYGLKSWIEAAKKRLHHNVLAIALANKLARIAWAVLHKGRTFECVKTNATASRPV

SEQ ID NO: 508220 - protein, 369 aa, unidentified
MWVATPTAAAVRSDRDRHQALACFGARSRTAPSIDPEGCQNLGFAHKAGSMKTSDDSMNVAGIDIGKHALDVGLDRDQDRLQASNDAEGFGKIIAFLKRWQVQTVGVEATGSYGFCLIEALREAGLEVVQHQPQQISFYRKMQLKRAKNDTIDAVLIARFTAMADPRTVFDDPRLAGLAEKLLYLEQLREDAIIRQGRLDRYRDPVIIAEIKAEIADFKARSKAMRAALLKELRTHPDLKSKLDLLLSIPGIGDYSALVLLIRLPELAYLDRAKIAALVGVAPFDDDSATMRGQRRIAAGRKTIRSALYLPTLAAATQWNPDLIVFYQRLKKAGKKTKLVVIAAMRKLLNIARAVLIKGDKWTPKKLSD

SEQ ID NO: 508221 - protein, 335 aa, unidentified
MYYVGLDVHYRTSTYCILNSHGREVKCETIRGHWAKLLDRLSIIKGKWTVCFEAMCGYGYLYRELSRMASRVMVAHPGQLRLIFRAKRKNDRVDSRKLAKLLYLDEVPQVYVPGEDVQSWRELIEHRRRVVDRQTACKNAIRSLLRGHGLIAPKGLWTKKGLAWLRQSQMPTSASGLKRDLLLDELAAAKRGVRTVTKALDKIGRRHPGVTVLLTIPGVGMRTAETITAYIDDPKRFGRSSQVAAYFGLVPCQDASAGVNRLGHITKQGPGTARKYLVEAAWQGVYRSAKIRAYFERILRGKKERRKIALVATAHYLLRCMHAMLIRCEPWRDVA

SEQ ID NO: 508222 - protein, 320 aa, unidentified
MDGNRVIGIDIGKWMLDVAREGATRSERYANEAAAIAALVSELDPARDLVVFERTGGYERGLEAVLAAAGIRWAVVHSKRVKAFREAQGIKAKSDAIDCRLLRDFGRDRLNAGDLRLGRLADVTLAALVGRQRQLNAMLHAERCRLDTTAIELVRRSIARTIATLEAELAEIEVAVAAHMAEDPQLELKEKVMCRRIGVAHTTARGLLAVLPQIGEATGKEITALGGIAPRVHQSGVTQKRRGLDPGRGAVKVILFNPARTAMRYDPDIKAFAQRLRARGKPGKVIMVAVMRKMLVQLNAAVRDALASDEKPKSAALAAV

SEQ ID NO: 508223 - protein, 349 aa, unidentified
MRTFTAAADTRFYAGVDLHARALFLVILDRAGQVVFARNLAATPGAFLQAVAPFREGLLVACECMHCWYWLADCCRDQHIAFVLGHAWAMKAVHGSKTKCDKKDAEAIARLLKGGNFPPAYAYPKERRGLRDLLRSRLRLVRQRAELYGHVHTARRQANLPPVSNDVKYQAKRAACTADIADPFVRRRVETHLALLEPLDASIRKLETEIEDAARGIFPVELAVLQSTPGVGPVLSLTILLEIDTITRFDTRQQFCSYARLCGAVQTSDHKRSGGGNKKAGNAWLKWAFSEAAVLSAQKDERIGAYLARLASRLGKAKAYSALAHKLGRAFYHMLHTKQVFDVQRFVRH

SEQ ID NO: 508224 - protein, 388 aa, unidentified
MIYVGIDIAKLNHFAAAVSSEGEILIEPFQFSNDYDGFYLLLSKLAPLDQHSIIIGLESTTHYGDNLVRFLICKDFKVCVLNPIMTSSMRKNNVRKTKIDKVDTLVIAKTLMMQDSLRFSTLEDLDYIELKELGRFRQKTMKQRTRLKIQLTSYMDQVFPELQYFFKSGLHQKAVYALLKEAPMPKDIAYLHLTHLSNLLVKSSHGHFTKDMARELRVLAQRSVGLNDSSLSIQITQTIAQIELLDSQLFETELEMANLVTCLHSVLMTIPGIGTVNGGMILGEIGDIHRFSTLGKLLAFAGLDPTVYQSGNFQAKRTHMSKRGSRVLRYALMNAAHNVVKNNATFKVYYDTKRAEGRTHYNALGHCAGKLVRVIWKMLTDEVEFNLE

SEQ ID NO: 508225 - protein, 381 aa, unidentified
MTTLATHNPQDTTTEGTLFVAFELSEKTWKLGFTTGHGQKPRERSVSARQQERVLDEIAQAKRRLGLPESAAVVSCYEAGREGFWLHRFLQGHGITNHVVDSSAIEVKRRQRRAKSDGLDVRKLLSMLMRYAQGERQVWQVVKVPSVEAEDQRHLHRDLETLKQERASTMTRIEGLLSSQGLRVTSLTKLPEQLEALRLWDGSSIPPGLRRRVLRVYAQYTFLSEQIAEVEAERRAQLQTSSDASIDKVRQLMQLKGIGINGAWLLVMEFFGWRAFKNRREVGGLAGFTPTPYQSGEHAREQGITKSGNRHVRWMTTELAWSWLRFQPDSALSVWFRERFGSGGKRLRRIGIVAVARKLLIALWRFRETGVLPAGAVLKAE

SEQ ID NO: 508226 - protein, 338 aa, unidentified
MEFKRISIDTSKHIFTLHGVDEHDHVILRRELRRAQVEAFFTKVPPTEVALEACAGAHHWGRVLGAMGHRVKLIPPQYVKPFVKRSKNDRNDAEAISEAASRPSMRTVSVKSVDEQAATIVLKHREMLVGQRTQAINALRGHAAEFGVIAAKGLGNIDVLLSALADHPAIPDIAKAMFEQMGGHVDDLDMKIQAVERQLLEQHKANEVSQRLAAIPGIGPITAITMALSVNPANFESGRHFAAWLGLTPKEHSTGGKHQLGRISKAGNERLRQLLVVGAMAVLRFAKPGSKSASAWLLQLLERRPRKVAAVALANKVARVVWAMMARGEAYRRQPVAA

SEQ ID NO: 508227 - protein, 324 aa, unidentified
MLPTLGIDINKDSFHLELSINDKLRHRKFVNRKEGFGELCVWLAKHKATQVHACLEATGPYSEALALYLHQQGHTVSIVNPVQIKAFGQSELRRNKDDRPDAGLIRRFCEKQRPAPWTPPPPHLRELQALTRHLENLIETRQQQINRLEATNTKQVAKSLRKLVAHLDAEIKRTEEQIDNHVGRHPDLKQQSELLESIPGLGKRTAAKLLAEIPDITQYKSARQVAAHAGLTPRNNRSGTIRGKTRLSKTGNARVRKALFFPAIVAKRHNPIVRAFCERLARNGKNKMQVVGAAMRKLIHIAFGVLKSGRTFDPNHELFIKPVC

SEQ ID NO: 508228 - protein, 335 aa, unidentified
MTVSNQAERVIGVDVAKNRLDIADSQGKIRKTISNTAPAIKKAIVQKVKDDDSVFVVCEATGGYERGLVKTLQDAGISVAIANPRQVRQFASAMGRLEKSDPIDAEAICQFAQTAELPAAPVKTAEQEARDAVVRRREQVLEMIGQENNRLQQESDPKMKKTIERVLKTLKSLLKKLDAEVERFLAEEAKTNASVEVLMSVPGVGAVTTATLLCELPELGQLNRSEIAKLAGVAPIVHESGQSRGHRSVSGGRGKVRRVLYMAALVGIRSNPALVEFHRRLVSRGKPQKVAIVACMRKLLTILNSMVRTKTMWRTKGEEKVMADQGPATTRAHGD

SEQ ID NO: 508229 - protein, 429 aa, unidentified
MNETELTRLEAFRQLKNEIRGSKQYLIVGIDAAKERHHAFFGTSTGKTLFKRLVFENNKEGFERLLVHTEALKARHGLEKVVFGMEPTANYHKPLGEYLIRRGKQAVLVSGVAVARNRELLDGRWDKHDVKDSANVADLISQGKVLYYDLPRQAVRDLRDLLSLKRRMKKQEHGLRVRIRNHLLAQYFPELDRYYGEGEAEGLKIVKWCVAPSVIAQLSYERFLRLVNPGPRITAGQRNRLMAVWKTAPHSIGCEAGDALGFVARMMVEGLEDLKEAMEKVDKRILEICKGVPCYPYLLTIPGVGPAIAAVLISAIGNPHRFATAKEVLKLAGLDLSAERSGKTSQDAVPVISKKGNAYLRYALYQAALIASSKNSLIMRYYTIILQGRERERGIRTKMRIKLAAKLLIIAWTLMRKQERFNPEYLRRG

SEQ ID NO: 508230 - protein, 359 aa, unidentified
MVMLAEQYDFVIGGDPDRDTIDLAILDTATGWVDAQTSDRADGPAYLRMLAWAVVAAPGRRVWALEGTGSFAAGLATVLAEAGEDVVEIQNKKRRRGAKNDRIDAIEAARSALSEEKQAVPRERGLREALRQVLATRQGVLMSRTKGINELKSLIVVAPEHLRAQLRALGLAKQLDRIDRLSSPAGATLEHRVTICTLRSIAARIRFLSTQAAELDVELLALVPQHPAGPTLLAEPGVGPVVAAQLLVSWSHRGRVRNEAAFACLAGVAPLEASSGQRTRHRLSRMGDRNLNRALHTVALTRLRCHAESPEYETRRAAQGKTHRDVRRSLKRILARRFYRLIQAATLPAAVAIEVAQAA

SEQ ID NO: 508231 - protein, 390 aa, unidentified
MTKRKTETVNDLSRCLDPLDMDATLIAVIEMSQSSWLVAGIVPGVERQPLKKIAIDEHALLKLLSSWRKEAEKKGHKITRVTAAFEAGHDGFWLARRLAAFGIEVHVIHASSVAVTREHRRAKTDRLDTELLKRGFLGWLRGERGHCKMVLVPTLAEEDAKRPSREREALVGEASRIITRIKAAFVRLGIRSFNPKLKAATARLGTLRTPEGEPIPPNTLAALKRDLERHNIIKRQIREIEQTRLDRLAQAPAKGPHPMVLLLARVVGIGVETADMLVHEVLSRNMRDRRAVARYAGLTGSPDESGAKRREKGLARSGNARVRRGMIQLAWRFLWLQKDSALAEWYRQRTQAAPATRKTLIVALARKLLIALWRLAHDGIVPEGVQMRPA

SEQ ID NO: 508232 - protein, 344 aa, unidentified
MYSIGIDLHKESLYWTVLDEKRAVVWQKRTATSDEAVQEAFALLPCALPQCRIAVEPTLDWQRFAEALTDLGAEVHIANPQAVGLIAKNRLKNDKVDSKILAELLHSGFLPESYIAPKAVRDLREIVRWRMRLVKIRTTLKNRIHSIVLKHGLKHPGSDLFGTEGRLWLSEIKEKIDEKEQIESLMRVLDATERELAGLLNLTRRAANRTPVARLLRTIPGVGTVVSLIIAAEVGDFSRFPSPEKLCSFAGLVPSSYSSGESVRHGNITKRGSRLLRWAMVQAAQRVNPSWGQLWRFHQGIAKRVGSKKARVALARKLLTISWYLATRNQPFKLEPVHASGGVK

SEQ ID NO: 508233 - protein, 413 aa, unidentified
MERIIERCAGLDVHKSSVTACVRISEENEGLHQEIREFATTTRGLLLLRDWLASFEVRLVGMEATGVYWKPIYYMLEDDFELWLLNARHLKNVPGRKTDVKDAAWICQLVEHGLVRPSFVPPKEIRELRNLTRYRKAQIEERTREVQRLEKVLQDAGIKLSSVATRVLGASGRAMLDALVGGTTDPEVLAELARGRLRSKLPALRDALEGCFSSHHALMVGKILAHIDYLDESIGDLSAEIERVIAPFSDEVELLDTIPGVNRRTAETLIAEIGVDMSQFPTHRHLASWAGMCPGNEESAGKRRSGKTRKGSKWLRSALTESARAAARAKGTYLAAHYARLRGRRGSKKAAVAVGHSILVICYHVLERQVPYEELGEDYLDRQRSSEAYAKRLVRKLERLGHKVALEPLPQTA

SEQ ID NO: 508234 - protein, 347 aa, unidentified
MKFYTTQHPYYCGIDLHARSLYVCILDAAGETILHREIKALPEPLLDLLAPYIGNIVVGVECMHCWYWVSDFCAEHGIDFILGHALYMKAIHGGKAKNDRIDSYKIAHLIRGGNFPLAYVYPPEMRSARDLLRRRTRIVRHGADLKAHVKNTTSQYNLPPNDLNLRYPNAREAMRDRFDDQFVQRNIDLDLNIIAFYNHELSSIECFIEKHAKHHNGSDYHILTSFPGIGRILALTILYEVGSISRFNSVQDFASYSRLIKCKAESAGKNYGTQGNKIGNAHLKWAFGEIAVLYLRGNDKAKSYLLKLQKRMSKAKALSALAHKIGRCVYYMLKNQKVFDEKRFLAG

SEQ ID NO: 508235 - protein, 343 aa, unidentified
MQVSTIGLDLAKNVFQAHGVSAEGKVVLKKQLRRGQVLSTFAKLPPCLVGMEACAGAHYWARELRKLGHDVRLMPARDVKAYVKRDKTDAADAAAICEAVSRPSMRFVALKTPEQQGRLMQHRVRDLLLRQRTQTINALRAHMAELGLVAATGRQGLCLLLAILADAKDERLPQDARASLKLLASQIAALQAQIDTLDKRLHAQHRQCPASRRLETIPGIGVIGATALAATITDPKAFKSGRDLAAFIGLVPRNNSSGGKQRLGPISKQGDRYLRRILVVGAHSILKQARTRPDKHPWLARLMARKPGKLAAVALANKTARIAWAVLARGESYRAPTAPAAAG

SEQ ID NO: 508236 - protein, 425 aa, unidentified
MNLLILKGVPMSLKIVYKICCGIDVHKTFVVACIASTNDKGITSYESHRFSTYTSGLKTLLQWLLNRNCKDVCMESTGKYWIPVYNILENDCSIVLAHPKYVKAIRGKKTDKKDAKWIADLFKHDLVAGSFMPPADIRQLRDLMRYRFKLTCFQSSEKNRLQNCLTVSNIQLGNVVSDTFGKSAQAILDKLLENPADTSFDLEPLVYKSLKKKLPQLRDAIDGYITPEQAGKLKVIKSHYENLESRKAELEELILALAAPYQQELAILQTAPGIRSDFTAIGIISEIGTNMEAFPSAKHLCSWAGLTPTNNESAGKKKSVRVSKAGCYIKPMLVQCANAVVTSKKHPEIRNRYLRLKKRRGHKKAIIAIARMLLTALYHMLKNGENYNAELYRKSYLPPVDREITVEQAIIIARNQGYKIKSATA

SEQ ID NO: 508237 - protein, 410 aa, unidentified
MRLFAGDDWAEDHHDIELMDEAGQVLAKRRLPEGVTGITQFHELIGRFVPADGDARVLVGIETDRGPWVAALIAAGYTVFPVNPLQASRYRSRPGVPGAKSDAGDAHVLAGMVRTDAHQLRPAAGDTAEAEGIKVLSRGHKTLIWERTRQVQRLRHQLREYFPAALAAFDDLDAPDTLELLGKAPDPARAAKLTRAQVSAVLKHAGRRKIADRTEVILAALRSEQLAQPPVLTAAYAATVRALIAVIATLNQQVTDLQGQVEAHFGQHPDAEIYRSQPGMGAILGARVLAEFGDDPRRYACGKARRNYAGTSPITRASGKKKIVAARYIRTDRLIDALRAQAFAALTASPGARAFYDTQRARGHGHEDALRRLANRLVGILHGCLKTRTLYDEATAWGHRDNFRQSSAAA

SEQ ID NO: 508238 - protein, 433 aa, unidentified
MAVQSLHSPHYHFGGGFAVKVVFPTCCGVDVHKTFLVATIITTPADSLQPHYQKKRFSTFNSDLNRFADWLLEHNCLDVCMESTGKYWVPVFNILEKRGIRVVIANPKWVKAVKGNKDDTKDSKWIGDLFRIGLVKSSFIPELNIRILREFLRYRYKLVSMKSSEKNRFQNAFTVCNVALDSVVSDMFGKSATAITDYLTSDESFDPDHCVSLLQRSLKKKAEKVLESIEGYSISDEQKARIKIIREHYDFIEKLIAKVDTCVNEMVEKYEGEINLLCTIPGIDRNSAITIISEIGTDMSQFGSSKRLCCWAGLTPGNNESAGKKKSVRISRAGVYLKPALVQVAHAAVKDKANPYYALKYERIAKRRGKKRAIIAIARMILTAIYTMLCTGEVWTPVDLFKIDIPEHLKEQQLAKAIKQATRFLEKQGLTVA

SEQ ID NO: 508239 - protein, 351 aa, unidentified
MLIIGCDFHPGFQQVAIFDNRTGEIEERRLPHREEAEQFYRSLSGPVRVGMEACGHYPWFERLLQELGFELWLGDAAAVRASVVRKQKTNRRDAKHLLHLLLENRFPKIWVPSLEVRDGRQLRVHRHKQVQARTRTKNQLQAMALSQGVQKKWKLWTKLGRAELEQLPLLPYAAERRQRLLETLDGLEADLVELNRQVEEEVRKRPEAMRLRTHPGVGPVTALAMVLTLGPAERFASGKEVGSYFGLIPREDSSGGKQRLGKISKQGSSFLRFLLVEAGPTAARYDPQLKRFYRRLAMRKHRGVAKVAVARKLATRLYLMLREQWTYPQLCQAVMQVSPSHSVVEPEKPTA

SEQ ID NO: 508240 - protein, 398 aa, unidentified
MPQQLWAGIDAGKSEHHCVVVDGDGARVLSRRVANDEATLGELINAVTTLADGGDLTWAIDLAGGGAALLITLLLDASQRLLYIPGRSVYYASGSYRGDAKSDAKDAAIIADQARMRRDLQPLRPGDEITVELRILTARRADLVADRTRAINRLRAQLLEYFPALERAFDYSNSKAALILLTGYQTPDALRRAGAARLVAWLQKRKARNADAVAAAAIEAAHAQHTVLPGQDLAADMVARVAQEVINLDTEIASTETMIEERFRRHRHAEIILSMPGFGFILGAEFLAATGGDMSAFDSADRLAGICGLAPVPRDSGRISGNLKRPRRYHRRLLRTCYLAAQSAARTDPASRAYYDRKRAEGKHHRQAILALARRRLNVLWAMLRDHMPYETSTATAA

SEQ ID NO: 508241 - protein, 348 aa, unidentified
MRFYIKQHRYYCGIDLHARSMYVCILDNEGNTLVHQNIKTCRRSFLAVIQPYQEDLAVAVECIFTWYWIADLCRQQGIAFVLGHALYMRAIHGGKAKNDKIDSQKIALLLKGGLIPQAYAYPAERRATRDLLRRRMHLARERADLIAHIQNTVSQYNLPPLGCRIGKKSERQEVVEHFPDPGVRQMVALDLTLIEHYDEQLRVWEQDLAMKAKAHDAYAYHLVRSVRGIGRILTLVILYEIEDIRRFPTVQQFASYARLIKCSKESAGKTYGYSGKKIGNAYLKWAFSEAAVLFLRGNPKAQQYIERQARKYGKGKALSILAHRIGRTVYAMLTQGRPFNETQFMSRL

SEQ ID NO: 508242 - protein, 408 aa, unidentified
MQNDFQYFVGIDWGSEKHRVCLLDGAGRMVEQRWVEHSGDSLAELVDWLRRQTVESPSVVAAAIETPRGAVVETLLEHGFAVFSINPKQLDRFRDRYSPAGAKDDRRDAFVLADSLRTDMHCFHAVRLDDPVVIRLRELSRLEDELSQEQSRALNRLREQWHRFFPQLLQLCPAADEPWLWALFEVAPSPARAAKLPEAKIARLLQQHRIRRLTAAEVRAVLKTKPLTLAPGAAEAAAEHALLLLPRLRLLQQQRTDLGRRISSRLEELSASPEGQSEHRDAAILLSLPGLGRKIAATMLSEASQAIAERDYHALRCYSGTAPITHQSGKQKTVLRRRACNQRLSNALYHWTRVSVVCDPKSKKVYASMRARGHSHGRALRGMADRWLQVLISMLRSGTLYDVQKRPA

SEQ ID NO: 508243 - protein, 461 aa, unidentified
MSKGSGTTRGDRRRNARRERLRQVLPRDGAVIGIDLAEDKQAIAVIDHDVRVLARKTVRVKAFRLGEALDWAVAQARAKGFASVTVACEPTGPRWLQVQRLCAERGLPLVCIQPLMSHIAREQQDYTTHKTDEADCVLIARLAVELHCYLPEQLEETWAHLRHLGRRRAQLITAATASAQRIQDFMSVAWPTVTETCARPLESNTWLAAVQLVTSRCGGQPGKLAVMGPEAFTTLVRGAVPGWGGKKAWGTICGRIFAALTDTEGVVVSSRRGLLRRCADELGDLQRTRAQLRAVEADMAAVLDELGLSRLADIPALTAVGAAAILAETGDPRRYDSSSSLVKHAGMSPSDNASGAFYGQAHISRRGRPGLRLAVWRAVWPMLRFNPVMAAKYAAMTSAADDAAQADAGSPQATAAGAAARARRAKARVACAASLLRWIYSMVVHDAGWDPGAASCPAEAA

SEQ ID NO: 508244 - protein, 352 aa, unidentified
MDTTTVGADLAKDLITVCVQDRSGRTTECRDLRRASFGAWLAKLPAGCVVGMEACSAAHFWARHMRQLGLEPRIMAAEFVQPFRKSRAGKNDRNDAEAIAVAAREPTMRFVSVKSVEQQARLARHRLREGWKEERTALGNRIRGLLAEFGLSVPRSSAALRKALALAAHDESLPQALRDMAAEVRGHLEGLDERVARCDREISLACRADPATRRLQDVTGVGPTSADALVATVGNARDFRNGRQFAAWVGLTPRQFSSGGKTRLGGITRRGDAYLRTLLVQGARSTLQQALRRSPGEATRHQTWIVQLHARAGYHKTLIAIANKNARMLWALLAREETYNPDAWRRLVATPH

SEQ ID NO: 508245 - protein, 406 aa, unidentified
MDGPIITVDVSKGNCHYQPWLTAGHSLRKPKVLNDTKDGFEALSETIEMVKEKSEADTVPVVFEATGVYHRCLQKYLDDIGNPYIVVPPLLSAAYRKTNLHGNKTDNADCAHIDKGYYQEEHLQCHQNESDTYARLRAKNRMYESELKILRQRKCTFRAMLDVIYPRMDKCFKGHASLYDSVPMEVLKKYPHPSLLLRHREETIVKAIRKPAGHKKGFTENIVHKMYQCAEECYSGVDADSVEVQQFPQMINELMEQMELCNTYLEELIEDASKLPSFAILLSIPGIGRNIAARIIAEIGDVTRFRNARGIVAYAGLNPKINQSGEKDGTHLAISKKGNRHLRCLLYLAVTCNYRLKKGDSIYQFNQKKRQQAASPLKPKAANIAAADKLLVVIYSLMKNGSTFRS

SEQ ID NO: 508246 - protein, 359 aa, unidentified
MRQSEGVKHHLREASVSEVIIIGLDIAKYVFHVHGADERGRAIFSKRISRGKLLDFFAAHPRCRVALEACGGAHHWARQLAQLGHEVRLIPPAYVKPFVKRQKNDAIDAEAICEAAQRPSMRFVAVKSEQQQAAGLVFRTRDLLVRQRTQIINAIRGHLTEYGWIAPKGPSHVTMLADLLEEEEMANSLPEAARAMFRLMLDLLAGLNGKIAALDKEIARRAREDEVSRRLMTVPGIGPISAAAIAALAPPAETFAKGRDFAAWLGLTPLQRSTGGKQKLGATSKMGERTLRRLLIIGSSTVVLQASKRGAPKGSWLEQMLARKPRMLVTVALANKMARIIWALLVKQENYRAPVAAEA

SEQ ID NO: 508247 - protein, 367 aa, unidentified
MKSSVTQSPGAIHLGLDVSKSKFAVGILRWDEQIPDVEVIINDEASVRRLIDRFPDRGRLRVCYEAGPTGFGLHRLLTSMGVACEVIAPALIPRAPADRVKTDRRDCQRLARLHRAGELVAIRVPTEAEEAVRDLCRARADLVADRTRTRHRLSKFLLRHDRIWHQEAWTGKHAQWLTGQRFDNPALHATYGHYRAVLAARDAELAAIEADLAHWYTHGPFTDAVARLAAYRGVARLGALTIASEVGDWRRFPAARTFMGFTGLVPSEYSSGQSVHRGRITKAGNAHLRTQLIESAWAYQHRPSLGAVLRRRQDGVDPATAARSWAAQQRLCGRFRRLSSRKTSRNVVTVAIARELAGFLWAEMTAA

SEQ ID NO: 508248 - protein, 352 aa, unidentified
MSIVAQEYEFVVGVDTHAKADVFALIDTHVNAQVGDASFPTSPAGLRRALAWVTRHAKGRVLFVIEGIGSYGASLARIAACGGYPVVEPDDMPARRGQGKSDPVDAARIARSVLGTDTTRLRQPRADQGIRAALRILVDARDMLNADRTRAVNTLTALVRIADLGLDARGKLSKTQIATIAAWHPRHEPLQTSTARTEAIRLARRIQDCDQTLHDNVAELTALVQASPVACLLDKKGIGPISAANIMTVWSHPGRIRDEASFAAIAGVNPIPASSGNTSHHRINHGGDRRLNRTLTVIANSRLRFDPETIAYAQRRTSQGMTKQDIKRILKRYIARQIYRLLEHQQHTQPTT

SEQ ID NO: 508249 - protein, 356 aa, unidentified
MSEKLNSKIAVIGIDIGKNSFHIVGQDRRGALVLRQKWSRGQVEARLANLPPCLIGMEACTGAHHLSRKLQALGHDARLMPAKYVRPYCKGDKNDYRDAEAIAEAVQRPTMKFVATKTADQLDLQALHRVRERLVSQRTGIINQIRAFLLERGIAVRQGLRFLRAELPDILAKRTDVLSPRMLRIIEDLSGDWRRLDERIEGLSSEIEALARQDQGCARLMSVPGIGPIISSAMVAAIGTGDPFSKGRDFGAWLGLVPKQMSTGDRTILGNISRRGNRYLRTLFVQAAWVVLVKVGPKQWERYGLKSWIEAAKKRLHHNVLAIALANKLARIAWAVLHNGRAFECVKTNATASRSA

SEQ ID NO: 508250 - protein, 365 aa, unidentified
MESIAHVGMDVDKEKIAVAVVKDYESEPRVQRVIGNRPDAIKTLVEELSAGYDQVTMCYEAGACGFELYRRITDFGALCIVIAPASLPKKANDRVKTDRRDAVKLAMGLRSGELSPVYVPTREDEALRDYLRAYEDIKAELKRAKQRLVHFLLRHEIRYEEGKNWSAKYWKWLRSLTFDSPMMGLAFEEYVGQITRLEETRKRIAQRLEAVAADERYETKVKTLRAFKGIGTLTALSFIVEIGDFRRFARAEQFMAFLGLVPSEHSSGGRRRLGSITKTGNGLLRTLLVEAAWHARYYKVHGKTLLKDRAVVSPEIATYADRAGKRLNRKYWRLLHAKRPPQVAATAVARELAGFIWGAMVGQTV

SEQ ID NO: 508251 - protein, 343 aa, unidentified
MQTVTTIGLDIAKSVFQVHGIDAAGQVVIRRQLKRRYVLAFFQKLPPCLIGIEACASSHHWSRELQALGHTVRLMPPAYVKPYIKRQKNDATDAEAICEAVTRANMRFVVTKTPEQQSGLVLHRARHLFIRQQTAVINAIRAHLAEFGIIAPVGRHGVEELLNVVADPNDKRVPEIARACLMAFGAQLRRLKEQILEFDRMIRAWHRSSETSRRLDDCPGVGPVLATALVATVADPKSFRSGRNFSAWIGLVPKQHSSGGKNRLGSISKQGDRYLRGLFVAGALAVIRYAKIHGTKHRPWLTALLARRPTKVAAIALANKIARMAWAMMAKGERYKEPIALAA

SEQ ID NO: 508252 - protein, 448 aa, unidentified
MVMAEPEEIPEEGHERIVERVAAIDVAKAFGKVCTRVPHPSDPSRRLTKVWEVQATLASVEELGDYLVGEQVRAVTLESTGDYWRIWFYVLEERGLRVQLVNARDVKHAPGRPKTDRLDAVWLAKLTEKGLVRPSFVPPYEVRVLRDYTRTRIDLIHERTRYWQRLEKLLEDALIKISSVSSTLTTLSTRAMLEALIAGERDPRTLAELARGRMRVKIPALMEALNGRFDDHHGELAAVLLAQIDGLDAQITRLGARIEELIARMPDSCPVEPGHDGAPDEAASSALDAVLRLDEIPGISPEVAQIIIAEIGLDMRRFPTAEHLASWAKLSPKTIQSGSRSRGGAVGKGNPYLKGVLGTAAVVAGRTDTFLGERYRRIAKRRGKLRAVVAVARSITVIIWHLLADPTARYHDLGSDYFLTKIDREKKTRTHIRQLQALGFTVTLTPAA

SEQ ID NO: 508253 - protein, 411 aa, unidentified
MQELSVVAGIDWAAELHAVCILGADGRVIKRFDVTHDSQALHVMVSKFRKAGVAKVAIERGDGPVVQVLIDAGLAVFVVPSRQIKALRTRYGSAGNKDDRLDAYVLADTLRTDGHRWRPLREDHPETKALRAMCRARKDLVETRVQVMNQLRANLELAFPGAVGLFSRPDSPITLAFLRRFPTAAKATWLSPARLDRWLRSVGYSGGIAAETLYRHLERAAPGLDGVEAEARGEITIGLVATIETLTAEITRIEAQIRKLFDAHPDQKIFASLPRSGMVRAATLLAEIGDCRERFPTDDALAALAGASPSTRQSGKHEQTVFRWSCNKKLRRAVMDFANGSRLGDEWAMQVYQRAITRGCRHPHAIRILARAWIRIIWRCWHDESPSVRNCTPAEKTWLLDIGHSYVCQRA

SEQ ID NO: 508254 - protein, 356 aa, unidentified
MSYDVKYIGMDVHKEAIVIAVLNESGKLVMESVIETKASSILQFLHGLRGELHVTWEEGTWAAWLYDLLQPQVQHMVVCNPRRNALLKEGSKSDKVDARKLADLLRTGMLRPVYHGENGLRTLRELGRSYQTISKDLTRVMNRLKALYRGWGIPCAGTQVYAARTREEWLSKLPQAGVRRRAELLYQQLDGLQALRREVRPEFLAESRKHKAAKLLRQIPCIGPIRAARLIALMQTPHRFRSKRQLWTYSGLGIETHDSAQYRFVRGQLQLSKKPQQLRGLNRNHNHEMKEIFKSAATRASCGRGPFYDFYAALLAKGMKPEMARLTLARKIAAITLTLWKKEERFDAEQLKTQAA

SEQ ID NO: 508255 - protein, 388 aa, unidentified
MLLDHPCDEAVAIRTHFGAIFVSLELSRSNWLVTSLSPGQGEKMSKRSVTAGGIGELLQLFAELRGKAQRRTGQSYRIVAIHEAGLDGFWVHRVLQQEGVESHVVDPASIATPRRRRRVKTDRVDGETLLRALLAYQRGEPRVCALVVAPSPEEEDRRRLCRERRTLIAERTTHVNRIKGLLFAQGISDYAPLRRDRRARLEGVVTGDGRALPLHLKAQISRELDRLELLLDQIKAVEAEQDAVLAAARTNAAEPAADPVTMLLALKGIGANFAAVLWSEAFYRQFANRRQLAAYAGLAPTPWRSGSIDREQGVSKAGNSRLRTTMIQLAWLWLRHQDESALTRWFKAHHHRGRNSAIVALARKLLVALWKYVCAGVVIDGAKMKSAV

SEQ ID NO: 508256 - protein, 334 aa, unidentified
MSKIAVSVGLDYHPGSVQICVLDEHGKVLTNGTRENSSQELNRVARLYGEQIQAAIEVSPGAANLADELVTRFGWSVDLAHPGYVARIKQSPDKTDFGDARLLADLTRVGYLPKVWLAPLDVRELRELVRYRQQLVRERRSTKLRVRALLRNQRLNGPGNAWTKAWLEWVRNEAALPDHSRWVMTQQLSNLERLQREIRQVEQRLEEVTKEDVIFQKLLEQEEVGLVTAVTLRAEIGRFDRFRSGKQLCRFCGLSPRNASSGARQADAGLIKASNPELRCVLIELGQRLMNHSDKWSERSAEMRARGKPRSLIAAAVANRWLRKLYHEMKSTHE

SEQ ID NO: 508257 - protein, 397 aa, unidentified
MKLIGIDIGKNKHFFCIMDQQTGEIISQPVSFSNDKEGFDFLVQKIKSYPKDSILIGMEDTGHYHFALLKYLLDLQYTVALINPKTTDFNRKMQGGITKNDKLDTINICDVLDTPERKKQYRITKVNSFDLYEQKQLTRQHHNLKEELNVYKNRLQKSIDIVFPEFNSLFKSKYGTVYMNILKTFGSAENIANTDIRTIRKCFEIDGRGNRISLTPERLKERARSSIGISSSAEVIQIKHLTAQIELIEEQLTEIDKKIEEFSIQNNSPILSIPGISHFSGTSILAELGDISNYSKPSQIIKFAGVAPLHYESSQFNAQHTAITKKGSKYLRKTLYQIILPVIRHNPVFNKYYQLKISQGKGHRCAQGHCVRKLLRIIYHLLKTNQQFDPQLLRQPA

SEQ ID NO: 508258 - protein, 412 aa, unidentified
MQDILTCAMGLDIHRDVIVACLAKGELGTDPEIEIRSFSTLIPEMRKLRDWVLEAECHYVAMESTGIYWQPIYEMLEPCFDGQISILVVNARHMKNVPGRKTDMRDAQWIATLLRAGLLKGSFIPDKTFRELRHLTRYRKSIVHDITAQKNRIDKFLQSSGFRFTAFLSDAFGASGRNIIRHLMKYGNISREALDRCLKTQTRKRIDEILVALNGSLSEHQRGFLRMIFGHLEALEQHRHTVEDAITKEITKHEEALSLLCSIPGIDVTAAAAIIAEIGTDMSAFPDSQHICSWAGLSPGNNESAGKRKSAHINKGNPYLKSMLCEVGWVISGKRTLYLSGWYWRIKQRKGAKRATIALARKLLALIYTMLKTGSPYNEDCFEIRRKQSERKRASRMVNELQKLGYFVVAPG

SEQ ID NO: 508259 - protein, 326 aa, unidentified
MMIIGVDHHPSFQTIAFFVEETGECGEQELNHSDGQAEKFYRDLKQRGICVQVGMEATGYARWFERLLAELGFELWIGHPAEIKAKRVKKLKYDREDARLILRLMRENNFPRIWVPGPENRDLRQLLWHRHRLVQMRTRILNQLQALAMNEGYHWRKKLFSEQGRALLEKLSLAPWASRRRQELLELLDRLNPTIEELTAAVEREARKRPEALRLMTHPGVGPITALAYVLIIGTPARFECGKQIGTYVGMIPCEESSGGKQRLGHISKQGNSLLRYLLVEAAQAAAHLHPDWRRRYMHLAMRRHKSIAKVAMGRRLEYHIRTKRA

SEQ ID NO: 508260 - protein, 360 aa, unidentified
MSFDGTSVGLDVHALSVVAHAVDEETGRVERARLCPDHGEILDWLHRLRGPVRVAYEAGPTGFGLARALADAEIDCVVAAPSKLLRPAGDRVKTDARDAAHLTRLLRLGEITPVTVPEAEVESVRDLVRAREDARADLMRVRHRLSKLLLRHGRVYSGGQAWTGVHETWLRRQCFDDTHTTAAFDHHFDAVLSATAARNRLDEQIIAVAASPRWTDPVDRLGCLRGISALTGLALTVEIGDWTRFTGSSIGAYVGLVPSEYSSGASRVQGSITKAGNAHVRRLLIESAWHHRAAYRNPGPTMRARWAKVDPALKARGHTGNQRLHQQWCQFNERKKPHVVANVAVARQLAGWCWSLATLN

SEQ ID NO: 508261 - protein, 370 aa, unidentified
MVSLPALIQYHNDTELSSLEETRCQFNGGKCVIKLGIDVHQEFYVVVEQVGGNNPKPPQRFGKGVFLGWAAKLKRPAAEVHAVYEACGFGFTLQRQLVALGIKCYVVCPQKLDERNKRVKTDSLDAKALCLKLDRFVEGNRDALALVRVPAEKEEQLRAIHRQREQLVKARKQLEAQGRSLMVNHAIEPVQQWWKRRAFAQLQVPQWMRTLLLNSQPILLVLEEKIRALTVQRQSAATPNQPRGLGQMTSVVIDREIGNWHRFNNRRQVGSYTGLCPGEYSSGNTRLQSCVTKHGNPRLRAALVELAWRMVRFQPNYKPILKWRALLAKGRLASGAARKKAIVAVARQLAIDLWRFRTGRGTPEQVGLTI

SEQ ID NO: 508262 - protein, 318 aa, unidentified
MNIIGLDISKDTIDATLHKTNGSIHYIKFKNNDDGLKQFRLWIKGNRIRKAYIGMEATGIYYEKAADMLSSYYTVYVINPLKIKDYGKSRFNRTKTDKADSNLIADYIKRHQDTLIPYQIPKNKALQKLINLKNQLQQHQKQIKNRLHSTEEDFIRNIHQDLIDTIQDKMEQVKIAISEQIKKQTDNNHYRNLQTIPSIGKDTASVLYAQLTEKHFKTANQFVSYAGLNPAIIQSGTSVRGRGRLSRYGNRRLKSTLYMPALCAYRFNAFPKLINNLKKAGKPKMVIIVAIMRKLAKLAYYIVKTGQPYDAERHRLNQ

SEQ ID NO: 508263 - protein, 331 aa, unidentified
MKNFYIGADVSKKTLDLVLYNADKEKMRASYIKITNDKKGVDELIKWMKEHKIVKSKAIVCMEYTGKYSFCFAELLETKKIDFVLVPALKIKGSFAGARGKSDKTDAERIAAYAFRYRDELAPTSLKDDRIVRLRDLMNDRKLAVKHAATYKTIMTEYKERKSSPRYKRAERMVSEYKKQISAIEKEIKGVISGEENMKKNYDLVTSIPGISFVNAVNLIVFSGNFVLFDNGRKFASYSGVAPFEYSSGTSVNRGTHVSKMANRMLKADLSQAAKAAINFDPWLKEYYERKRKEGKSFGCVLNAVKFKLIVRVFAVVKRGTPYVNIMKYSA

SEQ ID NO: 508264 - protein, 289 aa, unidentified
MLYLGIDQHARQITISLRDEHGDVVQARQVSTEPKKIDAFFQELTRLRKEEPFVAVLEVCGFNDWLIRMLRDYRCHKVILIQPDDRKKRKTDRRDAAGLSELLWVNRDRLLHGKPVRGLRQVDIASTTDQENRRLTTLRKEAGQARTRIVNKIRHMLRRHNLQWEMPTKRLPTLSAIAWLKKVVLAEIDRLEMNHLLADLEQAQQRLKELEGVIAQRSGASKTAAIITTMPGVSHFTATALACRVGRVERFPRAHSLANYWGLTPGCRNSGENNQRLGSITKAGSAMAR

SEQ ID NO: 508265 - protein, 375 aa, unidentified
MSEITRAPIVRVGVDLAKQVIQVHAVDVSGRRVAARAFKRDQFLAWCAQLPAGCLVAMEACSSAHYWSRKLRALGLDARLIAAHFVTPYRMEGKSGKNDANDAAAICEAASRPCMRFVPVKTCEQQGVMSLHRVREGLKEERTACINQIRGVLTEFGLVFCKSPKVLRAVLADVIEDASNELSAMARLVMQRAFEHWRELDEHLRWCDRQVGQHVRASPEAKRAVKVFGIGELGASALTAGVGDFKQFKSGHQFGAWLGLVPKQDSSGGKTRLGRITKRGDDYLRTLLIQGAKAAVMSADKRDDPTSRWLAQLTARAGWQKACVAMANKNARILWAVMTREEGFDPNHISVKPQAKPSARESAAVASSDTVACPA

SEQ ID NO: 508266 - protein, 322 aa, unidentified
MMSTQYNYAGIDIAKRNFVIAVSSLSKTKTETNNPKGIAHTIEYLKKHNVALVVMESTGGLEIPAAKAIHRAGMAVVIANPRQTHQFAQSQSLTKTDAKDAQMLAFFAQMMTQKEGWQTMLYHPPTEAKEVLEALVNRRNQLVDMRTAEKNRLHQVHETQVESVKQLIAHFDRLIELDKQIDDHTHTHFDGKAQVAEQIKGIGSITTATLMAMLPELGRLSHKRIASLVGIAPHPRESGETKFKSRCFSGRSAVRKALYMATVVATRFEPLIRDFYQRLLSKGKPYKVAVTACMRKLLTILNARMRDYFAENGITENSIRTA

SEQ ID NO: 508267 - protein, 461 aa, unidentified
MSRKKPTGKQNRSAQKRVDWKALEIVHPDAAGIDVGGSEHWVAIGPDRDPEPVRRFGCFTADVREMGRWLVEKGVRSVAMQSTGVYWMPVFEVLEQQGLEVYLVNAQHTKNVPGRKSDVQECQWLLKLHAFGLLNNSFQPTDEIRIARTLWRQRSNLVAEASSVIQRMQKVLTEMNVQLSNVLSDVSGMSGMKIIGAILEGERDPWKLTTFVEPEVKAKPEDIAKSLEGNWREELLFVLRQHVELYRIYQEKITDCDLQLRKHLESLGSKVDLRTRPIGNRPKGKKNSKNAPGFDLRTELYRITGIDWTQINGIDVLTAQTVIAEAGADLSAFPSEKQFASWLGLCPTNEQSGGKILNRRTRKVVNRATVAFRNAALTLLRSQSYLGAQYRRLRTRLGAPKAITAMARKLACLFYRLIKHGQPYVDKGTEYYEAKYREQQIRSLAKRAQKLGLQLVIPKTA

SEQ ID NO: 508268 - protein, 361 aa, unidentified
MQSTPLIAFDQHAATTVAAVLLPGQRTPALHSLTSDTPTILRFVKRIQGQGAVQCCYEAGPCGFGLQRALPARDSACDVIAPAVIPRRPGARIKTDRRDAGQLAVLYRAGALTAIHIPTEQEEAARDLLRCREDIRADLLRARHRLSKFLLRHGRRFTGTKKAWSKRHEVWLRAQTWPLPALDQTHRAYLRAVEEIVARLHDVEHDLRALLDLEPLRARVQRLRCFRGIDDLTALTIAAELGDARRFGTAPRTMAFVGLVPSEHSSGTKRAQGGITKTGHAHLRRVLVESAWHYRHHPFVGDTLRARQRGAPAAIIAQAWTAQQRLHRRYQRLAARGKPKQHIVTAVARELTGFVWAALTH

SEQ ID NO: 508269 - protein, 411 aa, unidentified
MEAAVITAVGIDVSKSKSTVAVRRPGGEIVLRPFDVRHTNSDLKKLASTLKKLGGDIRIVMEHTSTYWRPIALTLKEAGFFVSVVNAMLIHDFSDNTIRKLKTDRSDALKIANYALTFWDTLPPFNNEEETRLLLKMQSRANERITATATALRNGLIALADQTFPGVNIAFAPNTKNANGHEKWVDFFLRYRHKDCVCQYSMEAFTESYRGWCKRKNYKFRTDTAHQIYLLAQEGVATLPKCESTKMLITQACKSLNAVCEAKQSTQLEMQRLAAMLPEYEVVMQMEGAGPITGPALMAEIGDVRRFKNKKALVAFAGIDAPPFQSGAFESKSRHVSKRGSPHLRRTIFIVSNIILTRSNPENAVYCFMDKKRSEGKHYYVYTVAGSAKFLRVYYARVTEFLRSQPSPGAC

SEQ ID NO: 508270 - protein, 301 aa, unidentified
MYVLFRALTGIRYLALSVPNDEQSIASLLKRLARYRLERIVVEATGRLEHAFVSAAIAKGLPVVVVPPLKVRRFAEAAGQLAKTDAIDARLIARFAAALKPTTRPVTDANSKLIKDLVVRRRQLTSLRTTEKNRRGVMPEALKPSIDRIIASLDREIASLEQLIQDAVEQHAAWRHKRDLLTSMPGIGPSVASTLIGDLPELGSLSRRQIAALTGVAPFNRDSGTFRGKRRIRGGRAHSRTALFLSAMVAIRYNPDIKRFYERLLQTGKHKKVALTACIRKIVTALNAMLRDDKPWHSSFA

SEQ ID NO: 508271 - protein, 382 aa, unidentified
MPAYADPTPTPISADTIFLAFELSGTSWLVALHAPDADKVERHRLPAGVAAEVLGLIARTKARVTRRLGTTPRVACCYEAGRDGFWLHRVLEAEGIASHVMDPTSLQVDRRARRAKTDRLDAQALLRALMAWSRGERQVCSMVRPPSPEHEDERRLSRERGTLLKERLRLSNRIKGLCAAQGIYHYEPLGADRRERLARLVTGDGRALPGRLAAEIGRQLDCFELVLRHLAEVEAVRDARAAQAREEGGSKLATLLRLKGIGPELATVLELEVFHRHFANRRDVAAYAGLAPSPYASGGTSREQGISKAGNRRARKALIELAWLWLRHQPESALARWYRDRVGTATGRVKRIAIVALARKLLVAIWRYVETGLVPAEATVRT

SEQ ID NO: 508272 - protein, 367 aa, unidentified
MKKVSTVAAKPSKKISQQKLTVGLDLGDRNSWYCVLDEFGQIQLEQRVRTNAKALREVFGEMPHSRIGLEIGTHSPWISRLLSELGHEVIVANARKVRLIGESRKKDDRLDAQTLARLARIDPELLYPVKHRSAQAQADLMMIRARAGLVRARTGLVNTARGLAKSYGERLRGCNVRNMNPEKAEGLSPELQSALEPLLAGIEVLSEQIREYSERIERLAQQSYPQVALLKQVKGVGTLIGLTFLLTLEDPHRFRKSRDVGCYLGLQPGRRKSGQSEPQMHISKEGDPYLRTLLVQGAQHILGPFGVDCDLRRWGLKLAERGGRNGKKRAIVATARKLAVLLHHLWVSGDVYEPLHNNRGTTVAAAA

SEQ ID NO: 508273 - protein, 355 aa, unidentified
MKTTPNLITGLDVSDRHSTYCTITAEDGEVVEEGRVRTTPAALEAHFRGPRRRIVLEVGSHSPWISRLLEELGHEVIVANARMVGLIHNNPKKRDPVDAQTLARLGRVDPKLLYPIQHRSEQAQVDLSVVRARDAVVRARTGLINHVRGSVKSYGARIPECSAEGFATKAEGHVPEALRVGLEPVLEMIRALTRQTRFFDKQIEALCEERYPETAVLRQIKGVGPVTALTFSLVIEDPARFPSSRAVGAYLGLTRRHDDSGESEPELRITKAGDEFLRRLLVQSAHYILGRFGPDTDLRRWGLHYIERGGGSKTAKKKAAVAVARRLAVLLHRLWSTGEVYEPLRENRHGTVVAA

SEQ ID NO: 508274 - protein, 351 aa, unidentified
MVKVTNQLTRRCPVELYGGIDLHSNNSYLGIVDQECRIIYKERHRNELPLILSALAPYKSELKALAVESTYNWYWLVDGLMDAGYQVHLANPAAMKEYKGLKHKDDKKSALWLANLLRLRILPEGYIYPKEERPVRDLLRKRLHLVRHRTSHILSIKNIVTRNLGIAIKSDDMKALTEKDVERLISDECHRLAIMASLSTVHHLTGQVDQIEKTILGRVRLRDEFKGLLRVAGIGTILGLTIMLEVGNIRRFAEVGNYASYCRCVKSIRTSNDKKIGEGNRKNGNKFLSWAYVEAAQKARQYYPVIKRYYDKKAATTNDIVATKAISHKLARASFYVMRDGAAFDEKRLFG

SEQ ID NO: 508275 - protein, 347 aa, unidentified
MNVSTIGLDIAKNVFQLHGENGEGRIVLQKRLGRKRMVEFFSTLSPCVVALEACGTSHYWGRTLRALGHEVRLIPAAYVKPFVKRNKTDARDAAAICVAARRPDMRLVAIKSEEQQASRALERSRELLVKQRTQLMNSVRAMMAEFGIVAAQGYRGFAELVERLLGDDPGVPPTLIEALRLAIAQLDNLTPAIEALEDKINSIAKADATMRRLCKIPGVGFLTAHAMVAAIGDGRQFASARDFAAWAGMTPRETSSAGKRRQKGVSRQGETRLRKLFALGAATLMRNARSRDDRATQWQRGVLARRPMKVAVMAQAAKTARIAWAVLTSGEAYKPQGAASRSLATAP

SEQ ID NO: 508276 - protein, 356 aa, unidentified
MTAPYDYHIGVDYHKSYSHLVVQDGAGKTLRSGRVKNDRQSLGSFLERYRENSHAVVEATRNWMVMYDWLDDICDDVVLAHPLKVKAIADAKIKTDKIDATVLAHLLRADLVPEAWAPSEKSRELRVALRERMFYVRLRTMTKNRIVTVFDRYPEQIAQLKKLGDLFGKAGRQQLAALNVSEIDRIQINRGLEFIGDIDGRIKQSEATIRAMTKTNSNVKLLKTIPGIGEFFARLIDAEIDDISRFRNPKKLAAYAGLVPSTYSSGGKTYHGKIIKQGNKWLRWAFVEAVAPAVATDPQLRAQYEHLKFRGTNKARVAMARKLLTIAFQILRDQRPYERRGANSEEGASSTTSRLS

SEQ ID NO: 508277 - protein, 407 aa, unidentified
MNAVGIDVSKGKSTVAVLHPFGEIVVSPFDVSHSPKELSKLVTLLKTLNGDTKVVMEYTGNYYLPIALFLRNNGFFVSVVNPILVKDYSTKSLTVRKVKTDKKDALKIASFALDRWNVLSPFSAQSEARLLLKSYNRQYNQYNKLKIILKNNLIALLDQTFPGANTLFSTPTRKSDGHEKWVDFVLKFSHSECISKKSFSFFLKSYLSWCKKFGYKFSKSKAQAVYDFACNCSPSLSFSDSSALLVSNAIIQLNSINETLASLASEMNKIAATLPEYDSVMSMFGVGSVLGSQLIAEIGDVSRFPNKKALVGFAGLDASPFQSGNFNPQSRSISKRGSAALRKTLFQVMSVVLQRAPTNNVIFQFMDKKRSEGKHFYVYMTAAANKFLRIYYARVTEHLNLFTTTTA

SEQ ID NO: 508278 - protein, 413 aa, unidentified
MSEGYRVAGIDVHKKMLAVVVTDLSEGGEFRFERRKFGTLDSDLRMLAQWLAALEVREAVMESTAQYWKPVWRQLEEQCQLYLAQAQSNKAPRGRKGDFQDAERLVKRHVAGELILSFVPDSEQRLWRTITRTKYQLTRDRVRLQNQLESLLEDARLKLGTCVSDLLGVSSRRMLRAIAKGETDPTVLAGLAEENLQATAEQLSDALGAARTLSPLHRQILKLFLDRLDLIEKQVQVLHQQIATALQQHQQAVLRLAAAPGFGVDSAQQVIAEVGPTAATFPTPHQLASWVGVCPGREESAEVSKSNRSPKGNRILRRVLNQVANAAVKSQGSIYQLHYRRMVVRMGHKKAIWAIAHRLCKLVWTLLHKGATYIEYGAERSAQALKRRVSKQLRELRALGYQISPPVLTEPVA

SEQ ID NO: 508279 - protein, 343 aa, unidentified
MQTITTIGLDIAKSVFQVHGIDAGGQVIVRRQLKRRYVLTFFQKLSPCLVGIEACGSAHHWSRELQALGHTVRLMPPAYVKPYVKRQKNDATDAEAICEAVTRTNMRFVPTKTAEQQSGLVLHRARHLFIRQQTSVINAIRAHLAEFGIVAPVGRHGVEELLNVVTDPSDKRVPAIARACLSALGAQLRRIKEQILEFDRLIRAWHRSNEMSMRLEEAPGVGPVLATALVAAVADSKSFRSGRNFSAWIGIVPKQHSSGGKNRLGNISKQGDRYLRGLFVAGALSVIRYAKIHGTNHRPWLTALLARRPTKVAAIALANKIARMVWAMMARGERYKEPVALAR

SEQ ID NO: 508280 - protein, 344 aa, unidentified
MDNHTQYSGFAGVDLAKKVMQIHFVTGDGEITDKQVKRAEFLDFFRNRSKCLIGMEACGASQDWARKLEAMGHEVHLMSPKAVKPFVSGQKNDYNDAIGIYKAIFNGVRRVPVKSTEIRDLQTLRRIRSQVTKDRVKEINHVRGLLAEYGIVMGKSITAFNKGISSALESLKERGDVSPLVAEELQTTVESIKTKIERQKRLDREIEQLARGCKNYENFLKTPGVGPFTAAMLCVLLCDPAIFANGRQFAAYIGLAPRSRGSGGKNFIIGIPSKFNCDSESRAVFVECAQALARYKNKSPWVDGILRRKPKKVAVIAIANKLARQVWAMANKGESFKQMTILTA

SEQ ID NO: 508281 - protein, 338 aa, unidentified
MDIIKQVVGIDVSKDTLAVRYGTVDEQQNQQITESVTFTNNLKGFRELISFAKKKRGQLKAPLYFVMEATGVYYENLAYFLNAKHQKVIVILPNKTKNYSKTLNIKSKTDPLDARMITQFGLERQMQLWSVPSPLMKAIKALTREYNSKKDLVAQIKNQIHAKEYSHMPLKESLKRSQASLSFFEKQIKQIEKEIKELVKQDDDLNDRINKIDKIEGVGFMTIVSIIAETNGFALIENAKQLASYAGLDVVYNESGLKKHKTTISKKGNKHLRKAVYMPALSAVKHNPQLKQLYIRLVIKKGIKKVALIAVARKLLILIYIIFKKNVDYVPNYNLAKG

SEQ ID NO: 508282 - protein, 403 aa, unidentified
MKNMTSAFRFLEKKITRQQIKQSPEALNQWIGYLRNRFRNGPISVCLEQSKGALINFLICHDLFVLYPINPKTLAKFREAFRPSGAKDDPDDATKLLEIVANHRNQLTPWKPAEEIVRIIDILARNRRDAVDRRKQVINQLRSVLKAYFPQAIDLVSEDICSPLTWNFLMKWPTLQKLQKVKDATLRKFYHDHHCYKKKVVETRLQLIRQTQPLTSDEGILKTSPIEVKLLCQLLKQYTQSIAEYEQQLKELYPQHPDAEIFRSFPRAGTVHSARLASAFGADRERYKSPESLQKYSAVAPITISSGKSKVALARYKCPKHLRQSFIECAGQSLQYSLWTAAYYRMQIEKGKTHNVILRALAFKWIRIMFRCWQDKIPYNELNYLQSLTRKGSKILNYMTAAT

SEQ ID NO: 508283 - protein, 321 aa, unidentified
MTAILGIDVAKNKFDVALFRNGKYKNKSFENSPPGSEALVVWLKKNDVTAVHACMEATGSYGDALARFLFEAGHKVSVVNPARIKAYGESELLRTKNDKTDAKLIARFCEAHKPAAWQPDPPEIEHLRMLGRRRDALISMRTQEVNRLGGPDASVNESVQKVIDFLNEEIDLISKAIREHIHKHDGLRKKRDLLKSIPGVGDVTIEAVLSEANGFEGFDTVEQVVAYMGLCPKEHTSGTSVKGKAALCKIGNARLRKALYMPSLSAIQRNPCVKALYDRLKAKSKNGMIIACACMKKLVHIIYGVIKNGKPFDPAYNVKTA

SEQ ID NO: 508284 - protein, 482 aa, unidentified
MKKKTIYSNQSQELLRLFEEAGNNSKMMCVPIDYAKKDHIVMFCNGYGDILRKPFSVKNSPEGVKYLTEQVRRSCRHRGINSKHVFLGGEDVGSYAENFVNTLRVKGWIVAGVNAHDAKKQRANIQASTDRLDLMGIASMLLNRRANCSPAQSGIYRNLRTLVRHRRKLVVMSTEIRNQIHTVVDRLFPGFLDERKTGIVPFTNSSLYLMENRFSARQIHRRKRDRLIEILKRNGTSKPELTAAKLQEYARQVLIPPKEYMSTLQLSLAQHVKHFRCLKENIKQVEREIALWLSQTQGAFLTTIRGIGIVLAAGVTAEIGDPSVQKPLNNLASYAGIIPRVKQSGGVEGKTFTGKVAKRCNRILKDYVVKSGLHLGLHGPQDLMADYKRRDAAGQHADFGMARRYLRMAMCLMRTSQIYLPSRLRKKGVDVQQRSSYYLMTWPYIREKWYKLGALEATFEKDRPLGQWRYRVQELYEIKLKL

SEQ ID NO: 508285 - protein, 410 aa, unidentified
MPKIVYPICCGMDVHKSFVVACIATTDGKLVTTYKSKRFSTFTGDLRRLADWLSENDCRDVCMESSGKYWIPVYNILELSCNIVLAHPKYVKAIKGKKTDKRDAKWIADIFKHDLINGSFIPPPDIRQLRDLVRYRIKLTSYSTGEKNRAQNCLTVSNIKLDDVFSDVFGKAASAITDRLLESNEPFDVRPYLTKNIKTAPEDIQAAVDGAMCANQAEKLRIIRSHMKNLELCKMNLESEILTVAEKYLPQVNLVSTVPGIQIFSAIATIGEIGVDMSVFETSRHLCSWAGLAPQNDQSAGKKKTTRVSRAGVYIKPLLVQCALAAIKSNKHPEVKNRYHALKKRRGHKKAIIAIARMLLTAIYNILKKNEPYNAELYRNSDKPPTKREVTVEQAIFILQRQGYLVTASS

SEQ ID NO: 508286 - protein, 354 aa, unidentified
MKRTTKYVAFDVHQATTVASVREESGRVIARSVLPTDSGALTEFVRGMRGARHVTFEEGTQAQWLYELLAPLVDRVIVCDRRGAPRQGNKGDQVDADQLSELLRRGALRAVYHGSADRATLKELTRTYRNLVEDATRVMLRLKALFRARGIATAGTAVYHPRHRARWLAQLLEGGARFRAEALYAELDVLRQLRPKAKAAMVTEARRDPAWRVLRTIPFLGPVRVALLLATMQTPWRFRTKRHLWAYAGLAVVSRSSADYTLVAGAPVRRRRAPMTRGLNRNHNRVLKDVFKGAATAATARPGPLQDFYHRVMARGTREELARLTLTRKLAALTLRLWKKGERYDPTKLTMSAR

SEQ ID NO: 508287 - protein, 312 aa, unidentified
MNTEINIGIDTSQSHLDIFIRPLGVFFSVENTPQGIKEAVKKLRSYQPQRILIEATGRLEMPFVCAAHQAGLPVVVCNAGQVRKFAGASGRMAKTDKIDAQCIAHFGEAVKPRLTEMKPRNLQQISDLLAVRCQCLDMSTMQKNRLQRMPKHVHAPIRRILKSIQKELDYVDQQLDKLIDAIPEWRATRDLLLSAKGVGKVLTYTLMSELPELGKLNRKEIAALVGVAPMNKDSGGYKGKRQIRGGRHKVRTVLFVSMMSAIQCHPKLKPMYQRMVDAGKPKKVAIVACMRKQLIILNTMMKNGTHWDENMC

SEQ ID NO: 508288 - protein, 342 aa, unidentified
MNITIIGLDIAKNVFQVHGVDANGKVAFRKQLKRTQVLAFFANLSPCLIGLEACAGAHYWARELLKLGHDARLISPQFVKPYVKGNKNDANDAEAICEAVGRPSMRFVPAKSIEQQDIQMLHRVRSGLVKERTAQANRLRGLLSEYGIVIGQGLAQLRKRLPEILEDGENGLTMAARQLFADLQQQLVELDKQVSIYGEKILVLHRSSAVSKTLGTIPGIGPITATALLASLGDGKAFDKARQVPAWLGLVPKQDSSGGKPKLLGISKRGDTYLRTLLIHGARAVVKAAAKKDDAPSRWINNLVKRRNANIAAVAVANKNARIVWALLTRTESYHAPESVSA

SEQ ID NO: 508289 - protein, 338 aa, unidentified
MNYVGIDHHRQYSHITWLDEKGEVMKSGRVANLRRELEGFLQGARDVRAVIEAGRSSYTMVDVLADLGIETTVAHPKDVKAIAKAKIKTDERDSYKLAHLLRTGYIPEVHKRSRENRSSQRVLRQRAFYVGKQTAVKNRLRALLAQQGEEIRSEVERVENLFTDKGMKVLKGLALPEREAKLVGALLRTYHHIEERINETNALVKELYEKMPSAQLIQTVPGFGIFLAVLVAVEIEDIGRFEEVSQFHAYAGVIPSTHSSGERSWHGKIIKEGNRWLRWAVVEAVWPALRADFDIRCFYDRLKKRKGANAAKVATARRLLTIIYRMLKENRPYIPHKR

SEQ ID NO: 508290 - protein, 400 aa, unidentified
MLSIGIDVSKGKSTVCGMKPGGEIVYTPFEVQHTREGMSELVLLLHNSGEEVRAVLESTGSYHCPVVAALLENGIFVSVVNSLRMKRFCSQSIRKVKTDRIDAMQIALYGLAYWQELQPTKLPEDTYRELQLLARQYYQMTSLLIKAKVDFNAICDQVLPGMQELMNDHAGRHKLSDFVLRYRHTTHILEMGETRFRKDYCKWAEKKGYRNCERMAVLIFATAQNGIPVLPNAPSTQIVITEAIRVLHTVEASRDAILTQMQALAKTLPEYSLVREMPCIGDTLAPRLIAEIGDVRRFHSKRALIAYAGIDAPPYQSGKFCANNRHISKRGNRYLRKTGYEVMQSYVMHKPANDPIFTFIEKKRGEGKSGKLAMVAGLNKFFRVYYGKVTELYRSLPAIE

SEQ ID NO: 508291 - protein, 401 aa, unidentified
MKQSNATQQAVVERAVAQRVSAAGYVHAAYIGLDVHKVSISVAIAETGRQAPEFRGEIPNEPKAIDKLVRQLSERFAGQPLLFSYEAGPCGYGIYHQVQANGHDCEVVAPTLIPQRAGDRIKTDRRDAQMLARLSRSGELTPVWVPTPEQEAIRDLTRAREDMKAGELRARQRLNAFLLRHSKIYPGKSKWGPAYFRWLEETVRFDTPVQQIVLQEYVDHVKEAQRRVAGLEKQMKAALPAWSLAPVVESVQAMRGVSLITAMTVLAELGDITRFDSPRQLMAYLGLVPSEHSSGGSRRQGGITKTGNGHVRRVLVEAAWSYRFPARKTRIIEQRAEKTSSTVQAIAWEAQKRLCGRYRRLAATGKVKQQVTTAVARELAGFLWAIACEAMGKPHGSRAAA

SEQ ID NO: 508292 - protein, 355 aa, unidentified
MNDAKYIGLDVHQATISAAVRDSDGKLVLEAILETKAETILQFIHGLRGSLHVTFEEGTSADWLYTLLKPHVTEVLVCDPRKNALLKVGNKGDRIDARKLSELLRANLLRPVFHDDTGLRTLREMARSYLTITKDVTRVMRRLKAIYRSWAIPCGGQQVYSPRHRAEWLGKITEASVRRRAELYYQQLDTLRVLHQQAKKELLAEGRKHKTMKLLRQIPSIGPIRSVLLVAILQTPHRFRTKRQLWSYSGLALETRNSGEYRIEGGQLKRSKKVFAVRGLNKNHNHDVKNIFKGAAIRAMTVEGPFQKFYEALVAKGMKPTMARLTLARKIAAITLIVWKKGARFDAEHLKQQAA

SEQ ID NO: 508293 - protein, 535 aa, unidentified
MPRKLQGPLAGTSRERENGKGKPATPVPLWPSRPSESLALGPDQKGRALCHEHAKQNFGLHPRAPSLPLCNQRIQEEGDQAVGINGGNVVEVGPDEADHLLERAAAIDVAKASGKVCVRLPHPRIAGRRETRIWDVVATTNAIMALADELVGLGVERVVLESTSDYWRPFFYLFEAGGLVVWLVCSRDVKNVPGRPKTDKLDALWLCKLNERGMLRPSFVPPVEIRHLRDYTRLRADLVADRCRYVQRIEKLLEDALIKVSTVASDILGKSGRAMLEALIAGERRPAVLADMALGKMRAKRAALVEALTGRFDAHHAELARVLLDQVDALTAKIDQLTARAGELIAAMPAAQAPVPVPAGGPGHGSTGTCPVPLPVLERLDEVTGIGLAAAQAIVAEVGLDMAQFPTPARLVSWAKLSPRTVQSGARTSSGNTGKGDPYLRRVLSEAAASAGRTDTFLGERYRRLVRRRGKQRALVAVARSILVIVWHLLDDPMARFADLGPNYYEKRMDKGRRTRDLIRQLQALGHQVSLSPAA

SEQ ID NO: 508294 - protein, 436 aa, unidentified
MDRVIIGVDPHKLSVTIEARDTREILRATGRFGSDTRSYHQLLGVARRWPQRIWAVEGANGIGRPLAQRLLASGERVLDVPAKLAARARVSGTGQGRKTGAADAHAIVMVALRDKGLRELRIDPELTALRMLCDRRDELSRARAQALNRLHRLFLGLLAGGAPVKKSAIQYQALLATVRPRDLAGKTCRRMAAEELEDLRRLDIKLKAMKAELKAAVLATGSHLMDMHGIGPAGAARILADVGDVTRFPDRAHFASWNGTAPIDASGGQHTRHRLSRAGNRRINHVLSMAGIVQLRNDTEGRACYRRKLQQSKTSMEAMRALRRRLSDAVYRQLVTDAAARQAALQQTGPGGHSGAALSSSAAGLPPGTGTSDQPLPGPAPSTLPPPQAALKTPAAPIAATSRRRARGVNVERPTGRTTLTPTSAGAHSTAPGPRT

SEQ ID NO: 508295 - protein, 400 aa, unidentified
MDDIDDMGVFLGLDVGKSAHHGHGLTPAGKRVFDKQLPNSEPKLRAVFDKLAAKFGTVLVIVDQPASIGALPLTVARDVGCKVAYLPGLSMRRIADLYPGEAKTDAKDAAVIADAARTIPHTLRSLELTDEITAELTVLVGFDQDLAAEATRTSNRIRGLLTQFHPSLERVLGPRLDHPAVTWLLERYGSPATLRKAGRRRLVEVIRPKAPRMAARLIDEVFDALDEQTVVVPGTGTLDVVIPSLARSLAAVHEQRRALEAQIGQLLEAHPLSQVLTSIPGVAVRTAATLLVTVGDGTSFPTAAHLASYAGLAPTTKSSGTSIHGEHAPRAGNRQLKRAMFLSAFAALHDPASRTYYDRCRARGKTHTQALLRLARQRINVLFAMLRDGTFYEPRTPRLA

SEQ ID NO: 508296 - protein, 391 aa, unidentified
MVCVGIDVAKDKHDCCILDSEGTTLVDCFTIPNNMDGFKSLLQTIQDCSQKSDKIKVGLEATGHYSYNILGFLLDNDLPVYVMNPLHTNLYRKSLSLRKTKTDRVDAKTIATMLLSDVDLKSYTDTAYHNEELKSLTRYRFDKVQERAKLKQSVSRLVTILFPELEQLVSSIHGTSIYALLSEYPGAKQISEAHLTRLANILVKTSRGHYRKDKATHIRDAARTSIGSVMPAKSLELKHTIKLIQELTSEINEIEDAIRKIMDELKPPILSIPGMGFHSAAMILAEVGDFSNFNSPDKVLAYAGCSPSTYQSGKLTNCYAHMEKRGSRYLRYALYTATKYVCYWNPVFTEYLTKKQAEGKHYNVALSHATKKLVRLIYALQKSGKAYLAVT

SEQ ID NO: 508297 - protein, 375 aa, unidentified
MSLGRLTRFMKKYTVSGSVTAAPAAAKSNVNKSGSLLKLGVDIHRDKFVVVAQYEHATPRPPRGFAPAEFVPWVEARLRESLEVHVVYESCGLGYGLYRSLIQAGAHCYVIAPQQLDERNTRVKTDGRDGRALCLRLDRYLAGNKDSLAVIRVPSERQERARHWGRQREQLVRHRQKMEAQGCSLLINHGLPAPARWWRPQSWKRLGKLLPAWILPHLELYRPALLALDQQIHALTIELEKAAPAALPKGMGAMSSVVISREICNWQRFSNRRQVSSYTGLCPGEYSSGTKRVTGSVTKHGNGRLRAALVELAWRMVRFQPRYHAVQKRLAVLAKGARATGAQRKKAIVAVARQLAVDLWRLHTGRCTATILGFN

SEQ ID NO: 508298 - protein, 407 aa, unidentified
MPLFVGIDVSSKNLEACLMDAAGETLVTRTVTNNFPGASELKDVILQHAKPGDTIQIAMEATSVYSWHPAMFFHEDPELKQRQTKVFTLNPKLVKNFKKAYAEMDKTDPKDAWVIADRLRFGRLPKSVIQSEQYLALQRLTRMRYHLVHSLTREQQVFLNHLFFKFSAFNLEVDTSAFGHAITELLLEAYSLDEIAQMPLEDLAKYLQTKGRGRFSDPEDVAASIQKAARDSYRLSKCVEDSIDLILGSSIEIIRHLKRQIKDLDKAIARVLDGLPNTLETIPGLGPVSCAGILAEIGDIERFENQAAIAKFAGLFWPRHQSGDYEADDKMLARTGNRYLRYYLVEAANLVRRHEPEYRAFYQKKYREVQKHSHKRALVLTARKLVRLIDALLRNGQIYAPKKKVTR

SEQ ID NO: 508299 - protein, 420 aa, unidentified
MRNAGIHANSLLEVHRMYNAVGIDVSKGKSTVAVLQPGGTVIRKPFDVSHTSQNLNELADYLSSLDGTTKIVMECTGRYHEPMVKALSEAGLFVSIVNPHLIKNFGNNSLRKVKSDPADARKIARYTLDNWTELRQYSGMDNTRTQLKTLNSQFSFFMKQKVAAKANLIALLDNTYPGVNKLFDSPTREDGSEKWVDYSYSFWHADCVRKIGLKAFTERYMSFCKKHHYIFQQDRPEKLFNASKELVAVFPKEKTYKLLIQQSIQQLNLASEHVERFRREMNELASTLPEYSTVMGIYGVGKTYGPQLIAEIGDVSRFTHREALTAFAGVDPGVDESGQHKSKSNRASKVGSARLRKTLFQIMTTLLQNAPEADPVYCFLNKKRSQGKPYYVYMTTGANKFLRIYYGKVKECLRNLEQTE

SEQ ID NO: 508300 - protein, 424 aa, unidentified
MKRTQNEKILQIKNETLVVGVDIAKRTHYARAFDNRGVELGKLLKFDNSAQGFVAFDAWLEDIQQKHEMTEAIVGFEPTGHYWFNLGDHLEACGHKLAILNPYHVKCARELDDNCPSKSDQKDPKTIAMLVKDGRYRDVYIPDGNYQELRELVWERERLQDRLGSLSNQIIRWLDINFPEFVTVFKSWRGKAAWIALRCFSTPERMAKAGAQEILLAWREEMKRPSLKKAEALCLVAEQSIGRTKGSGAAMRSLQNIMTEYELLTMQIEQIEEEMRECLVRIPHATELLAIKGVGMVAVAIFVSEIGDIRRFKDPRQLIKYAGLNLRANSSGEHKGKTTISKRGRSRLRHALYQTMIPILATNEEFRSLHQRNLTRTQNPLTKMQSLIALCGKLLRVIFALLTKGVEYDPSKITVVMAEATQAA

SEQ ID NO: 508301 - protein, 344 aa, unidentified
MNKCIIHQGVDLHKKFFTFFCLDERTGDSMEGKVYNDDPEGLKRYLNQFDAASEVAVEANRNWYWFVDMLQERGIDVHLSNPKQTKAIAWARLKNDKVDARMLCHLLKADLLPTCWIPEKPWRDLREMVRYRMKLVSIRTQLKNMIHSYLSKQNIHTKFTNIWEGKGRSWLENIRLKYPHEGMKEYCLELIEHLSEIISKYDEELKNIGYRPKGIELIETLPYTGYTRALTIITETGPIEMFKSSKSYVACCGLAPTTRSSAGRTKQGRLSKEARLTLKWVYIEIANQVWRVDKDFHKYYFHVVYKRGKNIAKISLARKLAKAVYHMLKEGITFDEYKRRYLAR

SEQ ID NO: 508302 - protein, 355 aa, unidentified
MKEAVIVRECLGIDISKLDFVCVYAKETLKGDLLYSKSIKFPNNKTGFNQLLKWYRKNSTKSIDALFLMEATGVYYESLAYHLHRLGKPVIVVLPNKSKHFTKSLNVKTKTDSVDAKVLSQFGIERKQKLWEPPLAILKTLREYTRLLSSLKRQKMALENQNEAYTNSVGVDRFVLQTNTQLVHYFKKQIKKCEEEIIKHIASEKWLKRKIEQLMTIKGVGLLTVAIIVGETQGFSMIENRKQLTSYAGYDVVQKQSGTSLKGRTRISKKGNSNIRAALHMPSFVYIKYNAIVKDNYERINERNTSKMVGVIATQRKLLTLMYTLWKTDQEYIENFEQKKIDITKKEMPIQNECA

SEQ ID NO: 508303 - protein, 423 aa, unidentified
MLGVGIDWAESFHDVAPGVPGKGVIEQFRVDHGPAGVQRLISRCAELEPDPAEVRVVLETRHGLLVEALADAGFTVLPVNPDLVARRRGPAKKKDDSEDARICCLMALDAYLDLRQLIPHGEAGTELRAIARDDERAARDERRIGNRLRADLLAVFPAAIDISDGDLGAPVFLKLLERWPSAEALAAASRQEVEALARSARHGWPGRFADRVAGAMAAPRLAPRAALARAKEGSIRLAAAQLLAIRAQRRAWERRMGELLLGAPRYGRSKTPKDPDPGKAFPGGEIYLSMPGLGDRLAARVAGEIGEHYEQFATPNALQCYAGRAPVTRRSGRSEFTVARRLAYNRPLGEAVQQWAFCSLTRSAWAREFYDEKIAAGDSRNGALRKLGNRWLEVLWHCLHKGACYDEAVHAANRKRNRPPAAA

SEQ ID NO: 508304 - protein, 343 aa, unidentified
MYFIGLDVHKKTISYCVKDEAGRVYQEGKIGSTRRELDEWIRTMPQPRTIAMEATIFTGWIYDHLLPHAEKVKVAHPLMLRAIAAAKKKNDRIDAGKIADCLRCDFLPECHMASTEIRDRRRTLRYRSLVIKQMVQMKNRVSGLLMETGVSYNKQRLHKVGYFAELMTANEDVHESIRPLLKLSREMISRSQKLDYALVSSLERDPLLKERLRRLRTVPGVGPITALTWALEIGDFTRFSSIKQAISYCGLCGDEKSSADKVMRMPISKQRNKHIQRVLIEAAKLAPRESPELAIIRARELERGNPNRATLAVARKMVSYMLAVERRNQDFVPAEEFSRTAAA

SEQ ID NO: 508305 - protein, 335 aa, unidentified
MEVKTIGLDLAKHIFQVHGVDAAGEVRITKRLRRNQLLEFFAGLRPCLVGVEACPTAHYWGRKLKSLGHDVRLIPPQYVKPYVRRSKNDAMDAAAICEAVARPSMRFVPIKEPEQQAALMLHRTRDLIVRQRTQLLNAFRSHAAEFGVIAPKGPQNVVTLLAACEEARLPVLALELLRVLHRQIDEADARIEEIETQISAWHKANEVCRRLSSVPGIGPLTATAIAATVPDPGVFKSGREFAAWLGLTPRQNSSGGKDRLGRITRKGNQHVRRLLIIGAHAALLNSRVLKATDWVQGMMQRRPRQVVAVALANKMARIAWALMARGTSYKVAAAA

SEQ ID NO: 508306 - protein, 374 aa, unidentified
MANIIEAFVAFDTSKLRNAVAIAEAGRAGEVRFLGEIENTEAAITKVVRKAAGKYGRLTFCYEAGPTGYGLYRQIKRLGHECMVVAPSLILKKPGERVKTNRRDAVSLVKQLRAGDLTAVWVPDPRHEAMRDLTRAREVAVEDLRCKRQQISAFLLRQGLHYPGERTWTKAHRNWLMSQKLEYAEHRIAFEEMLLAMRQAQERIERLEQAIRVAVPDWSLAEVVTALMAMRGIDFISATAFLAEIGDLSRFPTPRELMGYLGLVPSEASTGDTIKRGPITKAGNRRARRILVECSWSYQHPPRVGKEKQERVAAAPQAVREIAWKAQCRLSARYRALTRKGKLKTVAVTAVARELSAFIWAINRQIINPRAAAR

SEQ ID NO: 508307 - protein, 368 aa, unidentified
MDQIIRIGMDTSKHIFQLHGVNAAEQAVLCRKLRRKEVAGFFERLAPCEVGIEASGGAHHWARVLEGLGHRVKILPPQYVKPYVKRGKNDAADAAALCEAMSRPSMRFVPVKTVESQAALMLATVREGLVRRRVQLANSIRGHAAEFGVIAAKGPARIAPLLARIAADTGVPALAREMFAALADEYAALETRLDEVDAKLRVWYRANDCARRLARIPGVGPITASLLVMKTPDARAFRSGRQFAAWLGLTPKDHSTAGKQRLGVITRAGDEMLRSLLVVGATAVIWQARRGRGRPSPWLAALLGRKPPKLAAVALANKSARIAWKLMVTGQAYDPIRAAARPAAQEGDHSAKPASRAPGFDRRCRQAA

SEQ ID NO: 508308 - protein, 345 aa, unidentified
MKITTVGIDLAKNVFQVHAVDERGTVVLRKQLRRDQMTAFFANLPPCVIGMEACGSAHHWARTLKSFGHDARLMSPQFVKPYVKSNKNDVTDAEAICEAVARPNMRFVPVKSVEQQAVLSLHRVRQGFVKARTAQANQIRGLLGEFGLVIPAGISHIAKRVPRLLEDASNPLPGSFRQLITRLTEHLKNLDTLVDEFEARIKAWHRSSELSMKLEKIPGIGPLGASALVASIADANSFANGRQLSAWLGLVPRQHSSGGKPALLGISKRGDVYLRTLLIHGARSAILAAQRKAVNTNVWLAGLLGRRHPNVAAVALANKNVRTVWALLAHGREFSPNYAAQLLAA

SEQ ID NO: 508309 - protein, 345 aa, unidentified
MLYVGLDLSRKRLDWQALSAAGERLAIGAVPPDRDGLTKLVQRLGDAPVLAVIESMSGARFVHDRLELAGWDVRIADAVKARGLAPLACKTDKIDCWVLAELARLALVPEIWLPDPRVRAERERARFRLHLVKHRSSLKNRVHAILFQHGVANPSSDLFGAGGRRLLERLALPEPWLSTLQASLALIDTLDEHIDRCERELRTLGADHRYIPLLMTCPGIGWALAFTIASEIGDIDRFPSPRKLTGYTGLCPKVDQSGERDRRGPLRKNGPTYLRWALVEAAHSAVRWHPPYQQIRERMQARHGKKRGTKIAAIEIARRLAEANWYMLTRNQPFAPASAPASLAA

SEQ ID NO: 508310 - protein, 459 aa, unidentified
MHKKAHRKQDRKKKISINQNWEVINPDAAGIDLGSTEHWVAVPPDRDQESVRCFGTYTSDLEALADWLKQCRITTVAMEATGVFWIPVFQLLEARGFKVTLANARHLKHVSGRKSDIADCQWIQKLHTFGLIGGSFRPADAYCVLRSYVRYRDELVSARSTQIQHMQKALQQMNLQLTQVLSDITGQSGLAILEAILEGHRDPVELAALANRRVKSPRAQIAKALVGDYRQEHLFQLKIAFELFHVYQAKIQECEDRMVGELEKLPVRVDIKAQPLPPKFSGKAIDENLRLALYLKFGVDITAIEGIGPQVALMLLSEAGPDLSRFPTVKHWTSWLGLCPDNRISGGKVLSCRTRRVLNRLANALRMAATTLERSKTAMGAYYRRMKAKLGAAEAVTATAHKLARLLYGMLTQGDAYVRESLERYERRYHSSKVETLRKLAKSLGCEIVEPQTLTNGVS

SEQ ID NO: 508311 - protein, 406 aa, unidentified
MEGPIITVDVSKGSCHYQPFIENGHPMRKPKQLSATIDGFQKLGQTIKDLEAKTEREDIPVIFEATGVYHRPLQKYLEDHKIRYYIISPLLSATYRKTDLHSNKTDALDCAHIAKAYYCEKELRQYQAQPQEYKRLYQLSRIYESELVHLRKRKVSLRSMLDIIYPRIDKTFKGNQNLYDPIPMEILKRYPHPSLLLSHREDTIVKTVGHRTGHLKGYTERIVHKIYEKAKECYSGCEINDIEVLKLPNLIENVQEQKKKCDSLLKEMIEIARTCPYFASVVSIVGIGENLAARIIAELRDVSRFDNRAAIVAYAGLNPKIQQSGDIDGLHLKISKKGNKHLRCLLYLGAQCNYRLRKEDPLYEFTKKKRQQTQCPLSSKAAYTASAHKLLVIIYSLCKNGTLYHS

SEQ ID NO: 508312 - protein, 454 aa, unidentified
MAKKRVKGKTLGGFAEINHDAAGIDVGNAQHWVAVPAGRDTVSVRMFGCFTADLHALANWLMKCGIKTVAMESTGVYWIALYEILESRGFQVCVVNARQAKNLPGRKTDVKDCQWLQQLHTYGLLTASFRPQAEIIILRRYLRHRETLVQEAATCIQRIQKALTEMNLQLANVISDISGATGLRILHAIVEGERDPQRLATLRDWRIKATPEEVANSLLGNWRDELIFVVEENLTLYGVYQEKIERCDQRIEQHLKSMPAQIEGDTNPLPEPRKGKRSHGNAPAFDLRSELYRVTGTDLTQIDGINVVTAQAILADTGTDMSAWRTEKHFVSWLGLCPDHRISGGKVLQRGTRRVVSRAATAFRLAASSLRRSQSALGAKYRRLQSRLGPPKAITAMAHHLARLFYRMVKYGSQYIDHGMAAYEARFKEQQLKWLSRKAAELHFRLAPIPNLAV

SEQ ID NO: 508313 - protein, 389 aa, unidentified
MRTAKMRGPGPSPVLTTPDHAGNVVGIDPHKRTLTATVVDPRGGVVASEHFRVSGEGHRELEVWARQFGSIARWGVEGSASWGRHTAVFLVARGGDVRDVCANRTPRSDRARQRGKSDTLDSERIAREVLAHPLLPRAFKRAGQEQGPDEQHQLLALWHNRRRSILTSRQHLVGEAEHLLCDLPLELRDELPDAKAVRPRLAALAHRNRRRRYDAPTTVRLGMLDAYRAQISALDREEKDVVAQLRELVAANGSTLSELCGLDTRSVAELLVEVGDPRRFTEGGFARFNASAPLAASTAEGPGEPVRHRYNPGGNRRVNAVLHRMAVTQLRCEPRAQAIYANARARGHTKKEARRILKRHLSDVIYRRMIRDLAAADRASVPTQPILAA

SEQ ID NO: 508314 - protein, 410 aa, unidentified
MAERFVGIDVGLREHRIAVLDRDGEAVGSSFTIAASKDGVATLVRTLAARAATPAQTLIGLEASGHLWENLEAALVGAGYRVIVLNPLQTRRYRDVVRRKAKTDDIDAHVIAGLLRSGVAQASYVPDEQIQSLRELARLRARLLADRQDYQRQLVTQLDVVLPEHRAVLGDLLTARARGILAQFPTAQHLAKANPRAIRRAAEDAGARGFSLDDATGVRDRARRSLYSGKAAAARAHVVRTLVSQLERLTSAIDEVDHAATTLLPPSEPGTGPSDAELLQTIPGIGPQTAATLLGELGAFTRFTDARALVAYVGFYPVIQESGARAATPRLSRVGSRIARRSLYLAAVNAVRGSGEWRTIYLRKKAQGKTAKQALVVVAVKLLHALYAMLKHRQPYNPSRLLVAPATIGS

SEQ ID NO: 508315 - protein, 439 aa, unidentified
MPTHERLGPDDCENLQDCWKPAIQILCRRGGGKCYLLGINLTTSALETLMEARTINNMPPAAPHDDAVRCLLAIELSKKSWIVAVNTPLSDKISRYTLEACDWKGLLDLCERIRTRVAREMKKPVEIISCYEAGYDGFWLHRLLEAHGIRNYVIDPASLQVDRRARRAKTDRVDVERLLRSLMAHLRGEPKVWSVVRVPSVVEEDDRRLHRERDRLINERIQHGNRIKGLLAIHGIYEYQPLRRDRMQQLERLRTADGQTLPPRLKAEILRELQRLVLVIGMIKTIEAERDAIASAKTEAEHTSAKKIQDLAKIKCIGPEFANSLVGEVFYRSFDNRKQLASYVGLTPAHFQSGAMSRDQGISKAGNAKARTVMIELAWLWLRHQPDSPLSVWFRERVGKLKGRIRRITIVAVARKLLIALWRYLENGMVPEGAILKVK

SEQ ID NO: 508316 - protein, 330 aa, unidentified
MSLFIGIDISAKSFDLVVRQQNKPSKSKCFEQSLDGHQKCLNMLKKLEPTLIVMEATGVYHLDLAIHLYDAGLPVAVINPASFKRFAELMLKQSKTDSIDAALLADFAQRMEPRLWVAPSSQCLALKDLGRQIQRLTVDKAKAKNRLHAFQSKKATLAVLLKDMLKSIGQYEKRIELLTNAALEIIQNDEALNRQFKSMVSAKGIGQTSAISILAEFSILSKDMKAKQVSRYAGLDVKLSQSGTSVNGASRISKAGNVYLRAALFMPAMSAVQHDENAKAFKNALVGRGKRKIQANVAVMRKYLTGLWSVYLSGEIFDSSKLFSAEHKKA

SEQ ID NO: 508317 - protein, 319 aa, unidentified
MKTTKCTEIKITETNTGIDVGKDTLDICVYESSLDWQESNTEIGIRRLMRRLSRYDVTRLLVEATGGYERALVEAAIEHNIPIVIVQPIQVRQFAKAQGVFAKTDKIDARLIAEYGVKLQPEVKTLPGPKVRRVKDLLSRKRQLNEMRTQELNRAHRAQKITAASHRRLLKLLDKEIAEINDKLAKEVTGIDEWQRTYDIISSVPGLGDGVAFTVLGELPELGQLTNRQIAALCGLAPFNRDSGRLKGKRRIRGGRAPIRTMLYMAMLSAIRYNPVIQVFYQKLVAQGKHKKVAIIACMRKMMTILNTMVRNDQEWQMN

SEQ ID NO: 508318 - protein, 385 aa, unidentified
MRLLFEVVDSEIKEAKKNMRLAVGMDVHSKNSTAYAVYAGMDEIPTRYEKFVEEFNREFCEFPSTSDGIGRMVVFLRDNQYEILIENSTKSHEVYWILTNMGCKVTVAFAGDLYRITKSVKKTDHNDSVELAGYMRRRMNGENEFAECYMPSPEWMMRREMCRAHLSDGIHLADLKRRIRAHLLLHGLKLDREYSDVTSPLARESMRKLKDPYLAVLCSDAKATIERRNMTAKTIKAMFYNDRNFELISSIPGFGIVSSAYVSALVVDVSRFRSREQFTAYFGVVPRMRASADSDPNCSTTHRGDGDMRSLLMMCTQVHIQHSEDSVVTQLFRRLKAAGKAHKEALTAASRKMLVVIFSILRSGIRYTDDQGLLELARKTQEDAE

SEQ ID NO: 508319 - protein, 348 aa, unidentified
MAMLADTVELVIGVDTHKDTHTAAVVTAATGAVLEQVTVAATPAGYQQLLKLAGRHQGQRMWAIEGTGGYGAGLTRFLAAHAEQVVELDRPKRTARRHGAKSDPLDATRAAREALGRDQLAQPRAAGQRAALQVRLTARRSAVQAATDAQRQLHALVVAAPDALRGRLRGLTTTRLVSACGRLRLRADLDPETAATVASLRALARRIQLLDAEIAEHTRAITTLVRAWRPDLLGRCGVGPIVAAIVLCAWSHPGRCRTDAAFAMLGGAAPIPASSGQTVRVRLNRSGDRQLNQALHLVVLTRLRYDPATRAYAQRRRAQGKTNREIRRCLVRYVARQLYRLLEAQPTL

SEQ ID NO: 508320 - protein, 435 aa, unidentified
MEEVEDEPLFCDRVAGIDIGKATVMVTIRVPSEARAKGRQQETREFGTTRRELLALADWLRGWQVERAGMEATSDYWKPVLFTLEQEGFDCLLYQASQVKALPGRPKTDKLDSVWLARITEQGSLAGSFVPPEEIRRLRTHTRYRRKLVQMRTAQKERCEKLLEDAHLKLSSVISDIHGVSGRDMLRAIAAGERNPKVLAQMARGVMRSKIARLEQALDCSFFTGEHAFILTMMLDSIDSLTAQAGVLDARIADMCQPYQRQLEQLDEIPGFGITTAQDLIAEIGTDMNVFPTAGHLASYARQAPRVKESAGKRKGKNATGRGNPYIGGALGEASISAGRTQTFIGEKYRRLTRRMPKRKAQVAIMRSQLVIAHALLSDPDARYQDLGPDYYERKADIRRRARNHARALERLGYKVTLEAIDPGTGELHLIATAG

SEQ ID NO: 508321 - protein, 459 aa, unidentified
MRPKAKKSKPKSRAPFNNPPMPRLNAAGIDIGAREIYVAVPRERDPKPVRAFETFTESLHKLADWLQSLGIDTVAMESTGVYWIPLFQILEARGIEVFLVNARHVKNVPGRKSDISDCQWLQYLHSVGLLNGSYRPAQHVCAARSLFRHRDSLIEMAASHIQHMQKALDQMNLQIHHVISDITGLTGLAILDAILAGQRDPAVLAKLRDRRIQASPETIIKSLRGEYRPEHLFTLKQALVAYRHYLQLISECDLEIQSHLRQFESLYEAPTEPPSTPVQRRRGRPCGSHTPQAKMARELHRIFGVNLIEVPGLNVSTVGTLVTEVGPDLSKFRNAGAFSSWLTLCPDNESSGSTVLAGKTRRSKSRAREAFRMAAYSLHHSMSFLGEYYRRLRARLGAPKAITAAAHKLARIFFHMVTTKQAYDESIFAKQEIIYRRRLQNRLKAQARQLGFQLVPITD

SEQ ID NO: 508322 - protein, 497 aa, unidentified
MLLGFELSGESAFGGYPDWNNFKVRSYIPGSSYYQPFKYFIMSKKHVSLEVVNPNAAGIDIGSRSHWVAVGQDAQDVREFGVYTEDYQELSKWLKEHEVTTIAMESTGTYWQNIFSFLVAERFDVILVNGRQTKNIKGKETDIKDCQWIQKLHTLGLLSSSFLPDSTTDVIRTYHRHRQNIIKQTGVTVQKMQKYLRLMNLRLDVVVKDIVGLTGQKIISAFVAGERSGKELAKCRHYNIRKSEEEIAKALQYNGREDYFFALKQEWKTYLHLQKQIDETDKEIKKLLKKIIRSNENKKKHTAKKKDYKRKNKNAIRNTDMNKIGVQYFEGIDLMAIEGVNDATVMAFISEIGLEGIKKFKTAKEFTAWLRLAPNNKISGGKVLSHHLPKGSNRLKIALRQSANVIGNLKEGHLNDFFRRINYKKGRATAISATARKLAVIIWNMLAKGIQYQPPKEYLFLDQKRKLKLVSRIKKNISKFDIKPEDVGFSKHLIINN

SEQ ID NO: 508323 - protein, 435 aa, unidentified
MSNNMKYDLFISVGIDVGADFSWMSIALPNQQIIGKPFKILHSDLNSLAATVSKIKEAEELYSMESRIFLESTGIYHYPLFCYLRDKGFTVSIVNPIITKNSTNINIRKVHNDRFDSKKAALIGLKPDLKVSLIPSDLVLDLRNLSREYYDLMDSRSAYVNKLQGELRMVFPQFLKIFSKITVNTSLTLLEKYTSPQAFLNAPEDEIIDSIRSTARFGLTYAKNKCNAIIQASRDALVFGHSVNSNFTRIRLYISFIRKYDEEVISILKQMHDLVDLSEGTKFVKQIHLIESFYGAGFLSAVSLMCEIGDFSAFRSPKQLFAYFGLDPAVKQSGKFSGTNVKMSKRGSRIARRVIHTMALISIGKNRNGSANNQVLRDYYLKKCQSKPKMVALGAVMHKVCNIVFAILRDEKEFAIITPKEHQKNYQQSKCDFAA

SEQ ID NO: 508324 - protein, 355 aa, unidentified
MDSKKYIGMDVHKESISIAVMNGAGKIVMECVIETKASMILQFIDGLRGDLQVTFEEGTSAAWLYDLLKPHVTKLLVCDPRKNASMKEGNKSDKIDARRLAELLRLNHLNPVYHGEHGLRTLKELVRSYLTITKDLGRVMTRVKAIYRSWAIPCSGKQVYAPRHRVEWLGKISEPGVRRRAEFYYQQLDALRTVRQQVRRDLLAEGKKHQAWKRLCQIPSIGPIRAAVLLGILQTPHRFRTKRQLWTYSGFGIETHSSADHRSVDGQLQRAKKQISIRGLNRNCNHDLKNLFKGAAIVASSKPGPLQEFYAALLSKGIRPEMARLTLARKIATIVLIVWKRGACFDAQHLKPQTA

SEQ ID NO: 508325 - protein, 401 aa, unidentified
MKYVLVLDVAKSKSMFMLSSDVGEVLLEPSEYIHNKSDFERIDSYISKLNIKDNLTVIMEATSIYHKAPERFFKENNYHVIVFNPLIGKEITNTIRKTKTDKQDCIKLTNLFWKGSIPDRNYTEDEIYTKLNELSRQYYHLDEGLTRHKNRYKELLHLCFPEFELCFKDGKIYDLTALNFIKEFPHAYIIKDKRVDALAYNMANTNDRHLNYYKRKANIIKEYAQNSYPGVNENSKDVDNLKQLANIIIEIAKQKEIIKEQMIELAKQTKNFECINSLFGIGELSASLIIAELKDITRFNNIKQINASCGLDPTIVQSGKSIDYHGPISKRGNRYARKILFNCSRNIVTLSAKCDKENPIYVYYQKKKQEGKHYYACLTACSTKLIRIIYALCMNNSTQQN

SEQ ID NO: 508326 - protein, 443 aa, unidentified
MNPTHPYDLIIGLDRSDKKADLRLITTATGQRRSEIIDTTPEALWEWLLALRQQHPQARVGLCLEQPAVHLIAFLEAYEWITLHPINPITLQKYREAFVTSRAKDDAKDADYLADLLLTHHAKLKSWAPEDSATRAVQQLVYHRRAVVDERTGLSNRLIALLKQYFPQALVLCGQDLWRPLATRFLLKWSSLQAVQKAKPASLKQFYYLNGSRSAKLLEQRLALIEKAVPVTDERALIESFALRVQLICRQLQLVQQTITHYAKQIASTYAVHPDHEIFASLPGAGPVLGPRLLASMGSRRERFGAAADLQHYTGIAPVTKRSGGSCYIHRRYLCPKFHRQSFHEYAKESLRWSRWAAAYYLQQRTKGSPHQTAVRALAYKWQRVIFRCWQNRTPYREETYEAALRKSGSNLVSLFDRVELGKSPFKKPVNKLKKTVDGLPQR

SEQ ID NO: 508327 - protein, 413 aa, unidentified
MRVVYERCCGIDVHKQTVVACAIVAGAEGQSVKETRTFETMTADLEALAGWLTRLGVTHVAMESTGVYWKPVYNLLDDRFAILVVNAEHIKAIAGRKTDVQDAEWIADLLRHGLLKGSFIPSEVLRELRDLTRYRTKLGDERKSEVNRVQKVLEDANIKLASVASDVMGVSGRAMLAEIVQGQTEATTLAELAKGRLRDKHDLLVKALSGRVRPHHRFMLAQHLSHIDYLDEAIGHLDQQIAEQMRPFAAALATWDSLPGINQRIAEIIVAEIGADLAPFEDADHLASWAGMCPGNNESAGKRKSGRTRKGSPWLRRALVEAAHGAARTKNKYFQALYRRLASRRGKQRAAVAVGHSLLVTGYHLITRKTTYQDLGGNYFDERDRETVKRRAVRRLEKLGYRVELAPLAAKAG

SEQ ID NO: 508328 - protein, 342 aa, unidentified
MDIKVIGIDLAKNVFQVCVCLMDNSVMTNKKVNRNKLLDKIRQFSEGSLIAMEACGTAHYWGRQFQALGYQVQLIPAQHVKPFVANQKNDANDALAICEAVFRPNIHMVPVKTVEQQDIKALRCVRSRLVQNRTAMVNQIRSLASESGVIFSVGRLQLQASLSRILANNEHELSHTLHYLLKLLYEDLCVLNERINQIERDIKALCQIQPRYNALLSIPGFGPLVTASFMSELGSGHQFKNGRQLSAWCGLVPSQSSSGGKVRLGSITKNGSSELRVLLIHGARAVGRFASKRDDRLGRWFNALALRQGRHKAVVALANKIARIGWRILTSNDNFDVNKAFA

SEQ ID NO: 508329 - protein, 350 aa, unidentified
MKYVGVDWAYRTAQWCALDLGGEIAGEGRISADRDGLARLVLELGDEVKACLEMMSGALWVRDELVGCGWQVEVADARKVKTVAPLAAKTDKVDARLLAELCRRELVPALWLPSLDERALRERLRRRMHLVRLRTSAKGRIFGLQTQWGVRVSLARLRRADGLSVLERAGVPEVWRRSVSECLALIDFLDARIAPLDAELRPFAHSDPRAVLLDTIPGVGELLALTIAVEIGEISRFTQPEKLVSYGRLAPRVRQSGDGRARSGPLSKSGSRLLGWAAVEAAQQAWRESNPWHELYVDVGHRSRHSNAAKAAVARKILIAAWHMLSRNQPFHPAPRRTSVPASSRLALAA

SEQ ID NO: 508330 - protein, 490 aa, unidentified
MKPKRKSVYRSQNATLRALFERAGDPRKVICVPLDYAKRKHVALVCDGHGDILKGAFPVENNPAGVAWLIEQISATARHRKIPKNQIFLGGEDEPAYVANFTAALREAGYVVLRVNAHEAKENRENHAASTDQLDLIGIAKTLLSRRARSSGDGSPENPAYHHLRELARCRRSLVRQQTGTANRIHALVDQLFPGFLDDSKTGITAFCEASIELMKDRFSSPEIAKRKPTALAKTLRRLRVHHPDEAAAKIINLARSALPPTPNRVATLQRTLKATVDLHQCLSRNADELRTDAALTLSTTPYALLTSIRGIGFVLAAGVAGELGDPAALGTTDSLCCYAGIVPKTLQSGGPDSPPVQGHVSPRCNRILKDWVVQSAQKIHLYGVPELKDRITRWNTEGRSGLYAGARHYLRLLRSLVKNQVPYLAPAGRIRGAAPEELAAAAQDTWKVMQNKWRTIPGGLDLMLDEAHPLGFWRRVLKEAHDIQLPTRP

SEQ ID NO: 508331 - protein, 369 aa, unidentified
MEKHSEVFVAFDVAKKKHAVAIAEGGRQGEVRFLGDVENSPLPIEKTIKRLATRYDHLHVCFEAGPTGYGLYRQVKALGHDCLVVAPALIPKRAGERIKTNRRDAVTLARLHRAGELIGVWAPDPAHEAVRDLVRAREAAADSLRRKRQQLLSFLLRHSRIYSGGGHWTLAHRRWLAGQKFEHAAQQIVFQEGIDTIEDSLQRLRRLEKQLALIVPEWSMAPVVEAYQAMRGASFIVAVTFAAEIGDVRRFDTPRQLTSFLGLVPAESSTGDTVRRNGLTLAGNRRARRALVEAAWTYRYPARVSETLRARLEGLPKPVRDIAWKAQVRLCARYRRLSATGKKPPVVVAAIAREVAAFLWAIGREVAPA

SEQ ID NO: 508332 - protein, 324 aa, unidentified
MLPTLGIDISKDSFHVELSINHKLRHRRFANRKEGFAELGAWLAKHKTTSVHACLEATGPYSEALALYLHEQGHTVSVVNPAQIKAFGQSELLRNKDDRPDAGLIRRFCEKQQPPAWTPAPPQVRELQALTRHLENLLATRQQQMNRLEVTNTKEVAKSLRKLVTHLDAEIKRTERQINDHVDRHPDLQQQCQLLESIPGIGKRTATRLLAEIEDISQYKSARQVAAYAGLTPRNNRSGTKRGPTRLSKTGNARVRKALFLPAMVAKRHNPVVRSFCQRLARYGKNKMQLVGAAMRKLIHIAFGVLKSGKVFDPEHELLFNSVS

SEQ ID NO: 508333 - protein, 338 aa, unidentified
MGEITTVGLDLAKNTFHVIGCDVHGKEVKRQLLRRAQVMAFFANLPPCLIGMEACASAHFWARGFRNLGHEVRLIAPQHVKAYVRGNKNDYNDARAIAEAVCRPDMRFVTVKTVQEQDVQALHRLREAQVRERTALCNQIRGLLAEYGIVLPKGVSIVRKRLPELLEADGNGLSAFFRPLLANCYEQLQQVDAHIDFYTRELKRHAQRHEAVRRLQTVPGFGPILSSVFHAFLGDGQAFRKGRDVSAALGLVPRQHSSGGKAVLLGISKRGDRYLRSLLVHGARSVVRLAAGKDDRLSRWINRLRSTRGYNKAAVALANKMARIGWAVLRQQCVYRTA

SEQ ID NO: 508334 - protein, 313 aa, unidentified
MKVEGRILESQRIGTERERLLSYFGKVEKPAAVAATFNGYYFLDLIEPLGLELHLVHPWKTRAIASARIKHDKLDSRILAELLRTGFLAEAWIAPREVRQQRQLLRYRAHTVRWATRAKNAVHGIVNRNGAPAPVESLFGPKGRAFLKDVVLPEMDRWEVEGQLARLDLLEQQIRELDREIRERVKADPVALALEMIPGIGPFIALLLVAEMGDIRRFPTAKHLASCTGLVPSLYASAEHRWGGTQRAIFGILRRPQSASRSGQSGCCSGPQAGGDQLLPVAGGASTVMSKLKQVRECTWGGAWSEDRPFMCD

SEQ ID NO: 508335 - protein, 351 aa, unidentified
MKQEHTAVPKLFIGIDIHKRSWKIHCSTDISGGKTFSMPPEPEILLNHVEKYYPDFDVSTAYEAGCCGYSAHRCFESYGWRSLVVNPADVHRKGKEKHTKTDRIDAQLIARELKDGRLDGIHVPDMEREQLRSLFRRRNDLVKDYRRIKSLIKSQLLYFGIAVPAEFDNSHWSHNFRNWLDALAFEYSPARATLDSRMRQFRFVDQDLRDVSTQLRRFCKTYYRKDYKLLRSIPGIGGIVACGILCELGDLRRFRSLKHLSGYVGLAPGIHQSGDNLRTTGITRRAHRLIRSYFIEASWQAVRTDPVMQAYYRKHSGRNVKSIIVKVARKLLSRTLAVIKTEVPYTIGVIE

SEQ ID NO: 508336 - protein, 349 aa, unidentified
MLIIGCDFHSRFQQIAMVDTETGELIERRLEHGNGEAKKFYAELQKPGRVGMEATGCAQWFEGMLAKLGHELWVGDAAEIRAAMVRKQKTDSRDAVHILDLLLTNRFPRIWIPSPEERDVRQLLRHRHKLVGLRTSLRNQLQALAMGQGVCRKKKLWASRGRAELEALGLDPWARRRRQELLEILDRVDPSLAELDRAVAQEAEHRPAARYLMQQPGVGPVTALMFVLTIGPIERFQRSKQVVSYLGLNPRESSSGGRQRLGAISKQGNSLARFLLVEAAQTASHYDEDLRRDYQRLKFRRGSAVAKVAIARKLAVRLYWKLREYSSPAPSTRTQGSPETPVVGASLSS

SEQ ID NO: 508337 - protein, 404 aa, unidentified
MYNAVGIDVSKGKSTIAVLQPGGTVIRKPFDVSHTSQNLNELADYLGSLEGPSKIVMECTGRYHEPMLKALYEAGLFVSVVNPHLIKNFGNNSLRKVKSDPADARKIARYTLDNWAELRQYSDMDDTRTQLKTLNSQFSFFMKQKVAAKANLIALLDNTYPGVNKLFDSPPRQDGSEKWVDYAYSFWHVDCVRRIGLKTFTERYKAFCKKHHYIFQQDKPEKLFNASKELVAVFPKEKTYKLLIQQSIQQLNLASGHVERLRQEMNALASTLPEYNTVMGIYGVGKTYGPQLIAEIGDVSRFTHREALTAFAGVDPGVDESGQHKSKSNRASKVGSARLRKTLFQIMTTLLQNAPVDDPVYRFLDKKRAQGKPYYVYMTAGANKFLRIYYGKVKECLRNLEQAE

SEQ ID NO: 508338 - protein, 346 aa, unidentified
MSQYSGPLVLDVSVKETSVCIVDDTGKIVREVKVASEPDALLPVLTNPTYHFKRIGLEAGPLSQWLYSALAEAGLPVICVETRHMRAVLKAQINKTDRNDARGMAQMMRAGLYRPVHVKTLRSQKLRMLLTHRKLLQSKAIAIDNDLRGTLRNFGLKVGVVGTVRFEARIRELVENLPDLAVLVEPLLIVRRALREQFCILHRRLLAIVRDDEVCRRLMTTPGVGPVVALTYRATVDVPARFRHSKSVGAVFGLTCAKHQSGESSRTGAISKCGDEMMRMMLYEAAHIMLTRTTKWSWLKAWAMQIARRRGMKKAIVALARRLAVIMHRIWVDGTEFRWTREVAVA

SEQ ID NO: 508339 - protein, 415 aa, unidentified
MEVLVDRAAGLDVHKDTVTACVRIPKPAGGRDQQVREFRTFTHDLRRLRLWLSEQRVTHVAMEATGVYWRPVWHILEDLPGVELLLVNAHHVKNVPGRKTDVSDAAWLAQLLERGLLRGSFVPPPVIARLRDLTRYRKKLVEARASETQRIQKLLEDAGIKLDSVVSDVLGKSAREMLDALIAGVRDPAKLAGMARTRMRPKIPELRLALEGRFSEHHALMLEMHLAHVDHLTASIGRIDDQVDEVMSPFGDEAQRLQTIPGVGKRTAEVIVAEIGVDMSRFPTAGHLASWAGMCPGNHQSAGKRRSGKARKGDQALRAALCEAAWAAARTKDTYLSAQFRHLRRRFGKKGDNKAVFAVGHSILVIAWHLLANECDYHDLGGDYFAQRNDADARKRYLIRQLEAMGQRVTVGSAA

SEQ ID NO: 508340 - protein, 391 aa, unidentified
MVCVGIDVAKDKHDCCILDSEGTPLVDCFTIPNNMDGFKSLLQTIQDCSQKSDKIKVGLEATGHYSYNILGFLLDNDLPVYVMNPLHTNLYRKSLSLRKTKTDRVDAKTIATMLLSDVDLKSYTDTAYHNEELKSLTRYRFDKVQECAKLKQSVSRLATILFPELEGLVSSIHGTSIYALLSEYPGAKQISEVHLTKLTNLLTTASKGRYGKEKAIQIREAARASIGSVIPAKSLELKHTIKLIQELASEIDEIEDSIQKIIDELNPPILSIPGMGVNSAAVILAEIGDFSNFSSPDKILAYAGCSPSTYQSGKLTNCYAHMEKRGSRYLRHALYNATKYVCYWNPVFAEYLAKKRAEGKHYNVALSHAMKKLVRLIYALQKSGKTYLTAA

SEQ ID NO: 508341 - protein, 349 aa, unidentified
MRRVGIDLALKAHHRATVFEDAVQVGKPFSVRRTAAGIDALVRRATSGTDQPCEFIMEPTGLAWLGLAAELERRGHHTYVPKAQKTHLLRKFLAQFAKTDTADAKAQALVRHVDPDGVYRLHVPSAAETTLRLCVKQRARLVVDVGRAKRRVLSWLILANPHLGDALGDDAFNQPGTAFLRRYIDPFAVQTLGIAKLRKDWATHARGVDGKRVAAVWEACEATCALYAELRAAGRLPFDYAVMQELVRQELERIEYLENQVAALDERIRATYRLVDPDRLLETEVPGIGAAIAPTIEAFVSDIDRFGSAKRFAAYFGIVPRTRQTGGQDGKPGQRLTKGGPGLRGCPTL

SEQ ID NO: 508342 - protein, 400 aa, unidentified
MNPVIGLDVAKGESQVQAFLKRKKPYKKSFKFEHHLQGLHAFYQFYQEVEQVSGQPPAVIFESTGHYHEPVLQFLEDQAITYYVINPVISYEARKTSLRKVKTDKIDAFHLGELYYKEDLEVFQRKNEQYLNLRQLTRQHSALTDSYVEIKLQFQAAVDHTFPEYHSVFSDLCGKLSLNTLLHYPTSAAIQEVSQQTLAMEMHQFGAKRSYAWFLDKAAQLKAAADRNPFQHPVCHGHVVSIQMYIQMLFQYQEHLSQLQKEIDALAKTFEDYDLVQSVPGIGEKIGATIISEIGGINLFERPKQLAAYAGLDPSVFESGKYKASINRITKRGSSRLRQALYSAVQCGLAKNRNKKLIGFYDRKRNEGKPHKVAVIACANKLVHWIHAMLKRQEVFVDQS

SEQ ID NO: 508343 - protein, 316 aa, unidentified
MDVHSKNYTLCAMEPVIGAEDRIFANIKVTADYKNILMFIENLKLKLGINDTYDIECGYEAGFLGYSLYNRLTEAGIKCVILAPTTMLTQQGQRIKTDTRDAKMIAQCLSYGGYHPVHIPTEEDDSVKEYLRMRGDHKLALKKIKQQINAFCLRHGYCYDKTKWTITHLTWLKQLDMSGLYRETLDEYLASYDEHTAKIERFDKRIEELSSQERYCEKVKKLGCFLGIRTHTALSLIVETGDFERFAKGNIYAAYLGLAPGERSSSDNINRLGITKAGNSHLRRLLIEAAGGICKCACRYWKTGCACCVWRTCTGN

SEQ ID NO: 508344 - protein, 414 aa, unidentified
MTEEETISWFAGVDWGSERHQVCLLDARGTTVGEREFPHSGEGLAELGDWLLSMASAASTVAVAIEVPHGPVVDALIDRGFVVYAINPKQLDRLRDRFSVAGAKDDRRDAYVQADSLRTDRRLFRRLQVADPRLIELRAWSRLAEELRAERVRLSNRVRHQLWRYYPQMLKLTDDLAAPWFLELWAIASTPAKAGRLRKSTVERLLKQHRIRRMDAETVLRILREPAIKVAEGVAEAASIHMRSLVARLRIVNRELREAERKLDELCTAISEIEQTSGEGLQRRDVAILRSMPGIGRINLGTLLSEASGPLSRRDYEGLRTLSGAAPVTKRSGKSLIVVRRYAAHVRLRDTVYHWARVASQRDPKCRARYTALRKRGHSHGRALRGVADRLLALACVLLQRQTLFDPCFGRSTA

SEQ ID NO: 508345 - protein, 337 aa, unidentified
MEHFAGLDVSMEETHVCVIDREGKVILEVRTPTVPKAIAAALAKGPAVERVLFETGRMAPTLFHGLTALGLPVVCAESRQAYQALRSLAAHKTDRNDARGLAHLARTGFFKPVHVKSLPSHAVRALIIARKKLVGQRVTLENQIRGLAVAFGVRLPRGLSPGFAENGMAVGRGIPGLDGAMRGLLAARDAILKAIVAIDADMKTLERSSAACRRLMTIPGVGRLTALAFAAAIDDPGRFRRSRDVGAYLGLVPRRYQSGEIDYTGSISKCGDGRLRTLLYEAANVMLTRYRGSLALKTWALDIARRSTMRKARVALARRLAVIMFAILKHGTEFEPA

SEQ ID NO: 508346 - protein, 415 aa, unidentified
MALKIVYKICCGIDVHKTFVVACIASTDNKGITSYESHRFSTYTSGLKDLLQWLLTRNCKDVCMESTGKYWIPVYNILESDCSIVLAHPKYVKAIRGKKTDKKDAKWIADLFKHDLVAGSFMPPADIRQLRDLMRYRFKLTCFKSSEKNRLQNCLTISNIQLGNVVSDTFGKSAQAILDKLLENPADTSFDLEPLVFRSLKKKLPELRDAIDGYITPEQAGKLKIIKAHYENLESRKAELEKLILALAAPYQQELAILQTAPGISSEFTAIGIISEIGTNMEAFPSAKHLCSWAGLTPTNNESAGKKKSVRVSKAGCYIKPLLVQCANAVVTSKKHPEMRNRYLRLRKRRGHKKAIIAIARMLLTALYHMLKNGENYNAELYQKSDLPPVDREITVEQALIITRNQGYKIKSATI

SEQ ID NO: 508347 - protein, 349 aa, unidentified
MKKIIIGIDISKEKIDASAIDVRNNQLGVLKLDYQAFENRPIGFRRMLVWARHLIKGVALDEVMFCCETTGGYDRCLCDYLFAKGLDIWRESSLQIKKSCGLRKGKDDKTDSLIIAEYAMRHMDKAVYYVSPSETVRELKALLLYRRKLEQEKTSKKVRVSELKATAAKSKSISFILRDAQKSIRILEKSIKDCEKQILALYDSDEELKKSYDHLTSIRGIGIVNASAMIAYTNNFKNITTSRKLSSYYGIAPFREQSGTSVNKKAMVKCYSNSMLRAYLTQAAENTIREHGIYHDYYRRLSERGKCHGIALNNVKNKLLHLSLSLIANDMDYEENHEVLRTIRKAKSA

SEQ ID NO: 508348 - protein, 354 aa, unidentified
MLAELVDHVIGVDPDRDWITVAALDSRTSGVITTDRFPATRDGYSDAIAWADAHTEESERAWVIEGTASYGRGLTMALQRRDELVIEFDRPMRKATKDGAKSDALDAIRAAREALGRDKLNQPRANDGIREAIRVHTVARAAAVRARTAAVNELKAFIVTADEQLRSELRGLRTNKIVTRCSRFRNGTTRPIDERCTRNAMRALARRIQHLEAEIADHDAAMKTLIDRAAPQLIAERGIGYVTAAAFYLAWSHPGRCHSEAAYARLGGTAPVEVTSGQSQDRHRINRGGDRQLNWALYFVAVTRQRCCPVTKDYMARRTSEGKTEREATRCLKRFIARRVWRLLEHPEIHLDNT

SEQ ID NO: 508349 - protein, 458 aa, unidentified
MQRQQRRSRRGAVPPKLRVHHPAAAGLDIGAEEIWACVPAESDARSVRAFGTFTPDLHALADWLAQCQVTTVAMESTGVYWIPIYEVLEARGFEVAVVNARHLQNVPGRKSDVQDCQWIQQLQSYGLLTASFRPAEEMRVLRAYLRQRAMLLEHRAGHIQHLQKAVQQMNVQLTQVLSDISGTTGVLIIRAIVAGERDPQVLARLRHGRCQRSEAEIAKALSGHYRPEHVFALKQALALYDFYTGQVQECDTYIEQHYAAIKPTYTEQTPPPPLGPDPKPNSHAKNAPAFAVRACLYRILGIDLTATDGLEASSAQVILSEIGTDMSKWPTEKHFASWLGLAPHNAISGGKGLRSKPLKGNRRAAQALRLAAQTLGRTQTALGSYYRRLRARKGPTQAITATAHKLARMLYHVLKHRTPYQPQSQETYEQHLRQRAIRHLKRTATRLGFTLLLQSVAA

SEQ ID NO: 508350 - protein, 338 aa, unidentified
MLHVGLDLHKKYSTVAVMDDDGNVQLEETLYHDDRPRLIEFFSKLAGKAVVTVEATRDWYWLYELLEELGVTVKLAHARKVRLIAEAWLKSDKVDPRSLAQLERTGFLPEAYISPREIRDNREYLRYRLTLVRLRTGLKNKVHALVDKLGIKHPFADLFCPAGRRFLSQLTLRPAYQEELTNYLALIEDIERRIVAATKEIKQQLKPDPRAELLMTIPGIGHLTAYLLLNEIGDIKRFPAPGKLCAYGGIVPIVRQSADHRWQGHITKEGNRYIRWALTESACKAPSKDYVLGCFYRRLKARRGNLKARVAVARKLLVAVWYVLTYGEPYKTTSSPTV

SEQ ID NO: 508351 - protein, 371 aa, unidentified
MNSVINIGIDVHKDSYSLCSYSFATNQAFGQTRIGSDNDLVIKYVRRLQKEQPDVEVLCGYEAGPTGYGLYRDLQKAGIGCVIIAPTTLPKASGNRIKNDRLDAMELSKHLAFGTYSAVHVPTAEDEAVKNFTRLRNTRVDALKKAKQNLLSFLLRVGRSFDGGKSYWTQAHYTWLKQQRFVDSVDQETFNEYLQEVHDQQDKVDRYNKRIEELSQLDAYREKVAKLCCFRGIETHTALSLISEVGDFSRFADAQQFSSYLGLVPGEDSSGQRERRGKITKAGNTRLRVLLVEGANATLRSSLYGQKSKRLKARQEGNELNVIAYADRANRRLHHVYHHLTIRGVNKNKATVAVARELSCFIWGMMNNKID

SEQ ID NO: 508352 - protein, 305 aa, unidentified
MKIHIGIDVSKLHLDLCQHQQACQIPNTEKAIRRWLKSLPPATVLVCEASGGYEALLVTLAHAAQRPIARLNARQVRDFAKAKGRLAKTDKLDAQLLVDFAETFHPEPLALPDPLQQELAALVKHRAHLLMQITQNNNLAETLADKKLLALIARTVAFLRKQVEQLETLMADKLAQSPNLSAKVQRLQQVQGIGTLTATALIALMPELGSLSDAQAAALAGVAPFNRDSGQHRGQRHIAGGRSQVRSVLYMAALVASRHNPVLKSLYLRLLANGKAKKLALTALMRKLIILANLLLKNPNFILAA

SEQ ID NO: 508353 - protein, 351 aa, unidentified
MEPQITALPKRYIGIDIHKRSWKVHCSTELFSGKSFSMSPDPGQLNKYISKHFPDHEVSVAYEAGCCGYHAHRCFEVYGWRSLVVNPADIHRKGKERHTKTDRIDAQLISRELKDGRLEGIVIPNVEREELRSLFRRRNDLVKDFRRIKSYIKMQLLYFGIREPEEFDNDHWSHRYRKWLDDMVFRYPTAKATLESRMRSFRFVDQELRDVSTQLRRYCKVHYKKDYMLLRSIPGIGGIVACGILCELGDLRRFNSVKHLAGYVGLAPGVHQSGGTYKTMGMTMRAHRLIRSYFVEAAWQAIRADPVMQAYYRRHIRKDTKRIIIKVARKLLSRTLAVIKTEIPYEIGVVA

SEQ ID NO: 508354 - protein, 345 aa, unidentified
MKKLTPAYVCLAVDLAKQVFQVAGEDAHGKIVYEERVKSRDAFSKLLKSLDPEVEVLMESGPGAQAWARQVQEQGGRVRILPAQRVAEHRSGAKNDRNDSLAILRAGRDKSVHAVPVKTVEALSMQAQHRVRSGYIGRQTEIGNQIRGLLLEQGISMAKSNAVLSSWVDRIQREDSYAIPAILREMIADLWAEWEHLAQRRERLDRQLEQTARSDETARRLMTIRGFGPIMATALVAKQARPERFPNGRQFAAYFGLVPDQHSSGSRVRLGRMTRRGDAYIRSLAVTGAQSVLHHVKADATEPDNKRLLRWMRQHGKKDAAIRLANRNLRIAWKVMTTHSEYRCQ

SEQ ID NO: 508355 - protein, 372 aa, unidentified
MREYTTDQIWVGLDVHQSSVTAAVLHGDSRKADVVTLPGDVNAVRKFFRHLSEEGAPRSCYEASGAGFVLKRMLDRDGFHCEVIAPSLIPRKPGDRRKTDRLDAVRLAELYRGGYLTPVRVPDEDQEAVRQLVRTRLSVQRHITRVKHRVVRVLASQGHRFTGTKSNWTQQHRAWLERMRRELAGPQRVVLSAHLDHLEYLESEQRSLDAEIERYSQMEPWRESVEALLCFRGIKTLTAMTLVTELGDIRRFRSPRGLMAYTGLVPTERSSGDVERRGPISKSGNAHLRRVLVEAAWHYRHRSRTDQRLVRRRQGQPSEVVAVAVKAQHRLNKRFWRLQERKHVNKTVTAVARELCGFVWAVLQVVARNQEA

SEQ ID NO: 508356 - protein, 389 aa, unidentified
MKIFVGIDIAKLNHFAAAISSDGEIILEPFKFTNDADGFQLLVSKLESFDKNSIIIGLESTAHYGDNLVRYLVTELYQVCVLNPIKTCQMRKNNIRKTKTDKVDTYIIAKTLMMQDNLRFVSFFDLDMMDLKALGRFRQKTIKQRTRLKIQLTTYVDQVFPEIQYFFKSGLHQHAVYALLKEAPSPKEIASMHMTHLANLLKVNSHGHFTKEQAKELRVLAQKSVGANDSAISIQITQTIQQIELLDSQLEKIEAEMTDIMKYNDSVIMTIPGIGYINGGMILGEIGDIHRFSNPNKLLAFAGLDPSVYQSGNFQAKTTHMSKRGSRVLRYALVNAAWNVVRNNATFKAYYDAKRAEGRTHYNALGHCAGKLVRVIWKMLTDNVAFNLE

SEQ ID NO: 508357 - protein, 389 aa, unidentified
MIEAMSNPHELASKMDRPSKVCVVSEAEEGSSSLGCGRNETCMEGQPITNSPHTGRFRMTEYIGIDVSKQSLELWDGTHEEEVPNEKGLKTLKKLLKKKYGTNWYEVRFVYEPTGPYSNYLRAFAAEHEVRVYEVNPKKSANFAKVLGNRSKTDVIDAQMLYSFRLLLKESEFSIPKTDEIAEQLGAYLGSYEMIQKTRTMLSNHVHALEYKSGVTRKLKDSLQRELGRLDAMEGQLENEMEAVAEDHEETREALHNLLSMNGVGVISAINLLYLFRKYPGANRNEITALAGLDPVRRQSGSSLNGGRKISRAGDPMLRKVLYLACMNGIQHNECMKAFYSHLLSDNHKKPKVALVACMRKLLLIAHHLYVTKSQYRTLEHEAEPCLSS

SEQ ID NO: 508358 - protein, 403 aa, unidentified
MNAVGIDVSKGKSMVSILRPYGEVVVSAHEVKHTSDEIKSLIQEIRSVEGETRIVMEYTGRYHEPIARLLSEAGLFVSAVNPKLIKDFGSDSLRKVKTDKADSVKIARYALDAWPKLRQYGAMDELRNQLKTMNRQFAYYMKQKTAMKNNLISLLDQTFPGANDFFDSPARSDGSQKWVDFVYTYWHVDCIRKMSLAAFTDHYQKWCSRKGYNFQPDKPKEIYEAIQNLIPVLPKDEMTKFIIHQAVDQVNTASKTVELLRSRMNEVASKLPEYPAVMAMKGVGPSLGPQLMAEIGDVTRFNKKGALTAFAGVDPGKNESGSYAQKSVRTSKRGSATLRKTLFQVMDCLIKTMPQGDPVYAFMDKKRSQGKPYYVYMTAGANKFLRVYYGRVNEYLASLEKDE

SEQ ID NO: 508359 - protein, 477 aa, unidentified
MVTARPSQLNRKQRKELARRLRVEDPGLTVMHPHAAGIDVGNSAHYVAVRPDRDPDSVRRFECFTADLHRLADWLVHCGVTTVAMQSTGVYWIPLYEILDARGLEVYLVNARHTKNLPGRKSDVQESQWLLKLHTYGLLRNSFHPPAEIRVVRTYWRQRGDHVHAVSTCIQRMQKALTQMNIQLANVISDLSGWTGQRIVRAMLAGERDPEKLAALSHPGIHATQQTIARSLEGTWQPDLLFVLQQEVAMYDAYLQRIAECDQALEQHLKGVADKVADTLSDAASQTPSRETRRSGPKRRRKAGSHAPQFDLGRELHRISGVDLTRIDGIDVGVAQTVISEVGLDMTRWKTEAHFASWLGLCPDNRITGGKVIRKGTRHVVNRAATALRLAATTLLRSQSYLGAQYRRLRARLGAPKAITAMAHKLARLVYRMLTWGHEYVDKGLRYYEERHREQQVQLLKQRASKLGLQLVAPEVA

SEQ ID NO: 508360 - protein, 343 aa, unidentified
MRKPPSTPLPASTIACLGIDVSKTHLDACLLTELATWHRARCKAANSPTGVAQLIQWMEAHVNGSIPVVMEATGPYGMLAAERFDNAGHRVSVVNAKRMKHFANAQGRRNKTDKADAEVIARFGLTQQLDQWRPLPAELSALRDLLRHVADVQAGVQAHRNRLEKLRHGQGPVAESLRRLIASGTNELKRLEAKVKDHLKDHPALEADCQRLETIPGIARKTSRLLVAEILRELKSSRAAAAWAGLTPRLNESGSQRKPSKIGPDGNQVLRKALYFPAVAAMRFSPRFKTFAQRLAQRGKSKMEIIIAVAHKLLRTAFSILKNQSTYDPTHQSIASRTSPQPA

SEQ ID NO: 508361 - protein, 334 aa, unidentified
MNKSDRVGIDVSKDWLDVERARECGEIEGARFENSGAGHRKLCRWLTKRGRTARVVVEATGAYHYKAVVALAGSKGVEVMVVNPMAVSAFGKALLQRAKTDTTSAHVLREFAQRMEFVRWVAPSRARSELRALSRRVEALTEMKAQEKNRLHAAQVDGEPGSVLKDIRTNIESLKRRVEQLRTQALKTIGEDQELQGAYTLLRTITGIGDASAISILAELERVSTDLDVRQWVAYAGLDPRPVESGTSVKMPRRISKVGNVHLRRALYMPALVAIRRNAQVKAFAEHLAHKGKSKLVVIVAVMRKLLHTIYGMLKHRVAFDPQKFYRTLPLVPA

SEQ ID NO: 508362 - protein, 355 aa, unidentified
MNHEKYIGLDVHAATISAAVMNAEGKLLMECVLETKAATILEFIQGLRGTLAVTFEEGTAGTWLHDLLKPHVRRLVVCDPRKNALMRDGNQNDRVDARNLAELLRTNQVKSVYHGNHGTRALKELGRSYLTLTQDSTRVMNRIKSVYRSWAIPCAGTSVYSARHRAQWLAQLVEPGVRIRAEHLYEQLDSLEPVRQAARRELLRESRKHAAVKLLRQIPSSGPIRSARLVALLQTPYRFRTKRQLWAYAGFAVQTYDSGEFRIVRGKLQRNRERITVRGLNRNHNHDLKNLLKGAATSALQRPGPLQDFYAALVEKGMRPSMARLTLARKIAAITLILWKKGVSFDPKQLPPQAA

SEQ ID NO: 508363 - protein, 331 aa, unidentified
MKNYLNSVGVDISKSFFDAVLFFSGEHEKFANDKKGFASFEKWLKKQGNHPENLLVCFENTGYYSTCLAIYLAEMHYDYVQEHPLQIKRSIGFRRGKSDKTDATDIARYAWLNRENLRLSKPPSKLLLTLQQTRTTRELLVKQMVAIKNQLKGLEVVGDRHIYGTAFKSLNRVLLTLKKQLLNLEDEIGNQVNQDEELSTKFNLCRSVTGVGLVLALEMIIHTQNFTGFNEWRKFAAYCGTVPYPYQSGTSIKGRARIHPSSNQKMKSLLTMASISALRVDPELRRYYKRRVEEGKPKMSVINMIRNKMLARIFSTVKRGTPFITMSKFAA

SEQ ID NO: 508364 - protein, 317 aa, unidentified
MFIGIDVAKHELVVATGVRGEVRTVRNDEAGVRTLAEELRALAPELIVLEATGGYEVFAVAALAAAQLPVVVLNPRQVRDFARATGQLAKTDRIDARLLALYGDRVRPPVRPLADEATRALDSVLTRRRQLLEMRTAESNRLQQLLGRGQRAVKQSLKKHIAYLDRELAMTETELGRLIRESPVWREREALLTSVPCIGHVVARSMLGGLPELGQLNRRAITKLVGIAPLNRDSGSWRGRRTIHGGRAPIRAVLYMAALVGTRCNPVLKAFYHRLLAAGKPKKVALIACMRKLLTIVNHMVRTGQHWQTPQHLSPQT

SEQ ID NO: 508365 - protein, 320 aa, unidentified
MRNAVGLDISKTTFDATAIIGGIEKSAKFDNDKKGFEQFKDWLDKLNSPDAHICMEATGNYYEGIADYMGSLYKVSVVNPLKISKYAESRFTRTKTDKQDAKLIAEYCQTAKAKDLVIRKPIIDDGYKLKRLSALYAQLTADSTAQKNRLEAAKDTFVVKICQSNIRHLQKQIKAVKKELEKLTRQPALKAQTERLATIPAIGRLTAVMLLNYLSGADFQTSNKFAAFAGLTPQIKDSGTSVRGKPSLTRYGNRRLRAMLFMPAMVAYRIKAFPDFIACLEAKNKPKKVIIAAIMRKLAVIAYHVHKKGEDYDPTRYKAA

SEQ ID NO: 508366 - protein, 370 aa, unidentified
MAVPGQKETRTFGTTTRDLLALLDWLKNAKCTHEAQESTGVYWKPIFNILEGDLTVLLVNAQHVKALPGRKTDVKDAEWIADLLQHGLLRPSFIPPAPQRELRELTRYRSSLVADRSRTINRLQKVLEDTNLKLASVVTDVTGVTARAILRAFLDGQTDPWELANLARGSLRGKQVQLAQAMVGTMKEHHRFLLRQQLTLIDVLDGQVAELDQEIAHRIAQDDERAEQACEAAFVESKLDGQRDTPEPELANQEQESQEASKGPDTTSAVIPDEGESQVKASRHGLEGYAKALERLDGIPGVNRRVAEIVLAEIGINMDQFPSDGHLASWAGICPGNTRQCRETSKWKNRQRQSVAESCPPRSRPWSRPQ

SEQ ID NO: 508367 - protein, 400 aa, unidentified
MYVGIDWAAESHDVCVVDTAGTIQGRATVAHSRDGFEELVGHLRRWAKHGEVLVGIERPEGRLVDRILEAGYPIVLIPTYAMKDLRRRYAVGGAKSDPGDSYVIADVVRTDGHRLRRLEPLSPETRALRSVVRARDDLVDQRVALSNQIRACLETYWPGAAVIFADVASEICLAFLERYPTPEAAARLSDVRLQSFLKKAGYSGRRSPAELLERLRAAPEGIRGVEAEARADAVRAMVRVMRSLPRSIKDLDRAVVAHLGEHPDAEVFTSLPRSGQINAAQMLAEWGDCREAYPDPDSVAMLGGLCPVTHASGKHRDVSFRWACNKRLRVALTAFADNSRHASPWAADIYRRAIARGCDHPHAVRILARAWVRVIWRCWQDRKPYNPALHRAATHLEEAA

SEQ ID NO: 508368 - protein, 340 aa, unidentified
MHATIIGLDLAKNVFQLHAEDRSGKVLWKRRLRREELEAFLRKQPPALIGMEACGSAHHWARVFTAMGHEVRLMHAKYVKAYVKRGKSDVRDAEAICEAVQRSSMRFVPIKSVEQQIDRSLERARDLLVKQRTQLMNARRALLAELGIVARAGLRGFTTLADKIAAGDAVIPRPSLTALKPLVEQWRALQASIDELEARLVARAHSDERMRRLMKIPGVGPLTAHAVVTAIGDPKRFSTGRDFAAWAGLTPLTDSSAEKTRIGHISRQGDHSLRRLMVLGAVNMARHARAKPCEANAWLNGVIARRPVKVAMVAQAAKTARIAWALLCSGENYRGRTAAA

SEQ ID NO: 508369 - protein, 343 aa, unidentified
MTVIIGVDPHKATHTAVAVDQAEQELDRVLVRATRRQLEQLQRWAQPFGDRVWAIESAGGLGYLLAQQLVGAGERVVDVPATLASRVRLLGTGRSDKNDPNDARSVAIAALRAPRLAEVQPADHAAVLRLLAKRNLDLSRERNRTANRLHVVLCELVPGGIAKELTVSRAVSLLETVEPAMAVDQARYEMARELLDDVRRLDAKKKEMNHRIASAVDASGTTVTEVFCAGPVVACLVLGYTGDVTRFRDRHHFAAYNGTAPVEMSSAGRRVHRLSRRGNRVLNYAVHIVAVGQIRQAHSEGRAFYDRKVKEGKTNREALRALKRRISDAIYRQLVIDAARTHS

SEQ ID NO: 508370 - protein, 315 aa, unidentified
MQAGKLIVGADVAKAELVIHHDDRDEIIKVKNTKPEIKKWLKQQPLNTAIAVEATNVYHLDLVELAHSLGFEVYVIDGFQLSNYRKSVGVRVKTDPTDARLLSRFLRNEGEDLRPWTPPPAVYGKLQSLLRRRAALVTARTAMTQSWANEALLKAAFTTFVKSIDRLDLLIQKKIKEVLREAGLHEQVARCQAVEGIGFLTATALVMAFMRGEFKSSDSYIAFLGMDLRVIDSGQKNGRRRLTKRGCSEIRRLLHNAAMSASRTATWKGIYEQHRNAGKATTQALVILARKLARVAFALMKNQDEYVSKGGKPAC

SEQ ID NO: 508371 - protein, 419 aa, unidentified
MKNSKTKNLKTVNERTLIVTIDIGKSVHHGYFRAPGGQDITPFPFYNGQKSYEDFWAKIVTFKQKNNLEEIVVGFESTGPYAEPLMNFLAKKPVKLVQVNPMHTKRLKELTGNSPNKTDTKDPRVIADVISLGHALTVVVPKGPAAELRRLTQARQRASKNRTALVNQLHHLMYVVFPEYTQVMKKITSKSSLYLLNNHTSPEEIVELGFANLQVILKKVSLGRMNHSKAKALFEAARNTTGIDEGRESLITEIRHLVSCIERESQFMDHLENQMSQYLNQIPYSRSILSIKGIGEITTAGLIGEVGDFRQFKTISEIMKLAGLDLYEISSGKHYGQRHISKRGRSYLRKLLFFIAINTIRTSGIMHERYLGMVDRGMPKVKAVVAISRKLLRIIFALVRNHSTYIENYDHLSCLKLAA

SEQ ID NO: 508372 - protein, 457 aa, unidentified
MGDDVLVSVDPHKASNTLAVMDPVTKTVIARQRFMNTAVGYRRLREFAGGWTHRRWAVEGCHGAGRSLAQRLAGDGEIVLDVPAKLAARVRVYSQGHGRKTDADDAISIGLAALNSTRVAVVRRDDTLVSLRLLCDRRDELGGLRTQAVCRLHRLLCELTPGGTHRGLRASRAEQLLAKLRPVDPVDVVRCQLAHQHLDDIRALDAKMTAVRAQIVTLVDVTGTRLTELYGIGPIIAGRILAEVERIDRFPSRHHFASYNGTAPIDASSGEQVRHRLSRAGNRRLNHALHMMAVTQIRQPETIGRRYYERKRLEGKTPKEAMRCLKRRLSDVVYWQLVADRRATITQCGSATTPTRTRPTSTSATTPVPRTAPPRRPPHPTVSTGSSHSTGKTAASSASKSSTPAVGSPKTSSTKQKTRAEATRKPRTSSAAVPDRRPTSAAAAGVKAGAATRRARP

SEQ ID NO: 508373 - protein, 326 aa, unidentified
MAIIGIDVSKLKLDCLWLRDLSLRKVKSKIHPNTPQGHQALLAWSIQQTGEAVASLHFIMEATGIYHEALAYALHEAGARVSVVNPAQMHDHARSLGTRTKTDKKDSWVIAHYGATQQPRQWQPEPDEVRHLKALIARYEAVKQDIQRELNRLEKARITRVSDAVLTSIETVHRQLDAEKIRLQSLIDEHIDQHPQLKQDRTLLESIPGVGPIIAQLMVAVIRSRGFTTASQCAAFLGLVPVQHESGSSVHGRSHLSKAGNAQIRAKLYMAAIVAKQCNPDIKRQYDRLLRNGKSRMSAIGAAMRKLVQICFGVLKHQTPYLPQTH

SEQ ID NO: 508374 - protein, 440 aa, unidentified
MKVVYQTCCGVDVHKSFLVATIIKTTSGVQPSYQKKRFSTFNNSILEFKKWLLDNSCRDICMESTGKYWIPVFNLLEDEINVTIANPKWVKAVKGNKDDTKDSKWIGDLFRLGLVPGSYIPCKEIRILREFTRYRYKLTSCRSSEKNRFQNALTVCNVALDSVVSDIFGKSATSVIDYLLEQSDNSINHEEISSRLLRSLKKKSESVIESIEGYQMTDSQKYRMRLVHAHMDYITSTIADIDSMINSLVEPYNNAVKLLCTIPGVDCNSAVTIISEIGTDMTQFSNSKRLCCWAGLTPGNNESAGKKKSVRITRAGVYLKPALVQVAHAAVKSDKSPYYKAKYERIMKRRGKKRAIIAIARMILTAAYQMLSTGEVWNPIDLYKIDMPAPLKEKQKEKAIKQAKKLFNRRGHCYRGATRLVKVLVKNQLCLKRLFLDSLF

SEQ ID NO: 508375 - protein, 280 aa, unidentified
MNATTVAVDLAKSVFEVAVADSNWKIVERARLTRTQFERFFANREVALVVMEACGSAHHWARRLTALGIEARLLPAQYVRAYVKRNKTDAADAAALLEAARASDITAVKVKSVEQQSLQALHRTRSLWMGTRTARINALRGFCREFGIAITLGARSGIEQIARLLADANSALPALLRGTMKLLIEEIRLLEARIGQLERELGELARQSPACKTLLSIPGIGLLSATALVAATSGSVAHFKSARQFASWFGLTPKEYSSGSTRTLGRISKRGDRYLRMLLG

SEQ ID NO: 508376 - protein, 342 aa, unidentified
MINITGVVAVLGIDLAKQVFALHGVDRSGRVVLKQVISRSTLMRVIAQLQPCLIGLEACSGAHEWARQFQGHGHTVKLIAPAFVAPYRKSGKNDDNDAEAICEAVSRPSMRFVPVKTREQQALLSLHRVRQGFVEERTAVINRVRGLLAEFGLVFAQRHGGLRAIPTALEGLPLLARRAVDDLLAHLRQINERIAAYDVEFKHLANQDDAAKRIMTIPGVGPITALGMVATLGHARDFKNGRQLAAWLGLTPKQHSSGGKTRLGGVTKRGDDYLRTLLVQGARATMQHASRAEPTRLSRWASNLVERRGYHKANIALAAKNARIVWALLARGGEFEAKAAAA

SEQ ID NO: 508377 - protein, 344 aa, unidentified
MGEAVTIGLDLAKSVFQVHGVDQAGEVVIRRQLKRAKVLDFFAKLPRCLVGMEACAAAHYWGRELRRLGHDARLMPPRYVKPYVKRQKNDAADAEAICEAVTRPSMRFVEIKTVEQQSVMVLHRVRQTLMRQRIQLSNAIRGHMGEFGLVAPIGRGGLARLIAVIGKEEDDRLPSDVRSSLRFLVDQLELVNVQVLENDRRIRTSARAIETGRRLMEIPGVGPVLASAIVAAVPDPKAFKSGRNLAAWLGLVPKQNSSGGKERLGGITKQGDRYLRQLLVIGSLAVIRFAKRHGTKRPRLVQLLARRSPMIAAVALANKIARMIWAMMISGERYREPQVAAAAA

SEQ ID NO: 508378 - protein, 366 aa, unidentified
MKKISTVQVFGNEIFKEQKLTIGVDLGDRWSFYCVLDEAGKIILEQKVSTTPEAMKQTFSRMPQSRIALETGTHSPWASRLLRELEHEVIVAHAQKVQLITKSNRKDDRHDARTLARLARIDPELLGPVRHRSAKAQIHLTIIRARAELVSARTALVNAARGLVKSYGERLPKCGTQQVSRELAAALSTELRDVLEPLLKEIESLNERVKEYDERMEKIAKEVYPEVSLLQQVKGVGTQIALTYVLTIEDPHRFLKSREVGCFLGLQPGRRNSGESEPQKGISKAGDRYLRTMMVQGAHYILGPFGEDSDLRRWGRKLVERRGKNAKKRAVVAVARKLAILLHRLWVSGEVYEPLRNSQKAMRAVA

SEQ ID NO: 508379 - protein, 408 aa, unidentified
MNQLFVGIDVGSRGNTAYLMRPDGEKHSNFTVQNNRGGAKILIDKIVSALTTMGLEQVVIGMEATGIYGDNLVYALREDGALGRFQRKIHVLNPKQVSKFKESYSDLPKNDDVDAFVIADKLRFGRITKEVYMDDYRYKALQTLTRARFYAVQDLTREKQRFANYLFLKCSGLAQDKDIANSSATTIALMERFETVDELAYADLDELAAFVNTAGHGRFSDPQATAKAVQAAARSSYRLPKTVNDSVNQAMAVCTATMRALEKQIKVLDKQIEQIFAVIPNTLTSVPGIGKVYSAGIIAEIGDINRFQSQASVAKYAGLVWKQHQSGEFEAQNTRLIKSGNRFLRYYLLEAANSVRRCDSEFRRYYDLKYKQVNKYQHKRALALTARKLVRLVFRLLKDGRNYIPPEG

SEQ ID NO: 508380 - protein, 385 aa, unidentified
MNTQNFIAHEFDIFGGLDVDKKSIAVTFMNQRGILRSFSMPNRTDHLLNYVGKQFQGKKIAFAYEAGPTGWGLYDKLTAEGYPCVVAAPSMIPKVRGQRVKTNRLDSVRLSEDLRGGQLKSVHVPSESYRQLRQLVQLRDTFVKEIVATKLRIKALLLFEGLEFPKAPAGSQWSLIVRGKLKKLSCSPAVRFKLDQLMESLESTEKRALNTIKEIRRFYRQDPELCQAMALLKTIPGIGEIVASHVLARIGDPQQITNVRQLAGFIGLVPTEHSTGDRVARGAITRSGDGRLRSKLIQAAWSAIRQDPELREFYRSVYHRHPRDRGARKAIVAVARKLTTRIYAVLKQQRPYVVREMVHSAPLTQEETSPQGTTQRLAEPGDTFS

SEQ ID NO: 508381 - protein, 411 aa, unidentified
MRLFVGDDWAQDHHDIEVMDEAGTVLAKRRLPEGVAGMAQLHELIGAHLGEDAADAEVVIGIETDRGPWVAALAAAGYAVFPVNPLQAARYRDRHQVSGAKSDAGDAHVLADMVRTDSHQLRPAAGDSPQAEGVKVLARTHKTLIWERARQVQRLRHQLREYFPAALQAFEDLDAPDALELLAKAPDPARAAKLTRAQVAAALKRARRRHAADKATAILAALRGEQLGQPPALTAAYAAAVRALIAVITTLNEQVSVLEGQVGEHFGRHPDAEIYRSQPGPGPVLGARVLAEFGDGPHRYADGKARKNYAGTSPITRASGKRKVVAARFVHNDRLIDALMAQAFSALRVSPGARACYDAHRDKGLEHNDALRRVANRLVGILHGCLKTRTRYDEATAWGHRENPGQSPAAA

SEQ ID NO: 508382 - protein, 316 aa, unidentified
MSAKESQPFIGIDVCKELLEVAAHERDYRFRCPNKPSAFPKLITELVALRPALIVLEATGGWETRVTTALHAAGLPVVVINPRQVRNFARAVGQLAKTDRLDARVLAHFAAAVKPPIRELKSQHEQELDALSGRRRQLVGMLTAEKNRHGSAATDTVQEKIKEHIDWLEEQIAELDEQLQGLLKCSPAWRAKDRILQSVPGIGSVVSVSLLAELPELGTLNRHQISKLVGVAPLNRDSGPLRGTRHIYGGRTRVRSMLYMAALSATRFNPVIKEFYQRLVAKGKPFKVAITACMRRLIVIINVMIRDSVTWKLKQA

SEQ ID NO: 508383 - protein, 329 aa, unidentified
MEPTPTPTPTPPATASFVGIDVSKAQLDVSIDGVAPFLIERTDAGLAERVGRLASTRPTLVVMQATGGLEVLAAAARAGLAVAVAVIDPRQARDFARATGRLAKADALDAWVLAHFARAIRPEPRPLPDETTRERDGLRDRRRRRVGMRVMEPQRLGPAAGRVRRDLEAHLKWLDEHIEQIDEELGQRIRSRPVWRERDDLPRSIEGIGEVASRTLPAASPELGTLTDRRAAASVGLAPMADDSGTHRGARRVTGGRKAVGAVLDMAAQSAWRFDPPPREFADRLAAAGKAPKVELIAVARKLRVVAHAVLRTKTPWDPNFAKEIAASS

SEQ ID NO: 508384 - protein, 351 aa, unidentified
MKKVAYLAIDVHAGHCFLGHIDIDGTFLGNRRFPTSEQHIIEALKGVKAKEKYLALEESNLAYWAAQVARPYVTEVICSDPKENALIYRSSNKRDKVDTHKLCRLLRLGELKRVYHAENDERAIFKAAVQHYIDLRDQQVVLKNKIKAMYRHWGVIDVAGQAVYGIKRRHDYLQRVKHLHIRNQLHRLYCLMDETESMQKRALKAMKQLGRKYPEIKQFKKMPGIGEIHSHTFDAFIQTPHRFANKRKLWRYCRLGITDRSSDGKPLGFKRLDRSGVSELKSLSYQAWLCAMRSDNEVSRFYSESFRRTSNRVHARLNTQRKILAVMYGMWKTGEAYRSELFLDSPQMSVV

SEQ ID NO: 508385 - protein, 364 aa, unidentified
MYDSTTTVAVGLDVHARSIRLAAVRADELLEERTLPYDEDAVERLLRRWPSVRCCYEAGPTGFGLYRHLVGHGIDCSVVAPGLVPQRPGDRVKTDPRDARKLARLLAGGLLEPIHVPSPEFEAARDLVRAREDARLDRMRDRHRLSKFCLRHGRLLPTSSWTVVRRKWLGEQRFEHACEQLTFDTYVHAVDLVDARIDKLEQAIRETAEQEPWRELVGRLRCLRGIDTLTALALVTEIGDFNRFRSAAEFMAFVGLVPSEHSSGEKRRQGSITKVGNSHARRLLVESAWHARRRPKVGYELARRQRGQDAVVIERAWRCQQRLYQRWQRMAGRSKPHQKIVVACARELAGFVWAIATDQPLRSL

SEQ ID NO: 508386 - protein, 338 aa, unidentified
MNPEQLIGAHSRPRMTSQGPLIMSHFDRFVGIDISKNRLDIYCHPDGLAFCVANTSDGIGRLLAKAGGGGVAFGCEATGGYEDLLLVTLSQAGTPGYCLHPADIRAFARLKGKRAKTDALDAKAIAEALVAAVTARKPVVRTKDQSIIKELTALRRTLIISLSELKSLKARMSAAVAAKTIATLIATNLRAIKTIEAAILQAIKDNPDARHKALQILSAPGAGPVLAAELIGAMPELGTLTSRQAASLVGVAPHPRQSGERKRSGKCQGGRPKIRRVLYMAALSVIKAKRQPLCAFYEKLRANGKPFKVAIVAIMRKLIVTLNAMIKTDMSWREIHST

SEQ ID NO: 508387 - protein, 341 aa, unidentified
MKRWIGVDLHKTQFTVCYLYKNGEHKIEVFKVDAKSIEAFKNVLNKSDEVAVESTGNTGYFAREIKSKVKAVRIINPTQFKIISASVKKTDEHDAVTIARYLSKGLIPEVRMRTKEESQIASLIGTRDKFVKLRSSLKNKIHNILNANGIVTKREVFGSEKGLNKVLALDVEDSYQFELKIIVEQIRSLNKSIDEIGKELTEKGKKLDGHKSITSLTGIGDISATILLNTIGDVNDFADDKKIAAYFGIVPRIAVSNETSHYGKITKMGNKIARTALVQSTLIAIKYNPYLRKFYFRLKAKKGSGKAIIATARKFLTIIYRTLKNKWVFEDFNKFKLAPSI

SEQ ID NO: 508388 - protein, 346 aa, unidentified
MEYIAMDVHKKYTWARVENTQGDRLYESRLAHSHGTIKNFVSRWTAGSPVAVETVGNWYWVVDEIEAGGGKPQLVNARLAKLMMGMVNKSDKLDAKGMNRLQRTGTLPTVWIPPSSVRDARELPRTRMVLSKQRTQLKNRVHATLGKYGFVVEEVSDAFGKKGRQIVAQLMAKLPPHTEQALGRVLDQLDHVCANLKWIEEKMMEVFAPCPQTTWLKTLPGVGDILAVVIWTEIGTIERFGRAEQLASYCGLVARENSSGGKIRFGAVRRDVNVYLKWAFVEAANSALLNAERCGYHHISRLYQRIKPRRGHGKAKVAVARHLSEASFWMLKKGDSYREPMSSTQR

SEQ ID NO: 508389 - protein, 338 aa, unidentified
MYYTGIDLHKFTSYLTTVDSAGVIVKQNDIKNVNHNFVQYFASIPGQHLVTVESTMTWYWLNDLLTSINIPMVLAHAKYVKAIAYAKVKTDKVDSHTLAQLLRMDYIPVAHKISNEKRTLRDALRARLKIVQRHTSITNSMQLLLAKYNYDSPTELTGIPEFQYQQLSEVEELLNEQMLDLEKQLYPFLIPNDDIQRLLWIPGIGKMNAFTILLEVDDINRFPDVKNFFSYCRLVPSARNSGGKSKQRSSKDGNKYLKVAFSDAAIHAVQYYPVIRKYHNSLLRKKNKNIAKTIIAKEIAEIVYHVLKNKSNFNNTFRGQELEHKKSLQWPRVVNPYV

SEQ ID NO: 508390 - protein, 343 aa, unidentified
MERYVGMDVSLKETSICVVDGKGEIVSEGTVTSEPAAIAAFIKTKAVGAKRIGLETGPTTTWLWHELRALGLPVICIDARHAKAALSMQINKSDRNDAVGLARIMQAGWYKEVQVKRLSCHEIRAVLNSRAQLVKIKRDIENQIRGLLKNLGLRIGKAGGKVFHRRAEELVGEHRLLQEAVRPLLAVREIVCREIASLTRKLLALARDNDESRRLMTVPGIGAINALAFCAAIDEPTRFQRSRSVGAYFGLTPRRHASGEVDWTGRISKCGDAMVRTYLFEAAGVLLTRVPHWCRLKAWGLRLVKRIGFKKARVAVARKLAVILHRMWRDGTDFIWSSKEAAA

SEQ ID NO: 508391 - protein, 370 aa, unidentified
MAQPTPIFVGLDVHKDSIAVAHAQGECADPPVFVGAIGPRQADLHKLIRRLQAKTSNLVFAYEAGPCGYGLHRYLTGQGFSCQVVAPSLIPKKPGDKVKTDRRDAVDLARLLRSGDLTRVYVPTVEDEAIRDLCRARDAARLTLKNAKLRLKAFLLRLGLHYVGRADWTDAHRRYLAKVVCPTATQQIVFQESVRAVDEQVDRLHRLEAELLERGPAWRLYPVVQALQALRGVQWLVAITVVAELGDLTRFDSPRQLAAFVGLIPSEYSSGPARRQGGITKAGNGRARRALIEGAWAYRYPAKVSEHIQRRIDGLPKPIQDIGWKAQVRLCKRFRRLTARGKHPNVAVTAIARELIAFMWAIAKEVPVTA

SEQ ID NO: 508392 - protein, 377 aa, unidentified
MQMEVTMNSLIHIGIDVHKDTYSLCSYSFRTSQAFGQTKIGSDNKLVIKYVEKLLKSHPEAEVLCGYEAGPTGFGLYRDLHKANIPCVVMAPTSLPRAVGNRVKTDRLDALELAKHLAYGTYSAVRVPTSEDEAVKDFTRLRNTRQQALKKAKQNLLSFLLRRQRRYTEGSTYWTKTHHRWLKQQKFTDPLDQETYNEYLQELYDQEEKVERYDARIEELSRLDAYRERVEKLRCFKGIDTHTALSLVCEIGDFSRFATAAQFSAYLGLVPSENSSGQRERRGGITKGGNIRLRTLLIEAANGAIRGNLYGAKSKKLKARQAGNTAQVIAYADRAQRRLHRTYSKLVLNSVPRNKAIVAVARELSCFIWGMMNDRID

SEQ ID NO: 508393 - protein, 337 aa, unidentified
MKRYLGVDLHRTQFTVCTRLENGRTYLRQWPMRELKLFAAQLRKDDEIAVEATGNTRLFHDAVIEHVARVAVVNPAQFKVISQSVKKTDKNDAELLALYLAKDLLPEVRMKEPNQRNMAHLAQTRDLLVKQRSALKAKINNLLSAEGINLKKEALSSNKALDRVLAIPLSPIVAAEARVLVAQIRSLTGSIAELEELIEEEGPKLAGHENLMSIKGIGPVSAAVLLSAIGRIDDFDNPGKLAAYFGLVPRVQNSNETERSGRITKQGNKLARTALVQCVLIAKRYSSFLQQFYQRIQRRRGGGKANIALARKFLGVIYYTLKNNWVFEDFPNFVLAS

SEQ ID NO: 508394 - protein, 395 aa, unidentified
MFIVGIDIAKRSHEAIIIAEDGQVVHKAFSFRNNCTGYNLLLEQVRRLTLVKSQIVFAMESTAHYWLALYARLLKDGYAVMVLNPIQSHSLRELYIRKAKTDARDSLIIADLVRFGRCKASNVPQDKILALRELCRSRAYLVDMAADLKRKLIALLDRIFPEYESLFDSVFSKASIAVLSKYSTPQKVKNANLGKLTDLLMESSNGHFGEWKAHQLKEAACSSFGIDDSGGVYSTLLGMFLEQILSLTAQADSLEKQISVFFQEFNNPLTSIPGVGTVLAATILSEIGDITRFSSADKLLAYAGLDPSVKQSGEFKSNQNRMSKRGSPYLRRAIWLASTVAVHRDPMFQTYYEKKISEGLHYMNVIGHVSRKMTAVIFAVLRDGQPYQPILQSAG

SEQ ID NO: 508395 - protein, 407 aa, unidentified
MSINCGIDWAEVHHNVALVDENGTVVARKRIDTGTAGLTALLEVIAESGGAPGTTPIAIETDKNLLLVALVEAGFTVYPINPRAVARYRERHGQAGGQSDPGDAAILANILRTDRAMHRPMPAISEHGRAIKALARQHQEAIWALYQTISRLRSVLLEFYPVALQAFPNLKHRAAVAVLSAAPTPASGRALTRRKVVALLHHSGRRNDPNLVERILRELKTPALRQPPQVEEELGHAVTGLLAVIASMQQSVDSLEDALGRELDSHPLAPVLRSAPGLGPILAARVLAEVGDDPARFATANGLRAFAGTAPITRASGRAHYVKARKVRNKRLGDACHWWAFVTLTKSAGARAHYDKRRAAGDHHNAALRNLANKLLGRMWWYLQHNEPWDDHAAWPDHQIPSQPAAA

SEQ ID NO: 508396 - protein, 315 aa, unidentified
MTDGSMFIGIDVAKAHLDVAVRPDGDTWQAANDASGIAALVAHLDQLRPTLVVLEAIGGYERPVTASLVAAGVPVAVVNPRQIRDFAKATGKLAKTDTLDAHVLAHFADAVRPTPRPLPDADTQRLAAILGRRRQVVAMLTAEQNRLHTAPTTIRERIGAHIVWLEEDLKEIDTALAQAIADDPTWRERDALLRSVPGVGPVLAVTLLAELPQLGALTRHQVAALAGVAPLNRDSGTRRGIRTVWGGRARVRGALYMAALVATRYNPVIRAFYARLCAAGKPKKVALTACMRKLLTILNALLAHHTPWQSSPSTT

SEQ ID NO: 508397 - protein, 338 aa, unidentified
MAIVYVGIDLAKNVFAVHGVDEAGKPALVRPSVPRARLHELIASLAPCTVAMEACTGAHHWARLFAAHGHTVRLIAPKFVTPYRMSGARGKTDAADAAAICEAVQRANMRFVPLKSEQQQGQLMVHRARQGYVQARTACINRVRGLLAEFGHVLPLKADTVRRQAAALLEDLPGWANTVIGDLLSELHRLDERVAVYDRHIAQLAREDERARQVMRLSGVGATTATAVVAMIGNGHEFKCGRQFAAWLGLTPGQYSSGGKTRLGRITKAGDGYLRSLLILGARAVLARAKANSDGISNWALALQQRRGYWRAVVAIAAKNARMAWAVLRKGENFKMPA

SEQ ID NO: 508398 - protein, 347 aa, unidentified
MSVTNIVTIGIDLGKNTFHVVGLDAMGAITLRKKRSRNQLEQSLANVPCCLIGMEACAGAHHIGRRLEKLGHQVRLLPAQYVKPYLKGHKNDFRDAEAIAEAVQRPTMRFVPLKSAEQLDLQALHRVRSRLVTQRTAVINQIRGFLLERGLPVRQGAAALRLALPQLLSMLSDNLSPRVVQLIQDLAEDWRYLDRRVASVTKEIDALVDQDAHCRRLMTAPGVGPIISSAMIAAIGTGDAFHKGRDFAAWLGLVPKQFSTGDRTILGRISRRGNRYLRTLFIQGARAVLLRRQTWPRHGFGAWLEAASKRLHSNVLVVALAAKLARMAWSMLAKGHDYDANFLGQTA

SEQ ID NO: 508399 - protein, 343 aa, unidentified
MESYVGLDVSLKRTSICVVDRTGKVLCEGTVNSAPEAIVEFVKSKAAGAVRIGLETGPTSTWLWTEIKALGLPVICIDARHAKAVLKMQINKSDRNDAFGIARIMQCGWYKEVRAKGLDSHAMRALLESRALLVKMKRDLENQIRGLLKNLGLIIATARGQAFHARVQELVAGKPFLAVAVLPLLETRNGIVRQIADLDREVLILARNDDQVRLFMTVPGIGPITALCYRATIDEPSRFKRSRSVGAYVGLTTRRYASGEVDWTGRISKCGDAMLRSYLFEAAGVLLTRVQKWCALKAWGMRLAKRVGLRKAKVAVARKLAVILHRMWIDGTEFQWSADKVVA

SEQ ID NO: 508400 - protein, 428 aa, unidentified
MNDSEIIRHQQFCQFKEQIRGSSEHLIIGIDVAKEKHHAFMGTANGKSLLRRLIFENNYEGFGKLMTHAEAVKVQNGLPLSVFGMEPTGNYHKPLGSYLINGGHQVVLVAGQAVKNNRILLDGRWDKHDTKCAANVADLVSQGKCLFYDSPPEAIVELRSLLSLRRRLKKEEHSLRMRIRNSLLAKHFPEMDRYFGRCLSENLSIVYWCMDPKKIAEMDLGRFFQLVTTHERGLAQQRRLKAIWQAAAASIGCTVDRASQFEAQVLVEKILQVQKEIKDTQQLIETISQQFMEYHLLLTIPGFGPYVASLVLAVIGDAWRFGSAKQVLKMAGFDLSAERSGKSSKKAVPVISKKGNAALRYGVYQAAFIASTRNIDFVEYYTDTLRGRERERGIKTKMRVKLAAKMLVIAWTLMKKKEEFNPDYLKQN

SEQ ID NO: 508401 - protein, 424 aa, unidentified
MAGVVIGIDPHKGSHTAVALDVHEKQLGRLRVRASSRQVDGLLEWASGWPRRRWAIEGARGLGQLLAQQLIASGERVLDVPPKLAARVRLLDSGQINKNDPNDARSVAVAALRAHELPELAAEDHAMVMRVWARRYHDLARLRTQVVCRLHAVVCELVPGGVRKYLRASQATDVLDRIVADSPVAQAKLELARELVADLERIDAQRREAKGRTARAVAATRTSINDVYGVGPIVAGTVLGYVRDIRRFPTRDRFASYNGTAPIEVSSGDRKIYRLSRRGNRQLNHAIHMAAISQIRHHDSEGRAYYEKKIAEGMTGKTALRALKRKISDALYARMIDDARRLAAKDPGGHTGNDSASSAAGSHPETPALRKSHSRATANSKTGTGQRPLTLRPAPDRRRTSRRAAGVQVEPRPGPHRGRRQDRP

SEQ ID NO: 508402 - protein, 334 aa, unidentified
MKKLKEITESIGIDVSKATLDVFIHTKKQHKQFLNNKKGFVAVLKWIKSEKIDLEETIWCFEHTGWYCILLSHFMYSHKLYYCCVNPMEIKRSMGLKRSKTDKQDAEEIARYAWLRRNELESSEPMPLNLVELQRLMSLREQLVKQTTALKNLSKGFKVTVEKESSDFGLKTIKQTLKTLELQIKKVEQEMRDLIKQEGDMYHNFRMSKSVKGVGDIMAIQMLLHTHNYKRFGTWREFSSYCGLVPYPYQSGTSINRKPTTHSISDQKMKSLLTMSAISAIQADKELKQYFKKRVEEGKPKMVVLNIIRNKIVSRIFATVKRGTPYVEMYKFAA

SEQ ID NO: 508403 - protein, 430 aa, unidentified
MEASIATTGAVTAYIGIDWADQKHAIALRSAAEPNKIEHQLIDQKPEALMEWIGGLEQRFGCQGKILVCLEQSRGALIYHLMGYEFFELYPVNPLQLARFRETFSPGGAKDDRPDAELLCELLCCHRERLRALKPDSVLGRKLNFFNQDRREAVDQRNRLSNAIKSQLKVYFPLALELLDSDTSTALAADLLLRWPTLEAIQKQRAPTLRKFFYGHNCRGEQRMLKRLELVQKAKPLTQDSAVIEPAALRVQILAHQLKNLLPDIARYDDKIAQLFEAHPDRFLFENLPGAGEALAPRLASAFGSDPQRWESALEIATLSGIAPVRRASGMKSGKKGQRKASVQFRQACPKFLRQSFHEFAGCSIRYCSWAKAHYDALRARGKGHHAAVRSVAFKWIRILFACWKQRTPYDPQRYLLALQHRGSPLANAC

SEQ ID NO: 508404 - protein, 365 aa, unidentified
MWEAPVKLQRTSVGLDVHARSVLGCGLDGDTGEVFQRRLCPDHGEIVAWLGELPGPVAVTYEAGPTGFGLARALTAAGIACEVAAPSKLIRPAGDRVKTDARDAAHLARLLHLGQITAVTVPSASQEAARDLVRARDDCRTDLMTARHRVSKLLLRQGIVYSAGKAWTRDHERWLEAQRFDDPALQLSYEAAFDAMLACLGRRARLDDAITAMAADSEFTPVVHRLGCIRGVATLTAFGLAVEIGDWHRLSGRSIGAYVGLVPSEYSSGDTRTQGGVTKTGNGHVRRLLVEAAWHHRTPYRPGAELRRRWDLASPAARARGQAANRRLHSRWASFDARQKRPVIANVAIARELAGWCWSLAVMPD

SEQ ID NO: 508405 - protein, 386 aa, unidentified
MQKLNDLSRSLTALEPNGTLIAVIEMSLSSWLVAGIVPGVERQPLKKLAVDESALLKLLHRWREEAEKAGRRIERIAVAFEAGRDGFWLARWLKARGIEAYVIHASSVAVSREHRRAKTDRLDTELLKRSFLGWLRGERDHCKMVEIPTMQDEDAKRPNREHDSLIGERSRIVNRMKAALVRLGIRGFNPKLKRATTRLDGLHTPEGEPIPPNALAELRRDMERRRLVNNQIRQIEEERLERIEQAPCDGAHVMVRLLARVMGVGIETADMLVHEVLSRNMRDRRAVARYAGLTGSPDESGRKRREKGLARSGNARVRRGMIQLAWRFLLHQKNSALTKWFRSRTENARGTRKPMIVALARKLLIALWRLMREGIVPDGVVLRPAQ

SEQ ID NO: 508406 - protein, 360 aa, unidentified
MQTQRTELNFEGQNFYVGIDVHLKTWTVSIMSEHLMLKTFTQPAQPDKLLNYLVRNYPGGNYHSVYEAGFSGFWSHYKLKEMGINNIVINPADVPTTQKEHLLKDDPTDSRKLARSLHSGVLRAIYVPEPLTMEDRSLVRTRSALVKDMGRYKSRIKSQLNLYGITYPEEFEKSGTHWSKRFLKWLNGTDFFQSDTGALSLRVKVQEAEQQRQLILDTTRAIRKMSQGEKYASNMKLLTTIPGVGLITAITFLTEIENIERFTNSDHFAGFIGLIPNRHSSGAKESTGEMTFRGHENIKKMLIESSWIAARCDPALTLSYHKYTRRMESNKAIVKIARKLLNRIFYVLTFKKEYVPCVVK

SEQ ID NO: 508407 - protein, 362 aa, unidentified
MTDAITWVGLDAHKQFINVAMRMAGSTEFLEWKVANEPRAVKRLAKKLVREAKGSEVRCCYEAGPCGYALQRQMMEAAPLVVEVIAPALIPRKPGDRVKTDRRDARKLCELLQAGLLTEVRAPTEEDEALRDLSRCREDLTQDLMRARHRLGKLLLRRNIRYSGTKAWTRKHRDWLRSLSLENAALKAVFDDYLLAVTQIEERINTVDAQIETAATQDAHREPIAWLRCFRGIDMVTAFGIYSELYDFRRFESPRKLMGYLGITPSEHSSSGKPNRGAITKTGNGHVRRLLVEAAQHYRHRPSVGMKLRKRREDQPGGWWPSPRKLSIGYIAAITAWSFVALPRTRRRSRWPASSLASSGLP

SEQ ID NO: 508408 - protein, 331 aa, unidentified
MIKKTAHFAGIDVGAEELLLVVRKNATSMKAQKFANTPAERARLVAKLVKLPGVSVCLEATGAYHLELAVALHDAGVRLNVVNPKAAHNFAKALMKHSKTDAIDADTLAQYAERMPFTVWVRPSPQALTLRSFARRINALTRQKAMTKNHLHALSFGPDLPKAVLDDAKLAIAQLEKRLAHLSSKAQAFIGKHEDLKRIFTLLLGIKGIAETSAIALMGELLLLPKALTHKQWVKYAGLDPRAFDSGKSVHKAPRLSKAGNRHIRQALYMPALSAKQHDPYVKAFFQHLIEKGKKPLQALCAVMRKLLHAIHGMLRDNQPFDNTRFYATAA

SEQ ID NO: 508409 - protein, 373 aa, unidentified
MTATSKGAWDVRTIGAERPDTEPAVILGVDTHLDFHVAVTVDGLGRRLGESSAPTTAKGYEGLLCWAEGFGPLRCAGVEGTSSYGAGLARHLRASGIEVLEVERPERRRRSPRRNLEKSDSSDAEAAARAVLAGEASGVPKSGDGRVEMIRALRAARRSAVKARTQAANQLQALRVTAPEELRRRLRGLSTKELVSVAARFRLGDDPHDVPTATKFALRSVARRYEALSAEIAELEAHLERLVAHVAPELVSLPGIGTDSAATLLIVAGDNPQRLGSEASFANLCGVAPIEASSGKVVRHRLNRGGNREANRALYMICLARMRRDQRTQEYVARRTQEGKSKREIIRCLKRYVAREAYRVLVSCGARTSPTGP

SEQ ID NO: 508410 - protein, 337 aa, unidentified
MLIIGCDFHASFQQVAIFDNQTGKDEEKRLGHREEAEAFYRGLAGQAVRVGMEACGHYPWFERLLAECGHQLWLGDAARIRASEVRQQKTDRRDAALLLRLLREERFPRIWVPSLEERDVRQLLMHRHKQVQARTRVKNQLQALARSQGLQKRRQLWSEAGRVELEKLELLPYATLRRERLLALLQALEAEIGALNRHVEAEVKGRPEALRLMTHPGVGAVTALALVLTLGPAERFGSARQVASYFGLIPSEHSSGGRQQLGRITKQGSSFLRFLLVEAGQSAARGDAELGRFYRRLAMRKHRALAKVAVARKLALRLYLMLRQDWTYAQLCKAVCR

SEQ ID NO: 508411 - protein, 346 aa, unidentified
MNYIGMDTHITTLDLAVVNEAGRITKAACIPTSIRELMNFVRQIPRPRTIYMEEGTLAAWMLENCSQHGEKLVITDPKENHWIGSSGQKQDPLDARKLALLARGGYIKEIPHPLGQRRRFRELLQAYHDTVKMTTRFKNKIKAKFRENGIQCNGDTVYQKAHWEEWKQKLPQDATLQLILEGLWHQFKQSEQSEEEILRAAKDLSKNYAEIKHFEALPGIGFISAATVSAILGTPHRFANKRTVWMYAGLGLMKKSSGGKLYSEKLTNDYNRLLKYTLKQAAMAAIQSRDNPFRQKYLDLTLTKGIAPHRAKLTVARELLVTMWAMWKKGEKYQPEIRSKENHKQE

SEQ ID NO: 508412 - protein, 429 aa, unidentified
MRTESTPGARGPVFCGVDTHADSHWLCVLDWRGRKVLSRQFPADAAGYEALAGAIAAAGEPACVAMEGTSSYGAGLTRHLASLGMPVREALSPARMQRRRPGQGKCDEADAERAARAAMSGSKLGTPKSQDGRVDGVRCMLAARSGAVKARTSAINTARSLLTTAPERLRSRFRGMGGPRLMEELPSVRAEGALGAALGALADLWEAARDAALDMERAIEASLEENCPALLAMYGCGPVSAAKLAVAAGDNPGRLRSEASFAAICGACPIPASSGKTVRHRLNRGGDRQANSALHEIARQRVMRDPETAEYAERARGRGKSDREVMRCLKRYVAREAYRALMHPHEIRRPADASALVAARRAARVSQVRAASILGTSEKYISMLERGQRELKPIRRAYEAWVEAGLPLDWDRQAFEAERKMDSKKHLAK

SEQ ID NO: 508413 - protein, 408 aa, unidentified
MEVLYARCCGIDVHKESLVACLRQQDGRRPHADVQSFGTTTVEILRLHAWLSAAACTHVAMESTGVYWQPVFNLLEGSFGVVLANAHHIKAVPGRKTDVKDCEWLADLLAHGLIRASFIPPAPIRELRDLTRHRKNLIRDRVKAANRVHKLLEGANIKLGNVVSDVFGVSGRAMLNALVAGETDPTRLASLARGSLTPKVKQLAETLRGRFTAHHGFLLGQILTQLDQLAALVASCDARITDLAHPFATQIQRLQTVVGIGRRSAEVLVSEIGVDMSRFATSAHLASWARICPGTHESAGKRRSAGTGTGNNWLRTTLLESAWAASHSRGSYLGAQYRRISKRRGPKRAAIAVAHSILVIAYHILRDKVAFADLGADHFDRMNSTNARRYHLRRLEELGCDVSKVTAA

SEQ ID NO: 508414 - protein, 398 aa, unidentified
MKTSGLDVHKDSIFCAIYDGKSYSSVKEFSTTTVSIRELRSYLQSERVKKVAMESTSTYWVSVWDILWEMGFDLKLVNPLHIKQMPGRKSDSKDAQWIAELLHKNMLRGSLVPSPLIQELRTYTREYRTLVNQRTKVLTQMDRILVMCGIRLSSCISNIDSKSFMQVVEALIRGETNPDVLLRLVYANRKNKESGKLKECLTGNIKAHHCLKLNTCKQQFDLFESQIQLYLNEMQKLCDEHFSEEISNLTTLPGVSQISAMVIVAETGGDMSVFENSGKFTGWTGLRPRNDESAGKFKSTATTKGNKHLRAIIVQVAWAASRTKGSFFMDKFTKLAIRKSRNKALVAIGRKMLVIMWHILSEKTQYNPLLVHIYDPVKVEHKIKYHEREIEKAKKLIS

SEQ ID NO: 508415 - protein, 385 aa, unidentified
MQKLNDLSRSLAPLNPDSTLIAVIEMSQSSWLVAGIVPGIERHPLKKLEPNEGELLRLLMRWRAEATKVDCTITRIAVAYEAGRDGFWLARWLRARDIETYVIHPTSVAVSREHRRAKTDRLDTGLLKRVFTGWLRGEPDHCHMAAIPTLAEEDAKRPNREREGIVRERTRIVNRMKSCLARFGVRNFKPTLRKTPERLATLVTPEGVHLPPNTLLELRRDMARLRFVMDQIKEVEQARAQRLERTPQDKTHAMVRLVARVIGVGIETADMLVHEILSRSLRDRRAVARYAGLTGAPDESGSKRREKGLAKAGNARVRRGMIQLAWRFLIFQKDSQLAQWYRTRTERGGKKRKTMIVALARKLLIALWRLVTTGEVPAGVVLRAA

SEQ ID NO: 508416 - protein, 403 aa, unidentified
MAKQRKSTFERLKRGAMNRQQRRDLGRRLASSHPGLTIVHSNAGGIDVGNESHFVAVPPDRDTNPVQEFGCWTADLKRMAAWLSACRIDTVAMQATGVYSIPLYDILTGHSIRVVLVNAQHTKNVPGRKSDVQECQWLMKLHTYGLLRDSFRLEERMESVRTIWRLRDRHVKDASRAVQHMQKALTKMNIQLANVLSDITGVSGQAIIAAILKGERDPWKLADLKHEMVKASPDEVARSLEGNWRDDLLFELQQAVDSYDFAHQQMRDWDRQLKSFLASLPVRTLDRASQSGDAPVATTPQEKKARKKPKARRNDPTIDLKAELKRICGVDLTSIDGIDVITAQTVLSEVGTDMSGFQTENHFASWLGLTPSKDISGEKSLQQGREKCKTGLLWHSAWRPRHY

SEQ ID NO: 508417 - protein, 360 aa, unidentified
MFRERTSVGLDVHARSVVAAAIDGQTGEVFKARLTPSHAEVLEWIGRLPGPCAVVYESGPTGFGLARALSAAGLRCEVAASSKLHRRAGDRVKTDARDALHLVRLLRLDEIVPVRIPSPAEEAARDLVRARGASRQDLMRSRHRVSKLLLRHGIVYSGSKAWTALHDRWLRQRRFDSAATQAAFDDAYETVVLAAARRARLDEKITALAGDSEFTPLVRRLACLRGIATLTGFALAVEIGDWDRFTGASIGAYLGLVPSEHSSGQSRVLGGITKTGNAHVRRLLVEAAWHHRTTYHPGVVLQRRWDQAPAAARARGHAGNQRLHARWVNLNLRKKRPVIANVAVARELAGWCWSLAVMPD

SEQ ID NO: 508418 - protein, 405 aa, unidentified
MQHKDCPVLARGRAVVGIDVGKNKHAAFAVDHQGEKLASLAAFANDRAGVDRLEAVVLQVAGPPAKTLFALEATGHYWMPLYHELVRRGYEGVVLNPIQTHGEARTRIRKTKTDHKDAEGIARFILTGKAHAARIPDEATEELRIMTRRLHQLVQMKGNVERAAHSLVDRAFPEYSGCFSRPFLPSARKLIREVGLTPERIANEPDGVRDLLRRAGRGRLTDTTINDLICRAQTSIGIGRAGVAVNEELSATVDLIDDLDGQIGMLDLRLATLMEERKSPLMSLGIGTSLAATIHAESDPASDFPSARQYAAYAGLEPDTFQSGAMTGTKAHISKRGSPHLRHALYQTAFVIYRRHDYFHRIYKRFRKKKHLHTDALVVVARHVAMVAWRMLVDNRPFGKRPPKK

SEQ ID NO: 508419 - protein, 355 aa, unidentified
MNDAKYIGMDVHQATISAAVRDSSGNLVMEATLETKAETILEFVHGLRGSLRVSFEEGTCASWLHDLLKPHVTEVLVCDSRKNALLRVGNKNDREDARKLSELLFLNKLHPVYHGETGIRTLKELARSYLTITRDLTRVMNRLKAIYRGWGIACAGQQVYAPRYRAEWLAKITESGVRRRAEIYYQQFDVLAALRQEVRRDLLAESRKHPAMRLLRQIPSIGPIRAALLIALMQTPHRFRTKRQLWAYCGLALRTYDSGEYRFVGGQLKRSKKAVTIRGLNKNHNHDLKNIFKGAATRAAATAGPFQNFYEARVASGMKPPMARLTLARKIAAITLLVWKKGVRFDAEQLKQQAA

SEQ ID NO: 508420 - protein, 350 aa, unidentified
MPRKNSTEPIATIGIDIGKNTFHLIGLDEKGAIVVQTKLSRNQLGRRLANVPYCLIGMEACSGAHHIGRMLEELGHDVRLIPAQYVKPFLKGHKNDYRDAEAIAEAVQRPTMRFVRIKTPQQMDLLALHRVRSRLVSQRTGVINQIRGFLIERGIAVAKGPRSLRKVLPDILGSCDDVLSPRIVLLIETLCEDWRRLDDWIEEITDEIELLANEDAGCLRLMTVPGIGPTISSAIVAAVGDASGFACGRDLSAWLGMVPRQMSTGDRTILGRISKRGNRYVRTLLVQAAHIILVRRPHTAGQGLWDWIEAASKRLHRNTLVIALANKLARIAWAVLARGADYQPKGLGHR

SEQ ID NO: 508421 - protein, 461 aa, unidentified
MSGKRRKKAANEQPVWSVNLDVVHPNAAGIDIGNESHYVAVPPDRDAQPVRQFACFTEALQQMAAWLKSCGIDTVAMQSTGVYWLPVYEILTDQGLQVFLVNARHTKNLPGRKTDVQECQWLLQLHTFGLLNNSFRPPEEICVLRAYWRQRAEHVISASACIQRMQKVLTEMNVQLANVISDISGLTGLTIIQAILDGERDRYKLAALADVRIQASREDIARSLEGNWRKELLFILQQELNLYQVYQEQIAECDTALAAHLQTLEDKVEPGSEPPVAKAGKKAGSNTPTSFDLRGELYRISGTDLTQIDGINIMNAQTIIAEVGIDMSRFPSEAHFASFLGLCPDNQITGGKVFRRSTRHVENRAATALRMAATSLWRSKTYLGAKFRRLRARLGAPKAITAMAHMLARLVYRMLRFGEQYVDKGMKYYEEKYREHEIRSIQKKAKDLGLVVTLTATTAAG

SEQ ID NO: 508422 - protein, 341 aa, unidentified
MNVKTIGIDLAKNVFQIHGVDEHGKRLFNKQLRRAQMASFFANIPPCLIGMEACASAHFWANKLISMGHNVKLMAPQFVKPYVKTNKHDAADAEAICEAVTRPNMRFVPVKTAEQQAVLALHRSRQSFIKQRTAQANQIRGLLAEFGIVVPRGIQQLQRRLPELVEDADNPLPVLFRTQLSLLQHHMAYLFDVIATLDKQIEQCYWQNALCQRIGKIPGIGPVTASALIATIGKANNFENGRQLAAWLGLVPRQHSSGGKQVLLGISKRGDTYLRTLLIHGARAVLQSAKHKQDAVSSWANQLMARRNNNIASVALANKNARTVWALLAKEREYCAPIISA

SEQ ID NO: 508423 - protein, 423 aa, unidentified
MDVLVERCGGLDVHKDVVVAHIRFPGPDGERLSATASFSAFTEDLLALRDWLVAHGVTRVGMEATGVYWKPVFYVLEEAVECWLLNARHMRNVPGRKTDMADAEWICRLVEHGLVRPSFVPPPPIRELRELTRYRKTRIEERTREGQRLDKVLQDAGVKLSSVASDVLGRSSRAMLEALVGGSRDAEALADLARGRLRRKIPDLKAALTSRFAAHHAVLIGEILAHLDYLDESIERLSAEIDRVISPFAHQRDRLTTIPGGDKRVAEAIIAEIGVDMSRFPTAAHLASWAGMCPGQHESAGKSRKGTSRPGDSWLQRHLALAAMAASRTKGTYLAAQYQHLLLGPRKTGKKRARKAVGHSILVAVWHILTNDVAWNDLGEDYFSRRQSPEHQARRKLADLRKIGWTIHPNEDGTSTLVPPAAA

SEQ ID NO: 508424 - protein, 351 aa, unidentified
MYYAGLDLHKKYFTLCVLTSEGQVVADHRRLPAALEPLTTTLRQLDGPVTVTIEATLQWAWLHDRLAEAGIPVVVAHPQQVKLISQARCKTDPIDARKLAELTRASLLPAIWVPTPEIRAWRQLLRGRAALVRWRTRAKNRIHGALAAENLRVAATDLFGAAGRAWLATAPVTPATRREITVQLAMIAALDGQIASYDGEVKRLAKHPDARRLMTIPGIGPFGAALLVAEIGTITRFHSAAELAAYAGLVPSTRSSGDKTSHGGVGVMNNHWLKWILIEAVQTLKQRPGPVQFHYERLLRAKGKPKATVAAARKLALYIYWMWHDDLEYPTWLQAEAKRVGCSMQSLASPA

SEQ ID NO: 508425 - protein, 356 aa, unidentified
MEPIKTDCVGCDAHRRYSVFVVMDERGHTGKETRVEHSRELYRHFLSTLPPGSPIALESIGNWYWMIEEMERAGHQPILAHAKKAKLMMGLTNKTDKLDARGLALLLRNGTLPSVWIPPGELRDQRELPRMRMVFARIRTMLKNRIQSTLAKYGIQIDQVSDLFGVTGRGLLQNRLNELPPETQRSIQEHLKLLDGVLEQIEGTEKRIKELIKETPQMQLLMSLPGVGPILAIVIILEIGDIERFPGAPQLASYAGTVPQVRSSGGKTYYGKVRPDVNRYLKWAFIEAANSIVLNQSRMPNRHVVQLYHRIMKRKGHPKAIVAVARHLAEATYWMLTKNEAYREPTSSRWISPTQK

SEQ ID NO: 508426 - protein, 358 aa, unidentified
MEHHILKVALGVDVSKDNLAVCLCRLTVNLTKEFEDPFEVSNDLPGFKKLIRWLDKQVASRENLWIVMESTGIYHEAFVYYLYEAGFNVSVMQSGRVKRYAQSLDQRSKTDALDSRMLAMLGCERALPLWTPPDPILRELKGLSRERSFLLKEKQIEKNRLHASEHSVYNNKRELRRYKQRLKLIARQLEEIEKEMTELINASSYLKGRIKHLESIPGISFVSAATVVGETLGFTGFTNAKQLTSYAGFDVVLKESGAYKGKTRISKKGNKNIRRALYMPAMTAVRCNPTLKKFYERVKPTKAKPMIALVAVERKLLVLMYSLWKNEINYDPEYEQKKTARTEVLAAQDRSNLALTSS

SEQ ID NO: 508427 - protein, 320 aa, unidentified
MSATTATKVYAGVDVSKRRLEVFVAPTGERLSVPNDDSGVDELLARLDEPSPTLVVLEATGGFERPVAAALVASGLAVAVVNPRQARDFARATGRLAKTDRIDAESLARFAEAVRPAPRDIPDEEARALGEILARRRQLVGMLTAEKNRLVTATARRVKKRIEAHLRWLEKELTRAERDLEEAIEESPAWRENEELLRGVPGVGPVLARTLLAELPELGALKNKQLAALVGVAPLNRDSGIFRGRRAIWGGRSEVRATLYMGALVATRCNPDVKVFYERLLAAGKAKKVALVACMRKLLVILNAMLRNRTPWRPSHALTP

SEQ ID NO: 508428 - protein, 435 aa, unidentified
MEEVTDEPLYRDRVCGIDIGKAQMVATIRVPSDKDPARRMAETRSFGTTRKEVLALADWLRCWQVPAVVMEATGDYWKGPLYRLEAEGFECVLADAKQVKNLPGRPKRDPADSRWLAACFERGAVTSCFVATPEFRVIRLHTRYRRDLIEERTREKQRAEKLLESAAIKLSSVVSELHGVTGRDIMDQLIAGERNPKVLAQLARTRARRKISQLEEALEGAEFFTDEHAGLLKVMLERIDRISEEIARLSEVIERLLAPYEEQVAQAESMPGWGHRAAQDAIAETGVDMSRFPTGAHLSSWAGRSPLDNQSGKRNRRAKSKKGNRYLAGLLGETAIAAGRTQTREGARYRRLARRRGKLKAQVAVGNTQLKVSRKLLSNPGMRYQDLGPDYYERRRDIRRQIAHHVGKLGGLGFEVTLCRIPEPEPDGPASTQTA

SEQ ID NO: 508429 - protein, 455 aa, unidentified
MAQRNRAFSRAGIEVTHPNAAGVDVGGATPYAAVRRDIDEPVRSFNGDTADLNALADWFEQCGETIVAMESTGVYWILRYEVLERRGFEVLRVNAREVKNVSGRKSDVLDCQWIQPLLTFGLLRGAFRPADPMGALRRLCRQRARLLRGQGRYVQPMQKAMTLMNLPLSHAISDVAGVTGQKIVRAIVAGERDPQVLAAYRDGRIKATEEAIAASLLGNWRDEHLFALKQALGAFDFCASQLAECDAEVERAMTLLHAHPGRPAARGRRSTNRNAPKFDVREHLFKVCGVDLTRIDGIDVTTAMTIFSEIGVDMSRFQTVKHFTSWLGLCPGTKISGGKRLGSASKRSHNRATQAFKRAAAALRSSRSALGAYYHRLCARMDKGKAVTAAAHKLARMVYLMLTRGQDYVDQGQQYDEERYRERVVRGLAKRAADLGMQLVPVTVPARIQQYQSIT

SEQ ID NO: 508430 - protein, 407 aa, unidentified
MMRTIIGIDVSKNKANVAVVTDLVVVKELTISLDLLGFNELKHAVFQFNEKAEIVFEATGVYSRRLEYFLQQAGLNYHILNPLAAKNRIATGSRLRKNDQRDARRLAITEFTEQLEPYLLAYKQNPIYRELTDMNRYYDQLNEDKKRARNRAHRVLQLVFASFGASKGSFNFDTKLAWELLTLFPHAQIVREIGDLNALEARISAAHFKGMGARRIHDAARKLWKLAAQNGDAVPVTSDNTRQMEALAEQVLALEAAQDQQVVRMMTLGKSLPEFTLLQTIPGIGGSTAIRLISELGDIRRFDTRQQLNSYVSLDTTEIDSGDHQSARHITKHGNPHARRILYWTVILMLNPKMGNNHIRDAYEKRREASSSKKKLIVRQMDRLIKTILYLIKTNQPYSYELSPQSK

SEQ ID NO: 508431 - protein, 404 aa, unidentified
MIFVGDDWAEDHHDIHVMDADGTRLAWRRLPEGLAGVSGFHEVVAAHVAEPSQVVIGIETDRGLWVQALGAAGYQVYAVNPLAVARYRDRHQVSGAKSDAGDAKLLADLVRTDRHNHRPMAGDSSEAEAIKVLARGHQNLIWARTRHTNALRSALREYYPGALEAFDDLHDRDALAVLGRAPTPTEAAHLSLAKIRSALKRAGRQRNLDTRAQEIAAALRTEQLAAPAAITAAFAATTRAAVGIIIELNRQIADLEAELATHFEAHPDADIYLSLPGLGVILGARVLGEFGDDPNRYTTAKCRKNYAGTSPLTVASGKKRAVLARHIRNRRLYDAIDQWALCALTNSPGARAYYDQHRAADDSHHQALRALGNRLVGILHGCLRHHTAYNENTAWAHRQITQAA

SEQ ID NO: 508432 - protein, 319 aa, unidentified
MTTSAIVVGMDVAKDRLDVAVRPSGEVWSAANDEAGVTALVARLRPLNPALIVCEATGGFERAAIAALAAAGLPVVVANPRQVRDFARATGQLAKTDQLDAGILALFAERVRPTPRPLPDAAAQLLDAVLTRRRQLLEMLVAEKNRLGFAPKPLHRGIQAHIRWLERQLDDVTKELAELIEASPVWRAKDDLLQSVPGVGPIVSSTLLGELPELGTLSHKQIAALVGVAPLARDSGTLRGKRMIWGGRASVRTALFMAAMCGRRWNPTLQVFYDRLKAAGKPTKVALIACARKLLTILNAMVRQNTYWRGSSLKLQYSC

SEQ ID NO: 508433 - protein, 355 aa, unidentified
MERYIGIDVHAASCTLAVISEKGRKLRDFPVETNGQALVEAVRMIPGHKHLVLEEGLQSAWLYETLSPHVDELVVAGITQSRGQKSDKRDAYGLAEKLRVGNLDKPVFKSPRQFTRLRELSRIHMTLVGDVVRGQSRIKSLYRSRGIFVSGVNVYGVRHREEWQQRLCFSAQTRATRLYDHLDFLLEQKKRAEVDLLREAKKHPIVRVLETAPGFGPIRAARLVPIVVTPHRFRTKRQFWSYCGLGIVTRSSSDWIQAADGGWIRTRVPQTRGLSRQHNHFLKSLLKGPATTEITQLSKDPIHARYERLLDGGTKPTLAKLSLARMIAATVLRMWKDEEEYDPGRGGPSTVTRKG

SEQ ID NO: 508434 - protein, 416 aa, unidentified
MPTIEFLGSIALSSAQSGPILLRQDGGLHFCEGSEGMTLKPWGKVVQAKNHLPPKELLSMLSSNVKYIGLDVHKEAVAIAVLNSAGKLVMESVVETKASTLLDFLRGLRGELHVTLEEGTWAAWLYDVLRPHVVELVVCNPRRNALLKEGSKSDKVDARKLAELLRSGMLRAVYHGEHGLGILRELARGYLTVGKDQRRVMIRLKALYRSWGITCSGKQVYTPRHREQWLNKITQPGVRRRAELMYQQLDGLSAVRHTVRGELLAESRKHEATKILRQIPLIGPLRATLLLALMQTPHRFRSKRQLWTYSGLAVETHDSAQHRYVDGQLQRSKKPQQVRGLNQNHNHEMKEIFKSTAMSASRCAGPLQDFYEGLLAKGMKPDMARLTLARKIAAITLTLWKKGECFDAEHLKSQSA

SEQ ID NO: 508435 - protein, 346 aa, unidentified
MMLIGCDFHPSWQQVSWLDVETGETGEQKLVHAGGEAKQFYEQLAAPVLIGMEATGNSQWFIELVEDLGHEIWIGDAAQIRASYVRNQKTDKRDAAHILKLLVEGRFPRLWTPDREQRDLRQLVLHRHKLVLIRSRVKNELQHLSLNKGMQRKRRLWSQAGQQLLRELPLKKWAACRREDLLGLLTMLDEQIGKLDGAVEHAAEENPQSKLLMTQPGVGPNTALAFVLTIGDVGRFPRGKQVASYLGLIPREESSGGRQKLGAITKQGNRMLRSLLVEAAQVAVVHDPGLRKQYRHRCHQKPKAVAKVAVARKLAVRLYWMLRTNVAYPEIVRIESSSGLPLVGAS

SEQ ID NO: 508436 - protein, 415 aa, unidentified
MEVIHGRCAGMDVSKKDAKVCVRVAGAGRRKTVETVRTWGATTNQVLALRDHLIAEQVSLVVMEATSDYWKPFYYLLEDLTGVEVMLVNARQVKNMPGRKTDVTDAVWLAQLGAHGLVRASFVPPAPIRELRDLTRTRTMVTRERGREIQRLEKLLEDAGIKLSSVASDITGVSGRLMLQALIDGHRDPAELADLAKRRLRHKIPELTEALTGRFNGHHAFLARIHLESIDQRTRQIAELDHRIDQAMAPFRSFADLICSIPGIGRQTAEVVVAETGADMTVFPSPKHLASWAGVCPGSNESAGRVKSTRTRPGNPYLKAALGTAALSIAATRGSFLAAKYKRLAARRGGKKALVAIEHTILNAIWTMGNTGAYYDDPGSDYYLRHDPERVRRNATKQLERLGYTVTLTSTAASA

SEQ ID NO: 508437 - protein, 467 aa, unidentified
MPRVRAHPQRRGPAVTLPRELQQVNLNAAGVDIGAESHYVAVPEGRDADGQDVRAFGAFTADLAAVADWLTRCGVETVAMESTGVYWIPLFELLTERGFEVLLVDPRRLKYVPGRKTDVLDCQWIQQLHTFGLLAGAFRPTDQICVLRSYLRQRAMLVTYAAHHIQHVQKALEQMHLKLAHVVSDIAGLTGLAIIRAILAGERDPRVLAQLRDRRCKADEATLARALEGTWRPEHLFALRQAVELLDFYRGQIATCDAEIEAQLGRFEDKSGGQPLNAAARGRKAGRTALSFDARPPLQRLTGVDLTRIEGIDAATALKVVAEIGLDMTRWPTDKHFASWLGLAPGNKVSGGKRLSGRTKPSASRAAAALRLAASTLHHSRSALGAFYRRLKGRLGAPKAITATAHKLARLIYSMLRFGTEYVDRGQDYYERRYQSRVVSQLMRRAQELGYTLTKTADISPPAGSPA

SEQ ID NO: 508438 - protein, 415 aa, unidentified
MIPAVVERCAGIDVGKKTRAVCVMTGAASEEPQAELRKFGTVRAELIRLREWLKSAGCTHVVMESTGCYWKPILNVLEDDPEFQLHIIVANSQQVKAITGHKTDPHDARWLAHLLRHGMIRPSFIPSRAVRDLRDLTRRRKQMIETGSEERNRIQRVLEDANVKIGDVLSDVFGLSGQLMLEALLEGKATHLEIAQLAKRGARKKISELEAALEGHQMRNTHRVLISNALRHMAFLEREIEQLDGEIASLVRDAGLEQQWQLLQTIPGIRETAAATILAESGGDMKQFPAPSNFSSWSGVAPGNNESAGVRRRAPTVRGNPHMKAALVESGWSASRTKNSEFQCNYERLKPRIGHRRAIVAAAHSLALVIYQVLDTAQPYEPRRPGFRPREVNRLRRHHSRRLRNLDKWLREDVV

SEQ ID NO: 508439 - protein, 307 aa, unidentified
MDVASDHLDVAVHGQPTVRRFANTIQGIAQLLRMVPPSSVLGLESTGRYHTQLAMAAHAAGLCVHVLNPLDARRYAQSVGQRGKTDRMDALVLARYICHEHAHLQQWQPPTACQAALRELLAHRATLVRQRSALAQAGCHNKALARLDEPVLAAMQQAIAQIDEQLASTVQADPASQEAFEYITSVPGLGLVCGSLLVMLFGRMQTRSADAVIAFTGLDPRPNDSGKKTGQRRLSKRGWPEIRRLMYTAAMSAARTKTWNSFYRAQRDKGMSTTAALVVLARKLLRVAFSLFKKRVKFDATLVAASA

SEQ ID NO: 508440 - protein, 366 aa, unidentified
MKKTSTVRVNGNMIFKGHKLTIGLDLGDRWSFYCVLDEAGQIILEQKLPTTPEAMKQTFGKIPRSLIALETGTHSPWVSRLLTQLGHEVIVAHAQKVQWITKSSRKDDRHDARTLARLARIDPELLGPVRHRSVQAQLHLTVIRARAELVSARTALVNAARGLVKSYGQRLPKCGTYQVSRELAAALSTELRDVLEPLFKEIESLNEHIKEYDERVEKIAKEVYPEVSLLKQVKGVGTQIALTYVLTIEDPYRFPKSRQVGCFLGLRPGRRNSGESEPQKGISKEGDRYLRTMMVQGAHYILGPFGEDSDLRRWGLQLAERGGKNAKKRAVVAVARKLAVLLHRLWVGGEVYEPLRNSQKVMREVA

SEQ ID NO: 508441 - protein, 418 aa, unidentified
MDLDEVVYRVACGLDVHFTFVTACLVTTGPKGKPKVEERRFPTNQRGLKSLHEWLTENGCEAVGMEATGVYWMPVYAALEGACTLVVGNPQHMKNARGHKTDRMDARWIAGQVRHGRIRSSFVPPPEFREARRLARCRRQLVEARTSIRNEIQRLLAEVGITLAGVVSDVFGTSGTSILNALSEGKCVRDELSIHLYSSLRKKDKMASIAAALEAPLPEISRQLLAIHLRRIEALDGNIDEVEALLFRQLAPHAAKLDLLQKIPGISKLSAHIILAEIGVDMTVWPTDKKFSAWAGVAPGCNQTGGRSKRAAVRKGNPYLCTILMECAGGAVQKLDSHLRMKHRKLCAQLGSKKKARMAIAHKLALIIYKVLGENVEYKDPEPKQPSEKAKRRMLQTRVKDLERLGYRVVLEPIEGVS

SEQ ID NO: 508442 - protein, 311 aa, unidentified
MNNTIGIDISKDTLDAHRLADGQHKQFLNGKTGHAQLVKWIGKQSDPLIIFEATGAYHRQLERVLGTHIIPFVKVNPKQARRFAQASGKLAKTDRVDCEMLAKMGAALQLVPKPFTAENLYDLKELLSARRALIKDRTAAKARKATVINALIKQQLEKRLRQIKNDIAKIDALMLDVAREDQYMSERLDILFSIPGIGVITALMILVDMPEIGALNNKQVASLAGLAPMSQSSGKWMGKARIQGGRPNLRNAIFMPALVAIRHNADLKTKYDQLVTAGKEKKVAITAVMRKLLVLANALLRDNRKWAEKAA

SEQ ID NO: 508443 - protein, 341 aa, unidentified
MQIHSVGIDLGKTTFHLVALGAAGKVLVKKKFTQLQLLTFTANMQTSLIGLEACSGAHFLGRALRAQGHDVKLIPAQFVKPFVKSDKNDFIDAEAIAEAVERKNMRFVPIKTDDQLDLQAIHRVRDRLISRRTAVINQLRAFLLERGMVFAKTPAKLRAAMADVLENADADLTPQMRNLIGMLWDEWKLVEQQITALTDDLEKIADADAGCARIRQIPGIGPVVATAIVAAIGSGAAFRKGREFAAWLGIVPRQYSTGGKAKLFGISKRGNVYLRKILIHGARAAVLRIKRDRAPIGAWLDALDSRAPKNVVVVAMANKLARIAWAVLSSGNDYRPATVPA

SEQ ID NO: 508444 - protein, 370 aa, unidentified
MNHHTTMFIGLDVHKEFISVAYVPDDHGAEVTYIGPIGTRQGDIDKLIRRLKPKGSQLVFAYEAGPSGYGLYRYLRKKDHPCLVVAPSLIPKKPGVRVKTDRRDAVQLARLLRSGDLSPVYVPQVEDEAIRDLSRAREDVLQDLKASRLRLKSFLLRQGIYYTGRANWSAAHLRWLAEVVCPTPVQQIVFQEYVHTTTERLERLTRLEAELHDHVKGWKLLPLVEALQALRGVQFTVAVTTVAELGDITRFDNPRQLTAYLGLSPSVYQSGDKRRLGGITKTGNAHARRALIEGAWAYRYPAKVSRQIQERQENLPQSIRNIAWKAQTRLCKRFQRLIARGKNPNVTVTAIARELASFMWAIAREVSPIT

SEQ ID NO: 508445 - protein, 341 aa, unidentified
MQTTKYFVGFDISADDFSASCITSPDNLVFSTQKFLSNIDGSNEFLSLLSKHNIKQSEVIICMEATGVYSENISYFLASKGFTVCIEAPHKIKNKTKVSPRKNDFADAEAIAEYAYRYTDKLSAWKPKDEILEQIQVLLSTREHLTVQMTANLNALKTLKHKHYQTPLANQIYEQTIIKLKEHIKQIDQEMKNLIDKDDSFKNNISLAKSVPGVGLLLAANLLVLTRGFTEHVNYKHTAAYSGICPYEQTSGTSLHKPPRSKKCGPAKFRKLLYLAALSVRTHNQNFKKYFLRKVAEGKNKRLVLNNIENKLLKIIFAVVNSGVAYTENYKSINPALLKTA

SEQ ID NO: 508446 - protein, 355 aa, unidentified
MDSKKYIGMDVHKESISIAVRNGAGKIVMECVIETKASMILQFIDGLRGDLQVTFEEGTSAAWLYDLLKPHVTKLLVCDPRKNASMREGNQSDKIDARRLAELLRLNHLSPVYHGEHGLRSLKELVRSYLTITKDLGRVMSRVKAIYRSWAIPCTGKQVYAPRHRAEWLGKITEPGVRRRAEFYYQQLDALRTVRQQVRRELLAEGKKHQAWKRLCQIPSIGPIRSAVLLGILQTPHRFRTKRQLWTYSGFGIETQSSADHRSVDGQLERVKKQSSIRGLNRNCNHDLKNLFKGAAIVASSKPGPFQEFYTALVTKGIRPEMARLTLARKIATIVLIVWKRGACFDAQHLKPQTA

SEQ ID NO: 508447 - protein, 367 aa, unidentified
MKDSSTVVGLDVHKNSIEIVTADTDGAMEVRHFGRIGGTMDALDRAVRKLVSQGSALRFVYEAGPCGYEIYRHLTRKGFSCKVVAPSKTPKKRGDRIKNDRRDAETLARMERAGELTAIYVPREEDEAMRDLTRAREDAVKALRTARHQLNAFLLRYGKRYPGKASWTPSHLRWLSDVALPHPSQQIVLQESILAVAGCTDRTTRLTDQILKLLPEWRLFPVVQALQALRGVAPIVAATTIAEIGDLSRFQNPKQLMAYLGLVPSEDSSGESTHRGSITKTGNGHVRRVLIEAAHAYGFPARVSRHLLKRHEGLPQAVLAIAWKAQVRLCGRFRRLMGRGKLRTKVVTAIARELCGFMWAIAREVKV

SEQ ID NO: 508448 - protein, 386 aa, unidentified
MTHSTNILPRSVDYDQTLVLAIELSNKSWVLAAQVPGLSQTKAKRTIDPDKNGLLAAIDGYRTRAAAAGRSVKRVITSYEAGWCGFWLARWLMAHGIEVHVVQPSSVPVDRRMRRGKSDGIDAELLLRTSLAWLRGEPRVCSMVPIPDEADEDARRSVRERSELVSERVGLVNRIGAILATLGADDYNPLLQSRRRRLTELRTGLGDPIPPNALAKIMRLLTRLELVLAQIVELELERDAVARTDAPDQASKMIQQLISLRGIGVQSATVLVRAAFVRRFANGKALGSYAGLTSTPYSSGGIDREQGIGKAGNRRLRTVMVELAWLWQRYQPGTAQVTWFRERVGSTGRRVRKVMLVALARKLLIALWRFVIDGVMPEGAVTKPSI

SEQ ID NO: 508449 - protein, 448 aa, unidentified
MSKINTKNEQVKRISQLTVINPTAAGIDVSDNEMMVAYPINSEQLEVRVFGCFTRDLYSIVQTLKSKRITTVAMESTGVYWVALFLLLQEYGFEVYLVNAKHVKNVTGRKDDESDAEWIQKLHSCGLLNASFQPDNMTRTLRSMVRHRKNLVQTSSTYLNRMQKALELMNIKLHTVISDIDGKTGVLIIESILAGERNPEVLAGLRDKRIKASKEDIIKSLEGYYTTEHLFELKQCYQLYCTHRKMIDECDKEIENQLGVQIASRDEGVLPDIPNTKRKASGKNRVSFNLTSYLKEILGVDVTEVVGISEISGLTILAEVGKDMSKWKTEHHFTSWLGLAPNTKISGGKVISSKLKKKKHHAGQAFRIAANSLYKSQSPLGDHYRMLKAKVGAAKAVVATARKLAIIFYKMVSNQQAYNPKVLEEYQQKYKQKRINQLKKKLELLEAA

SEQ ID NO: 508450 - protein, 348 aa, unidentified
MRFYNRQHRHYCGIDLHVKTMYVCILDATGQVLVHRNVKSTPEALLETIAPYRDDLVVAAECMFTWYWLADLCATEGIAFVLGHALAMKAIHGGKAKNDKIDSHKIASLLRGGLLPQAYVYPAAMRSTRDLLRRRLHLARKRGQLLAHIQNTRAQYNLPEFKRRLAYPANRDGVGEHFTDPSVRKSIEVDLVLIDQYDGLINDLEVTLVRDAKCHDADAFHRLRSVPGIGKILAMTILYEIHDVTRFDRVQEFASYARLVKCGKESGGKTLGTSGAKMGNVHLKWAFSEAAVLFLCHNAEGKHLLAQIQKKHGKGKALSILAHKIGRAVYYMLVRGTVFSMEKFLHAS

SEQ ID NO: 508451 - protein, 350 aa, unidentified
MLIIGCDYHPSFQQIAFVDTSSGELSERRLFHREEAEQFYGKLKEQSVPVRVGMEASGHARWFERMLRDLQFELWIGNAAEIRAKRVRRQKTDRQDAQLLLRLLMEDRFPRIWVADAENRDLRQLLWHRHRLVQMRTRVMNQLHVVALNEGLRRKKALWRQAGRQELESLALAPWANRRRQDLLDLLDQLTPKIQQLTQALEEEAEKRPVTRRLMTHPGVGPLTALAFELVIGTPERFHCGKQIASYVGLVPSEESSGNRRRLGHISKQGNALLRYLLVEAAQVTIRTQAQWRSRFFHLAMRRGRKIAKVAMARKLAVHLYWMWRQGCDYGHLQKLGSHAGEPGNPYGVR

SEQ ID NO: 508452 - protein, 416 aa, unidentified
MTDQLNIVCGADIHQRFLIATILCRDGRMWTNRFLMNINGLLTFKDWLMSYGCQKVAVESTGRFWVPIHMVLEGTVDVIVANAYKIKHTTKKKTDLKDSEWLAELCLNDMIEPSRIFPKEDRELRNLTRAREAYVRDLSKEKSRVHHILESCSIKLASVISDIFGKSGMYILNGLLSGTSIEVVLKGIPDKRVREKKSEELRDALMGKLEVSDIFLIRQSLQIMNQLEMCIEELDREIRSRIASRPVDIKILRSIPGIGIVSAYTILAEIGNYMDFKKPEQLAMWAGLVPSVYQSADKLITGSITKQGSKHLRWILVQVAHAIAHAKGGKLKKFFLKIKAKKGYLVAIVALARKILCLIHHLLVNQEIYEEEGCKSKRDAPIPKNKNPTILTIEDMIQCIAQAGYEVKKINSGVDG

SEQ ID NO: 508453 - protein, 392 aa, unidentified
MSKASSEVAILVNGEKVHGYTISNDALGFARLLGDLKTVHKPEIIFEATGVYSRRLQAFLEDNGYAYTRLNPLEAKKQLDSLRVRKTDQIDAEKLAQSQFVLNRKPTYVQEEVYQELRDLSRFYQNLTEDIVRAKNRLHKVLQVTFPELETILSTPTGEQYGNLVVAFPCKDFVLDLSKDELSESIRQSTSKRISDKRVAYLAEKLIALANQSYCAVKKTSPMLEEVRYYAQELLRLSERRKAVLDQMVELAQPLPEYDILLSIPGIAETTATSIIGELGDIRRFQSANQINAFIGIDLRHYESGNFLAKEHITKRGNPYARKILFKCIHNIASASHTNPCHIADFYEKRKRQSQTTSTKPHTIASIHRLIRTMYYLIMHNKLYDYASTQNR

SEQ ID NO: 508454 - protein, 348 aa, unidentified
MDYYAGIDVSLECSSICIVDNAGKIVREGKVASEPEALTEWLGGLGAGLVRIGLEAGPLSQWLYAEMKASGLAVELLETRHVRDAFSAMPVKSDRNDARNIAQLMRLGWFRPVHCKSMGAQETRAVLTARKLVQSKLQDVENSLRGILRGFGLKVGKTTGRSFAGRIQELVAGHPTLETIAEALLSVRAVLLREFNGFEKRVRGMARADERTRLLMSTPSVGAIVALTYASAIDDPARFKSSKQVGPHFGLTPKKYQSGETDRTGRISKIGDAAVREALYQAAHVMLTKPVKGCAELKSWAMRIAKRAGMRKAKVALARKLAVIMHRMLADGQAFRPTTRTKPAAVAA

SEQ ID NO: 508455 - protein, 338 aa, unidentified
MYYTGIDLHKFSSYLTTVDSSGNIIKQADIKNVNHNFAQYFSDLGNENITTVESTMTWYWLNDLLSSLNIPLVLAHAKYVKAIAYAKVKTDKVDSHTLAQLLRMDYIPVAHKISNDNRLLRDALRSRLKIVQRHTSVTNSMHLLLGKYNLDSPDQLDDIPKYQYDQLTEVEALLSEQMLDLEKQLYPFLIPNDDIQRLLWIPGIGKMNAFTILLEVDDINRFEDVKHFFSYCRLTPAARNSGGKSKQRSSKDGNRYLKVAFSDAAIHAVQYYPIIRNYHNSLIRRKNKNIARTIIAKEIAEIVFYVLKYKSDFNNKFKGKDLVTRKSFQWPRVVSPYA

SEQ ID NO: 508456 - protein, 333 aa, unidentified
MRKTIFIGLDISKLTFDACLLPENGKEKHKVFDNTDAGHAKLLRWVETLVADASVHYCMEATGSYNLALAQFLTEQERFVSVVNPFYTHHAALTGGQGNKTDKADARTIAHYAKAHTPPLWHMATPEVRLLTALLRRREVLEEQCQAEKNRLGTPGVLAPVVASLEKSLAFLKEEIRLLDHHIREHIEQSPRLRSDRDLLQSLPGIGTKTAEWLLGEMPDVHLFASAEALAAYAGLAPKQQQSGTSVKRPTRITRRGSARLRKALYFPAITALRYNPLVQALGQRLQAKGLCAKQRIAAAMRKLLMLAYGVLKHQQAFDPKWKSVGTATTAEA

SEQ ID NO: 508457 - protein, 335 aa, unidentified
MQSYGIDLAKEKFDVSFFDLTSKKVSNQPSHKVVKNNLKSIGRFLETLPSDAVLVAEHTGVYGDTLLKCCMDSNVKIAFVGGYVIHRYRATPDRAKTDVLDCALLRDFGERYPDKLKYKTFPEEALYELRQLARHREMLVEQRKQLITADKSEDCRPVRSLAVKRSMDRIKEMLDTEIVETEKEMLKVINGHESIHHNYELVKSVDGVGLITAVELLVKTENFTKITTARQYAAYAGTAPYEKSSGKMDKGAHISKIGNRRSKTLLYICAESARLHNKEIKLYYERRTLIDKKPRHYVLNAIANKLLRIIFTLVEKGEYYDANFIRQDPRVVKYN

SEQ ID NO: 508458 - protein, 343 aa, unidentified
MQIRSVGIDLGKTTFHLVALSAAGTVLLRKKFTQKQLITFTANMQTSLIGMEACSGAHFLGRVLRKQGHDVKLIPAQFVKPFVKSNKNDFLDAEAIAEAVDRQNMRFVPIKTDDQLDLQAMHRVRDRLVARRTSVINQLRAFLLERGMVFAKTPFKLKQAMPEILENADANLTPRMRSLVSLLWSEWKDLEHQIVAMNEEVEQIASSDPACQRLRQIPGIGPLVATAIVAAIGNGAAFHKGREFSAWLGLVPRQHSTGGKARLFGISKRGNCYLRKLLVHGARSAVLRVKRERSPFGPWLDALERRSPVKVVITAAANKLARVAWAVLSSGEEYRPPTALMPS

SEQ ID NO: 508459 - protein, 363 aa, unidentified
MVRTTMAQPTSSGVVVGVDTHKDTHVARAKDALGRRVGEQLVPTTPAGYRQLLAWARGFGEVKAFGVEGTGSYGAGLARYLRSEGEVVIEVIRPNRQARRRNGKSDPADADAAASAVLSGDAAGLPKGADGRVEMLRALRVARSTAVKARTQAVNALKALVVTAPSDLREQLRASSTVRLVYACARLRPGELVDATAATKVALRSLATRSEALEAELERLNAVLARLVGDAAPELVARFGVGPDSAGALLVAAGDNPGRLRSEAAFAMLCGASPIEASSGKIVRHRLNRGGDRQANAALYHVVMSRLRWDRPTQDYMARRTAEGRTKREVIRCLKRYVAREIYLALKGMSSDRVTTTLAHEVA

SEQ ID NO: 508460 - protein, 339 aa, unidentified
MNKINTIGVDLAKNVFHLCVQDQTGHILNKNKLGRNQFKRFLATTPVSRIIFESCATAHYWSRVAVRYEHEVKLIHPAYVKAYLKTNKNDFNDAEAICEADSRPTMRYVSAKTIAQQDSQLLHRIRQRQVQARTALVNQIRGQLLEYGIALPQGISQVRSRLAGILEDGENELTFFARALFAELRDELYALDDRIKLADKKIKQLASENPICQRLMGMPGIGPMIATAFVSAVGDANSFKNGRELSAWLGLVPRQYSTGGKQRLLGISKRGDSYVRSLLVQGAISAITRCKERPDSQLVWAKQLREKKGLQKAAVGLANKMARTLWSLMAKDHDYVAVI

SEQ ID NO: 508461 - protein, 348 aa, unidentified
MTLVGCDLHSRKQQVAVLVTDTGEVLEQELLHEGDAVERFYRALPRPVTVGIEATGYTLWFHAVMQKLGHTLLVGEAAKIRAMVVRKTKTDRRDAQHLLDLLKHERFPTVWMPDPTTRDLRALIAHRVRLVRMRTMVKNGLHAIALNQRVALGPSLWTKRGLAQLQALSLPPHTANRRADSLELLTWLTTHIDQLDAQIAEAAAADARAQRLLTHPGVGPLTALITVLVLGPAARFRTSKHVGLAPAIHSSADKYHLGKITKQGNALLRWILGQAAPLAARADGELRRAYFAVLHRRGRPKAKVALARKLLVRLYIMLRDQIDYEEFRRRGRVRRPRIAVNPVSATTM

SEQ ID NO: 508462 - protein, 344 aa, unidentified
MEVAIGIDPAKGSLAVAAVDALGRVLGAREFSNDPREHRALLRWVRERGPDRVIGIECSLSYGASLSRFLLHAGEDVREVPTRLTFQERRRRGSQGKSDLVDSVAIARIVASGEVLPSAHRIEVLTDLRALVDYRDQLVRAKTQVANRAHADLVNVRPGYGGEVPNLRAKVHQGKARSLLRGDRSVRAELLRSRLGELLRLEAEIAAMDRRIHASVRETGTSLTAIPGVGPFIAAKILGEVGDPSRIRSKAAFAVLSGTAPLPASSGQTQRHRLNRGGNRQLNWALHYIALVQCRLLPEAKTYMARQREAGKSHKEAMRCLKRHLSNVVYRHLVADAERAEPVA

SEQ ID NO: 508463 - protein, 360 aa, unidentified
MRIIGCDLHARQQSVAMLDTETGEVVNRTLMHEGNEVREFYSALPRPVLVGIEAIGPMQWFLKLLDELEIECRVGDATKIRAAEPRKQKHDRRDAELILKLLVENRFPAIWRPSQELLDLRALLLHRHHWVRLRTQVQNALQAIALANGLRRGPGLWSYDGQAKIAFLPLPPHASYRRSMLQALFRQMEEEVEQLTAQVAEQAEQRSGARLLMTHPGVGPVTALATEVFLGDPQRFPDGKALASYVGLIPREYSSGAHQRLGALTKQGSPFLRFLWNEAAAHAVRRDPDLRRFYRRKLVQKGLGKSRVAAARKLGIRLWIMLRDQIDYEEFCRRGQKQCGAACAGMPETRFGAHGHRPVD

SEQ ID NO: 508464 - protein, 339 aa, unidentified
MKYTPVGVDIAKHLIQVHFIDENTGDVVDKQLRRRDFLEYFSNRESCLIGMEACGGSQHWARELTKLGHKVRLLQARFVKAFVMGNKNDVMDARAIWMAVQQPGKEIAVKTEEQQSVLVLHRSRRQLVKFRTMQINSLHGTLLEFGETIHKGRAAMEREFPEALERMKERLPPYLITVLENQYNRLNELDSLIEDIEKQLTSVAKQNETCKRLLDIPGVGPLIATAAVATMGEASAFKSGREFAAYVGLVPRQTGSGGKIRLLGISKRGDTYLRTLFIHGARAAALLTKEPGLWITELKKRRPVGVATVAMANKLARTVWAIAAHGRKYDKEYVSIRSY

SEQ ID NO: 508465 - protein, 343 aa, unidentified
MGEVSTIGLDIAKSIFQIHGVDADGAVVIRKRVSRAKLLEFFAALPACLVGIEACPTAHHWSRRLGALGHTVKLLPPSYVKAYLKRSKNDANDAAAICEAVTRPSMRFVATKSEQQQSGLMLHRSRQLLVCQRTMLSNAIRGHMAELGIISAKGRNGTAELLKIIADEQDDRIPAAARFSLDILARQYAAIRAEIAAIEKRIHAWHRSSEESRRLEEIPGVGPIVATALVAEVGDWKEFTSGRSLAAWIGLVPRQYSTGGKERLGRISKQGNRHLRWLLVAGAMAVIRYARQHGTKRPWLARLMERRPIKVAAVALANKIARMAWAMMVRGERFKEPKLLPAA

SEQ ID NO: 508466 - protein, 350 aa, unidentified
MSIVAELYRFVVGVDTHAKTHTFAVIDTRTGKEVGVRDYPVTAKGMGRAVTWALSVAGGEPLLAAVECTSTYGATITREFTARQVKVVQAIPPRRSSRRAKGKSDRIDAEAAARSVLGRSIEGLSIPKDPDGYAKAMGVLLTARDRLKTRRTADISALTALLRSCDLGVDARCALKAAQINKIANWRVDPKDLSTLMVLRVQAKTLATAIITARKDLDENKAQLMRLLLQTAPSLKGLPGVGPVNGCQILASRAQEGRIPSEAAFACLAGVAPIPASSGNTVRHRLSRYGDRQLNLALDVVAKSRIRFEPETQLYVAKRKAQGKSDREIRRLLRRYIARQIHRHLAPIGL

SEQ ID NO: 508467 - protein, 348 aa, unidentified
MHIAVLGIDLGKNSCSVAGLDASGRVVLRRRLHRDSVVKLASRLPACVIAMEACCGAHHLGRLLQAYGHVIRLMSPEYVQPYVKAQKNDERDAEAIAEAATRPTMRFVDLKSEDQLDMQTLHRARSRLVGQRTALINQLRAMLLERGIAVAQGRHRLARYLAQALDDGNAEPVPLSLRIRLLIEDMRAQWSELDRRIASFDAEFVAATRSDEAARRLSTIPGIGALNATALVAAVGDARSFARARDLVAWLGLVPRQATTGGRPRLLGITKRGNKYLRTLLIHGARAALPSLATTEGALGNWLRGLSALAHRNTVIVALANKLARIAWAVLRSTAIYSARISDRPTAV

SEQ ID NO: 508468 - protein, 346 aa, unidentified
MTIVEAGRPVTGGVDTHLDVHVAAALDGIGGLLGVESFAASAAGYRDLLAWMSSFGAVGRVGVEGTGAYGAGLSRYLQGQGVEVIEVDRANRQARRQVGKSDPADAVEAARAALSGRARGLAKTRDGNVEAIRALLVTRRSARAMRSKALVQIRHLSFTGPDELRERLKGLSSITLPREAAALRPRATGDPVTYATKVAIRALGQRISLLDEEAERIDELLADLVAQTAPSLLALHGVGVDTAASLLVAGGDNPERLRSEAAWAHLCGVSPIEASSGKITRHRLNRGGDRQANSALWRIVMVRMVSHLPTRAYVERRTKEGRSKREIMRMLKRYVAREVYRHLPRP

SEQ ID NO: 508469 - protein, 346 aa, unidentified
MTRYIGLDAHSESCTIAVLGGSGKRLRHERLQTSAELLKSFIKEVPRPRHLCMEEGTLSEWLCEELTPLVDKLVVVMPDRNPGNESDLIDACKLADDLRRDAIRRPVYKAPGCFRALREAARTHYVLQRDKVRTKSRLSALCRGCGRPELAKALYGSNTRPDALQELPEHLRPRAALFGQELDALVECAAQAERSLQEESGRVPIVRRLATAPGIGVVRAAYIVAVVMTPHRFRTARQFWSYSGLAVVTRSSSDWVSEGSGQWRRSKTQQTRGLNHNRHPLLKNVFKGAALQITLMPEHPLGQAYQRLLTTTKPNLARLTIARRLAAAVLAMWKNEKDYEPAKHLM

SEQ ID NO: 508470 - protein, 349 aa, unidentified
MSHPTRWIGIDLHRRRSQVAIIDEHGELTVQKRIATGREAFRELLGDPDGTHVALEATYGWEWLAELLEDAGFDVHLAHPLRTRAIAAARVKTDAVDAKTLAHLLRTGLLPEAYIAPPELRDLRDLLRHRATLVHLRTSIKNRVHALLARQGILPEHSDLFGKAGREYLTTLELPDGPRRRLDSLLALIGDFDREITNCTREIDQRAKADERVKLLCQIRGIGHYTAMLIIAEIGEVKRFPTAKHLCQWAGLTPTVRSSDGKARLGHISRQGSTILRWALCEAAQHTPTGGGPLRAQYERIAKRRGTKIARVAIARQILTLCYYGLRDGEIRCLTRSQHDIDDEQASAA

SEQ ID NO: 508471 - protein, 433 aa, unidentified
MQDTEDEPLFAERVAGLDIAKAEVEVTIRVPSDTTAGRRQQETRVFGATRRELLALADWLRCWGVTKVGMEATGDYWKPVFFLLESRGFDCELYNAAQVKALPGRPKTDRADSIWLAKITERGMISSSFVPPEPIRRLRTHTRYRRHLTQARTAEKQRTEKLLEDGHLKLSSVISDIHGASGRDMLNGLAAGQRDPRALAQLARGTMRGKIRRLEEALECSFFTDEHAAVLAMMLVTIDHYTTQIDQLTAKIEKLAEPYLHQIRQLDEIDGVGTICAQDIIAETGADMTVFPTASHLVSWARWSPQVKQSAGKRKGSNATGRGNPYLSAALGEASISAGRTQSFLGARYRRLTKRMPKKKALVATGNSVLTIVHALLADPAARYLDLGADYYEQRMHTRRQARNHVKSLERLGYKVTIQALSPDTSQPLTTAG

SEQ ID NO: 508472 - protein, 363 aa, unidentified
MKKDNTPIKSRTETVIGIDLGDKRSHICVLDAAGVCVETGTVVTTPSGFEERFKRIDPCRIAIEAGGQSAWVDELLTKLGHEVVVANPRRLRMIYENHSKSDEVDAEQLARVARLDPSLLHGIEHRKHSTRVDLGKARSRDMLVATRTTLINHVRGQMKSFGMKLGTRGAAYFHNWAREQVPEELKIALDPILDLLEQVDKQIKVIDTELERLAEDVYPVTQLLRQVDRVGLHTALRFVLTVEDPFRIKKSRNAAAYFGLVSKRKQSGARDPEMHITKAGDGDMRRLLVQCAQQMLSAKGKESDLRTWGLNLAARGAKAAKKKAVIATARKLAVLLHVLWKTGQVYEPLKNTTGRGPSKVACA

SEQ ID NO: 508473 - protein, 322 aa, unidentified
MSLTVLGIDIAKQKFDVALLADGKIKNKTCRNSTEGFEVLKMWLEKQGIQKVHACLEATGNYGEDLAVYLHEVGHTVSIVNPARIKGFAQSELVRTKTDKLDAGVIARFCLAMKPEPWIPPAPEIRSLRALVRRVDSLIDMRSQEKNRISTAHESVTVLIKEHIDYLDQEIEKIRKQIADLIGKNPHLKQRKELLDSIPGLGKATIPHLLAELDNFDKFTHVREMVAFIGLAPKETLSGSSIKGKPRLCKIGNARLRKALYMPALVSIQCNPVMIAFYNRLKEKGKNGKVIVCAIMRKLVHVIFGVLKSGKMYDPNYKPALA

SEQ ID NO: 508474 - protein, 366 aa, unidentified
MEKKIAYVGIDYHLNSLSIAVMVEGEKDLYQTIRIRNEDKVILKYMKKLAKDFEIMACYEASCNGYSFQRKMLQWGYHCDVIAPSLVPKKKGDRRKNDFRDARNLAQSYAHGMLTVVHPPTEYEESVRSLIRCRLAFKEDEKRVKLRINSLLLSQGLDWPKKKWTHQHRMWLAKLRFDNPQLQQVLDEYLEHLQYLQIRIKNLDSQIEQIAHSDIYASSVKRLRAFKGIGTLAAMILIAEITDFRRFPNPRALMAFLGLIPSEDSSGDRQKGGSITKAGNRRCRTQLVESVQHYVRKPVIGPQMRQDLAEVDAKSANLARKCMQRLHKRYWALIMKGKARQVAITAIAREFVGFIWAMMQPEPVAN

SEQ ID NO: 508475 - protein, 349 aa, unidentified
MKKVVKQVVGIDVAQDELVICLGKMYDDWTPLLVAHKTFTNDQKGFEDLIAWVAKRTESEVPVRYIMEATGVYHESFAYFLHEKNQELSIVLPNKISNFVRTLETKTVTDKTASEAIAMFGLEKKVETWEPPKGIYKRIQQLTRERSQLIDERTVIKNQIHAEKAGAFPNKTSLQRSEKRLALLVKQEAEIMMELRKLIKTDEEVERIVLLICTISGIGFLTAASILGETNGFDLIRNKKQLTSYAGLDVKEKQSGTSVKGKPCISKRGNKVLRKTMHLPALAAIRHDERYKAVFARLVSKHGIKMKAVVAIQRKLLEMAYTVYKTQKPYDKEYFKRNEVIKEEEILTT

SEQ ID NO: 508476 - protein, 467 aa, unidentified
MTPRAGKAFRRSAQAEDLAIRHRHAAGIDVHSREHFVAVAAEDVPAGFINADDKLPAGVRKFGTNTGDLEAIAAWLKDCGVTTVAMESTGVYWIPLYDLLASQGFEVLLVDPRQTKHAPGRPKTDVVDCQWIRRLHSYGLLTGSFRPGDEIIRWRGLQRQREMLIRYAAMHVQHMQKVLEEMNVKLTEVVSDIVGQTGMKIIKDIVRGERDPLKLAKHRHESCKRTEAEIASALYGNWRPELLFALKQALALYEFYQKQLRECEGQIEACLRSLKDKSDGRPLPPSLRQRKPEKNEVRFGARALLFRMSGVDLTQIEGISEATALVVLSELGTDLSAFAHEKNFVSWLGLCPQHRGSGGKIFKRRIRRGANRVARALRMAAQGCHHAKNALGAFYRRIQSRAGGPKAIVATARKIAERVYRMLKYGQEYVRQSEEAYEQKYQLKLVKSLAKRAAHLGYKLVPETITT

SEQ ID NO: 508477 - protein, 347 aa, unidentified
MDQQCHYVGLDVSLETTSICVIDDAGAIIWRGKCRSDPDTITAIVRQHAPGAVRVGLETGQLSNWLTLSLRRRGVPVVCMDARHAKAALSLQINKTDANDAFGLAQVVRTGWYREVAVKSMDAHTLRMLLVARSRLVSQRQATANTIRGLLKTFGLVVARGSKGLFPVRVREQIAGNPALIAIIEPLLAVWYAIRDQVAMLDRQMLARARNDQVARRLMTIPGVGVVIALAYTAVIDDPARFRRSVSVGAYLGLTPRRYQSGEVDTTGHISKCGDSLLRGYLYEAAAVLLYRDGRASVLKSWGLELAKRIGMRRAKVAVARKLAVIMHRIWSDQSEYRWTAIPSTTA

SEQ ID NO: 508478 - protein, 338 aa, unidentified
MALYCGIDLHSNNSYVAVIDETFKKVAEGRLPNDLAAVAGMLAPYQGELEGVVVESTWNWYWLVDGLKEAGYEVHLGNTWANQQYDGLKYADDRHDARWLARLLAMGILAEGHIYPKEERPLRDLLRRRSFLVKKRTSLLLAIGGAIACHTGGRVKTDDLRKLSTQDVEALVQDSRVALAISSQLEPVKAMDVQIRRLEKAVLAEARLRDEFRPLLTVWGIGNVLALTIMYEVGPISRFAKVGNFASYCRCVKSERWSNMKRKGRGNAKNGNPYLSWSFTEASHFAVRHHPVAQRYFQRKRAKTNGIVANRALAHKLARASYYVMRDQVDFDPARVFG

SEQ ID NO: 508479 - protein, 344 aa, unidentified
MIKRNLIAIDLAKDVFQVCRVSPSGKTLSNKPISRKRLKELLINSKPSIVAFEACGSSHYWARFAKSCGHTIRMLPPRAVKAFRQGHKTDETDAQAIAIAAQHEAIRSCNFMNIEQQTLQSFESSRRYISKQCRALANHIRALAYEYGLTIPKGNAGLFKQIPLILENAENGFPHTLRTIFHSLSEQLKTQQDLLKSIENEKAGYVNTIEPCQRLTALEGVGPVGSAMLYSCIGKGEMFKNGRQAATYLGVTPKQHSSGGKTVIVGIDKKGGNKALRAVLFQGALSVISRLPNEPTTVKQRWLIQLVQRVGVKRACIALANKTVRTAWALLATGEEYHPQPLTV

SEQ ID NO: 508480 - protein, 382 aa, unidentified
MKKNISTTTVMKATMSVDVTAAPPQRAEDGVASVAPRYHAVVGLDVGDRQSHYCVLDLDGGVIAQGEVKTTEASLRILFEGKGRMRIALEAGTHSPWISRLLIASGHEVLVANPRKLRLIAESDSKHDRADARLLARLAHVGPALLSPIHTRSAQTQMDLTVIRAREVAVQTRTKIVNAVRGLVKSTGQRLPASPTLTFARKATEACPETLQPALLPLIRLVEALTAEIATYDRLVVETARVYPETRAIQTIHGVGALTAVAFVLVLNNDRSRFKRSRDVGCYLGLRPKQRDSGMRSPELGITKAGDPLLRRLATQSAQYILGPFGQDSALRRWGLTLASHGAKNAKKRAVVAVARKLVVLMHRLWVTQERYDPMRGIAVAA

SEQ ID NO: 508481 - protein, 420 aa, unidentified
MKDWKDITHYAGFDWARDHHMAVIVDGQGQIVADFEFEHSLEGWKIFSEKTAPWPNLAVAIETNQGAAVDQLLQRGYTVYPINPVASESYRKRKAPSGTKTDHLDGWSLADALRVEGMGWKPLKPMDPLTQKLRLLCQDEVSLIEQRTLLVNKLQQALLEYYPVALQAFDDWTASFTWDFVIEFPTPQQLVKAGKRRWEKFLHTHKLWRPETLERRLALFAQADQFKASDCILEAKSQLALSLCKLLRTLDQQLEQYRQQIEKLFKDHPDHDLFGSLPGAKKVLGPRLLAAIGGDPDRYGSQQVLQCYAGTAPINYQSGQVHKTKIRWACDKFMRHTIHLWANCFRQSSAWGQTYYEKKRKEGMSHACALRCLGQRLLKILFRMITDRKPYDAEYHALNQKKHGSWVLALVEKPTPKPCE

SEQ ID NO: 508482 - protein, 373 aa, unidentified
MPRYSTAFGMDVHLRSTTVCALDAETGEAVTRRFRGNPWGEVAEWMSGFPGPSLAAYESGYLGFAPQRELSGLGVDCVVAAVSRVPRSAADFSSKNDRNDAARMAKAILSHDISPVWVPSPEIEGLRDLAGAHDAATARLAAAKQRLLAFLARRGYAYGGTTPAGNPRRYWTYDFLRWLDKVRPADDGGIRALAALRNEVEAADETREAVLAEYRAAVAAGPLSAEVEALQSIKGCGFALAAAFAAEVGDFSRFRSGRQVTAYFGLAPKQRSSADSVRLGGISGAGNALVRRLAVEGSWCYAQAGHQPKLMPKGSGVPLEVRMHGRKGSERLLRRREEMLERGMPQAKANAATAAELVRWLWALGAMCREAGE

SEQ ID NO: 508483 - protein, 341 aa, unidentified
MKRFIGVDLHKNSFTACYMQEGGEYELKSFKVDQRGMEEFKKTLAKEDELALEAVGNAGYFARQIEGLVARVRIINPVQFKVISESIKKTDEHDATTISRYLSKGLIPEVRMRSKEEAKLASLIGTRDKFVKLRTALKNKIHNILNADGIVTSKEMFNADRSLDRVLEMELDEADLFELRVIIAEIKNLNRSIDEINKELIDRGKKLSGHDNLTSIKGIGDISATILLSAIGDVDDFKDDKKLAAYLGIVPRVYITNKTCHYGRITKMGNKIARTALVQSTLIAIRYSPYLRGFYLKLKAKKGSGKAIIATSRKLLTIVYHTLKNNWVFEDFDSFKIAVST

SEQ ID NO: 508484 - protein, 447 aa, unidentified
MADVNSKRRRRARLTVVHPRAAGIDIGSRFHVVAVPSELDDEPVRKFTSFTKDLKLLAEWLLLIGVTTVAMESTGIYWVPLYEILVAKGIEVYLVNARHAKNVPGRKTDICDAQWLQQLHSYGLIRASFQPDQRIAELRTYFRQRDLLVRYRSSHQQHMQKALMQMNLQLHHVVKDITGLTGRRIIDAILSGERDPQKLASLRDQRCKESQDTIAAALQGNYQEDHLFELKVAVDLFDSYTAKIKECELAGQSLLTQLAGDQFVAPDKQAGDWRIRGNGFSFNPKALIESISGHNLLSLPGLGPTTVITLISECGLDMTRWPSEKHFVSWLGLSPQNKISGGKVLSSRTRQGATRAGSAFWMAAVPLSRTNTALGAFQRRLAARIGKSKALIATARKIAILYYKTLRYGMSFQDPGASSYQQATRERQLQGLQRRAKAMGYQLVATS

SEQ ID NO: 508485 - protein, 342 aa, unidentified
MKEVSIIGLDLAKNVFQAHGASADGSVVFRRKLSRAQLLKFFAEQPSCTVAMEACASAHHWARAIGSLGHTVKLIPPAYVKPFVKRQKNDVADAEAIAEAAGRPTMRFVAPKTEAQQAAAMAYRTRDLLVRQRTQTINALRAHLAEYGVVAPVGVAHIGRLAALVESDDGALPEAVAALGQMLLAHIKTLNASIETLNKELQQRAGSDDKARRLMTIPGVGPITAAALTTFAPPFETFTKGRDFAAWVGLTPRQHSSGGKERLGKTSKMGQRDIRRLLIIGAVVVVRWAARKGAPVGSWLARMMERKPRMLAAVALANRMARIAWALMRKSEDCRDSAMAAA

SEQ ID NO: 508486 - protein, 340 aa, unidentified
MEAIIIGIDIAKSVFQLHAEDRSGQVLWRKRLRREEIEAFLAKQPPALIGMEACGSAHHWGRVLRGLGHEVRLMHAKYVKAYVKRGKSDLRDAEAICEAVQRPNMRFVPIKSIEQQTARAVERARDLLMKQRTQLSNATRGLLAELGIVAKTGLRGFKTLADRVDAGDSAIPEALRNALKPLVEHWRALHASIDALEARIVAQAKSDERMRRLQTIPSVGPIIAHALVSAIGDPRRFATARDCAAWVGLTPLTNSSAEKTRIGHISRQGDHSLRRLVVLGAANLARRAKAKPNPANVWLNGVMARRPVKVATVAQAAKTVRIAWALLCSGETYRATAVAA

SEQ ID NO: 508487 - protein, 375 aa, unidentified
MHRRRAVEDRITYVGLDVHKEGIVVAVAEGGLRGEVREYGRIANTAAALDRLMRKLGSTGVRLRFCYEAGPCGYGIQRHLSARGHDCVVVAPSLIPKRAGDRVKTDRRDAAGLARLHRAGELTAVWVPDAEHEAMRDLVRARLDAVHALRRARQQLSGFLLRQGCHYGRPAWTKLHRRWLAGLKFEQAVHHIVLEDYIAAVEAAEARRGRLTAQIEAMLPDWTLAPVVAALQTMRGMALVNAATLIAELGDLSRFANPRQLMAYLGLVPCEHSSGASVRRGGLTKAGNSAARRLLIEAAWCYRFPARVSRELLLRQEEQPKPIREIAWKAQLRLCARYRRLARSGKPANVVTAAIARELAGFIWAIARRVPPAAG

SEQ ID NO: 508488 - protein, 366 aa, unidentified
MRKSVIYVGLDVHKDSIVAAMATKRQPAVIVRRMLNDWGQLVRTLDDLGNKDRLRVCYEAGPTGYDLARRLNAAGIHCIVIAPSLIPVQPGQRIKTDRRDAKKLADLHRNGQLVEVRIPETETEAMRDLERARDDAKNAERTARQQLDKFLLRHGRSWSQTKWTRLHWAWIERQELPAEALRRVLADYIRAVKEATARLERLEKDIEELVERWALAPLVKAFQALRGVRLITAVILAAEVGDYARFGTPRELMAYLGMVPSESSSGQQRRQGRITRTGNGHVRRILTESAWNYRFYPRASRAIRKRREPLPTEIVAIAEKAEERLSKRYRYLIQKGKSSPKAVTAVARELAGFVWAIAQEVALEAA

SEQ ID NO: 508489 - protein, 351 aa, unidentified
MSHKTAVTVAHTIGIDPGKNTLHLIGLDDKGAIVLREKIARGRIAARLANVPRCLIGIEAGMATHYVARELSLLGHDVKQVPPAYAKPFRQGHKNDFRDAYAVAEAVQRPSTRCVPVKTDNQLDLQALHRVRSRLISDRTAVINQIRSFLLERGIPVRQGLRFLRHRLPEILATRTDVLSPRMVRIVEDLVGDWSHLDERIENVTDEIEDLARGDASCRQLMTVPGIGPIIASAMVAAIGNGIAFARGRDFAAWLGLVPKQMSTGDRTILGRITKRGNRYLRTLFMQGARVILLRPINWAKHSFGVWLAAAARRLHHNVLATALANKLARIAWTVLAQGRSYEARIEPKAA

SEQ ID NO: 508490 - protein, 346 aa, unidentified
MQPVIGCDAHKHFSVFVSVDQHGKPSRPVRVDHDRDIYCEYLRTLPPASEIALEATGHWYWIVDAMEQAGHHPHLANPFEAKRRMAKSNKTDALDAKGLAILLRCGTLPESWIPPGALRDQRELPRTRMALRDLRTSLKHRIHAGIDRYGLQADAISDLFGTKGRAYLASILKALPPETAQMIAMQLDSIDQLEEKIQAIERRIAETLKASPEIRLLRTVPGLGPILAPLVWLEVGDVERFPRAEHLASYAGLVPRIIASGGHIRHGGTCRNVNHYLKWAFVEAANCAIRIKAHREDHIGLLYQRLYPNKGHGRAVVAVARHLAEASYWVLRKKQHYRAPQPRIAG

SEQ ID NO: 508491 - protein, 339 aa, unidentified
MDHIAIDLGGRKSRICVRNAQGLVVDEQWWVTNRLGDYLKKRAVSRVVLETSAEAFAVADLATQLGHEAVVVPATLVRSLGVGARRVKTDKKDAQALSKASCAMDLPSVHVPSKQSREWKALCSSRECLVTTRTKLINHVRGLLRTRVSQIRSGEVTTFARRVREKLLSSAEALPMAVERELSLIEQLNRYIAAADKELATITAQEPRCRNAMTVPGIGPVTALRFVAAVDEVSRFHGAHALQSYLGLTPGEESSSMRERRTSITKAGSPVVRWLLVQAAWCALRTRRNDPMVQWALEVAHRRGPQVAAVALSRKLAGILYAVLRDGTTYQSSRGAQAA

SEQ ID NO: 508492 - protein, 380 aa, unidentified
MAEITRVLFALIVRVGVDLAKNVIQVHAVDRAGRRVVSRAIKREQFLNWCAQLPPGCLVAMEACSGAHHWGRRLCAMGLDARLIAASFVSPYRMEGKSGKNDMTDAAAICEAASRPTMRFVPIKTCEQQAVMSLHRVREGFKEERTACINRIRGVLAEHGLVFGKSPKLLRAELADVIEDASNEMTGLARLVVQRAFEHWRELDEHMKWCDQQIGAHVRGSEDAKRAAKITGIGEIGASALIAGVGDFKQFKGGHQFGAWLGLVPSQNSSGGKASLGRITKRGDDYLRTLLIQGAKSAVMSAGKRDDPTSRWLQQLVARVGWQKACVAMANKNARILWAVMTREQGFDPEHVSQKPQDKCKQPAASAVPVAPRQAIACPA

SEQ ID NO: 508493 - protein, 341 aa, unidentified
MNGSKTVVGIDIAKRVFQLHWIDMETGEIVSLQLKREKFLEHFANRQPCLIGMEACGGAQHWARKLTAMGHQVKLLPGKAVKPFVIGNKNDRQDARAIWTAVQQPHVKAVAIKTEEQQAILALHRMRSQLVKFRTAQINGLRGLLTEYGEVMPQGKAGIRKGITDALARLSDRLPAMVIDTLREQWARIGKMDEEIATIEQRIKLWLKQDDACKRIAEIPGVGPLTATAAVAIMGDAKAFKSGREFAAFAGLVPRQTGTGGRIKLLGISKRGDTYLRTLLIHGARAVLTTAKDPGPWVTELRQRRPLNVAVVALANKMARTIWAILAHERTYQKEFVSQPA

SEQ ID NO: 508494 - protein, 453 aa, unidentified
MGRQSSAFDGDAGMPLVNLNAAGLDIGASEIWACVPAGRDAQTVRPFGTFTPDLHDLAEWLVGCSVDTVAMESTGVYWIPAYEILEARGLRVYLVNARHIKNVTGRKSDVQDCQWIQRLHSCGLLSASFRPESEICTLRAYLRHRASLIEHRAAHIQHMQKALQQMNLQLTQVLSDITGSSGMAILRAIVAGERNPLKLAELRDRRCAKSQAQIAKALTGNYRPEHVFALKQAVALYDAYNGQIRECDAEIERQFSVIKPTHDDDLPPLHSRDKMNTHSKNGPSYDARTLLYRMLGVDLVAVTGLNASTVQTVISEIGTDMTRWPSVKHFSSWLQLAPHNDISGGKVLRSRILKGHNRAGQALRLAAQSLARSPSALGAYFRHVRARSGAKQAVVATAHKLARIIYTMLKHRTPFHDIGADEYELRLHQRQIARLHKTAKSLGFILQPIQVSE

SEQ ID NO: 508495 - protein, 481 aa, unidentified
MQSSAENETGRAKRLTRKQRRDLGRRIWSDRPGLDVVHRDAAGIDIGSREHYVAVGPNRCSEPVRIFGCFTTDLRQMAEWLKECGIQTVVMQSTGVYWIPVYDVLEQQGFEVWLVNAKDTRNLPGRKTDVQESQWLLKLHTYGLLKKSFRPTPEIRALRTCWRERAEYVQQAGVCIQRMQKALTEMNVQLTTTLSDLSGVTGMSILRAIVAGERDGMRLAEFRDPRVRASKETIARSLEGTWLPEHIAVLKRQLGDWDHLQRQIAACDVDLEAMMKRLPSAEVHPSQPAAPAAGGERKRRKKNGKSSKNEPNFNLEEEHQRVAGVDLSRVDGIKANTIQTLIAEAGLDMGKWPTEDHFVSWIGLSPGNEVSGGKVLKKKTKKVKSRLATALRMAATTLRESDSYLGAQFRRLRARLGPPKAITAMAAKLARLVYRMLRYGQEYVDKGTALYEERYRQQQISYLSKKAAQHGFELVPAAPTA

SEQ ID NO: 508496 - protein, 373 aa, unidentified
MEQHSEVFVGVDAAKLRHAVAVAEDGRQGEVRYLGEIGTDPESVRRLAARLEKRHGGGLHFCYEAGPTGYGLYRQLTGLGYRCTVVAPSLIPRRPGDHVKTNRRDAQQLARLLRAGELTAVWVPDAAHEAMRDLVRSRDAAVGDLRRKRQAISSMMLRQGRVFPGKKTWGATHRHWLEKQRFEHPAHGLVLQEMLLAVRHAEERLERIEAAIAEFLPTWSLAPVVEALQALRGIGLVGAVTIMAEIGDLRRFDSPRQLMGYLGLVPGERSSGESVHRLGITKAGNGRVRRALVEGAWSYRHLPRTGPAKRYVHERVPPAVRDIAAKAQARLCARYRALSGKGKKLTVTVTALARELAAFVWAIAREVQTAPAT

SEQ ID NO: 508497 - protein, 414 aa, unidentified
MQHASKTTLPATGPGHRTAGVDWARDDHAVAVVDAGGQVVERFTVAHTAAGLRDLVRRLAKLGADEVAIERPDGPVVDALLEAGLTVVVISPNQLKNLRSRYGSAGNKDDRFDAFVLADTLRTDRARLRPLVPDSPATVALRAACRARKDLVAHRIALANQLRAHLQRTFPGAVGLFAEIDSPISLRFLARFDCQERADWLSSRRMAAWLDSVGYCGRVAPATLYARLTAAPRGAAGAEGAAQAHVTRAFLAALSTVVQQVKLLSEQIEEQLALHADAHIFTSLPRAGTVRAARLLAEIGDCRARFPTPESLACLAGVAPSTRQSGKFRAVGFRWAADKQLRDAVCDFAGDSIRANPWAADLYRRATGRGHDHPHAVRILARAWLFVIWHCWQNGTPYDPAQHRALQALLKPAA

SEQ ID NO: 508498 - protein, 333 aa, unidentified
MSTLVVGVDIAQQTFVAASWQHGSGHLFGTFPNNDAGFAALGAALPSAYSIHLVMEPTGGYELPLAIFAIAHGWRVSLPNPKQVRDFAKGRGRRAKTDSQDALVLARFGAEANPPAWQPLPPEVVELESLVRRRDDLQEMLRQERNRQQALERRPHQHQSVPRSLERLVDTLAEELAAVERAIADHIKQSTELAAAARRLRTLPGVGPQTVAALLVVLWRWQVLTEGEGSAKGLTAYVGLDPQPHQSGTSVNKPSAISRMGERSLRRKLFMATLGGLRGASPLRMFYERLVGRGKAKKVAIVAAMRKLVCWAWALFRTQSEFDATKYVHRFAV

SEQ ID NO: 508499 - protein, 417 aa, unidentified
MKLLFIGDDWAEGHHDVAAQDDAGKTLARRRLPEGADGIARFREMVGSCRGEDAEPDPARVIVVIETDRGPWVKALAAAGYRVYPANPGQAARHKETVANPGKKDDFFDAGCLADMGRTRRHQMRELAAGSDVAEAVKIAARAHQKLVRERTRHLLRMRPALREYFPAALEAYADLTLAGKDALELLAKAPNPESAARLTVTQVTAALKRAGRRGDLAQRARDIQAALRAPHLAQPDVIAEAHAASVQAAAAVITALNEQVKIMEAKVSGLFRRHPDAGLYLSQPGIGDITGARIPGEFGDAPGRYATAKARKNYAGTSPLTIQSGKKKTVHARYIRNRHLIDALPAQALTALSVSPGARGSYDDLRARETGHDDAMRRVASRLAGILHGCLKTGREYDEATAWSHRAGNPEATKAA

SEQ ID NO: 508500 - protein, 354 aa, unidentified
MSQKLNAAIAVIGIDIGKNSFHIVGHDHRGAIVLRQKWSRGQVETRLANLPPCLIGMEACVGAHHLSRKLQMLGHDARLMPAKYVRPYSKGQKNDFRDAEAIAEAVQRPTMKFVATKTADQLDLQALHRVRDRLVGQRTGVINQIRAFLLERGIAVRQGLRSLRSELPGILATRTDVLSPRMLRIIEGLAGDWRRLDERIEGLSSEIETLARQDKACERLMTVPGIGPIISSAMVAAIGTGDVFSKGRDFGAWLGLVPKQISTGDRTILGKISRRGNRYLRSLFVQAAWVVLVKVKCWERYGLKSWIEAAKKRLHHNVLAIALANKLARIAWAVLNKGRAFECVKTEETASRPA

SEQ ID NO: 508501 - protein, 409 aa, unidentified
MSGALHIGIDISGTQNLAYFMDNDGNKVRKALSFANSYEGLEEFLHIVEDLARSHEPETVNIGMEATGFYWWHLQEALKDLQLGEAKVEIFTINPSLIKNFKKTYPTLPKTDYIDAFVIADRLRFGRLTPLHRGSLVHAPLARLTRLRYNLKNNIQKEKNRAINLVFLKFSGFRQATGRRTFHKSAMDILTEFTPDEIAERPLEELVHFILEHGNHRFAEPEEFVKELKKAARNSYRLSPDMEDSVSVALSMTVENIRFHESQCKKLDKVIERELKAIPQTLTSVPGIGSTLAAGIIAEIGDINRFDGEKALAKFAGLTWHKHQSGPFEAEETSLTKAGNVYLRYYLVEAANSLRLHNPEFAAHYQRKYEEANKHQHKRALVLTARKFVRMVFALLSKGQIYQKQEVRS

SEQ ID NO: 508502 - protein, 344 aa, unidentified
MEPMYYIGLDVHKRKISYCVKDSSGKIYAEGSLPATRMDLDLWMKTLPHPWSGAMEATMFTGWIYDHLKPHAAALKVAHPLMLRAIAAAKKKNDRIDANKICDCLRCDFLPECYMAPTAIRERRRTLRYRNLLVRQMVQMKIKISSLLMEAGVSYNKQRLHKTGYFRELLASNPDIDEGLRSLLRLCRETVVRLQKTESAVVRSLERDSLLVDRVERLMTIPAVGPITALTWALEVGDVQRFSSIKKAISYCGLCGAERSSGNTVQRTPLSKQRNKHLQTTLIEAAKMAPRNSADLAMLYDKEKQKGNANRATLAVARKLVAYLMAVDRGQRNFQVVETSNIAA

SEQ ID NO: 508503 - protein, 348 aa, unidentified
MKILALDLGKGKSAVCILDTAEMKESYTTVGTSPLELSILLGDQQPDLVVFEIGTLAGWVHDLAVQCGCPVQVANPNHDGWRWRNVKRKTDRLDALKLARLSAVGQLPTVHMPSATVREHRALIQYRTQLVARRTRIKNTIRSLVAREGRQMAPGAGAWTQKELEVLRRWSRRWDEVHGEELWRGQLQEELRSLEQIEQQLLRVERKLDALARGDERVVRLQTIPCVGPRTAEMLVAVLDDPHRFKSRKEVASYVGLTPRQFQSGQTDRSGGISKQGHSQLRRMLVEVSWLALRYNPHLRSIYLRICNGSFSRRKIAIVAVARKLLIIAWAMLRDGTRWRPPTACSAA

SEQ ID NO: 508504 - protein, 342 aa, unidentified
MQITTIGLDIAKNVFQVHGIDANEKVVVRKQLRRSQVIAFFKALPPCLIGMEACATAHYWARELTKLGHEVRLMPAKDVKAYVKRNKNDAADAEAICEAVRRPRMRFVRAKSAEQQGRLMQHRTRDLLMRQRTQVINALRAHLAELGITAAQGREGLKELLKIIASDADERLPADAHASLIVLAAELQAMQTLIGSIEKRITAQHRGNEASKRLETIPGIGVIGATAIAATVTDPTVFRSGRDFAAWIGLVPRQDSTGGKQKLGPISKQGDRYLRRILVVGAIAVLRYAKQNPEKYPWLTQLLARRPFKVVAVALANKMARMAWALLAKGGTYRAPALVAAV

SEQ ID NO: 508505 - protein, 309 aa, unidentified
MNNLTKYYGVDVSKSYLDVDGLDKPCRFPNTPEGCAQLFAALPPHAHLVCEASGGYERILCAAAWSAARPISLVGADRVRAFARSLGLLAKTDRLDAALLTRYAIERKPVPVGPPDEVIERLRSYLRAREHVLELRRHEINHREHLADTPLLREQSDTRLKLLDGQIDALEKAVTELGASKPALAVCAARLQEVRGVGKITAWTICADLPELGELKPGQAAALCGLAPFARDSGDRNGRRFIVRGRSTLRRVLHMAAITASVHNPRLREVYLHLKKRGKPSKVALVALARRLIEFLNHIVKNPNFCLDI

SEQ ID NO: 508506 - protein, 411 aa, unidentified
MDKIYDNCCGIDVHKKLIVACLRKGNRQEVREFGATTRELLELADWLKTSDCKMVAVESTASYWKPLYNILESSDLNAMVVNARHMKAVPGRKTDVKDAEWIADLLQHGLLQPSYIPDKDQRELRELVRYRKSLVGERTRELNRLQKMLEGANIKLSGTVSDINGKSARSILEYLLTGECIDGAKYDEMYEQKVIAHNLKATKEQIIDDLNGVMTPLQRRMMKELLSHLDELNTHIKNLDDEIDNFMKPEEKQASQAIQDVTGIGNTSAQAIISVIGTDMERFSTDRHISSWAGLCPGDNESAQKRKSGKTRKGNSLLRTTLITCAHAAVKNKKSYFYAQFMRISAHRGKKRAYVAVAHSMLIAIYHILKDGVIFKDLGADYYNQFNKERKINAYLKKLKALGWEAPVVAA

SEQ ID NO: 508507 - protein, 415 aa, unidentified
MALKIVYKICCGIDVHKTFVVACIASTDSNGVTIYEHHRFSTYTKGLKDLLQWLLKHNCMDVCMESTGKYWIPVYNVLENDCTIVLAHPKYVKAIRGKKTDKKDAKWIADLFKHDLVAGSFMPPADIRQLRDLMRYRFKLTCFQSSEKNRLQNCLTVSNIQLGNVVSDTFGKSAQAILDKLLENPADTSFDLEPLVYKSLKKKLPELRDAIDGYISPEQAGKLKVIKAHYENLESRKAELEELILALAAPYQQELAILQTAPGIRSNFTAIGIISEIGTNMEAFPSAKHLCSWAGLTPTNNESAGKKKSVRVSKAGCYIKPLLVQCANAVVTSKKHPEIRNRYLRLKKRRGHKKAIIAIARMLLTALYHMLKNGENYNAELYRKSDLPPVDREITVEQAIIIARNQGYKIKSATA

SEQ ID NO: 508508 - protein, 345 aa, unidentified
MLYVGIDFHKEYSYITEMDQSGVVSKDFRLSNDKETLTRFVNELPGDAKVALEATCNWYYFYDLIEGRDVDVSLAHPLKTKAIASAKIMNGKISSATLAHLLRSDLLPRAYIPDRATRDAREILRQRAFLVAMRTRLKNRVHAILSKNGICCPYSDVFGEKSLRWLGALPLRPCYQQAMQSYIRLAAVFASEIALVTETITSLSLDSPQARLLDTQPGISHYSALLIDTEIGTIDRFPSAGQLCSYGGLVPTVHASGGKTRRGHITKQGSKWLRWILIECSPHAVEASPHYENLYDRVFSKHGKGAAKTAVARDMLKTIYYMLKRNQPFQERPILKRAPASAMGS

SEQ ID NO: 508509 - protein, 331 aa, unidentified
MENALQIVGADLSKKTIDLRIHQAKDGIRIENSSTGFKQMMTWLRRTTKDLSGIIVVMEHTGLYSFCFEKFLFEKGIRFSKVNPIDIKFTIGFTRGKSDKIDAARIARYGAEKQGSLPIQTPTSKALEGLKMLSTSREKLVRTRASLKTSVEEFRNIGMSDREPPIKAQLKVIKSLDKEIKILDDQIQSTIQKEKELKQTYTLLTSIPSVGAVVATNVIIKTGNFKRFPNSRKFSCYCGIAPFEHTSGTSIRGKTRVNHMADKSMKTLLDLAAKTAIRCDPEIRDFFLSRTAAGKPKMSTINIVRNKIVGRIFAVAKRQTPYVIAGSLQAA

SEQ ID NO: 508510 - protein, 414 aa, unidentified
MPWTGQPIRMADGKLMIENYDSVDVFIGVDVGKSEHHAVALDRSGKRLYDKALPNDEAKLRAVIQKLKARGTVLLVVDQPETVGALPVAVAYAEGILVGYLPGLAMRRIADLHAGEAKTDARDAAIIAEAARTLPHALRPIRLEDEQVAELSMLCGFDDDIVGQMTATSNRIRGLLMQIHPALERVLGPHLDHPAVLDLLQKYPTPTALKALGKARLGNRLVKLAPRMGRRLAEEIFQALSEQTVVVGGTHATRAVLPRLAEQLGTLRRQRAEIAVEVAELVAANPLEPIIRSMPGVGVRTAARVITEISGKDFATAGHLASYAGLAPVTRRSGSSIRGEHPSRRGNKVLKRTLFLSAFAALSDPVSRNYYDRKIAQGKRHNQALIALARRRCDVLYAMLRDGTLSEIRTPLTT

SEQ ID NO: 508511 - protein, 359 aa, unidentified
MDATTVAVDLAKNVFELVVADQHWRVVERARLTRTQFQRWFGNRDVALVVMEACGSAHHWARVLQQQGIPVRLLPPRYVRAYVKRNKTDAADAAALLEAVRCADIVPVRIKSVEQQALQSLHRVRSAWVATRTSRINTLRGLCREFGILISAGARLGVEQISRVLVDPHSNVPVMLRETLKLLVEEIRLLEVRIAQLERELSEAAKLSPACCTLLTVPGVGLLTATALVASTGGSVQHFKDARHFASWFGLTPKEHSSGSSRYLGRISKRGDRYLRTLLTHGARAVLRAASLAQRRGAVLDPLRRWGLLLQSRSNYNKATCGLANKLARICYASLRDQQPYQSLRLAKKLERQTFPMPA

SEQ ID NO: 508512 - protein, 371 aa, unidentified
MGITDTNGRTEYKQARFSSFTKGLQELADWLAKYDSNDVCMESTGKFWIPVFNILEKTCWVTLAYPKYTKPQKGNKTDHKDAKWICDLYMCDMVNPSFIPPPDIRQLRDLMRYRSKLTNIMTSEKNRALNCLTVSNLKLDDVFSDVFGKSSRSVIRYILEHPGETFQVAPFIDRRCKHPVEEIQAVIDGTISHQQAVKLRECLQHLDELEVHKTNVEKEILCLVQQYPYQLELLQTVPGFSGNIMTAIALISEIGADMSVFPSAKHLVSWAGCCPRNDQSSKKVKSTRISRAGVYLKPLLVQVAIQPFTANADKLSAAGALEIRCQICDGRFLSMWAALFIFLGCPLPPCPKNLHVHNGRIVILASVAWIF

SEQ ID NO: 508513 - protein, 349 aa, unidentified
MLIIGCDYHPSFQQIAWVDTESGECGEQRLAHSGGKAERYYRGLQGQKVRVGIEATGHARWFERLLAELKYELWVGDPAQIRAKRVRKQKTDREDARLLLKLLVEDRFPRVWVPSAENRDLRQLLWHRHRLVQMRTRVMNQLQAIALNEGVRRRKGLWSQRGREHLESLALANWATRRRKDLLDLLDRLNPRIEELSEAIEQEAVQRPEVKRLMTHPGVGPLTALAFVLIIGSPERFRGGKQVGSYLGLAPGEESSADRQRLGHISKQGNALLRFLLVEAAQAVVRFDPEWRSHFLHLAMRRHRAIAKVAMARKLAVGLYWMWRKEWDYRQMAQFGSHVGQPVTGHGVQ

SEQ ID NO: 508514 - protein, 380 aa, unidentified
MRKDIRHVGFDVDSDKIVVAVAEPEGEVRSLGAVPNREESVRRLIKKLGPASRLRVCYEAGPHGYGLYWLLSSLGVHCDVIAPTLVPVKSGDRVKTNRRDAMKLARSYRSGDLTAVWVPDAEHEALRDLVRAREVAKKDQLRARHRLGKFLLRRGLRAAAGMKSWTKKHLLWVKTLRFEHPAQEATYLDYLHEVEHAAERVARLDRSIDQAIEALPAEMRALIAGLQALRGIKQVSAATIVAEVGPLSRFPRPKQLMGYSGMVSSEDSTGDSVRRGAITKTGNAHLRRIVGEAAWAYQYRPAMSPELKKRQEGLSEEVKEIAWKAQHRLCTRFKRLSAKGKLRQKVTTAIGRELLGFIWAIGTQVEREQRHSLKEHRRAA

SEQ ID NO: 508515 - protein, 418 aa, unidentified
MQTELSQFTAVIGIDWADKKHDVCVQDMATGRRRASQVRHRAEDLDEWARSLHRRFGGPIAIAVELSKGPIINVLQKYDFFVIFPIDPSKLANHRKTFTTSGAKDDPTDAEFALDLLSKHTEHFKPLSPQSVEMRTLMTLVEQRRQLMNDRVRITNRLRNALKQYYPQPLEWFDRIDTLLFCDFIRRWSSLAQAKRARRATLEKFFREHNMNRKPLLERRIDAIKSAMPLTTDAAVIMPHRLRVQTLAAQLEVVLESIKQYDTEIASLAPQHPDYELFDPLPGAGLVYTPRLMVAFGEQRERFNNAAEVQKYGGIAPVTKRSGQSTWIHWRWQCSTFLRQTFVEWAAQTINKSYWAGLYYHQQRARGCSHQAAVRALAFKWIRILYRCWKTRTPYDEARYLKALQERGSPLLKTAEAA

SEQ ID NO: 508516 - protein, 332 aa, unidentified
MYSIGLDVSKSSINVFISSEELDLEIENSLKSLKSFYSKLKKIYKKEIDKVVFVFEPTGSYSALLYQFCADKNIQIFMINPKQARNFSKAIAQRNKSDLIDARVLAQAISIARKNEIVIPTIDTVVEEIKELMSYYKLKVKQRVQLSNHLEALSVKNGNKTLVRSIKKELKSLKKQEEKIIASIYSIIKKDETLLNKYNAIISIKGVGNIAATVLLHLFIKYPNANQRQIVSLTGLDPVIRESGTSIRGKSRISKAGAKIYRGSLFMAVMSATRHNKQMKAFYERLKNNGKHTTVAQIAVMRKLVTIAHSLYKNGEMYNEDKYLKSTGVSIV

SEQ ID NO: 508517 - protein, 338 aa, unidentified
MATYAGIDLHSNNIFLGIIGQDHKRLCNKRLPNKLSVIKKALQPFKKTLSGIAVESTFNWYWLVDGLQEAGYKMHLANPSAIKQYEGIKHRDDKSDALWLAQMLMLGILPEGYIYPKDQRPTRDLLRRRLLYVQQRTAHILSLKSMVTRNNGNTISTRTIKKLKPQEAHTLFDQEHLCLACSHALATIHFLSSQIKSIEKEVMKHAKIKPEFNSLLTMPGIGNILGLTIMLEVGDIHRFPRAGNYASYCRCVKSERRSNEKKKGAGNRKNGNKYLAWAYVEAAHFAIRFEPKARRFFDRKASRTNNTVARKALANKMARASYYIMRDQVAYDESKMFA

SEQ ID NO: 508518 - protein, 402 aa, unidentified
MNDRQAHIWVGIDAGKAHHWVTAIDDQGAMLWSRKVSNDESAILDPLAEVLTLGENFTWAADIVGTTSALLLALLASHGQSALYVPGRIVNRMAGAYRGEAKTDARDAYVIAETARHRHDLTPIRLPVEIIADLKLLIAHRGDLVADRVRMLNRLRDVLTGIFPRLDRAFDYAKHKGALTLLTGYQTPTALRRMGQVRLTKWLARRGVQGAPAVAEAALEAASGQQTQIGNETIAAQIIADIATQILALDKRLRTLENQITTMFHAHPQAEIIESMPGMGPILGAEFLAAAGPLDNYADDGHLAAAAGLIPVPRDSGRRTGNMHRPKRYNRHLRRSLYLSAQTSVIREGPNRDLYLKKRSEGYKHTQALLALSRRRVSVLWALLRDNRTFTPAPPIRSAQMS

SEQ ID NO: 508519 - protein, 363 aa, unidentified
MVRRLSPGGCRGVDRRCSIEIRTIGIDLGKTVFHFVGVNARGEVVVRKKGSRTQLLRFTSNLRACLIGMEACGGSHFLGRALREQGHDARLMPAQYVKPYVKTNKNDYIDAEACAEAVTRPTMRFVPIKTDDQLDLQSLHRVRERWVVRRTAVINQIRGLLLERGITIRKERHHIEESLPGILEDADNELSGALRVLLTQLRLEMQYLHGQIGETDKLIARICGELEQCRRLVAIPGIGPITATATVAAIGNGAAFKKGRGFSAWLGVVPGEHSTGGKQKLTGTSRRGNKYLRKLFVQGAHTVLLQKTKQSSGLSTWLVNLTARKRKQVATVALANKMARMAWAVLFKGEAYRPPTVPQVIAA

SEQ ID NO: 508520 - protein, 370 aa, unidentified
MQEPITSYVGLDIHKDSVAVAIAQAGRDAPQFIGTSAANLAQVCKVLTRQKCAPKRTLVVYEAGPCGYGWARHLNAHGWRCEVIAPAHLARSAMGRAIKTDRRDALLLARESRAGNLVQIVLPDQRDEAIRDLSRAREDAIAARLRGRQQLKSMMLRHGRSCHGSSWTLAHERQLATIRFEHPAQQIAFNEYRQTVREAHERCERLAQALREQCAEWRMGPVVDALMCLRGFDFIAAVTVIAELGDLTRFAHPRALMSYLGLVPSEHSSGNTRQQGAITRMGNKHARRILVESAWTYRYPAHVGREQQSRQQGQPKLVRDIAWKAQLRLTRRYRKLNLGRKMKTNKVCVAVARELCGFVWDLARHVPIHS

SEQ ID NO: 508521 - protein, 346 aa, unidentified
MVLIGSDFHPSWQQVSWLNKKTGETGDQKLVHEPGAVEKFYRQFPAGSRIGMEATGNCQWFVELLASLGHEVLIGDAAKIRASDSRQQKHDKRDARLLVQLLAEDRFPQIWVPSREQKDLRQLLIHRYKLVRIRAQVKNGLQHLAMNQGVLKKRKLWSVAGQKALRELPLASWASRRREDLLKMMSELDAKINLLDQAVAEAAEKDEKARLLMTQPGVGPITSLAFLLTMGDVSRFRRGKQVASYLGLIPREYSSGGHQRLGSISKQGNTFLRMLLVEAAQGAVRCDPEFRKEYLHRCHKKPKGVAKVAAARKLAIRLYWMLRSNTKYPEVVRVESSSRVPLVSAS

SEQ ID NO: 508522 - protein, 338 aa, unidentified
MALYCGIDLHSTNCWITIIDEDRKLIRESKFGNDSAAIFGFLEPYRVELEDIAVESTFNWYWLVDGLMDEGYRLHLTNTCAIKQYDGLKYTDDRHDARWLAHLLSLGILPEGYIYPKKDRAVRDLLRRRAFLVHKRTSFLLSMRGAFECRTGMRTTSNDIKKWTPADVEQHIADPLEALGITCLLDPMAAMDGQIKILEKEALKRGNLRAEFRGLKTVWGIGKVLGLTITYEVGDIGRFAKVGNFASYCRLVNSNRLSNGKRKGSGNSKNGNPYLSWAFSEAAHFALRHHEPAKKFVQRKRAKTNGIVAIRALAHKLARASYYVMKDNVDFDPDKMLQ

SEQ ID NO: 508523 - protein, 343 aa, unidentified
MKLSRVGIDLAKNVYQLHGVDRSGKTVWKRRLKRHQWLQVLLDTAGRECEIGMEACAGAHHWGRELQSRGYTVKLIPPQFVKPYVKSNKSDAKDAEAICEAMSRPNMRFVTVKRVEQQDIQATHRIRAELMTQRTAKANQIRGLVAEYGLVAPKHLSSLRAAIPCWLEDAENGLTGDFRALLQGVWTDLLLLDDRVGEMDQKIKLLADNNEVCVRLQQLRGIGPMTATAMIATVGDARQYPRSRQMAAAIGITPKQHSSGDKHRLLGISKRGDVYLRTLMIHGARAVVARAKHKDDRLSRWVTNIANKKHPNVAAVALANKTARMAWAMLRNETDYDPDFALR

SEQ ID NO: 508524 - protein, 460 aa, unidentified
MGKKRKKSKKSPSKDPYGLPVIRTHVGAADLGSRFHVVCIPTGEDRRQTVRSFGTTTPQLQQLVAWLQSEKIESLAMESTYIYWIPLYEMLERGGIEAVLVNARHVRNVPGCKTDSKDSRWLQLLHSVGLLKGSFRPGPEICQWRALTRQSGNLVASRTRAVQWMQKALDQMNIAVHRAVTDLTGVTGLSIIRAIVAGERDPVVLARLRDKRCRKSEAEIAEYLQGTWFEEHLFNLERALEDFDHYERQITRYEVEIQRVIEKISPAEREDSTPPEHPKADKQKAMIRHGEEKLRQQLWRFSGVDLTRIDGIRVSGAQTIFSELGLDLSSFPNEDHFVSWLRLCPPSHTSAGKRLKKPNGTGSSRLSGVFRMAALSVRHGDCALGAQYRRMARRKKSQTAVLDVARTIAKQVFRMLRYGQDYVDEGVTAYENRFQRRRLKGLISTAEKMGYVLIPKENAA

SEQ ID NO: 508525 - protein, 366 aa, unidentified
MSTMAQSRHSLIPLEYDIFIGLDVDKHSMAATITDHYGYTKSLKVPYDQQALVQYTGKHFKDKRVAFAYEAGPTGYGLYDSLQAAGYTCLVVSPSKIPVQRGNRVKTNRLDSGQLSRLMQGGQVNSIRVPTPIYRELRQLTNLRNMHIRQVSAMKCRIKAMFLMEGISFPDAPAGSHWSSRVLEELTHVECSTVIRFKLDQLLETLSFHQHHALEAQRQIRRLCMENQDIADSIRYLTSIPGIGWIVASNVISRVGDWRGLRNSHELGAFLGLVPTEHSTGERVSKGSLTHTGDARVRSMLIEAAWSSISHDQELASFYHRVYQHHPRDRAARKAIVAVARKLTERMYCVLTERREYILRPKEDMN

SEQ ID NO: 508526 - protein, 387 aa, unidentified
MMVRTVNDLSAATHGETVRCLIAIELSKKSWVVAFNTPLSEKISRRTLTGCKWKKLLELIEDVRARVGRQMGRPVEVMSCYEAGYDGFWLHRQLEAHGVRNYVIDPASLQVDRRARRVKTDRIDTERLLRSLMAYLRGEPKVWSVVRVPSVAEEDARRLHRERDRLVSERVQHVNRIKGLCALHGIYDYDPLRRRAMAQLEQLRMTEGEALPPRLKSEIKRELQRLELVVEMIATLEAERDAIVEDEASPHVNAKKIQNLHKLKAIGPEFAAVLVGEIFHRGFNNRRQLASYVGLAPSPFQSGNVAHDQGISKSGNRKGRTTGIELAWLWLRYQPDSDLSAWFRARVGITKGRIRRIAIVALARKLLVALWRYLETGLVPRGAVFKG

SEQ ID NO: 508527 - protein, 347 aa, unidentified
MNITRVGVDIAKSVFHVHAVDRHESTQWQAKLKRSQWIESLCERVHPGAEIGMEACASAHHWGRVLQKRGYRVKLIAAQFVKPYVKSNKNDRVDAEAICEAMSRPGMRFVAVKSVEQQDTQAAHRIREELVGQRTAKANQIRGLVGEYGIVAPVGIQKLRLALPQWLEDAENGLTDEFRVLLADLAEDLRHLDRRVSSLDERIAQCVKNDPVARRLLELRGVGPLTASALAGALGDGKGFRKGRDFAASLGLTPRQHSTGGKDRLLGISKRGDGYLRKLLVHGARAVLQHAKDRDDGLSQWLNELTARKHVNVATVALANKTARIAWAIVYNETAYDPMLAASIEAS

SEQ ID NO: 508528 - protein, 455 aa, unidentified
MNYYLGIDVSKGYADFVMISQNKKIIESGFQLDDTFDGHQKLFDYLSKFFEQHKDAALHAAVESTGGYENNWFHSLHEFQEFFNLKVARLNPKGVNHHSKAGLNRIITDNLSARTIAEYLLTHPEKVNYQTQDYYYPLRKKWNFIHSLTKEKTKYLNQLESMLYEANPDILFYCKDNVSKWVLKLLKKYPTAKRLAGASVTKLAQIPYISKEKAREIIERAQNTIASANDLLTQDTIKTLADQILRLEQLIDRQVKLIVQNCPFPEIDLLKSFKSIGDFSAIGLLIQIGSVKRFPTVKHLASFFGIHPVYKSSGDGTSGMRMSKQGRKQPRAILFMVALSAISQNPVIKETYARNLAKGKCRMDAMGVCMHKILRIVYGMLKNNQSFNPEIDRLNQEKGTQNNQKEQTNRLRRYQAPDEYAPISRRQKIKRKEHESSQDGNSAMHEILFDTPSLN

SEQ ID NO: 508529 - protein, 343 aa, unidentified
MDYFAGLDVSVKDTSVCIVDDTGRIVREVRVTSEPDALLTVLRNPTYRFKRIGLEAGPLSQWLFSALGEANLPVICVETRHMRAVLKAQINKTDRNDARGIAQMMRVGLYRPVHVKTLRSQKLRMLLTHRKLLQSKAIAIENDLRGTLRNFGLKVGIAGRTKFEARIEELVEDVPDLAVLVEPLLIVRRVLREQIAVLHRRLLTIVRDDEVCRRLMTIPGVGSVVALTYRATVDVPARFRKSKSVGAVFGLTCSKYQSGEIDRSGRISRCGDEMMRVMLYEAAHSMLRSKKWLWLKAWAMQVARRCGMKKAIVALARRLAVIMHRIWVDGTEFRWIREATVAA

SEQ ID NO: 508530 - protein, 351 aa, unidentified
MGTYIGVDYHRKYSYMTAMDESGKICGQGRVDNHQEAIREFLTRAGVNGKSAAVLEATRNWTVMHDWLEELVDEVHLAHPLKVKAIAEARIKTDKIDAKVLAHLLRCDLLPEAYVPAPASRGARNVLRQRMFFVRVRTMVKNRIWHLVDRYPELANSRPCQELFSKQALAWLKTIPVKEQDREMLDEELKLYYALEERISRSEQLVEKLARGDRRVKLLQTIPGIGRFFAMLIANEVDDISRFANEKKFFSYIGIIPSTFSSGGRTFHGRLTKQGNKYLRWALVEAIWPAVRSHPELGAYHHRISVQKGANPAKIATARRLATIIYRVLSQGRPYRVSGSRLPSRHLGGPS

SEQ ID NO: 508531 - protein, 356 aa, unidentified
MSTMPQPEVRVTVGVDTHADSHVGVALDQLGRDLGTITVETTLRGYGQLLSWASGFGVVDRFGIEGTGCWGAGLARWLHTQGLVVIEVDRPNRRARRRYGKSDPADARAAARAVQSGEATGTPKAGNGAVEAIRTLQVPHRTAVKARSQAANQLHALVVTAPEPLRGRLHDLRLRELVEVAARLRPGPELDTPLEATKQALRLLARRYRQLDAEAVELTRQLHTLVIAVAPALLAEQGVGTHTAATLLVTAGDNPERLHSERSFAHLCGVAPLDASSGKQQRHRLNRGGDRQANSAIHTIAIVRMSHDPTTRAYVARRIAEGKTKRETVRCLKRYIARRIYHHLTDITYQPALDTT

SEQ ID NO: 508532 - protein, 409 aa, unidentified
MQECNAATHRIETASSPVALSAASGKGAAKQHAAYIGLDVHKETIAVAVAEPGRGEPIYRGEIANTPKKVAQLIGKLSEAYDSGLLLFCYEAGPCGYGLYRQLIASGHDCEVVAPSQIPKKAGERIKTDRRDALKLARLLRSGDLTAVWVPDREQERMRDLSRARDDLKAQERKARQQLNAFLLRHGQHWPKGKSRWTPAHEHWLAGLKLDDPWEQIVLETYIDAERAAGERVAQLTDQLMRALPEWSLAPVVDSLVALRGIDKLAAIVLLAELGDISRFDSPKQLMAFLGLVPSEHSTGGRRRQGAITLTGNSHARRMLVESAWSYRFPARQTKHLKSKAANASPAAKRIAWKAQVRLCGRYRSMTRAGKNTKLVCVAIARELAGFLWDIVRQEMPQLLHAQASATSA

SEQ ID NO: 508533 - protein, 406 aa, unidentified
MNQIISVGIDVSKGKSTVCAMIHPNTIIKEPFEVLHTVEEMSMLADYIGSLDGEIRIVMESTGHYHLPVAQFLYQKGFFVCVENAYIIRQFSRIMLHGAKTDPLDARKLAKYGLAYWSELKPYQFHPSCYTELSLLSKQYQTYIKLLIAAKQNVIHLMDEMLPGFKKALDTTSNVQFSKVKYVDFAKEFYHVDMIKSMGKETFRENYKQWCKEKGYRFQSEKADELFHLAEDGIPTLPTEFPSTRLCMEVATEQVSQLGYALEQILSQMQNLAKTLPEYQTIRQMGGMGEKLCVRFIADIGDVRRFHNGKALVAYAGIDAPPYQSGQYTGTKRRISKRGNSALRKTGYEVMKSLKSHPPKTDTRVYDFIIKKENEGKSRKQAKIAGLNKFLQIYYARVMEIYKNIA

SEQ ID NO: 508534 - protein, 457 aa, unidentified
MRFPGIRRARHGLTREVKDREEGIPVVAVMIGIDPHKASHTAVAINGAEEPLGELRVRACASQAEQLLAWARAWPERTWAVEGADGLGHLLAQQLLSAGERVLDVQPKLAARVRLLATGDINKNDPNDARSVAVAALRSRGVREARRDDHAAVLKVWSKRYRDLGRTRTQVACRLHAVLCELVPGGVPGEITAGQAARILASITPAGPVEAARRELAAEFTDDLRGIDARIRDTRKKLAVAVAATGTSLTGLFGAGPVTTAAAIGDVRQVSRFPSRDHFAAYNGTAPIEVSSGGRKVYRLSRRGNRRLNHAIHMIAVTQIRYRHSPGRAYYDKKLAEGKTSKEALRALKRQISDAIFACLQADARRAAAAAAKSPGGQPGNGSDSSAAGSHPEDRLVGQATPGPATHPTTAAGPDAAAAIPALLPPRASGRPGQGPGTARPRSGARRASSTRPAASR

SEQ ID NO: 508535 - protein, 365 aa, unidentified
MPREGNFWYAGKGNNTPYNPLLRRCPMKLYSAIDLHSSTNNLAIIDDDMKRVFAKKLTNDSQIILDALSHYQEDIVGVVVESTYNWYWLVDALMDEGYQVHLANPCAIQRYSGLKYSDDTHDAFWLAKLLKLGILPEGYIYPKQERPVRDLLRKRGHLVKLRTSLVLSLQNIITRNCGVKVCSNDLKKLTEDCVSAHLCGNEDLSLCGNVSKESIDVLTRQIRRIESFVEKKLKVTEPYTNLLTIPGVGTILALTIALETGPIRRFPTVGNYVSYCRKVASAWLSNDKRKGTGNRKNGNKYLSWAFSEAAEYARRYHHASRNFYNRKLSQSNVWVAHNALAHKLSRAAYYIIRDRVPFAEEKLYS

SEQ ID NO: 508536 - protein, 355 aa, unidentified
MQSNKISFKGQNIYVGIDVHLKTWHVTTLTESGYKYSFAQHADAKELFDRLNKKFPEAHFMSAYEAGFCGFSAHYALTEQGIENIVVHAADIPTTGKEKAMKTDAVDSEKIAWALKRNELTGIYIKDKRYMDDTNLIRLRQRFIMDLSRQKNRTKHLLYTQGVTYPERFRNCRTHWSRNFMKWLREEVEFLSEQKLSLLLLCEQVENTRKAILKVTREIRRLSTTDRYKENYDLLITVPGLGLITSMSMLTELDNDIVRFPNERRFVSMLGLIPTCHDSGEKKVSGEKINRGNKHLGPLIVEASWVAIQRDYQLGAYYSSCCQIMKPNKAIIKVARKLACRAYAVLKTKTKYELS

SEQ ID NO: 508537 - protein, 375 aa, unidentified
MSDHSEAFVGLDTSKLRNAVAIAEGARGGEIRFLGEFESSATATAKLVKKLAAKYQRLTFCYEAGPTGYGLYRQIRNLGAECIVVAPSLIPKKPGDRVKTNRRDALNLAKLLRAGELTAVWVPDRGHEAMRDLTRARETAMMDLRSKRQQVSAFLLRQGLHYSERKKTWTKAHTNWLASQKLEYAEQRLVFEEMMLAMRQAQDRLERLEQAIRVAVPDWSLAEVVTALMAMRGIDLISAATFLAEIGDLSRFQHPSELMGYLGLVPSENSTGDKIKRGPISKAGNRRARRMLVECAWSYQHPPRVGQEKQAKVAAAPRAVREIAWKAQCRLHGRYRALVRRGKLKTVAVTAVARELAGFIWAVSRAITAARVVAK

SEQ ID NO: 508538 - protein, 320 aa, unidentified
MMAQSDRVVVGIDVAKGKVDACIRALSQRRTFESTAEGRRQLIAWLRKHRVGKAVMEASGGYERDWAKALREAGIEVRIVDPKRVRSFARSAGRLAKNDVIDAEMIAWFAETFGEAPAQAYDADREKLAQIVNARQALLDVQTELQNRNEHSVPEVVRKMQARLLKKIALEMAKLEAAIAAMIKATAHFTELAEIIESVPGLGGGTSAGLIAAMPELGQVSNKAAAALLGVAPYDDDSGKRRGERQIKGGRRKVRNLFYMACLGAATRHNPMLKAFYGRLIAKGKEKKVALVACMRKLIVILNIMIARREKWDANRYAMG

SEQ ID NO: 508539 - protein, 446 aa, unidentified
MELDIINPNCAGIDVGSKSHFVAVGQALEDVKEFGVYADDLTAICLHLKEYGVTSVAMESTGNYWQNLYVELEKHQMEVTLCNGKFTKHAKGKKTDVKDCRWIQKLHALGLLTGSFLPDATTEQLRTYCRQRTNWIDLAAEASHKMQKYLKLLNFRLDVVVKDICGLTGLAIIADICKGNLDPEKLSLHRHGNCRKSEEEIAKALKGNNRTDFLFGLKQEYDSYLFFQKKIEACDTQINAFLKTQINSNPDKKKLKTDDKMHKRVNKNSIKGIDLNQAAYQYFGGIDLMKIEGLSHSTILTIMSEVGPEGFTKFESSKQFTSWLRLAPNNKISGGKILSNKIPKGSNRLKIALRHAANAIGNLKETHLSDFFKRVAYRKGRATAVSATARKLAVIIWNMISKRVQYKAPTEYLFLDQKRKFNVIQKIKKNIAKLELKPEDVGFVTA

SEQ ID NO: 508540 - protein, 313 aa, unidentified
MDEIWIGIDVSKTRLDVAVGEDGENWSAGNDDQGIAKTVERCSQFHPQLVVVESTGGLESRLVSELYLAKVPVALVNPRRVREFAKATGLLAKTDKLDARLLTRFGQAVKPDPTCLPSEEEQLLSAMVTRRRQLIDMRTAETNRLPTAHVSMRSSIENLLSWLNEQITALELKIDEFIQNHPYFKAKDDILRSVPGIGPVTAAIVISDLPELGKLDRKKIAALVGVAPFNDDSGFHKGKRRVNGGRPNVRTVLYMAAISASRFNPIIRSFYEHLLMMGKLKKVALVACMRKLLTILNAMLRDQKSWQPAIVAP

SEQ ID NO: 508541 - protein, 354 aa, unidentified
MLNTKYIGMDIHKETISIAVLSAGGKSVMECVIETKASTILQFIHGLRGDLHVTFEEGTWAAWLYDLLNYVTEVLVCDPRKNALLKEGSKSDKIDARKLAELLRLNHLKPVYHGEHGVRTLKELARSYLTITQDLTRVRNRLKALYRSWAIPCSGRQVYAPRHRSEWLGKISEAGVRRRAEHYYQQLDALRPLRQEVRRDLLTESQKHKAWKLLRQIPGIGAIRAALLIALMQTPHRFRTKRQLWTYSGLGLETHDSAQYCVVEGQLRRSKKPLMLRGLNQNHNHDLKAIFKGAALEASSGAGPFHDFYEALLAKGRKPTMARLTLARKIAAITLIVWKKEVSFDAKHLKQQAA

SEQ ID NO: 508542 - protein, 425 aa, unidentified
MRQEIPEPAEFGAYIGLDWADQSHVISLRSADSNQVEHYQVKHTPEVLAEWVSGLQQRFAGQRVAVALEQSRGAVVHALMGYDFLVLYPVNPKTLAKYREAFSPGGAKDDPTDADLLLELVTLHRDKLRAWLPDDELTRTITLLVEYRRQLVASQTRLSNRLTSLLKLYFPQALAWAGELTTVQACDFLQHWPTLAQVQQVAPTKLRKFYIAHGCRKAEVIEQRLQEIKVGQPLTKDVAVITASVAMVQATTSQLRQVLEAVARMDKQIAELFAQHDDHDLFSSFPGAGPVLAPRLLAAMGADRGRFAAAREVQQLSGIAPVIERSGKSCWVHRRWACPKFLRQSFHEFAGQSIRWSAWARAFYDQQRNRGNGHHAAVRSLAYRWIRIIYRCWQLRVPYCEETYCRALERRQSPLARILSAQTQS

SEQ ID NO: 508543 - protein, 397 aa, unidentified
MKGWVGIDVAKDTITVTFLAADADTEHTAQTDTFSLTQEGWEDFHRHLHAFAHTLQTVAIGLESSGPYTVLLLAHLVTLPYPLYLINPTLIQCFRQAQSLRPAKTDPIDALIIARFLRQTHTTLTPFSETEDLHLLTREYESLSQQIAAFKTSIRQQVHILFPELPQHINLFAQRTLHLLLAFPSAQSVAQADSDTLHTLWQAPRGRKPRLTITQLQHLARTSFGVHYPTREHLLQSLIRRLLFLEAERKRLEQAILAYIQRLHQDAFRQLQQIPGMGPITTATLLAEIGDISRFPSAKHLVAYAGLDPSVHQSGRYRGRSRLSKRGSPHLRRILFLIAQHLVRTTRRFATAYHHYRQKGRSYKETLVIVARKILVVFYALLSRSVPFKDLPIPESP

SEQ ID NO: 508544 - protein, 418 aa, unidentified
MKVVYPVCCGVDVHKTFLVATIITSQGITPHYSKKRFSTFNNSILQFKQWLIDNNCFDVCMESTGKYWVPVYNLLEDTIRITIANPKWVKAIKGNKDDTKDSKWIGDLFRLGLVPGSYIPNKPIRILREYTRYRSKLVSCKSSEKNRFQNAFTVCNVALDAVVSDMFGKSASSITDYLISSDSFDPEYCSSLLQKSLKKKADIVVQSIEGYQMTKEQKARILMVRAHFEFIKESITDLDEKLDKMVAPYESYINLLCTIPGVDRTSAITIISEIGTDMSQFANSKRLCCWAGLTPGNNESAGKKKSVRITRAGVYLKPALVQVAHAAVKSDSSPYYRLKYERICKRRGKKRAIIAIARMILTAIYHMFVTGELFNPSDLYKIDMPQEMMGKQKEKAINQAIKLLVANGLIKTPDIPVA

SEQ ID NO: 508545 - protein, 341 aa, unidentified
MKSNTIGLDLAKNVLHMICLDERQNEISKRKFRRHQVLPYFANLLPCWVAMEACAGAHDWARKLLKMGHKVTLIAPQHVKPFVRGNKNDYNDARAIIEAATRPGMPTVEIKTTVAQDLQAIHRLRSQCIKSRTALANSIRGLLSEYGIVIPQRIQNLRKHLPSIMEDTTRELSDLFRELLMSSYDQLVDLDERVLFYTKKVEQLAKEDDACQRLQTVPGFGPIVASAYRITMGNGHQFSKGREASAFLGIVPRQHSSGGKTVLLGISKRGDRYLRTQLIHGARSVVIWAAKKNDPLSRWINRIRLRRGWNKAVVAMANKMARIAWAVLRYGTTYDPSKACW

SEQ ID NO: 508546 - protein, 355 aa, unidentified
MNSEKYIGLDVHQATICVAVMDPKGKVVMESILETKATTILEFLAGLRGTLSVTFEEGTWAAWLYDLLKPHVANLVVCNPRKNALLKHGNKSDKIDARKLADLLRLNDLEPVYHGETGVRMLRELARSYLTIVKDVSRVMSRLIAIYRSWAVPCAGRDVYYTRHRGEWLGKIPEAGSRRRAEQLYQQLDMLQPLRQQARRELLAESRKHTITAKLRQIPSLGPIRSALAVALIQTPHRFRTKRQLWTYSGLGLETRDSGEYHYVQGQVRRRKKQVFIRGLNKDHNHDLKGLFKAAATRASVRPGPFQDFYQRSLAKGIQPTMARLTLARKIAAITLTLWKKGENFDAEKLKAQAA

SEQ ID NO: 508547 - protein, 352 aa, unidentified
MQTLVVGCDAHKHYSQLEVQDSTGQALSRVRVDHAHGSILHFFSTLPRGTPVALESVGNWYWIADEIEQAGCLPLLTNPAKAKLLMGHVNKTDKLDASGLATLMRLGSLPSVWLPPAALRDQRELPRTRMAFTALRTSIKNRIHSLLAKYNLSPAGDVQLFSKAGRAWLDSSVSGLPPESARCLAQELELLDFLSLQISSLEERIHSLIALTPTMQLLKTIPGVGDILAIVIEREVGDIQRFPSAQQFSSYCGTTPRVSSSGGKTRYGKLRTESNQYLKWAFIEAANAVAAHHAQRGWTTRHASRLYLRIRSRKGGSVAIGAVARHLAESTFWILKKSEPYRETNAVSPRQG

SEQ ID NO: 508548 - protein, 425 aa, unidentified
MQQSAPEDFGAYIGIDWADQTHFVSLRDAKSQEVKRYKLEQKPEVLLQWVNELQQRFPGQRVAVALEQTRGALIYALMSYEFFVLFPVNPKALARYREAFNVGGAKDDPTDSDLLLELVTLHRSKLRAWRPDDELTRTITLLVQYRRDLVDMRTALTHRLAALLKLYFPQALQWAGELDTFQACDFLQRWPTLTKVQRTPAAKLRQFYVSHNCRTEAVVEKRLQQIPTAQPLTTDGAVITTSVAMVQAIVNQLRPLMVSIKELDKQIAELFAKHDDYELFSSFPGAGEVLAPRLLSALGADRDRFESAEEIQQLSGIAPVTERSGKTCWVHHRFACPKFLRQSFHEFAAQSISQSPWARTYYKRRRERGNSHQAAVRSLAFRWIRIIYRCWQMRIPYSEQTYQQALRRRGSPIAKLIPLLVDQTS

SEQ ID NO: 508549 - protein, 373 aa, unidentified
MPKYSTAFGMDVHLRSTTVCALDADTGEAVTRRFPGNPWGEIAGWMDGFPGPSLAAYESGYLGFAPQRELAGLGVECAVAAVSKIPRSAADSASKNDRNDAARMAKAILAHDISPVWVPSPEVEGIRDLAGAYDGATARLATAKQRLLAFLARRGFVYGGTTPAGNPRKYWTYDFLRWLDKVRPEDDGGVRALAALRNEVEAAAEARADLLSEYRAAVGASPIAAEVAALQSIKGCAFALAAAFSAEVGDFTRFRSGRQVTAYFGLAPSQRSSGDSVRLGGISGAGNALVRKLAVEGSWCYAAARHQPKLMPRDTGVPLEIRMHGRKGSERLLRRREEMLARGMPAAKANAATAAELVRWLWALGMMCREGAE

SEQ ID NO: 508550 - protein, 426 aa, unidentified
MKFNTQNKKIAAITEKTLVVGIDIGSEVHFARAFDWRGYEYSSKPFQFTNSEEGFEAFRVWIEDMKAKGGKETVMPGMEPTGHYWFNLGRYLQDRGMKPLHVNPHHVKKSKEMDDNSQVKNDRKDPKVIAGLVNAGRYMYPYIPNGVYAEIRTLNSLRVFAQEEAIRLKNRIARWFSIYFPNYKDVYGNVNAISGLMVLKKAPLPEDIVKLGVEGVNHIWRESKVRSVGLKKAKELVTAASHSVGVQNSQDAARIELQFLLSDYEMQVKREAELMAMIEAKIKKIPYVENLLAIKGIGMKTAIGFVAEVGDIRRFKDPKEIQKLAGYAIVNDESCKHVGESHISYRGRKRLRYVLYEAAVSVLAHSPEFRLIHHYYTTREHNPLKKMQSLVAIACKLIRVFYRILTSGITYDPGKMMGDIQRPQAA

SEQ ID NO: 508551 - protein, 411 aa, unidentified
MQVLYPRCSGLDVHKATIAACVLVAVGQTKQKHLLRCRTMTRDLLALADWLAGFGVTHVALESTGVYWKPIWNVLEGRFELLLINAQHFKAVPGRKTDMKDCEWLAELLQHGLLRASFVPPTVVRDLRDLNRNRAILVQQRASVSNRIEKVLEDANIKLATVASHVLGQSGRAMLHAMSTGEEDVDKLAEMARAKLRNKIPELRVALTGAVRDPHRFTLQQWLLQLDAVEKQIADFETEIEQRNQPFQAEVERLMGIPGVDRVTASALVAEIGTNMAQFPTVQHLACWAGLCPGNQESAGKRLSGKTRKGNPWLRRVLCQAAWAASHTKNTYLSAQYHRLAARRGKKRAIVAVAHSILVIAYYLLSRGEQYRDKGSDYFDRINSEGLKRHLVKRLESLGHRVKLEPILAEA

SEQ ID NO: 508552 - protein, 406 aa, unidentified
MQVYIGIDWSENKHDIVMMNEAGAAIVRQTIAHTPQGFLELEASCQNLDLPPDACLFGLETAHNLLVDFLWSRGYANVYVVPPSVVKSTRGRYGQSGARTDQSDALLLADLLRTDRPRLQVWRPDSLLTRQMRAKVSLINHLTRSIVRLSNRLRAVLLRYYPAALHVFSNLRTQIALEFIRTYPTPETTMTLTVDDFKAFAHRHGYTQPKRLPECFARLKTPRPQAMPETVLVFRDEAVLLATHLLHTVRSKNVALRELQALFKQHPDHYIFDSLPGAGKFLAPALLVKFGDDRQRFPSPDSVQALAGTCPVTDRSGKRKVVKFRRACDREFRDIAQKWAIASKPESLWATSYWGHIRPHCDSDSHAYRCLANRWLAIVWKLWQTRRVYDEAYHLQQRAKHSKPRR

SEQ ID NO: 508553 - protein, 351 aa, unidentified
MPHKLNSGIAVIGVDIGKNSFHVVGHDKRGAIVLRQKWSRGQVEARLANLRPCLIGMEACVGAHHLSRKLQMLGHDARLMPAKYVRPYSKGQKNDFRDAEAIAEAVQRPTMKFVATKTAEQLDLQALHRVRERLVSQRTGIINQIRAFLLERGIAVRQGLRFLRAELPRILAASCDALSPRMLRVIEDLAGDWRLLDQRIEGLSSEIEALARKDKDCERLMTVPGIGPIISSAMVAAVGTGDAFSKGRDFGAWLGLVPKQISTGDRTILGSISKRGNRYLRTLFVQAAWVVLVRIGPKHWDRYGLKSWIEAAKKRLHHNVLAIALANKLARIAWSVLAHGRAFESTKIQAA

SEQ ID NO: 508554 - protein, 355 aa, unidentified
MPNQYKHIGVDLAKSSFVADLPKGVTSFAQSPAGLLRFLSQLPARAWVVCEATGGYERALARACHQAGVRVSVVNPRRVREFAKSQGILAKTDRIDTRLLSLFARKTEKLRASRAPVQAEAVLRELLQAREALVEALKHETNQAEHATGLPLLEGLAAARRALLERHIKQIDAEMERVIAADRDLADRAARCAQVQGVGPVTTAAVLALMPELGSLEKGQAAALLGVAPIAAQSGTCDKSRHIEGRPPPPAQNRLHGRTERRPPQPRSLRLLPAPPRTRQTRQSRSLRPHAQTHRTAQSSPQISQLFPCALITVAALRCAARGFVRFSPNGCDAAFHAVPKWLGRFFRMTTNTSP

SEQ ID NO: 508555 - protein, 309 aa, unidentified
MDAIVVGIDVSKDRLDVHVLPTNEAFSVRRDAAGVEAAVSRLLPLAPQSVAVEATGGYETVVAASLAAAGLPVVVVNPAQVRAFAQALGKRAKTDPIDAAVIAAFVAATRPEVRPLPDAETSALADLVTRRRQIIQMIVAERQREKRAAAKTRRSIVRLVKALEKELASVDHDIDDAVRGSPAWRAKEDLLSSVPGVGPTIARTLIAELPELGTLDRRQVAALAGLVPYTRQSGQWRGRSFIGGGRATVRSAVFIGAMVAARCNPKLRAFHQRLIADGKPKMVALIAVARKLLTILNAILRDKKPWQPA

SEQ ID NO: 508556 - protein, 311 aa, unidentified
MQEVFVGVDIAKDWLDIFHPGSGLRRIDNTAAAARRFAKASAKDGVWVIFEASGGYDRLLRDALEAAQARFSRVNPRQARDFARAMGVVGKTDRVDARMLAEFGARLRPAATAAAAPERCALQALTTRRRQLVEIRKQELTRLPQTLDPAARADIRSLILILNARIRRIEGAMAAQVGATPDMAQAARRMQTVPGVGPIVAATLLAELPELGQLDRRRIAALAGLAPIARDSGKHLGKRRIGGGRPTVRAILYIAALHASRLSQPFKAFRDRLKAAGKPTKVTLVATAHKLLDILNAMLAASTDYKANTMP

SEQ ID NO: 508557 - protein, 404 aa, unidentified
MRFCGIDWANDHHDALSIDEQGRQLGSIRVAHSPEGLSQLDTYLERMAGPGGREQIACIVETTHGLLIAHLLEKGWPVYPVNPRTVEKRRAPSGAKTDTIDAYLLAKTGRADFQDLHRLNPDSEQIQEIKTLTRDQDALIQMQTRLVNQLTACLKAYYPVALEVFGKLHQPSTLAFLRAYPTLQAVRAASAEELTAVLKQARYPGASQKAQQIVKHLQQPCLHASEVITRTKARLMLALVDQLEPLLKQIAEYDKEIERLFLIHADSELFSTLPGAGARLAPRLLAEMGDDRSRYADASSLQALAGTSPVLFQSGTYQKAHRRLGCIKPWRNALHQFAWQSTLQEAWAKEYYQRKRAEGKSHTVAVRALANIWARILYAVWKTKELYQTTTFEQARQAHALRSA

SEQ ID NO: 508558 - protein, 332 aa, unidentified
MVAGTQGSFNKVGSTKMTQISRTAGIDTSKVKLDVAVHGGVKRWQVDNTLVGWRRLAAELTSAEVMRVGIEASGGYECGVVSCLRAKGFTVLVLQPIQVKAYARLHLRRAKNDKLDAVLIAACAATIDRPRIEPDERLTKLAQHLTFVEQIEEDIARFKVRLEHVGDPRLRRMVMADIARLKGRRSAELLRIVTALHAHDDLARRLDLVLSVPGLGERTALALIIRMPELGRVCREEAAALAGLAPFDDDSGKHKGERHIAGGRSRLRRSLFAAALPAAFRWNKALIDLYRRLTARGKAHNAALIACARKLLIYANTVVQRGTPWIERPLSV

SEQ ID NO: 508559 - protein, 363 aa, unidentified
MNSVYHTELSSLEETRGQFNGGKADIKLGIDVHQDFYVVVMQVGGSNPKPPQRFHKQAFLLWAAKLKSRSAEVHAVYEACGFGFSLQRQLSQLSIHCYVSCPQKLDEHNKRVKTDSLDAKTLCLRLDRFVRGNREALAMVRVPSEEEERSRAIHRQREQLVKVRKILEAQGRSLMVNHGIEPVKNWWKGNNFAALPLPAWIKELLQNSQPILIALQQKISALTLQLQVAAAFNQPRGLGAMTSVMIDREIGDWHRFNNRRQIASYTGLCPGEYSSGHTRLQSCVTKHGNPRLRAALVELAWRLVRFQPNYSAVRKWKERLAKGTLTTGAARKKAIVALARQLAIDLWRIRTGRLSAEALGLEI

SEQ ID NO: 508560 - protein, 364 aa, unidentified
MTTEQKRRTLFVGVDVHKDTHTAVGVSPFGEKLFEITVGNYQKDFRSLAEAVESVSAKEMLSPYFGLEDCSGFGERLSGFLLESGYAVVHVPPILVDGRRKNETHPEKSDSLDALGVAKVMLQRSDKLLPYTLTPEALKAKQIKEVSVDREFLVSERTRLKNQLHTLLHRLWNTEYRTKFKDPFSLKALRHWLSRTPKGADVFLVRMMKRKARRLLDLHEEITELEDELETLLKESGSTIQTASGCGVTIAAMVVGEIGDINRFHSPAALAKYAGCAPREYSSGKTHRHRKTRSGNRRLNCAFHRMALSQISRMGNPAAQKYFKKKVSEGKSKPQALVCLRRHMVNIVWMMMKHKTEYRYPQEH

SEQ ID NO: 508561 - protein, 465 aa, unidentified
MAMRKREEELYPNAAGIDIGASSHWVAIPRHLAEAGGCEPVREVGAMTDDLNALAVWLVGLGVDTVAVESTGVYWIPVFEVLEQHGLQVWLVDARQLKYVPGRKSDVQDCQWLQKLMSLGLLRAAWRPSAEVCVLRAVARQRETLLIEQARWVQRMQKALVQMNIQLTEVLSDVMGQTGQAIIRDIVAGAREAKVLARHRHRRIRASEADIAKALTGNWREEHLFVLKQALAMYDDIGRHLAECDARLDALLDARASKAVDLGKLPRTGSKLRSEHDIRQRLANWAGVDLTRINGLGVTVVMKLLTEIGPDVSRFASVKHFCSWLGLCPGTKISGGKVLSSGTKRSANRARQALRLAAQSLCRSESALGAFYRRLCSRMDKPRANTAAAHKLARMVYFMLTRGESFVDQGQQRYEAQQRQRSIAALKRRASAIPARPSTVTISASMTDAAIATRGSCESVQSWYA

SEQ ID NO: 508562 - protein, 412 aa, unidentified
MIVGIDVGSETHYARAFNWRNYEYSKKPFAFSNDEAGFPSFKDWMDDIAEKHGMETVIPGKEPTGHYWLNLGAYLQEQGMKPVHVNPHHVKKSKELDDNNQSKNDRKDPKTIAGLVNEGRFSYPYIPTGIYAEIRNLSNLRIQTQEEITRIKNRIARWFSIYFPEIKDVYRNPDAVSGLMVIKQAPLPCDIKELGVDGVNKIWRDARLKGAGIKRARTLVTAAEHSIGNTEAPRSARKEIRNLLEDYEGYKKRMDELMEEIEKTLSEIPYIDKLMKINGIGIKTVSCFIAEVGDIGRFDNPKQVQKLAGYAIVADSSGKHNGESRISHRGRKRLRYALYESAISVIGKNKEFKEIHSYYRTREKNPLKKMQSVIAVACKLIRIFYTILTKGVDYDGQKMLNDIVRPEIQPAA

SEQ ID NO: 508563 - protein, 443 aa, unidentified
MCGGSVNAFPSLTFIQEGRFLTVVYPICCGVDVHKTFFVATLITTEGIQPIYKKRRFSTYNSQILTFKAWLLENNCRDVCMESTGKYWIPVFNLLEDSINVTIANPKWVKTIKGNKDDAKDSKWIGDLFRIGLVPGSFIPSKDIRILREYTRYRFKLVSCKSSEKNRYQNVFTVCNVALDAVVSDMFGKSAASITDYIVNADAFDPEHCVSLLQKSLKKKADEVIESIDGFQMTASQKKRAKMVKEHYDYLVSQIGKLDDAIGELAKPFEPAINLLCTIPGIRRDSAIMILSEIGTDMSQFDTSKRLCRWAGLTPGNNESAGKKKSVRITRAGVYLKPALVEIAHAAVKSKATPYYRIKYERISKRRGKKRAIIAIARMVLTAVFHMLTTGEVWNPVDLNQIDMPPELREKEIQKSLRRALKLLITHRIVSPDVIQIPESAPA

SEQ ID NO: 508564 - protein, 394 aa, unidentified
MMICVGIDVAKDKHDCFILSSEGKVLADVFTIPNNAEGFGTLLQTIRRCTRPTDKIKVGLEATGHYSYNILGFLLDKGLPTYVINPLHTNLYRKSLSLRKTKTDRVDARTIAAMLMSDVDLKSYTDTAYHNEELKSLTRYRFDKVRERAKLKQSVSRLVTILFPELEKLVSSLHMASVYAVLGEFPGAKQIAGAHLTHLKTLLNDASKGHYGRDMATELRNAARCSVGSVMPAKSLELQHTIRLIRELDTEINDIETAIQAIMEEMQSPITTIPGIGIRMGAMILAEIGDFSRFDSPDKILAYAGMSPSTYQSGQLSLSGAYSHMEKRGSRYLRYALYNATKYVCLWDPTFEAYLAKKRAEGKHYNVALSHAAKKLVRLIYAMEKSRRPYNTAA

SEQ ID NO: 508565 - protein, 324 aa, unidentified
MESTAKDKYYVGIDISKDSFDVALPHGEKYRHLKLANNLQGFAKLVEAVQGLQACCVMEASGPYYLQLATYLHAKGIEVSVVNPLSIRRFCQMRLTRAKTDKKDAVMIARYGLCEQPQRWQPEAAHLFELRQLQMVTQGMEKTLHQYRRQLEALTAAPQVNRQARKSLEQSLQYIEKQLEKLEAEMLLLIKQHHQELFEQVTSIPGLGRKSALLLVVITGGFTRFAHYKQLVSYLGLSPRIYESGTSIKGRARICKMGMSRVRAVLYVCSWSAIKANKACRELYERLLAKGKAKRLALIAVVNKLLRQAFAVATKKEFYLEKTY

SEQ ID NO: 508566 - protein, 347 aa, unidentified
MRFYTKQHKFYCGIDLHAKKMYLCILDETGQIRLHRNINTNRDIFLNIIEPFREDVVVAVECMFTWYWIADLCTKEDIPFVLGHALYMKAIHGGKAKNDKIDSHKIAVLLRGGMIPQAYVYPQKMRATRDLLRRRNHLMRKRAELYAHIQNTRSQYNLCEPLGCIAKPQNREGIIERFEDISVQHMLASDMAVIEAYDPIIAKMERDIISMAKHHDPVAHALLNTVPGIGKILSLVILYEIEDIKRFPTVQDFASYSRLVKSAKESNGKKYGSNGKKIGNAHLKWAFSEAAVLFLKGNEPGKRHLDRLANKHGKGKALSILAHKLGRAVYFMLKNKKPFDQDTFLGL

SEQ ID NO: 508567 - protein, 346 aa, unidentified
MLYAGLDLSRKRLDFHLLDAEGATVEVGAAPPDADGLCGLTQRLDRHGSRICAAIESMNGARFVHDRLELAGWQVEIADAQKVKGLAPLACKTDRIDAWVLAELARRELVPAIWLPDPAVRGERERARWRLHLVRHRSSLKQRVHAVLLAHGKPCPVSDLFGVRGRQLLGRLGLPEPWQGTIEASLRLIDELDREIGDCEAELRRLGADHRYVPLLLTVPGIGWVLAYTIAAELGDIDRFPSPRKLAGYTGLCPRVYQSGERDLRGPLAKQGPRYLRWALVEAATHACTHPAYRDRYRQTKARIGKQRGAKVAQIDLARRLTEAIWHMLTRNQAFAPKGATDPLAA

SEQ ID NO: 508568 - protein, 345 aa, unidentified
MPIVGGLDIHRKQITFDYLDTETGQVQRGQISPADRLHLRAWLARFAGREDVAFAVEGCAGWRYVAEELAAAGIAAHLAEPADTAFARGRKRHAKTDRTDARHLRVLLAEGRLPECWIPPARILECRALLETYNDLRRERTAWAQRIHAVLFHQGAPALGEGALRTEKGVTALREVAAAHLSPAGQLQVATALEVIDALEARLHVVRHQLTDAARHLAGARALAARLYGVGPVTALALTCWLGGAGRFSSSRQAVRFAGLDITVHSSDRKGPPGRLSRQGPPVLRWAVYEAGKTHARTSAPDHRYYAQVKDRKNSKRACLSEARKILRQAHHILAELGDDALAAA

SEQ ID NO: 508569 - protein, 268 aa, unidentified
MQQFIGCDQHKLYSVFVSMDEAGQAGEAVRVMHDRSAIQKFLAQLPAGVEIAVETSGHYYWLVEEIEKAGHQARLAHALEVKKRIGRKGKKTDKEDATGLAMLLRNGTLPEVWIPPGELRDRREMFRMRMFLSQQRTRVKNRIHGALSRYNVRLSGDPYSVQWREQLRARLPELPEFTRQSVQWQLRTLDFTLAQMKQAEGRLLKVLTDIPEVDLLKTLPGVGPILSMVLMLEIGKVERFPSSAHLASYCGLTPRVSSSGGRTHLGQV

SEQ ID NO: 508570 - protein, 415 aa, unidentified
MEALYERCCGLDVHKASITACVLIKVDKGKVRKQMRRFSAMTTDLHALAEWLCELQVTHVAMESTGVYWKPVWNVLEDQFTLVLANAQHVKNVPGRKTDAKDSEWIAELLQHGLLAGSFVPPQLIRDLRDLTRGRASLSQESSRIANRIQKLLEDANIKLASVASNTLGKSGLAMLDAMVGGEDDPERLADLAVGVLRSKIPQLRLALEGLMREHHRFLLKRLLTQWRFLQSEILELDRRLQQLAQEVPILVEVVARWDSIPGIDQIAAWGLVAETGLDMEQFPTAAHLASWAGVCPGNCESAGKRLRGMTRKGSPWLRRILGQSAWAAARTKQTYLASQFRRLAARRGGKRAIVAVGHSLLIIGYYLQKNEVVYEDLGADYFDRLNADGLRRYLVKRLESMGHKVTLEPRQNAA

SEQ ID NO: 508571 - protein, 338 aa, unidentified
MSLYAGIDLHANNHYLAVIDETDKLVASRRCPNDLASIRRVLEPHREELVGIAVESTFNWYWLVDGLQESDYCVHLVNTLAAQQYQGLKYTDDKTDARWLAQMLRLGILPTGWIYPKKDRAVRDLLRRRSQLVRQRTASRLGLRNVLERTTARRLSTNALKKLTRDDLAGWIEDENVRLSMAASLAMIEAASEQIEHLERTILEQAKLKDGYRILTTIPGVGPVIAATLQYETGDLGRFATVGDYVSYCRLVKAERSSNQRIKGQGLRKNGNPYLSWAFHEAAHFAVRFQPQARRWYEKKRARTCALVAIRALAHKLARAAYFMMRDQVPYAPARLFG

SEQ ID NO: 508572 - protein, 363 aa, unidentified
MKPKTDFSTASLAVIGVDIGKEVFHIVGLAVDGKIAFRKKVRRLGFEDAFEKLPPSIVGMEACLSAHFVSRVLRRLGHEPRIIPAIYVRPFVKGQKNDYNDAEAIAEAALRPNLRAVQEKSQDQLDLQACHRVRSRLVSRRTATINQIRAFLIEQGITVRSGARALRNSLFAILENRRDEISPRMASLILGLYEDWCQLDKRIETITSAIEELSQVEPKCQRLMSVPGIGPIIATGIVAAVSMGEAFERGRDFAAWLGLVPRQHSTGGRSVLGRISKRGSKYLRTLFIQAAKVLLMRPHNWPRYSFGAWLTAAASRLHKNKLAVALANKLARIAWSVLRNEKAFDTHLEVAAIYAAPLEPVRD

SEQ ID NO: 508573 - protein, 408 aa, unidentified
MKLLVGIDVSSEKLDTCFLDSEDHILLEVSLPNNIVGASKIKEHILDFEKSIHYDRIIVGMEATSVYSFHPSTFLAEDDDLKTLNIEVVVMNPKAIHRFKGLFEEDKTDQIDAYRIADFLRFDRFNVSLLKEEQYMALQRLTRSRYQLICQLTEMKQHFLENLYYKCNTLTKEIDTSVFGSTMMELLTDSMSLDEIASMSLVELAAFLQERGRGRFSNPDKLANSISKAIRDSYRLGKIMQGSVDVVLASYAMMIQALKKQIKTLDKAIQNLVFTLPESKSLLSIPGIGPVYAAGILAELGQIERFENEAKIAKYAGFYWKRKQSGNFESERTVMTKTGNHYLRYYLVEAAGSVMRNEPVYREYYLKKYHEVPKHQHKRALVLTARKLVRMVDVLLRNHQLYAPERSV

SEQ ID NO: 508574 - protein, 439 aa, unidentified
MILIREVADAPVIMGISKPAGLKSPCREVKIVNPLFVGIDVSSRSNVAYLMKPDGSKHSSFSVQNNLGGAKLLSERIVSALNSMRLSNVMIGLEATSIYGDSLVYALREDGSLGRFQRKIHILNPRQVKKFKEAYPDLPKNDWVDAFVIADHLRFGRITKEVYMDDYRYQALRTLTRARFDAIENLTREKQRFANYLFLKCSGIAQDKDIQNTSATTIALVECFETADDLANAALDELTAFIAKTGRGRFADPVATAKAVQAAARGSYRLPKTVNDTVNQAMSVSIASMRALKEQVKVLDKAIEQQFEIIPNTLISIPGIGKVYSAGIIAEIGDIHRFNSQASVAKFAGLVWHKNQSGDFEAEHSRMIKSGNRYLRYYLLEAANSVRRCDSEFRRYYDLKFKEVNKYQHKRALAFTARKLVRLLFRLLKDNRLYIPPES

SEQ ID NO: 508575 - protein, 355 aa, unidentified
MSQEKYIGMDVHQATISVAVMDDRGKLIMECILETKAGTILEFIQGLHGSLSVTFEEGTSAAWLHDLLKAHVAHLVVCDPRKNALLKDGSKSDRIDARKLAELLRLNKLHPVYHGEHGVRTLKELGRSYLTITQDLTRVMSRIKALYRSWAIPCSGTTVYAPRHRAEWLATIQEPGVRRRAERLYQQLDLLQPVRQQARQDLLRESHKHPAVKLLRQIPAIGPIRAALLVALLQTPHRFRTKRQLWAYSGFALETHDSGEYRIVRGKVRRNRERLTVLGLNDNHNHDLKNLFKGAAISASTRPGPLYDFYVALLEKGMRPTMARLTLARKIATITLTIWKKGVDFDAQQLNRQAA

SEQ ID NO: 508576 - protein, 485 aa, unidentified
MQRRLVGIDLGIASAHTVRVRDEAGREVCRRRCEPTVDSLSMIESAALAGAAPGTRLEVVIEPTGPAWLPIAVFFTARGHLVFRVSSAKAADLRRFLSRHAKSNGIDADTLARLPLIDPDGLRPLELPDAAAAALDRRVRACDRLTMAASEHKVRIKDLVRQVMPCTPLTGDLGKADLAVLERYADPRALLRLGRARLTALIVKASHNHQGAARAEQWLVAAQAAVDLYGDHPAVAFTDLAAEIATEVRLLRAIATELAAHAAERETCYRWVDPMQLARSLPGLAEVGGPAMTAVIGDAARFPTAAHFKSYLGLAPRASETGDTDRKGQPMSKAGSRLARATLIRAADWARKQDPQLARIYHQQMVERGAEHLKASCVVAARLAERLWTVMRRRMPYVICDVDGTPVTPQQAKQIIAQQWTVTEEIRRRRRSTKRRAGKAPHQALTGHDQKDARSVRTRRPSPPESSATPSRTVKQPALLTTDPR

SEQ ID NO: 508577 - protein, 359 aa, unidentified
MQQQSYKLDFTGKEIYVGIDAHLKTWSVSIMANGLMCKTFSQNAKAEDLRKYLDGNYPNGAYYSAYEAGFCGFSSHRQLVKLGINNIVVNPADVPTTDKERKQKEDSRDSKKIVRSLYNNELEAIYVPNMNIEGLRSMVRYRRALVKEISRYKNRAKSFLYYNGIEIPAELTSGSKHWSKRYSKWLEGLELETEYSRATLSHIMETVDHLRKKLLEINRSFRQMEKDSEYSETISLLRTVPGVALITAMTIMTELNNIGRFRSIDRLCSYVGLVPRTSSSGEKERTGGITPRSNRQLRSMLMESAWIAIRYDPALMMKYGELRKRMEANKAIVNIAKKLLSRIKHVLVNKEPYVKGVVI

SEQ ID NO: 508578 - protein, 341 aa, unidentified
MNESAVGTAVGIDVSKLKLDVCVAAGTKFKYKVVKNTRSGHAELITWLVQRKLPHDVPVVLEATGPYSEAAATALADAGWRVSVVNPARVKGFAQSQLSRNKTDKADAKLLATFAQRADLELWRPPSRAVRDLHALVERLQALQDMRQQESNRLEALSQGMPQGERSRVIVMVQDHIDWLSAQIADIESEIHDHIDNNPDLKHDAELIRSIPGCGPKLAAQFLAYVGDVRRFKSAKALAAFVGVTPKQKQSGTSVNGRTTISRAGHAAARKALYMPGLVAKHHNPVIMAMAKRLESRGMAPKAIVGASMRRLVHLIYGVINSGNPFDMAIPMRGLAFQDGI

SEQ ID NO: 508579 - protein, 377 aa, unidentified
MEKHSRFVGLDVHAETIAVAVAEPSGEVRALGTIPNTPDAVRRLVKKLAPAESLRVCYEAGPTGYVLYWQLTQLGVACEVVAPTLVPVKPGDRVKTDRRDAEKLARSYRSGDLTAVWVPDAAHEALRDLVRAREAAKKDQLRARHRLGKFLLRHGRRRPAKTTAWGTTHRAWLKTVRFDNPAQEATLLDYGTEVDHARDRIARLERALDTAIAAAPAAMRAVISALQALRGIAQLSAVTIVTEVGVLSRFARPRQLMGYSGAVSREHSSGPTIRRGAITKTGNAHLRRVIIEAAWAYQHRPAIGATLRTRQCDVSEEVKAIAWKAQHRLHSRYCRLLAKGKLKPQVVTAVARELLGFIWAIGVQVEQAHREASTRAA

SEQ ID NO: 508580 - protein, 359 aa, unidentified
MKTQGQTLDFSGQNIYAGFDVHLKSWAVTIMTDEITYKTFSQPPEPEVLYQYLKRNFPGGEYYSAYEAGFCGYWIHNSLVSLGINSMVVNPADIPTTNKEKVQKEDKRDSRKLAKSLRSGDLVPIYVPSAKTIEDRCLVRTRSMLVKDLTRNKNRIKSFLHFHGIKILASFENSRTHWTKRFINWIEAIEMKEDSSKLTLSLLVSECKKLRSSILTVTRSIRELSQTEAYMQQEKLIRSVPGIGPITAITFLTEIETITRFNNNDQLHSFVGIVPSTKSSGEKDVVGNITSRGHSILRSAIIESAWIAIRHDPVLIKTYHDYCKRMEPNKAIVRIAKKLLNRISFVLKNKQPYSLSVVK

SEQ ID NO: 508581 - protein, 347 aa, unidentified
MRFYNNQHKYYCGIDLHTRKMYVCIIDEKGEIREHRNMKTDRDALLRAIAPFREDIVVAVECIFTWYWVADLCHNEGIPFVLGHALYMKAIHGGKAKNDKIDSHKIAALLRGGMIPMSYVYPEKMRATRDLMRRRNHLMRKRSELYAHIQNTNSQYNLPDSFGCLSVPKNRNGIIEQFEHPSVQESITADMEIIRSYDVILSQLEKSIINMAIHHDPVSYALLQTIPGVGKIIALIILYEVENIRRFASVQDFASYSRLVKCAKESNGKKCGSGGSKIGNGHLKWAFSEAASFFANNSDSAKKYLDRSTKKHGKSKALSILAHKLGRAVYFMLKNKEAFNQNKLLNL

SEQ ID NO: 508582 - protein, 341 aa, unidentified
MTVYIGVDLHGRQQTVAYMDTSDGEIKQYELHHQKDDVRSFYRQFAGEVIVGVEASGYTSWFEEMIEELGHKLLVGDAAKIRRLARRRQKNDRRDAELMLDLLMHDEFPRLFRYSAASREVLRQLRFRHKLVKMRTMVLNSLHALSIGAGLSLQAKLATAQGRARLQQLRLSPVLNQQRDEWLAVTDELSTRILTVERWLKIQAKGNAQVQRVQTHAGVGLLTSLCLVHTLGDISRFSSTRKVTAYVGLDVTEHSSAERKVYGGISKAGSRLLRYLLVEAGQTAVKSDDNLRSFYNQVMKRRGKAKAKVAVARKLLVRLFIMLRDKIDYAEFLRRGNRSGD

SEQ ID NO: 508583 - protein, 346 aa, unidentified
MEHHVGIDVSLELSSLCVLDATGKVIREAKAASEPEALVAFLQGLGVTIVRVGLEAGPLSQWLYDGLKKAGFEAVLLETRHVKAALSAMTIKTDRRDARGIAQLLRMGWYRPVHRKSVPSQEVRALLAARKQMQIKAMDLEQTLRGLLRGFGLKVGDVSRGKLAARIRELVSGHAMLERIAEQMLTARETLWSEFAKLHREVLAIVKEDQVCKRLMTVPGVGAVVSLTYRAGVDDPARFAKSKSVGAFFGLTPKRYQSGETDVTGAITRVGDAGVRTALHDAANALLTRTTKFSTLKRWAMDVAKRRGMRRAKVALARKLATVLHRIWADGTEFVWGKDPAAATAA

SEQ ID NO: 508584 - protein, 348 aa, unidentified
MIVGIDVHKRSHAAAIVDERGAAIATLTIPNSRAGVARLCRWLQEHGADGVAVGVENAGGYGRLVCAVLVAAGHEVLNVPAWRVKRERVHEGPGKSDPADAVAIAQCVLRHREKLGPALEPPLIRAIALLETHRRQSVTRRTDAIQRLRAVWAQLDPEAEGATSNVATKRALRHLKEIDFGDGLAEHAAARCIRDLAHEIEALNARVAELEHELADLLAAPGDPFADVRGAGLATTVTLIAQSGDVRRFRGDAAYARFGGSAPIPCGSGATAGRHRLHRGGNRQVNACLHRIAVTQARVDPRARAFLERKMAEGKTKREARRALKRHLSDVVYRRLYAWAEQALPSAT

SEQ ID NO: 508585 - protein, 315 aa, unidentified
MTTAEFKNISVGIDVSKASLDVAIHESGEIWSEPNTASGCAALVSRLIKLKPMRIVIEATGGYETLVTASLSAAELPVIVVNPRQVRDFAKATGQLAKTDRLDARVLAHFAAAVAPPLRPTKSDEAQHLEALLARRRQIVEMLVAEKNRLAAHRDRAVVKDLKTHIVWLERRLKQSDDELQRVLKASPVWRERDDLLRSAPGVGSVLSLTLLAQLPELGTLNRKQIAKLVGVAPFNWDSGQWRGSRHIWGGRAAVRAPLFMATLSAIRCNPIISSFYRRLIAAHKAPKVAITACMRKLLTILNVMVKTQTSWRTA

SEQ ID NO: 508586 - protein, 342 aa, unidentified
MKIAVLGIDLGKTSCSVVGLDGTGHVVMRRRMHRDSVIKFASGMAPCVVAMEACCGAHHLGRIVRDHGHQVRLMSPEYVRPYVKAQKNDDRDAEAIAEAATRPTMRFVELKSAEQLDMQSLHRVRDRLVGERTALINQLRAVLMERGITVPQGRRKLEQHLAVLLDGEELRLSPRVRSLVEDMRAEWGALDRRIAAFDDEFAARAKTDDAARRLATIPGIGVLNATALAAAVGNAASFARGRDLAAWLGLVPRQMTTGGKPRLMGISKRGNKYLRKLLVHGARGALPSLSASTTPLGKWLKDLLQRAHKNTVIVALANKLARIVWAVLRHGGTYDAAALTVA

SEQ ID NO: 508587 - protein, 345 aa, unidentified
MKVLKQVLGIDVAQKELVVTLGKMYDDFKIELCAYNVFKNTEKGFLALSQWVEKLTDTEIKVRYVMEATGVYHQKFAYYLEEKAEDLSIILPNKISNYLRTLETKTITDKTCSEAIARFGLERKLDNWKKPKDIYRVLKQLTRERRQITDERTIVKNQLHAEEAEAMPHFKSIERLKKRINFLNTLEKEIKDEIKDSIKGHDQLIIDISNICTIPGVSILTAATVIGETNGFELIRSKKQLTSYAGLDVKEKLSGTSVKGKPTISKRGNRYLRSCLHLPALSTIKWDDNFRDQYVRIVSKHGIKMKGCVAVQRKLLELIYILYKNKTVYDKEYECKKNSVLAQKA

SEQ ID NO: 508588 - protein, 358 aa, unidentified
MITLGVDAHKQVHVAVALDDAGREVDRWRGANSPDGWDTLRAWAVSMGDERQWGIEGAWNYGRGLAQQLVSAGETVYEVNARWTAEGRRRARRPGKTDRLDARAVALFVRQEAPQLPRVAADDVTAILDLLTSQREVVVTETTRLRNQLHALLLQIDPQYKDRIPNLETLQALAALETYQSASPAPLQEQRAAIVRQVVQRLRLALQQAAELKRQIETYTEAAGFASLTTIHGVGLIIAGTLAGILGPGIRFSSDAELAAYAGAAPLEASSAGLVRHRLNRGGNRRLNALLHMIMLTQLRNWEPARRYMAKRLAEGKTKREAMRALKRYLVRAVWKAWKKCLAPPSEEPAAKESPNPQ

SEQ ID NO: 508589 - protein, 345 aa, unidentified
MTDVSTIGLDIAKTVFHAHGADARGQMVFSRRLTRAKLLEFFAAQPRCVVALEACGGAHHWAREIASLGHEVKLIPPAYVKPFVKRNKNDAVDAEAICEAAQRPSMRYAAIKTEAQQAAGMVFRTRDLLVRQRTQLINAIRGHLTEFGWVAPKGPSHVSVLASLLEEDEEIGGSLPEAARSMFLVMTGQLEQLNEQIKLLDKEIARRAREDEAARRLMTIPGIGPIAATALLALAPPAEGFARGRDFAAWLGLTPRQHSTGGKERFGSISKMGERTLRRLLIIGSSAVVRQASKRGAPRGSWLEQMLARKPRMLVTVALANKTARIIWAVLTKGEDYRAPVAAAA

SEQ ID NO: 508590 - protein, 384 aa, unidentified
MSLRAGELPGNTPVVAEVACQRRIKPATGCTGVLRKRFDSSYPSHFKQQNKSMENNCFIGIDVSKNKLDICVLQGKEVLQEDVIDNNPSAIHRFLVDMAEKRGLDLCSCLVCAEHTGNYTYPLTLACRDLGCRLWLENPAQLKYSSGVHRGKNDRVDARRIALYASRFNDKAMLYHELTPELERVKQLRQERSLYRSDLSKYKGQLSDQKNFMESTVYKAKANRLKHVIKELEKMIDVVEREITGIIDSCDVLKRQMKIITSVEGIGRETALCFIVETAAFTRFTDSRKFACHAGIAPFQYTSGSSVRSRNRVSRRANKQVKTLLHMAALSITRKKKSELKVYYKRKVEEGKNKMTVINAIRAKLVARVFAVIRKNDIYSINFT

SEQ ID NO: 508591 - protein, 349 aa, unidentified
MKKIVKQVLGIDVAQKELVVCFGIMYDTWIPGLVAYKVFVNNEKGFDELFKWVTKLADSNVAVRYVMEATGVYHEKFAYYLCNKNLEVSIVLPNKISNYSRSLETKTVTDKTSSEAITLFGLERVLDRWFPAKGIYKQLQQLTRERNQIIEERTVIKNQLHAELTEAKSNKRSIERAKKRLLLLDKQEKEVKNDLIELIKTDEEVKEVVMLICTITGIGHLTAVTVLAETNGFELIRNKSQLASYAGLDVREKQSGTSVKGKPTISKRGNKHLRKAMHMPALSAIRRDERFKAIFIRLVSKHGIKMKAVVAVQRKLLEMTYTIFKTRKAYNKNYFKENIEIKEQQSAEM

SEQ ID NO: 508592 - protein, 523 aa, unidentified
MVSKRPSKKSRSRAAEFLQKPRGVIHPRVQKVGPEHFGIVCVDCAKARSKWMLTDFYGRVLVAPTELAHNRVELTAMVGQVREALTTFALGDCLVAIERTGRYHHPVKNAFAQADFDTRLVHPYATKQFRQPANPDNKTDDTDLAAMQRAAVNGFALQEAAPVESWVQVQLCIRQRRDLVRKCSALACQIRQHLDAAVPGYAACFDKLWESHVAFRLVRQFGSAPAMAAQGVTDLGHYLDDQKVRYQQRTLDTVVAWAKNAAAADIAGELHRQIALAYEDDRQRKTQEILVLERDIAHRLVQTPYVLLMSFPGINVVSAADYAGEMGPIENYANPNAITGRAGLFPSRYQSDRVDRANGPLVRRANRALRAVILGIADNLMLCNRHFRQLAATWKTAGKDPRKSHVKVGLRFCRISYHMVAGRQVFRHPSLRERGYILDKLLAFHLEHQTPYEQILRDLHHAFAQIPIKEHAAEAAPLAQRLRTTRTFAKKGPQPLAEILAIVLARLGVGMLPSTPSEEKDLT

SEQ ID NO: 508593 - protein, 315 aa, unidentified
MYTIGIDVSKKELVAARTTKRGIVEERWTIPNDPAAIALWLDALPHALLGAEATAEYHNELARQCIARGVPFKLLNPIVTKQFTRATVRRRKTDRSDAEVIARCLLNGEGYLLSAESLSPVRRILRTAEKIRRMDCTLRRMEGQMRSFVKEADTGPLLRCARSVRKAAQALQKQGLAMADETQTKLLSSIPGIGKTLSATIASEIGDCGRFGSGKALVAFAGLDPRVKQSGSTLSRNTRLTKRGSPYLRRAFFLAAMIGERSDPELRAYYEKKRAEGKRFTEATVANARHVAHRVYAVLKRGTPYVKKELSTVEA

SEQ ID NO: 508594 - protein, 363 aa, unidentified
MVCDAQVPTKEKPMATEYLITMDVHCRTSDICVKTRVGKLVKRGHVGTGIPQLREVIASVPRPRYVLFEEGALAGWLYRELKGCADEVLVCDPRRNAHVAKDGDKDDAIDAEKLNDLWRAGMLRLVHQMEDVQKAAVKQLVGMYHDRVVHRVGEAARLLAMCRRWGVMLSRSALAELKGWAELGQRLEQAQVPKSLRWMCEDQWRTLERAEVQEAKLYREVCRLAKGDKVMSRVCELPGYGPVRAATLISYLDTPWRFKSKCALWKYVGIGLRREKSGTGPEILSVEQACNRLLRNVTIGAAQSAINQKENIFARRYGHWIRCGLSLRNARRNVARDQVTAIWGMWKSDRAFDESMLAEADQS

SEQ ID NO: 508595 - protein, 403 aa, unidentified
MKHVIAFDVSMGKSYMVIYNAQKQCVFESEIKHSKPDFEKLQEKIHKLTDETGESPEIVFEATGIYSRQLERFMQDNQYTYCLLNPLEAKLQCDSLRIHKTDRSDAHRLALTHFTVTRRVSTGTDNLFYQLKSLSRLYSELDGELSMIRSRMHKVIQLTFPELERMFTSRSDLFLNFVQLFPHPDCVLGLSKTIIKNRIRANTNKKISNITAEKKAIQILEIAKTSYPAVSQNDVLCDQLKLYARRYQELLHQKECCINKMVYVAEQRAEYDIILSLPGIGPNTAVRLMAEIGDITRFNNNKQLNAFAGIDIRRFQSGKTFFKDKINKRGNKHLRKLLFLIIQNMIKQRRYGQNHIVEYYDKLKTQPYNKCHKVASIACVNKLLKLLFYLITHNMYYDYRLTA

SEQ ID NO: 508596 - protein, 327 aa, unidentified
MMFIGFDISKDKVDLCWLRDPITNKKKTKVFKNNHLAFKEIKQWLLSTTKTIAEEIVITVEPTGVYHEPLMYFLYQQGFNIILANPSKAKKYAEALNVVHKTDRSDAIMLASYGYAKQSTVNFWQPEAKEIRELKALLRRLDALESNKQREQNRLEASEFNATSERVTQSLKETINFLDDEIKKLKSDIDSHINSFPDLKKNRTLLETIPGIGPVMSRELTYIFAAKNFSRAKQAAAYCGLIPRLHESGKMKGRTTMSKLGPSKIRSKLYMAAVVAGQWNYKIQQQKIALLNNGKTSMQIIGANMRKLIHICFGVIKNQEAFKLQES

SEQ ID NO: 508597 - protein, 374 aa, unidentified
MNLNQGCTASEASRTFSHKEKSLHSQGKPGIGGLISVLNLVYQRRMQMEQRVLGIDVAKDTLDVALSDGVRLNYGQFSNTQKGHEELERWLRKHSAQSIHVCLEATGQYGDGVSEYLFTQGFSVSVVNPARIKHYANSKLRRNKTDKADAQLIAEYCIRENPAIWTPPPASFKELQTLVRHLDDLQGAFQQESNRLQSGVHTAFVVNSLSSICNFLEEQIKQTKKAIQEHIDQHEELKRMQDLIVTIPGIGKLTAAKLLGEIRNILDFQSARQLAAYAGLTPRNFLSGTSVHKKTRLSKTGNANLRKSLYMPAIVSIKCNPVIHSFCERLTRSGLLPMEVIGAAMRKLLHLVYGVLKTGRPFDPNYLASLQVPS

SEQ ID NO: 508598 - protein, 359 aa, unidentified
MRIIGCDLHARQQTLAMLDTSTGKIEETTLKHEENIVREFYCHLPRPVRVGIEATGSMQWFVNLMEELAIECLVGHPAEIRAAEPRKQKHDQRDAHLLLSLLVEERFPAIWLPTKELLDMRALLRHRHQWVGLRVKIQNALQAIALANGLRRGPSLWTQAGQHAIASLPLSPHAAYRRNELQAMYVKFEAEIEKLNQRVEQQAGERSGARLLMTHPGVGPITALATDVFLGDPARFANSKELASYVGMIPGEYSSGKRQRLGGLTKQGNPLLRFLWSEAAIHAVRRDPELRHFYHRKLIQKGLGKARAAVARKLGIRMWIMLRDRIEYHEFCRRGQMQQTSGDACAGMPGPRYGAKVTG

SEQ ID NO: 508599 - protein, 421 aa, unidentified
MIQVSHEAFAAFVGIDWADAKHDGCRQVAGSAKRDYCQLEHPPEAIDAWGTTLRMRCHGQPVALCLALNKGPLGSALRTYDFLVLCPIHPLTLARYREAFTPSRAKDDPTDAALQLALLLPQRDKLQPLNPQSPTMRALAQLIAPRRRVVGDTVRITNRLPSPLKNYCPHVLHGLQEKDTAIFCDFLSRWPTLKAVPLARRATLATFFRAHHVRYAEVIAQRLQAIKAAPPLPTDAGVMAPHALLVQALVAQLRGTLQALADCDTAIAQRAQSHPDFPLFQALPGAGPVFAPRLLVACGEQRERYACAADLQKYAGSAPVTERSGTKSWVHGRLQCPKFLRHTFVEWAAESLRPSFWAQVSYQQPRDKGKAHQAAVRARAFQWIRILSRCWQERTPYDAAIYRQALHRRGASLSQTLAKAS

SEQ ID NO: 508600 - protein, 376 aa, unidentified
MERGSLMLNTTTFVGLDVHARSIKAVALDAMTGEVRSATFGYDAAEVAGWVSSVDPSAKCVYESGVTGFDLQKRLASMGIDCVVGAVSKMIKPPADRKRKNDRNDAEFLARMLSVGNVVEVWVPDDGCEAARDLVRALDDAREDLKRCKQRLSKFLLRHGYAFSETTPTGRRKGNWTAAHWAWIKSISFPEKADNDVLAYYVDAVRQAMEDKKRLEKLVEAEASKPRWKRRVDSVRCLKGIDVTSAADLVFEAGEFSRFKSARSFAAWLGLTPSEHSSGESVRQGGITKAGNKHLRRVLVESAWHYLGCSPHSKDLAKGQVPDPAARRHAAKGVRRLVERRRAMLERGVHKNKANVATARELACWCWAVGRMIENG

SEQ ID NO: 508601 - protein, 377 aa, unidentified
MSNIIKWPGEADGPNPNQFLYVGVDIHKDKHTAVATNCFGHKLMEMEFANTAKDFKQFVASMQSLADQQNREFIFGLEDSFGYGLHLAKHLFDSHLPVKMIPPVLVDRSRKYETHPEKSDSLDALGVAKVLIQRIDTLPDYSISITDELAKEIKELAMDRDFLVKEQTRIKNQLHRLLHKTYGSEYQKKFKDIFALKALRYWKKYPTGKAYILVDDSILKNQVRRKINRLMDIRQECKEIKNELKILLDRTGQKLPTMNGCGTVLASAVMAEIRNIERFHSLAALAKYAGLAPRQKSSGKTIRHVKSKSGNRKLNMAIHRIALSQISNSGNQYAKAYFKKKITEGKSKNQALCCLKRKLVNIIYMMLKHKQAYNYQK

SEQ ID NO: 508602 - protein, 341 aa, unidentified
MEEYIGLDVSMKETAVSIRRDGKRIWRGKCASDPAVIANVLRKHAPSAKRVVFETGPLSVWFYHALCAAGLPAICIDARHAKAALDMAANKTDANDADGLAHLAEVGFYREVRVKGFDSMLTRTLVSARTRLVRITTELSNQIRGLMKTFGLVVPAGKGGKFEGHVRELLIDQRNLAAIVLPILEAWRSMRLRAAELGRQLIADARQSETCQLLMSIPGVGTVTATSFTTAIEDPHNFKKSRSVGAWLGLTTRRYQSGQVDYDGHISRRGDRHVRSLLYEAATVILTRSSAESALRTWGLELRKRVGFKRAAVAVARKLAVTMHAMLKSGEMFDRSAGAAA

SEQ ID NO: 508603 - protein, 427 aa, unidentified
MAYLIAGIDVHKGMLAVVVADVEVDQEYQFERVKIGTSPNELRALADWLVERQVEEVVMESTAQYWRPVWEALELHWRPQRRSRDGATPVSGTLHLAQAQSNRGAGGRKKDFPDAERLVKRLVAQELTLSFVPDPEQRLWRTVMRRKYQVTRNRVQLHSRLESLLEEAHIKLSSVVSDLLGTSARRMLQALADGETDPATLAALADQRLRATPAQLRNAFGACAGLHPVYRRLVKLTPEELQMIEEHLGQLDQEMATLLSHHHAAVRRLAEVPGLGVDSAQQIIAEVGATAATFPSAKHLASWMGACPGTEESAGKNYSHRCPKGNRQMRRVLNQAANAAVKAKGTIFAIVYRRIVPRLGHAQAIGAITHRLCRLIWKILHQAVRYEERGPAVSEEAKKVRARKMIRELRSLGYRVELLQAPSSSPA

SEQ ID NO: 508604 - protein, 402 aa, unidentified
MEKYAGIDIAKKVHWMCVTDAEGRFLMEPRPYDNDAEGLSRMVADLDLYGGDIAVGMESTGCYWRSCYKVLAEGGYPVSVINPVKTCAERKQGNLGRAKTDRVDCLVVADTLRKQGIPSTPSPDADAAQLRDLCRFRRTVSESLSRAKIQVVALLDQVWPEYPRLFGNLFCGASLAVLRRLASGGMDADGLADDLRGASRNRYGVAKAVEALDSLRSTCGVPATDALRLQLRLLLDQLDFCAAQLEEIDAEADALLDAVAPTLPTVPGIGRATAAQIAAEVGDVERFKDAKSLVAYAGLDPTRHQSGGFDPDRNRISKRGSAHLRRSLYIAAQASLRADCEFREFYDRLRGRGYSHRYAVCAVARKMLCVVWALMRSGEEYSRDRHRAREKAPEGASPVDAG

SEQ ID NO: 508605 - protein, 392 aa, unidentified
MYIEGIDIGKNHHEASIVSPKGKQIGRSLRFATTHKGADSLMSFIFKNIGNSPCVFGMEATGHYWYPIYSFLKAKGYTIYVINPIQSDSLRKMYIRQTKNDSIDSFLIAEVIRFGQFGTTSMADENILAMRQLCRYRDSVISSRTEIKLRIGTIMEQIFPEYEKQFSSLWVSTSMGILEKYLTPENIENAPIDELFEIIKDKSHNKLTMKKAISIREAAADTFGIKIAQDAFSFQLKQLIDRMNFLDKQIEALDCQILEYYEKFDCYLHTIPGIGMIAAATILAEIGDINRFKSSSALVAFAGIDPTVRQSGEFSSTHNHMSKRGSPYLRHAIFLVASTCSFHYSPLNAYYKKKREQGKHHLTATGAVARKLTTVIYAVLRDGKPYEPKSFC

SEQ ID NO: 508606 - protein, 315 aa, unidentified
MTASPVVGVDVAKDRLDVAVRPNGETWSAANDDVGITTLVTRLRPLAPALIVCEATGGFERAAIAALAAAGFPVVVANPRQVRDFARATGQLAKTDQLDAAILALFAERVRPAPRPLPDAAAQLLDAVLTRRRQLLEMLVAEKNRLGFAPKPLHRGIQAHIRWLERQLDDVTKELAGLIEASPVWRAKDDLLQSVPGVGPIVSSTLLGELPELGTLSHKQIAALVGVAPLARDSGTLRGKRLVWGGRASVRTALFMAAMCGRRWNPTLKVFYERLKAAGKPTKVALIACARKLLTILNAMERDQSRWTPNVQYSC

SEQ ID NO: 508607 - protein, 316 aa, unidentified
MESTPVYAGIDVSKDQLDVATSPGGEHWAVGNVDTEFPGLVRRLQECHVSLIVLEATGGYEVPVWSALTSVGLLVAVVNPRRIRAFAQALSVLAKTDRVDAGVIALFAERMRPTPQAIPDDAAQRLSALVTRRRQVQEMITAEQNRRGFALRALHPQIDDHIAWLRHQLDVLEGDLKDLMNQSTTWRKKAELLQSVPGVGIVTSLTLIANLRELGTLGRKEIAALAGVAPFNRDSGKMRGRRTTWGGRAGVRTVLYMAALVATRYNPVIKPFYEKLRKAGKVAKVALVACMHKLLTILNAMARTNQPWREAAATAA

SEQ ID NO: 508608 - protein, 359 aa, unidentified
MDIQGTSVGLDVHALSVVAHAVDEETGKVSKARLCPDHGEVLGWLHQLRAPVRMTYEAGPTGFGLARAINEAGMECVVAAPSTLQRPAGDRVKTDARDAAHLARLLRLGEITAVTVPEREIEAVRDLVRAREDARVDLMRVRHRLSNCFCGRGSSIFGGTPCTCAHEKWLRRQRFDDAHLKAAFDHGFDAVLAATAARDRLDEQITEVAASPRFADPVNRLGCLRGIAALTGLALTVEIGDWSRFTGSSIGAYVGLVPCEYSTGTSRVQGSITKAGNTHVRRLLIEAAWHHRKSYRTSGPTLRARWAVVEPALRARGHAGNRRLYKRWRHFTERGKNPLVANLAIARELAGWCWSLATM

SEQ ID NO: 508609 - protein, 356 aa, unidentified
MLHLFNKSGESIMTNINVLGIDLAKNVFQLHGVDGQGKAVLKKRVERNKLSEFASNLSQCTVVMESCGGSNYWARVFHKSGHNVKLISPQFVKPFVKTNKNDANDAEAIVEAASRPSMRFVPIKQVEQQDIQSLHSVRSRLVRNRTALINEIRGLNLEYGIAIPMGAVKVKKHLRAVIDNQRNELTALSRELMEELYNELIEIEEKLKNMEKKIKSICKENDQCRRILSIPGIGELIATAIVAAVPNANEFENGRHMSAWLGLVPRQSSSGNKQVLLSISKRGDRYLRTLLIHGARAALSHYKNTNNKYGEWLTNKKAMLSFNKAAVALANKNARIIWAILKTGKEFDANQKWGVA

SEQ ID NO: 508610 - protein, 409 aa, unidentified
MQVLHPRCGAIDIGKDVLVAAIRLQEDAVVKRECRTFRTLHGALLELRGWFQSVGVTHVVMEATGSYWRSVWNVLDGHFELTLANPAQVKNLPGRKSDVNDATWLADLHAHGLIRGSLVPARETIALRELTRTRKQLGREVARHTLRIQKLLDVAGLKITGPISQILGLSGRRILKALIRGEKDPERLVALVDPHVKASRRELMEALEGELTSQQRRLLKMHLQLVENLEASIAEIDRDIEKAVRPFRDILDRIDEMPGWSDINAPALLGEIGVDMSRFPSHKHIVSWARLCPRLDESAGKVKSRRTLKSSAWVKTLLIQAAWCAVKKKDSYFRAQFLRLRARRGPQKAIVAVAASMLVAIYHMIREGTPYRDLGFDHFQRPNHDRLMRRSVARLTQLGYRVTLTREVA

SEQ ID NO: 508611 - protein, 325 aa, unidentified
MESKKLCCGIDVSHTKLDVCYQNNLGELFYLQVGNNIKGFEKIMEHTGKDYHFVMEATGVYYIRLAFYLHEQGCKLSVVNALSIKRYIQMHLERNKSDKKDAGWICRYAIEQKPLYWEMPDSAYFESKQLYNTIREYTEQIKRFNNQLHSLKLLPVPSKDTIKSLEKVKRQLEKEIEVLEVKLQAMLEKWQPQQLKSVGSIKGIGKRATAMLIVFTQGFKYTQSHRQLISFAGLSPTEYSSGSSIHGKSRIYKRGGKNLRDVLYMCSMNAIKTNTACKTLYERLRANGKTGKQALIAVCNKLLKQVFAVVKNNSLYQPNYCSPKP

SEQ ID NO: 508612 - protein, 400 aa, unidentified
MPRLWAGIDAGKTHHHCVAIDEDGRRVLSRRVANNETELLALITDVLGIAESEEVVWATDLNQGGAALVISLLVDHGQPVLYIPGRTVHHASRTYRGDGKSDAKDAAIIADQARMRRDLQPIRGADEIAVELRLLVSHRTDLVCDRTRAFNRLRANLLQYFPALETAFDYSRRKGSLVLLTKYQTPDGIRRAGAPRIEAWLRKQGVRSPAELAQTAVEAANRQHTTITGQKTGAMLVAKLAADILRLTREIEETEDLIEARFREHGHAEILLSVPGFGPQLAAEFIAATGGTLTRYESADRLAGVAGLAPVPRDSGRISGNHHRPKRYDRRLLRACYLSAQVAANHCPLSQAYYTRKRAEGKSHKQAVLALARRRINVIWALLRDGRPFEQRAPAAAQAA

SEQ ID NO: 508613 - protein, 360 aa, unidentified
MRIIGCDLHAGQQTLAMLDTETGEVVNRTLMHEGNQVREFYSELSRPVLVGIEAIGPMQWFLDLLAQLGIECRVGDAAKIRAAEPRKQKHDRRDAELILKLLVEKRFPAIWMPSKELLDLRALLLHRHQWVRLRTQVQNALQAIALANGLRRGPGLWSYDGQAKIAFLPLPPHASLRRSALQAMYGHMEEEIEKLTVQVAEQVEHRSGAQLLMTHPGVGPVTALATDVFLGDAQRFDDGKSLASYVGLIPEERSSGRRRRLGRISKQGNPLLRFLWNEAGAHAARRDPELRRFYRRKLAQKGLGKARVAVARKLGIRLWIMLRDQIDYQEFCRRGQKQSGAACAGMPEVGNGANRHRPVE

SEQ ID NO: 508614 - protein, 316 aa, unidentified
MAKVVSEITLGIDVSKDELVIFDWDTEQLTRLVNEPAEIKTWLGNLYGPARIAIEPTSSYHLELVEQAHALGLTVYLINPRQLVHYRQAVNVRNKTDPQDAWLLARYVAHESASLRPFKPQCAKAQQLWALLKRRAVVVKARKQLEQSFKEIKLPHKALFSEIQRVLDRIDQRMQTLVRSLGWLADYQRCLSIPGIGPLNAIALVAVYRRGAFAGSDAFIAFIGFDVRVRESGKYKGRRKLTKRGEAEIRRLLYCASQPSRTYQPFDNYYQRQLEKGISKIAAKVILARKLARIAFTLLTNQQNFKKQEIIYSQVP

SEQ ID NO: 508615 - protein, 466 aa, unidentified
MKKNDKKKVKSRKKRSKKRDLNSLPTLNINAAGIDIGSEEHWVAVPEDRDESPVRRFGCFTSDLHAMADWLKKCGIDTVAMESTGVYWVPLFQILETQGFDVKLVNARHVKNVPGRKTDVEDCQWLQQLHTYGLLSGSFRPDDSICVLRSYWRHRDNLIRYAAAHVQHMQKALTEMNIQLHKVISDITGVTGMRIIRAILDGERNLVKLAQMKDPRIKNSEETIAKALEGDYRPEHLFALKQAVELYFFYHHQIDACNQEIENYLKQLESEIDSNPDVKTIKRNKQISKNEPSFDLASHLYHFTGVDFTKIDGLNVLTVQTILSEVGLNPEAFGTEKRFASWLGLCPENRITGGNIKSVRTRKVINRAAKAFRLAANSLKNSSSALGGYYRRMRARLGPPKAITATAHKLARIFFHLWKNGGTYQDLGADYYEQKYKDRVIKNIKKRAKQLGFQISLQPIVNAEVS

SEQ ID NO: 508616 - protein, 380 aa, unidentified
MPEAVIGLDVGKSSHWACVATRDGEVLLSAPVANREDDLDSLFGRFPDALVVVDQSRNIGALALARARAAGMSAAYLPGLAAHGAARLFAGDAKTDERDAMVIAKTALGIPDALLPVGDPGPTIAAARALAAQRNFLTCENTRNKNRLRSILLESCPAFEALVDLSDGTQLRLMASLGGAWSVADAGPRRAAALTRGAARGKIEALVRSTTSSTRPDASVVAAEDRAVKLLARRISENSAEIEAITAEISALLEGDDTYRCLLTVPGIGPKTASELAISIDIEDFPSHDRLASYCGLAPRNRQSGTSISSVTASRQGNKRLKNLLIFSCNCLTRTKGRWGDYYTRCRERGMSHGKALKALARKRLKVIYAVMRDRVPYAA

SEQ ID NO: 508617 - protein, 345 aa, unidentified
MQPMYYIGLDVHKRTISYCVKDGSGTIHAEGTIPATRLDLNLWMKTLPQPWTAAMEATMFTGWIYDHLKPHAAALKVAHPLMLRAIAAAKKKNDRIDASKICDCLRCDFLPECYMAPTAIRERRRTLRYRNLLVRQMVQMKIKISALLMEAGVSYNKQRLHKAGYFRELLATNPDIDEGLCALLRLCRETVVRLQKTEGALVRSLESDSLLVDRVERLMTIPAVGPITALTWTLEVGDVQRFSSIKKAVSYCGLCGAEKSSANSMQRTPLSKQRNKHLQTTLIEAAKMAPRSSPELAMLYDKERQKGNANRATLAVARKLVAYLVAVDRRQKEFLTVERENRTAA

SEQ ID NO: 508618 - protein, 313 aa, unidentified
MAKSERFIGIDVSKATLDVHVLPEGQDFVFANDIDGIKAICRKLGKLRPHLIVLEATGGLQIPVASALGIEKHPVAVINPRQARDFARATGRLAKTDKIDAQVLALFGQQIRPEAKPLKDEQAQELSALMSRRKQLVGMLVMEKNRLSLAIGSIREDIVKNIEWLEERLDDINTRLGQAVRTSPVWREQDDLLRSVPGVGEVLSATLLADLPELGKLGRREIASLVGVAPINCDSGKHRGKRRVWGGRGNIRSVLYMAIMTAIRFNPVISKFYKRLIDAGKPHKVAATASMRKLLTILNTMVRTGQPWAYSPN

SEQ ID NO: 508619 - protein, 313 aa, unidentified
MNTLPSSILSIDISKDHLDTDGWPVTWRRHLPNSSAGIARLIRKAQALQAFVIFEATSVYDRALMAALEAAGLAYHRANPRKAREFAKASGFLAKTDRVDALMLAEYARRIPLRVSEPACPLRQALNRLLDRRDQLVTLRKQELTRLKQVTDEAILAEMKALISVIAARVADYEAQIKAHLKAHPELEEEAKRLGSAPGVALITASSLLAYLPELGQRSAKAITALVGLAPLARDSGRWRGQRRIWGGRRKVRALLFLAARHAEKHPAFAEFAQRLQQAGKPRKQIRIAVARKLLLALNAMMGQKRDFCDRPC

SEQ ID NO: 508620 - protein, 341 aa, unidentified
MKNISILSIDLAKNVFQLHGQNKQGKQVLKKRLRREELRNTIANLPPCLIAMEACIGAHAWARQFMKMGHQVKLLAPQYVKPFVRVNKNDQRDAAAIALAASLPSIPSVSVKSEEQLDLQAIHRVRERLVRERVATGNEIRGLLADMGVVIPTGDAAIKNLLPVLLEDAEQPITYRGRLLLDDLRSQWLEKETHVKRYDRILKEYSKGSEECQKLMEIPGLGIINASLLWCYIGDAKRFGSGRHVAASLGLVPKQASSGEKEKHKGISKQGNKYLRKQLVHGARAAYRVLQKDGATGRLAEWVKRMKSSGKHTNKIVVALANKLARIAWSLLSRANSHYQS

SEQ ID NO: 508621 - protein, 401 aa, unidentified
MNPLFVGIDVSSKNNVAYLMKPDGSKHSSFSVQNNLGGAKLLSERIVSALGSMQLERVVIGLEATSIYGDSLVYALREDGRLGRFQRKIHVLNPKQVRKFKEAYSDLPKNDWVDAFVIADHLRFGRINREVYMDDYRYKALQTLTRARFDVIQNLTREKQRFANYLFLKCSGMAQDKDIQNTSATTIALMEHFETVDDLANADLEELTAFITETGRGKFADPDATAKGSYRLPKTVNDTVNQAMAVSIASMRALKGQVKVLDKAIEQQFEIIPNTLTSIPGIGKVYSAGIIAEIGDIHRFDSQASVAKYAGLVWNRSQSGDFEAEHSRMIKSGNRYLRYYLLEAANSVRRCDSEFRRYYDLKFKEVNKYQHKRALALTARKLVRLVFRLLKDNRLYIPPEG

SEQ ID NO: 508622 - protein, 347 aa, unidentified
MRFYTQQHQFYCGIDLHARTMYLCILNRDGEILVHRNMPAGPEPFLKTIAPYRADLVVCVECIFTWYWLADLCAREGIPFVLGHALYMKAIHGGKAKNDKIDSQKIAVLLRGGMLPQAYVYPAAMRATRDLLRRRLHLTRKRAELLAHVQNTNSQYNLPEIGKKLAYKANRDGVAARFPDPAVQKSVEVDLALIDYYDRLLSDVELTIVQTAKQHDAQTLYRLQSVPGIGKILSLVLLYEIHDITRFPRVQDFVSYCRLVKCAKESAGKRYGTSGAKIGNAYLKWAFSEAAVLFLRNNPAGQKYLARLEHKHGKGKALTILAHKLARAVYYMLKRDTVFDMPKFLNG

SEQ ID NO: 508623 - protein, 451 aa, unidentified
MAKPKKRKHRKLDRSLPVMRPNAGGIDIGATEVFVAVPADRDTESVRSFPTFTQDLYELANWLQRCRVDTVAMESTSVYWIPLFQILEACGIEVHLVNAQHVHHVPGRKSDVLDCQWLQYLHSVGLLGASFRPEQAVCEIRSLMRHRENLVQMACVHVQHMHKSLDQMNLQIHHVISDITGVTGLAIVDAIVAGETDPETLAKLRDHRIKASVETVRKSLVGDYRPEHIFTLKQSQTAYRYYQQLIADCDREIQQRIERFHNEDADPSAPAECSAQSGPSIGSFDLRSHLQRIFGVDLTVVPGFDVLRIQTIFSELGADLSSKFSTEDAFSSWLNLSPKDGTSAGRRIRGPRIRTKNRVTQTFRMAAQSLHNSQSYLGDYYRSQRARHGAPKAIKNTAHKLNRIFYHLVTTRQPYDETVFAKFEARNKQRQLRKLQSLAKQMGYSLLQAPA

SEQ ID NO: 508624 - protein, 351 aa, unidentified
MVIIGCDYHPSMQQIAWVDTETGECDERQLRHSDGEAERFYRELKQKAMPVRVGIEATGHTRWFERLLAGLQLELWIGDPAKIRAQRVRKQKTDRQDAQHLLTLLLEDRFPRLWVPSPENRDVRQLLWHRHRLVQMRTRVKNQLQSMALNEGVQRKHKLWNREGRAELESFALAPWAARRRQDLLRLLDQFTQQIDELSQAIEQEAQQRPAVQQLMTHPGVGPITALAFVLVLGTAERFGCGKQVGSYLGLIPCEDSSGGRQRLGHISKQGNTLLRYLLVEAAQSAVRCDTEWRKRFLHLAMRREPRIAKVAMARKLAVSLYWLWRNHPVPPATAGTVRTWSSSGDHNGVP

SEQ ID NO: 508625 - protein, 309 aa, unidentified
MDSYVGIDVSKDRLDVHVRPGGETFAVGRDGKGLEELIDRLQALLPSLVALEATGGFEIVVAAAIAGAGLPLAVVNPAQVRQFAWAIGKRAKTDPIDAAVIAHFAETVKPEPRPVPDEDARLLAELVGRRRQIIEMTVAERQRAKRAANPQVRKSLARLIAMLEKELQAIDKDIDTLVRGSPVWRAKEDLLASVPGIGQTLARTLLAELPELGTLDRRRIASLAGVAPYVRQSGQWRGKAKISGGRPNVRSAIFMAALTASRHNPVLGAFYRRLLTAGKPKMVALIAVARKLLTTLNAILRDQKAWQGA

SEQ ID NO: 508626 - protein, 317 aa, unidentified
MSEKGREEVFIGIDVSKEKLDVAVRPTGEFMSFSNNEDGISCAVDFVKPLCPHLVILEATGGLETAAVAMLADKALPVVVINPRQIRDFAKATGKLAKTDMIDAHMIARFGEAVRPELRPLKDEEAQKLAALITRRRQIIGMITVEKNRLTSAPRWTRKDIQANIAWLEKCLKRIDKDLQDLLKKSPVWREKDNILRSVPGVGPVLSMTLLSNLPELGALNRKEIAALVGVAPLNRDSGLFRGKRMIWGGRSAIRSVLYMSATCAMRFNPAIKKFYERLRLSGKLHKVAITACMRKLLVILNTMIKNRTEWSPAQSQ

SEQ ID NO: 508627 - protein, 341 aa, unidentified
MNVKTIGIDLAKEVFQVHGIDEHGKRLFNKQLKRAKMLSFFANIPHCLIGMEACASAHFWAGKLMSMGHNVKLMAPQFVKPYVKTNKHDAADAEAICEAVTRPNMRFVPVKTPEQQAVLALHRSRQSFIKQRTAQANQIRGLLAEFGIVVPRGIQQLQRQLPELLEDADNSLPSLFRVQLSLLQHHMAYLFDVIATLDKQIEQCYRQNALCQRISKIPGIGPITATALIATIGNASNFENSRQLAAWLGLVPRQHSSGGKQVLLGISKRGDIYLRTLLIHGARAVLQSVKRKQDAVSGWASRLLARRNNNIASVALANKNARIVWALLAKDQEYYAPVMNV

SEQ ID NO: 508628 - protein, 347 aa, unidentified
MSEHTPTTMGIDISDQWSTVCVLDTDGEVMEESRFRSTRAGLGRYLEHRAPMRVVLEVGTHSPWMSRQIEELGHEVFVANPRQLRLIYQSDRKCDAVDAEALARLGRVDPKLLRPIRHRAADTQLARAQLRVRDMLVAARTRFILSVRGMAKSMGEVIPRASAESFHVGVPGAVSAPVWQVVEPLVEAVAGLTAKIKGCDAALEELSLTRYPETAALRQISGVGPITALAFVTTIEDPHRFARNRSVGAYLGLCPRRDQSGASDPSLRITKAGDPYLRRLLVGCAHYILGPFGPDSDLRRWGLAYAGRGTNSKKRAVVAVARKLAVLLLSLWKTGETYEPTRHAAAA

SEQ ID NO: 508629 - protein, 352 aa, unidentified
MAKIEFDELMSIGIDIGKDTFHLVGFDPDGQRVIRQQIKRLALVATFEKLPRCVVGMEACLSAHFVSRTLRKLGFEPRIIPAIYVKPFNKGQKNDYNDAEAIAEAALRPNLKVVSEKTQEQLDLQALHRVRSRLVSRRTATINQIRAFLIEQGITVRKGLRALKNSFETILEARKDEISPRMRSILIGLYGDWMWMDDRIDKVSKEIEEISRTEENCVNVMTVPGIGPMISTAMVAAIGEGEAFDRGRDFAAWVGLVPRQYSTGGRTVLGRISKRGSRYLRMLFVQAAKVIMMRPHRWPDFSFGEWLTRAAERMHRNKAAIALANKLARMAWSILRHKTAFDAPRDEVAVGI

SEQ ID NO: 508630 - protein, 342 aa, unidentified
MEISTIGLDLAKSIFQVHAINDVGEVVVRKALRRSQVLPFFAKLPPCLVGMEACGTSHYWGRELVKLGHEVRLMPAGYVKPYVKRGKTDANDAEAICEAVTRPTMRFVPVKSPDQQAALGLHRTRSLLVKQRTQLVNMMRSLFAEFGIAMPRGLHHALAMARQLADGHATDVPELAGRLVTSLAHQIGAAHEELAALEKELLAWHRSNDLSQRLATIPGVGVIAATALAASVSEPERFRSGRQFAASLGLTPLQNSSGGKERLGRISKMGDRYLRQLLVVGTTSLVRRARTAPGSVDPRIPAMLERRPARVVTVAAANRTARVAWAIMTKGGAYRKSAAALA

SEQ ID NO: 508631 - protein, 346 aa, unidentified
MQHYVGLDVSLKQTAVCVVDQAGKIRREGTVASEPKAIADFIAANAPQVVRIGFESGATSTWLWTELKKFGLPVICIDARHAKAALKMQINKSDRNDAVGIARIMQCGWFKEVRVKDLDSHAIRALLGSRALLVELKRDLENQIRGLLKNLGLVIGRCKLNTFTARANELIDGKPALAAAVEPLLKAREAIGRQIADLDRKVLRLARSVPQVRRFMTVPGVGPITALCYLATIDDPTRFKKSRSVGAYAGLTTRRYASGETDWTGRISKCGDGMLRSYLYEAANVLLTRVGKWSALKAWGMRIAKRRSLSKARVAVARKLAVILHRMWIDGTEFSWSSEGTAMQPA

SEQ ID NO: 508632 - protein, 416 aa, unidentified
MKKKDYIEFEQVVERGCGMDVHKETIVATIRGKGIKTITKSYNTFTGSLKKLKEWLKKHGVTHIAMESTGIYWKPVFNILGDDFEILLVNARHVKNVPGHKTDKTDSRWLAKLLLSGLLKGSFIPSRPFRELRDLTRYKKKLINQVAAEKNRFMKILEDANIKLSTVLSDVFGASGTKMINHMLAFDGYRPEELMQYVHGKVKASREDIKEALTGYVTPHHKFMMKTILGNIAKIESTISEIEGHIDTVLGPYKLEKELLETIPGVGPDVAIGIISEISTNMEHFPDHKHLASWAGMSPGSNESAGKNKSSSTTHGNKNLRSYLTEGGWAASKTKNTYFSSKYKSLVGRRGKKRAIIALGHKILIASYFIIKDKVEFKELGEEYLNNFRKDKLIAYYKKQIEKLDPNAELDNEVAA

SEQ ID NO: 508633 - protein, 337 aa, unidentified
MDRIAVFVGLDYHQDSVQVCVMDQRGQVVTNRSCANDWRELTALVGRYGNVVRAGIEACTGAASMAEELSERAGWSVDQAHPGYVSRMKQNPDKTDYTDAQMLADLVRVGYLPRVWTAPREVRELRVLVRYRHQWAKARRNAKLRICAILREQRAGHGPGRRWTRVWLEWLAQEAPLSEQSRWVVGEHLAELDALETRLCRVEDRLEDLTRDDAMVQRLLLDKGIGPVTAWTLRAMVGQFDRFRTGKQLSRFCGVTPCNASSGRRQADAGLIRAGDPELRVVIIEAAHRLMRYDGRWRALAAKLRTEGKKTSVIVAAVANRWIRWLFHQMQPERLAA

SEQ ID NO: 508634 - protein, 375 aa, unidentified
MEGAPMLDTTTFIGLDVHARSIKAVSLDVMTGEVRAATFGYDAGAVAEWVRSVDPRARCVYESGVTGFDLQKRLSGLGVDCVVGAVSKMIKPSADRRRKNDRNDAEFLARMLSVGNVVEVWVPDDECEAARDLTRALEDARDDLSRSKQRLSKFLLRHGLAFDERTPTGRRKGNWTRAHWSWIESIRFAEGADNDVLAYYVDAVRRAAEEKARLEGLVEAEARKPRWRKRVDSLRCLKGVDTASAADLVFEAGEFSRFRNARSFAAWVGLTPSEHSSGESDRRGAITKAGNKHLRKTLVEAAWHYLTCSGRPKDLARGQAPDRGARRHAAKGVRRLVERREALLARGVHGNKANVATARELACWVWAVGLMAEEA

SEQ ID NO: 508635 - protein, 393 aa, unidentified
MFFVGIDIAKNSHEATVIDCNGEFIVKPFKFQNSIQGFKKLLSALTLLSENISDFEFGMEATGHYWLNLYTKLIESGYNVHVINPVQSDALRGLYIRQTKNDAKDAFIIAELIRFGRYSETTLSDSELLSLRELTRQRYYLVDCISDAKRKVITCIDKVFPEYQCVFSDIFGTTSIELLSTYTSPDVIAELDTELFSQFLKSVSRGRFGKEKAEELQNLAKNTFGSFLFVDSASLAIRQFIQQIKLLESQVKELEEFIKEKFSHFDNQLDTIVGIGTTLAASFFAEIGDINRFDSPDKLAAFAGIGPSVKQSGEFNGTKCHMSKRGSPYLRRTFWLAAIAGIRYNPAFRDIYDKKREQGKAHGVAISVVMRKICNIIFVILKTNKPYEIILPN

SEQ ID NO: 508636 - protein, 398 aa, unidentified
MDLPVYYELKTNNGNRDYRIQIGGHYMNYNTVYVGMDVHKESFTLCSCKYEDEKASHYQRTPASYKNVLRYLAFLRTIYGEDTRFVCGYEAGCLGYSLYHQLENFNVECVILAPTTMLEQRSKRRIKTDKRDAEIIARSLAQHNYSPVHIPTETDNQTKEFIRMRDDHKAELKKIKQQILSFCLRQGYQYDGSGNWTAKHVKWLRSLKPAGLYKEILDEYLLTYTILTDKLNRLDQRIEELASKEEYTESVSKLTCFLGIKTHTALSVIVEVGDFQRFVSARKFAGYLGLVPGQHSSGDDRNGLGITKAGNTHVRRLLVESAQSYTRGKIGYKSRVLRSRQAGNSPQVINYADRANERLRRRYYKMVLKDGKKYNIAKTAIARELACFIWGMMTDNIY

SEQ ID NO: 508637 - protein, 354 aa, unidentified
MVIVGTDVHKRTHTFVAVDEVGRKLGEKVVQATTAGHQRAINWARAQFGDDLVWGIEDCRNLSARLERDLLGAGQSVVRVAPKLMAQTRASARTRGKSDPIDALAVAHAVLRHPDLPVAAHDEVSRELKLLTDRREDLVAQRTATINRLRQRVHELDPAAEPTPGSLHRAKPCDTLAAWLQTQQGLLAELAAEELADIVRLTQAINALAARIGERVRQVAPTLLALPGCGELTAAKLVSETAGITRFRSEAAFARHNGTAPIPVWSGNTAGRVRLNRSGNRQLNAALHRIAITQIRLPDSPGHRYYRHRLAEGNSTKEALRCLKRRLSRVVFTRLHTDEHTHRNAGNTDHRIAA

SEQ ID NO: 508638 - protein, 369 aa, unidentified
MEAKEMGPINFLYVGVDVHKDQHTAVATNCFGHALMEKDIKNSKEEFAELVRKIRMLAEAKSLKPVFGLEDTSAYGQRLALHLRREDFLVKVVSPVLVVRERKKLTHPEKSDSQDALGVAKALISEIGTLPDFSISKTSEIAKGLKDLVVDREFLVKEQTRIKNQLHRLLHKSYNSEYREKFKNPFSVKALEYWSKHPVPADLSGNVLLKSQIKRKIGRMRGIKKEVVEIEEEMRILVNQIDQKLETLNGCGLVLTSSVLAEIKDIDRFDSPNALAQYGGFCPKEKSSGKRIRHIKTKSGNRKLNKAVHRIALSQLGRQGNIYSKNYFQKKIAEGKNKSQAICCLKRKLISIIFMMLKHKTAYDYAARC

SEQ ID NO: 508639 - protein, 420 aa, unidentified
MNSINIGQRGRFVKSFYMVVGVDIGKGFHMAVVRLRDGSFSKAFRFSSNASGFTDFWDWLNKWYEQDGFSGVLIGLESTGHYWETLAYWLRKRGIEVVQVNPLHTHKAKDLYDNNPGKTDKKDARIIADLVSQGKFLHCIIPQGRYADLRQLVLLRKRLVTDRTRQLNNIHRVIDVLFPEFGSVFKNIKTKSCEYLLTHVYTPDLLLSFSYKRLVKTLHKISHGKLKVEKLADLYKLAKSSVGIREGINGIKIVLYHDLSQYMQLNKEIKHLEELIEEVVCELEESDYLRSVKGVGLITAAVILGETGGLSHYSSAEEIIKLAGLNLYERSSGKHHGKRRITKRGRSVLREGLYLAAVSVIRRDGVLRDFYERLINKGKARAVALIAVACKLMRLLFALVRARRFYVTNYSVCEAELGVV

SEQ ID NO: 508640 - protein, 342 aa, unidentified
MPCYVGLDASKRTTNICVIDETRTILKEGVVESDPKAIVGFLRGEGRRYARVGMESWSLAPWLYAGLARAGLPIICIETRHSSAVLKAARSNKTDRNDARGIAEVMRARIYKTVHIKTVHAQQVRSLLTVRKLLRNQLVAVENAIGGTLLVFGYKQASGSRATFERRLRKLLSADAFLAGCVESLFSVWKLLVSEIESLEQRVKALANDDPVCRRLMTAPGVGPIIALTYRSALDEPLRFRRSSDVAAHLGLTPEAKQSGKWDRKGRISKRGDAAARTALVLAARTLLRRHTKASWLKQWAEQICARRGYMKALIATARRLAVILHKMWVTDSDFRWTREPA

SEQ ID NO: 508641 - protein, 306 aa, unidentified
MSLGVGIDVSKAFLDVAVHRQARSHRFPNTPAGFKALAAWLIPQSPGQVVLEATGGYERAALDALHAAGLPMVRINPRQARDFAKATGQLSKTDALDARSLAQMAAVLELTAYQPVEPWQRQLAQYQQRRTHLVVSVQQERQRLSHFTDPWLRRQAQAALRRGEKMLGELDKRIVEQVAAQADLAPLRQIKGVGPVLLATLAAQVPELGRLSGKEVAKLVGVAPLACDSGTLRGARRTWGGRAMVRKVLYMATLTAVRYEPGLRVFYQSLRARGKPAKVALVAAMRKLLVILNAKMRDQLNLASTM

SEQ ID NO: 508642 - protein, 344 aa, unidentified
MNSTTIAVDVAKSVFEVAVSEHPGQVRERHRLSRGRFSRFLAEHPPATVVMEACGSAHHWAREAQSRGHRVVLVPPHAARPYVLRNKTDRTDAKGLLEAFRNDDLRPVPVKSETQQALAGLHRFRSTWVATRTARLNTLRGILREFGVVIPTGAHHVVPHVRALLEDLDAGVPGLLRVALGEAIREVGELEERIRAIERQLATAAEPALLIRRLRTVPGIGVLTATALVAVVGDVQRFPSARHFASYLGLTPREHSSGQRRHLGAISKRGDTYLRMLFIHGARSVLHHAKSKTAPARDRLRTWALQVERLRGHNKAAVALANKLARIAWAVWRSGNDFITAAVV

SEQ ID NO: 508643 - protein, 357 aa, unidentified
MIYVGMDVSSKSFVVHAINERNKVVFKGEVPPSRAGLALLMKRLGEETKLVVFEAGNQMKWIALWFKGRKDVHLHVVHPNEVKWISQSSGKTDKVDARKLAELARGNLLPRKVHIVEGHVRELRELLSARQTLLSKRVALINTIRAYVLQEGRKLPEKFFERRDWYASLERKKLSGPLLLIVQSFRGAIDALRGAEQELTDRIAAIKDKRLDLLETIPGIGTISSRVLLSAIDEAERFDSKKEVAKYGALTPTVYQSGGITHLGHINRNGRQEVRRVLLQCAHTVVRMKSYSAAPLKAFYQRVMRKGEKKIAIVAVARKLLTIAYAVLKHRAVYDPAKLVATEIHKPVKTYRPVAAR

SEQ ID NO: 508644 - protein, 481 aa, unidentified
MAKRKLSTFDRLHADQLNRKQRKQLQQRLRSADPGLQIVHPDAAAIDAGSRSHFVAVPPGRDDLPVREFGAWTADLHRLTAWLLSCHIRTVVMQSTGVYWIALQEVLEHAGLEVYLVNARGTKNLPGRKSDVQECQWLRKLHTYGLLRNSFRPPEQIRAIRTLWRHRDRLVHDAGRAIQQMQKALISMNIQLANAISDISGVSGLAILRAILKGERDPQRLAQLRDRRIQASEEEVAASLQGHWREDVLFELGQVMEAYDFYQKQMATCDRRLQEYLAALPERERQSAAPDQEPTQGSGKKKRRRSQPRRKNQPTFPLQAELDRVFGVDLTRIDGIHVITAQVILSELGTDLSAFPSEAHFASWLELVPRRDITGGKVIKQKSRESKNRVANALRMAAESLSRSDSYLGARYRRLRARMEGTKAVKAMARYLACLVHRLLTKGQEYVDRGAAYFEAKRTERDMLSLKRKAAQMGMQLVPAS

SEQ ID NO: 508645 - protein, 347 aa, unidentified
MRFYTRQHRHYCGVDLHARSMYVCVLDRDGNVLVSKNIPSAPEPFLELIAPYREDLAVAAECMFTWYWLADLCAREAIAFVLGHALYMRAIHGGKAKNDRIDAHKIAGLLRGGMLPKAYVYPQAMRATRDLMRRRNYLMRQRAELLAHITNTNHQYNLPALGVRPARPAERSGLLEHFAEPQVRRSVAVDLSFVEHYDRELPALERYLESNAQAHDPVGLAIVRTIHGMGKVLGLSILYEIQDIGRFARVQQFLSYGRLVRPTKESGGKILGHSGRKIGNAHLKWAFSEAAVCFLRANKRAQALRARLMAKHGKGKSLAIIAAKLARAVYFMLKRGQAFDPERFFAH

SEQ ID NO: 508646 - protein, 349 aa, unidentified
METIYYLGVDIAKKTFQAALTVDGVNFFDQEVVNSPRTIRVYFQQLSGKFNFPFSRLTVCLEHTGIYSYHLLDFLIKHDVKVSMEPGLQIKQSQGMARGKSDQVDARRIAQYAFKNRQELKLWKAQRPVLQKLKALLCARERLIKVRVQIEVPINESGEFIDEQIQKTLVKTCQSTLKALKKDILRIEGEINCLVKEDPSLSHQTKLATSVPGVGKITALNVILTTGEFERITDVKQFACYAGVAPFEHSSGSSVRGKTRVSKMANMTLKKLLHMAAMSAIQCNEELKIYYERKVSTGKNKMSVLNAVRNKLITRIFACVNQERKYEKNKQPHCIRGRSIVRGIASHCS

SEQ ID NO: 508647 - protein, 344 aa, unidentified
MTYYTGIDVSLRSVSICVVNDKGEVCFEAKVAAEIATIVECLHRFDRDVKSVGFEAGTLTQYLTYGLQAAGFEVVCLEARQVSVTLAAMRNKTDRNDARGIAQILRTGWYSRVHVKSLHSHQVRALLASRKVILKKCVDLENELRGLLKVFGIRLPSRVGHGAFDTELRETVSGDEMLACALVPLLDARTVLYKTYLKVDNAVKGLVCADPICRRLMSIPGVGPVTALTFKAAVDDPSRFKSSRTVAAHFGLTPRRFQSGEVDNPGHISRAGDADVRSALYVAAHSLLTRTAQRSSLKAWGVRLAKTRGHRRAVIAVARKLAVILHRMWIDGSEFRWGPVPTQA

SEQ ID NO: 508648 - protein, 406 aa, unidentified
MDVVYSHVCGLDVHKKNIVACTITPEGKEIRTFGTMTDDLILLVDWLKVKECTHVAMESTGSYWKPIYNLLELEEIETLVVNAQHIKNVPGRKTDVKDAEWIAGLLRHGLLKGSFIPNREQRELRELIRYRRSLIEERAREVSRIQKVLEGANIKLSSVASNVLGKSGRAMIEAMIAGETDPEALSDLAKRKLKSKKADLKRALNGLMGPHQKLMLGAQLRHVDYLDEEIGRLDEEIKKRMLPFDEDLELLDTIPGVARRTAETILAEIGSNMNQYPSAAHLCSWAGLCPGQKESAGKRLSGKTRKGNKKLRSTLVEAAKAAARTKETYLSSQYHRISARRGANRATVAVAHSILSMVYYILKRKQPYIELGPTYYEKRKRDVIIKHSIKKLESLGVSITVNTAAS

SEQ ID NO: 508649 - protein, 314 aa, unidentified
MNSPVYVGIDVAHAQLDIAVRPGTRFSVPHEEPGIVRVVEQLRALSPTLIVLEATGGVEVSLTSALAAAGLPVVVVNPRHVRDFARATGRLAKTDALDAQILAQFAEVMRPERRPLPDAQTQALAALVTRRRQLIEMLTAEKNRLSMAPPPVRKSLRAHITWLERELAHTDTDLAQTIRQSPVWREKDELLQSVPGVGPVLTSTLLANLPELGTLTSKQIAALVGVAPLNRDSGTLRGKRTVWGGRAQVRAVLYMSAIVAARFNPVIRAFYQRLQTAGKAKKVALTACMRKLLTILNAMLKHRTPWRTEGTAHA

SEQ ID NO: 508650 - protein, 354 aa, unidentified
MTRATKYVALDVHQATTLASVRAETGQVIARTILPTEGRALTEFFRGMRGAVHVAFEEGTQAQWLHDLVVPLVHRVVVCDRHGERRHGNKGDRVDADGLSARLWRGELRAVYHGSAHRATLQELTRTYRNLVEDTTRVMLRLKALFRARAIPTRGTKVYQPAHRANWLAQLGERGVCFRAESLYAELDVLTLLRPRAKAAMLAEARRDPAWPVLRGIPFLGPVRVALLLATLQTPWRFRTKRQLWAYAGLAVVTHSSADHEMQHGRPVRRRRAPLTRGLNRNHNRIAKDVFKGAATAATARPGPLQDFYQGMVGRGMREELARVTLTRKLAALTLRLWKKGDRFDPAQLTQQAH

SEQ ID NO: 508651 - protein, 360 aa, unidentified
MSFNGTSVGLDVHALSVVAHAVDEETGHVERARLCPDHGEILDWLHRLRGPVRVAYEAGPTGFGLARALANAQIDCVVAAPSKLIRPAGDRVKTDARDAAHLTRLLRLGEVTAVAVPEADVEAVRDLVRAREDARADLMRVRHRLSKLLLRQGRVYSGGQAWNGVHETWLRRQRFDDSHTTAAFDHHFDAVLSATAARDRLDEQIVTVAASPRWSDPVDRLGCLRGISAYTGLALSVEIGDWARFTGSSIGAYVGLVPTEYSSGVSRVQGPITKAGNAHVRRLLIEAAWHHRAAYRNPGPTMRARWAKVDPALKARGHAGNRRLHQQWCRFNERKKPHVVANVAVARQLAGWCWSLATLI

SEQ ID NO: 508652 - protein, 353 aa, unidentified
MKVTTIGIDLAKSVIQVHGVDERGKVVLRKQLRRGQVMDFFAQRPGCLVGMEACGSAHAWARRLMKLGYTVKLMAPQFVKPYVKTNKNDAADAEAICEAVTRPNMRFVPVKSEEQQAVLSLHRARQGFVGQRTAQANQIRGLLAEFGIVIPQGIRHIARHLPEILEDAENTLPGAFRQLLRQLGEHLKTLDELVRAMEVQIQQWHGTNEASQRVSAVAGVDALTASAMVASVGDARNFSSGRQLAAWLGLVPRQHSTGGKSKLLGISKRGDCYLRTLLIHGARSVIAAAGRRKQSTVGQPAVQQRADQWLEALIARRNRNVAAVALANKNARVIWALLAHGDRYQAFHPLVAA

SEQ ID NO: 508653 - protein, 421 aa, unidentified
MEEIFEEEAELVARVAALDIGKATLTACVRVPHEDKPGRRRQEVRTFATVTRSLLELRDWLICQGVSLCVMEATSTYWKPPFYLLEDAIDCWVVNARDVKNVPGRPKTDRLDAVWLAKLAERGMLRPSFVPPPWQRELRDLCRYRRTLIQERTREKQRAEKLLEDTQIKLSSVISDIFGKSGRDMLDALIDGQHDPHVLAELARGSMRGKKSVLQEALTGHFRDHHGYLLKMMLDRTDALTAQIEALTGRIDEAIAPFAHQVTQLDEIPGIGKTGAQELIAEIGTDMTRFPTAGHLVSWAKYAPRARQSAGKNKPGTTGKGNPWIAGTLGEAGIGAARTKTFLGSRYHRLARRRGKPRALVAVGNSILVIAWHLLSDPDAHFTDLGPNWHDRLAPLRRKRQLVAELERLSGKKVLLQEATA

SEQ ID NO: 508654 - protein, 347 aa, unidentified
MRGAVHMQITTIGLDIAKNVFKVHGIDAAEKVVVRKQLRRAQVMKFFATLPPCLVGMEACATAHYWARELTRLGHQVRLMPAKDVKAYVKRNKNDAADAEAICEAVRRPTIRFVGAKSAEQQGRLMQHRTRDLLIRQRTQTINALRAHMAELGIVAAQGREGLKQLLAIIADEKDARLPIDARASLIVLAAQLQALQTMIGSIERRLLVQHRANEASKRLESIPGIGTIGASAIAATVTDPNAFRSGRDFAAWIGLVPRQDSTGGKQKLGPISKQGDRYLRRILVVGAHSVLWLAKKNPEKYPWLTQLLARRPFKVVAIALANKMARVAWVLLARGGTYRTPQLAAA

SEQ ID NO: 508655 - protein, 315 aa, unidentified
MANLIKSKTVVNVGVDVGKQYLDVCIHEKGIYWREENTATGIKQILKRLSYYKVERLVMEATGRYEFELAQLAYARKIPVCIVKPIRVRQYARANDQLAKTDKLDAEIIAEFGAVLKPKVTPAKSKNLIAIKDLIARRRQLINLRTQESNRSGIMGKTLSISCRRIIRHLNTEIKRIEKQLARHVAEQAEWTEKQSLLKTVPGVGDTLVYTLLADLPELGDLNNKEISKLVGVAPINRDSGRMRGKRRIQGGRANIRTVLYMATLSATQCNPVIKAFYKKLVAQGKHKKVAITACMRKFIIILNTMVKNKTEWAI

SEQ ID NO: 508656 - protein, 349 aa, unidentified
METLFKASKYGVGIDMGKDEFHACISAIDPTQRVKIKATRAFKNNPKGILDFLQWSDYHCKQLGVPVQYLMEATGVYYEQLALALHRQQAHVCVVLPQKAKYYIKALGIKTKTDGVDAQALAMMVCQQALEAWRPISEAMYTLRQLTRQQIDLQEFKTQINNQLMALEVGMYHSPAVKKQLEKLIAELDSQLAECLKLIKGAIEANAEWKRKTEQICRIKGVGILTVANLITETNEFALFENQRQLVSFAGCDVVENQSGKRVGKTRISKRGNSRIRRALHMPALMVVTYEQRPFIALYERVYKQTNIKMKGYVAVQRKLLTLIFALWKKDAKYDPTYEPVAQKKVALS

SEQ ID NO: 508657 - protein, 355 aa, unidentified
MTSTKYIGMDVHKESISIAVMNAAGKIVMECVIETKASTILQFIDGLRGDLRVTFEEGTWAAWLYDLLKPHATEVVVCNPRKIALLKDGSKSDRIDARKLAEQLYMNKLKPIYHGEHGLRTLKELARSYLTITRDVTRVMNRLKALYRSWGIPCAGNEVYAPRHRSEWLGKISEAGVRRRAEHYYQQLDALRSLRQEVRRDLLVESKKHKAWKLLRQIPGIGPIRAALLIALIQTPHRFRTKRQLWTYSGLGLETHDSAQYRVVEGQLQRSKKPVTLRGLNKNHNHDLKDIFKGAAMRASTATGPLGDFYEALLAKGRKPTMARLTLARKIAAITLIIWKKEVRFDANDLKPQAA

SEQ ID NO: 508658 - protein, 458 aa, unidentified
MSKKQMSLEVVNPNAAGIDVGSRSHWAAIGQDAEDVREFGVYSQDHQELCEWLFQNKVTTIAMESTGTYWQNLFSSLVSYGFDVILVNGKQTKNIKGKKTDIKDCQWIQKLHCLGLLSSSFLPDSTTDVIRTYSRHRQNLVKQSARTVVKVQKYLRLMNMRLDVVVKDIVGLTGTKIITEFLAGERSGKKLAKNRHYNCRKPEEEIAKALQYNGRDDYMFALKHEWETYLHLQKQIEQVDSQIKNLLEDIIDKDDNKKQHVASKKPYKRKNKNTIRGADMNQISYKYFEGVDLMAIEGVNDATIMAIISEIGLDGIKKFESSKQFTSWLRLAPNNKISGGKVLSHHLPKGSNRLKIALRNAANSIGNLKEGYLAHFFRKICYKRGRATAVSATARKLAVIIWNMLVKGIPYKPPIQYLYLDEKRKKGLVKRIKKQIDKFEIKPEEIGFSNSLIINTNF

SEQ ID NO: 508659 - protein, 358 aa, unidentified
MQTQSNKLDFSGQNIYVGFDVHLKSWKVTIMTEKLLHKTFSQSPNPELLYNYLRKNFPGGTYHSAYEAGFCGYWIHNKLKSFGINSIVVNPADIPTTDKEKVQKEDARDSRKLARTLRSGELKAIHVPSLKTLDDRSLMRTRSALVKDLVRNKNRTKSFLYFHGIELSESFSKQKAWSKCFIDWLGKIEMSEKSGKDALNAIVGASINLRASVLQVTKQITELSKSKEYQEQVMLLKSIPGIGLLTAMTLLTELETINRFESFDNLSGFIGLVPSTHSSGDNDIVGDITRRGHSVLRSALIESAWIAARLDPALTKSYHDYCKRMEPNKAIVRIARKLLSRIRYVLKNKKNYVCAVVK

SEQ ID NO: 508660 - protein, 360 aa, unidentified
MHATTVAVDLAKSVFQLAVADEQWRIVDTQRLTRSQFERWFVNRSVGLVIMEACGSAHHWARWLNALGIPVRLLPAQYVRAYVRRNKTDATDAAALLEAARAADIRPVRVKSVEQQALQGLHRIRSLWMGTRTSRINALRGFCREFGITIPQGARTGVETIARVLADPRSAVPDLIRHTAGMLLEEIRLLEARIAQVERELATVARHSPACTLLLSVPGIGLLTATALVAATSGDVTHFQDARHFASWFGLTPREYSSGSSRYLGRISKKGDRYLRMLLTHGARSVLRAATVADGAGKDVCGIRRWALDVQGRSNHNKATCALANKLARICYATLRDHAPFDEAARLRRKAGRQSFAIPA

SEQ ID NO: 508661 - protein, 334 aa, unidentified
MEKITTVGIDLAKRVFALHGVDGAGRVGLRKTVRREQLVETVAALPPCLIGMEACSGSHEWARRFQELGHTVRLMAPVFVAPYRKSGKNDGNDAEAICEAVSRPNMRFVPVKSAEQQAVLALHRVRQGWIEERTATINRLRAVLTEFGVVLPNRAQHVRRGARAAAEALSELARRAVEDLRAHLGVLDEYIAAYDRELEAQARASEAAQRLMRIRGIGPLTAVAIVATVGNARDFRSGRQFAAWLGLTPRQHSSGGKTRLGHISRRGDAYLRCLLVQGARSVLLTAMRHSDRMSRWAVSLQARCGYHKALVAIAAKNARIAWALLSKNQTLRTA

SEQ ID NO: 508662 - protein, 320 aa, unidentified
MYVGIDVAKAELVVAMGATGPVTTFPNDDVGLTALVGAMREAKPTLIVLEATGGYEIPCTAALAAAPLPVAVINPRSVRSFAKATGTLAKTDRIDARLLAQFGERVQPEPRPLPTAAQQELEALVTRRRQLLEMRTAEQHRLGQALGGHRQRVKQSLRKHLAYLDRELRITETDLRDRMQASPVWRARDDLLQSVPGIGPTVSQTLVAELPELGRLNRREIAKLVGVAPLNRDSGKRRGRRMTLGGRASVRAILYMACLSAIRHNPVLRAFYQRLTRAGKVKKLALVACMRKLLTIVNQMVRTGQHWRPSPSIACQLQPT

SEQ ID NO: 508663 - protein, 336 aa, unidentified
MYTPFEIQHTREGMSELVSLLHNSGEEVRAVLESTGSYHCPVVAALLENGIFVSVVNSLRMKRFCSQSIRKVKTDRIDAMQIALYGLAYWQELQPTKLPEDTYRELQLLARQYYQMTSILIKAKVDFNALCDQALPGMQELMSDHAGRHKLSDFVLRYRHTTHILEMGETRFRKDYCKWAEKKGYRNRERMAALIFATAQNGIPVLPNAPSTKIVITEAIRVLHTVEASRDAILTQMQALAKTLPEYSLVREMPCIGNTLAPRLIAEIGDVRRFHSKRALIAYAGIDAPPYQSGKFCANNRHISKRGNRYLRKTGYEVMQSYVMHKPANDPIFYVH

SEQ ID NO: 508664 - protein, 408 aa, unidentified
MNDTRKRYIGLDVHKHYLIAIGVDDELNVVLPVRRVELSHLEAWMKKTLTQQDDVVLEMTTNTWQLYDELCAYAGSVLVVHPPHVALITRSQVMNDKIAASILARLLAKGLLVGIWVPPQDIRELRGLVAQRKKMTGLATQAKNRLHAVLQRHHLVPPEGNLFHESQSDWWLALPLRKLEQINLYSDLETLRFAQGQQERLTSMMEEIASQQEQVTRLLQIPGFGVVTAVTVWAAIGTIERFEDPQHLVGYAGLGTRVHDSGMSTRTGRITKAGRRDLRVVLIEAAQIAANSHPHWKAELARLQPRLGRNKAIVAIARKLLVAVWYILAQHKTDRFAQPEAIAQKFLKFAYQLGKANRPAGQSAAQFVRQRLDALQLGSELTSIAWGSKKPIPLPPSTNKVSDVPNTK

SEQ ID NO: 508665 - protein, 356 aa, unidentified
MEEYIAFDSHKHYTLAEREKVATGEVKQCRIGHEPGAIRGFLGACDPGTAVAVEATGNWYWIVDEIEQAGLKPRLVHPRKAKMMMAMVNKTDKLDVHGLNLLQRTGTLPTVWIPPGEIRDLRELTRTRMFVARHRTRLKNRIHATLAKYGLYLTEYSDLYCKGARQGLESLISKLPTQTQYVTRMLLEQLDFVEQQIQAQEERLKELITVTPEMQLLQSLPGVGMILSAVIAFEIGDVSRFAYAEHLASYAGTVPRVHASGGKVRYGQLRSDVNNYLKWAFSEAANSVAVNHERRPERHVSRIYRSIRGRRGHATAIGAVARHLAEATFHVLKKRKEYREPSLIRKQTKRGRTKEA

SEQ ID NO: 508666 - protein, 352 aa, unidentified
MIDLVGRVLGTEQCRAMASGYAALLAQMHGHGRLSRVGIEGTGAYGAGLVRLLRDEQVQVIEVDPPDHKTRRFQDKSDPIDAVQAARAALAGERTGTPKQRNGQVEALRNLRVARRSAVNQRGETQRQMKARIVTAPDELRGQLRGLNIAKLIATCANLQAGRADAAIPAVAVAVALCSLARRHQHLSTEIANLDELLEPLVAGINPALLAANGVGPDVAGQLLVSSGEKHDRLTSEAAFAMLCGAAPIPASSGKTTRHRLNRSGDRQANAALYRVVLVRLRWDPHARDYMQRRTKEGMSEKGTIRCLKRYVARELYQLITANDLNSRLDIYRSIFAGALAPRAGRQARPAV

SEQ ID NO: 508667 - protein, 476 aa, unidentified
MARQTSPRASLQAVPMLAQETLYVGVDVGKKAHVAGFISSTLLTRHQRFEHCPALAFENSREGFRSLIDRIKTYVPLTQVQALLEVTGHYHRALLQYLQELDIPVFVIHVQKRQEGLLKTDKRDALGLANQLYNQLEKGSRFGDPLQAVRRLVPATEAAASLRGLVRHHYELVAESTQRKNKLTAICDELFPEFTRLLRNPNLPTALALRERFPTPADLAVASFWGLRAARGRTCSVSDVKLLELQRLAAQTIGTKDPARIRSLVIEQKQLIRELHVIAEHLAQLETEIAQVVEGSREGKILTSIPGIGSQAAATLMSMIGTIANFERAAQLKSYMGWVPKVAQSGSSLDWTRLSPRGVRQMKQTMYLIVWRAIQWDAEWKAMYERLLARKCRLDERTRRLIGREKVIGRLAGQMVCVIYALLKKDQELLAHLAPGEQPPEPTLYDPEVHRQHRLGQYQPRGARGKPPQLFELPSS

SEQ ID NO: 508668 - protein, 409 aa, unidentified
MNTGTITAVGIDVSKHKSTVAARRPGGKVVLLPFDVEHTAEGLKKLVAKLRQLDGEIRIVMEHTGMYWRPIAMTLKEAGFYVSVVNAILIHNFSDNSIRKVKTDRADAMKIANYGLTFWIDLQEYAGEDENRQLLKIQSRLYERTATTAGMLRNGLISLLDQTFPGANKLFRDDSRNSKGNAKWIDFVLRFWHKECVASLSLASFTDTFQKWCKRTGYKFSASDAEHIHAIARNAVATLPKNDSTKLLITQATNSLNAIYDSLQAIRTEMDRLASMLPEYELVMGMEGIGKVTGPQLMAEVGDVRRFSHKGALVAYAGVDASPYQSGSFDSKSRHVSKRGSPHLRRVLFVIMSMTLIRANTANPVFCFMDKKRAEGKHFYVYTVAGSAKFLRIYYAKVKEYLNALEDTA

SEQ ID NO: 508669 - protein, 410 aa, unidentified
MQVLYAKCAGLDVHKRTVVVCVLLTLADGQVIKHKQTFGTMTPDLLALADWLKGLGVTHAAMESTGPYWRPVYQLLEGLFTLLLINAGHIKRMPGRKTDMTDAEWIAELLRHGLLAPSFVPPRPQRELRELTRHRTNLMEKRGQAINELHRTLEGTNLKLTSVATDVTGVSATEMLQALLTGQETDPEVLAEMARGRLRQKIPLLKKALQGKIEEHQKLILTQLLADIDLFDEQVTEVSGIIAQRVSQNEELIGRLDEIPGVNRRTVEVVLAELGSDMSRFPSDRHAAAWSGMCPGNKESGGRRYAARSRQGNKALKRVLAEAGQAAGRSKDTYLGAQYRRLGARRGKKRAALAVGHSILRIIYHMIKDGTTFQELGADYFDRRNEASVTRRLVQRLEGLGYQVELKKAA

SEQ ID NO: 508670 - protein, 350 aa, unidentified
MLIIGCDLHSRYQQIAMLETAMGEVVTRRLEHENGEAKTFYASLPRPALIGIEATGYTQWFERLLAELGHELWVGDPAEIRARAVRRQKTDSRDAEHLLELLLTKRFPRLWVPSPEERDLRQLLKHRDKLVRMQTSVKNQLHFLAMSQGVGRKGKLWSARGRQELEGLALGPGASRRRPELVEILDRLKPQIAELDQAVAAEAERRPDVVRLMKQKGVGPVVGLAFVLTLGPVERFRRSKQVVSYLGLNPREDSSGGHQRLGAISKQGNEMMRWLLVEAGHMAAQFDPELRRRYQRLKFRRGAKVAKVALARQLAVRLYWALRQASEATPPVRTPSSPESRKVDASPSRL

SEQ ID NO: 508671 - protein, 420 aa, unidentified
MKVVYQTCCGVDVHKSFLVATIIKTTSGVEPSYQKKRFSTFNNSILHFKEWLVKNQCRDVCMESTGKYWVPVFNLLENEINVTIANPKWVKAVKGNKDDTKDSKWIGDLFRLGLVPGSYIPCKPIRILREYTRYRYKLTSCRTSEKNRYQNALTVCNVALDSVVSDIFGKLATSVIDYLIEQSDNSINHEEIASRLLRSLKKKSDSVIESIEGYQMTDSQKYRMRLVRAHMDYITSTINDIDTMLDSLIAPYENAVQLLCTIPGVDRNSAITVISEIGTDMAPFSNSKRLCCWAGLTPGNNESAGKKKSVRIARAGVYLKPALVQVAHAAVKSDKSPYYKQKYERIMKRRGKKRAIIAIARMILTAIYQMLSTGETWNPTDLFKIDMPEPMKEKQKEKAIKQAMKLLIREGKISKSQLAS

SEQ ID NO: 508672 - protein, 450 aa, unidentified
MSPLALDVVTKTGKTPVLGRMLSKYVGRKTSSIENDITKARNHLRQRGKIMRVVFGIDVSKASSEVAILVNGEKIHGYTIPNDAIGFNRLLEDLGTVYQPEIVFEATGVYSRRLQAFFEDNSYAYIRLNPLESKKQLDSLRVRKTDKIDAEKLATSQFILNRKPSYVQEALYQELRDLSRFYQNLTEDIVCSKNRLHKVLQVTFPELENILSSPTGKQYWNLVMAFPCNSFVLELDDAALRAIIRQSTSKHISENRVTYLVDKLTKLANHSYCAVKKTSPMMEEVKYYAGELLRLSEYRQSVLEKMITLAQPLPEYEILLSIPGIAETTATSIIGELGDIRRFHSANQINAFIGIDLRHYESGDFLAKEHITKRGNPYARKILFKCIHNIASASHTNLCHIADFYEKRKRQSQVTSTKPHTIASIHRLIRTMYYLITHNKLYDYTSTQNR

SEQ ID NO: 508673 - protein, 387 aa, unidentified
MRKPNDLSRCLAALEQDNTLIAVVEMGVESWLVAGIVPGIERHPLKKVEVDEGTLLALLQRWRDEAVRVGHPIKRMVVAFEAGRDGFWLARWLRMRGIEAYVIHPASVAVSREHRRAKTDRLDTELLKRAFVGWLRGETDHCSMAAIPTLEEEDAKRASREREHLVGERTRIVSRLKNCLARLGIRTFKPTLRKAPERLVSVRTPEGALIPPNTLAELERDMAHLRFVNGQIKEIERARLARLQQEPKTRAHAAIRLLARICGIGIETADMLTNEVLLRDLRDRRAVARYAGITGSPDESGKKRREKGLARAGNARVRRGMVQLAWRFLRFQPGSALAQWYQARTVDARSGTRKTMIVALARKLLIALWRLVTTGEIPAGVTLRATA

SEQ ID NO: 508674 - protein, 347 aa, unidentified
MVTDQVDFVVGVDTHADQHALAVVDAVTLQTCRQLTILASRQGYRQALRLAKRHAPGRRAWALEGSGCYGSGLARFLNTRGERVLEVERPSREGAKGRLKTDALDAERAARQVLAGSAGARPRLGPDTQALRALLTTREGAVSACTAAINELRALIVVSPPELRERLQGRSEAALLDACVRLRPGRSDTEQAAVALALRSLALRIRQLRNEARTLEKELGRRTQALAPELLARPGVGPISAAAILIAWSAPGRLRSEAAFARLAGTAPIPASSGKTVRHRLDRGGDRQLNRALHTIILTRQRIDPDTQAYIARRLSEGKTKREAVRCLKRYLARSLYRLLETTPTPT

SEQ ID NO: 508675 - protein, 355 aa, unidentified
MITVGVDVHKATHTFVAVDSVGAKIAETTVPATTAGHHRALAWARALLPSIDETDGPLWAVEDCRNMSNRLERDLLSAGQSVVRVSPHLMATHRRTGRERGKSDPIDALAVARAAQREPDLPVACHDEVTRALKLLTDHRDHQVVQRTSSINRLLWHLHELDPEFPGKADLTTLLTQKRIGAWLGERSGVLVEIATEELADIVDLSRRIKEISKRIGAMVTTVSPALLEIDGCGELTAAKILGEVANIDRFPGQDQLARYCGIAPVPVWSGRTEGTMRLTRAGNRQLDRAVHTIALTQARREGTLGHAYYERKLAEGMSKKQALRCLKRQIVRAVFRALETDHRNRTNPPLHTAA

SEQ ID NO: 508676 - protein, 351 aa, unidentified
MTTRYVGVDVGKTRCRAAIMNKQGTIESEFFFENNQKGIQHLTSQLTCEDQVVMESTANLWLTLYEALDDKHIKTVLANPMKTKAIASARVKTDKVDAKILAHLLRADLVAESYVPPKQIREIRALIRHRLSLTKMRTMIKNKVHALTDKYGYRCEFSDMFGVSGLKWLKTLELRELDHLILENHLSHIESINLQICKADVAIKEKACEDEDIRLLMSLPGIDVRTALLLKSEIGPISRFLDYKHLVSWAGLAPRVHQSGDVLWNGGITRCGSGILRWAIVEAAQTAVRYDERFGEFYGRVKARRGGSKAVVAVANKMLKVVWVLLVRREVYGGVNQRRYEEKLNSAGFDM

SEQ ID NO: 508677 - protein, 347 aa, unidentified
MQITTIGLDIAKNVFQVHGIDVAEKVIVRKQLRRSQVHEFFKALPPCLVGMEACATAHYWARELTRLGHQVRLMPAKDVKAYVKRNKNDAADAEAICEAVRRPTMRFVQIKPAEQQGRLMLHRTRDLLMRQRTQLINALRAHMAELGIVAAQGNAGLKELLKIIAGERDARLPVDAQASLIVLAAGLHAAQTMIGSIDKRIIVEHRSNEASKRLRSIPGIGLVGASAIVATVQDPKVFRSGRDFAAWIGLVPREDSTGGKQKLGPISKQGDRYLRRILVVGAHAVLKQARQKPEKYPWLTQLLARRPFKVVAIALANKMARVAWALLAKGGTYSRARALVSTVMAAA

SEQ ID NO: 508678 - protein, 269 aa, unidentified
MQEESMFVGMDVHKNYLQVAVLDERGKVLDNSRVDNNLTKVNEFYDSLHPSDDTKIVMESSGMWYNIYECLSKRHLDIRLSNPAKTRAIASAKIKTDKLDAVKLADLLRGGYIAECYRPTRGTMELRELGRHRAALMRMRTKLKNKVHSIMFMNGTSISYVGTHTFTKGYIEKLKELNDYRINGCLRVIKSLNDEINTVSKRILLFAKEDENAKLLMTIPGIGYYSALLIVSEVGDIDRFPDSYHLCSYAGLIPSTRSSGGMYHIMAAV

SEQ ID NO: 508679 - protein, 415 aa, unidentified
MAKIMEPILRCCAGLDVHSATVATCVRRIDEQGVIHAEVRTFGTMTRDLLALCDWLTKEGVSHVAMESTGVFWKPIYNILEELFQILLVNARHIKNVPGRKTDVKDCEWIAQLLQYGLLKGSFVPPRPQRELRDLTRMRAQLKHELTSVANRIHKVLEDTHIKVGLVATDVLGVSGRKMIKALIAGETDTAKMSDMAKGRLRNKKGVLEQALVGNVTEHHRFLLKALMEHLTYLESQIERFNQRIEEAARPFEKAITALIPMPGYDRVSAQSVIAEIGPDMNPFPSDSHLCSWAKICPGNNESAGKRKSGATGHGNRWLRAILVQVAWAASHKKNSYFQAQYRRLAGRRGKKKAIVAVAHSILTVTYFVLKLERSYKDLGGDYFDQISRERVRKYHIKRLEGLGYEVNLTEKEAA

SEQ ID NO: 508680 - protein, 358 aa, unidentified
MNNITRVGVDLAKNVIQVCAVDVTGKVVLNKPLPRDKFLTWCAELPKGCLIAMEACSGSHHWARELNKLGLNAKIIAASHVSPYRMEGKGGKNDANDAAAVCEAASRPNMRFVPVKTSNQQGILCVHRMREGFKEERTGCINRIRGLLAEFGIVVSKSPNKLREKLQDILEEAENSLDWLARLAIQELYTHWCAIDEKIDWCDKRINAHISDDVQAQSAKQLIGVGALTASAAVATVVDFKQFKNGAQFGAWLGLTPKQSSSGGKTKLGRITKRGDTYLRTLLIQGAKAAVMSAHMRHDPISKWLFQLKEKSGWQKAAVAMANKNARILWAVMTKGVNFDPAYVSVKPGGSIGAALAV

SEQ ID NO: 508681 - protein, 339 aa, unidentified
MWYTGIDQHREFCVLTTYGPEGARVKQARVASTGLALAGYFAEYPGPHKAVVESTGGWYWLADALAPLGVELVLAHATRLKAISAAKVKTDQVDSDVLALLLRADLIPVAHMIRPEQRGPRDLMRTRLRLVAKCVSAQNSIDRLLEKFNASDVAELGELYQLQAGCHAAQIQQLTQQITDLERALHPHPIPNVDVQRLLWIPGIGKVNAFTIYTEIDGITRFPTPRQFFSYSRLVPGADNSGGRTRHRSGSKAGNRYLKLAFSHAGIRAVQYYPEIRAFFKAKARKKPIRIARTLVALELARIVYHVLTKQEAFNGQFKQRPLTRQKHAQWPRRASPPA

SEQ ID NO: 508682 - protein, 467 aa, unidentified
MKHNQQRARSGKKSRGSISLLERIQPDAAGIDCGQNSHFVAVPPDRDPQPVREFRTFTADLHRLADWLAQCEVKTVALESTGVYWIPLYEILEQRGFEVLLVNARDVHNVRGRKSDVKDCEWLRELHSVGLLRASFRPAATIVPLRSLMRQRQTLVEEAATRIQRMQKALTEMNLKLHTVLTDLTGQTGLKIVRSILNGQRDPEQLAVHRDHHCHASHQEIVAALTGNYRAEHLFALRQNFAAYEFHLQQIAECDTAIEKLLAKLAEQQPPPSGPLSTPRRKRGSKHAPTFDIRTSLHRLTGGADLSQIHSIGPHAALQIVAEIGTDMRRWPTEKHFTSWLTLAPNNKVSGGRLLTSRTPPSANRAAVILRRCAMSLGRTSTALGAFYRRLAARTGKAKAITATARKLAVLVYRVLSGDLIYNDPGAAAYHQLNRARELKSLRKRAKLLGYQLVNHSTGEVLSIPVS

SEQ ID NO: 508683 - protein, 504 aa, unidentified
MGYRDSQTLFEGGIEVSTTSRKLKFTPFPQRFFDPVVPLLKDYCFLLSTPENIYLGYYGSPIIHGDTIHHQAICSVEKQEELILQKEYRVFKESPKGDEGGSMFYLGIDVAKKSSRYLVLDSEGKRIISFSLENLKERFQNLLSRLQEAKIATKDILAGLEATGWFWENLYQFLQEKGFKVVLLNPYYVNKFREALAKKAKTDDIDALVIANLLRTGEYMNSVVPEEKIQVLREYTNLRYEFLRTRQDYQRKVISLLGVVFPEYERTALKNPFGVAPLQILKEFPTAKDLALAKPRHIEKIVRSIQGNNFDLKEIQSLIDWAKNSIYSGRAREARGVSLKMLLGQVQALNSNIQEIDKSIEDILSPGTDDSFPGENLLSIPGVGKKTIAAVLSYLGVDGSSFCSAKKVTGYVGFFPRLYQSGETKRENRISHRGPKVLRWALYMSAVSCLIHNKEMRVIYQRKISQGKSAKQALIVVAKKLLEVMLAMLKSGKTYNPIQVYANT

SEQ ID NO: 508684 - protein, 420 aa, unidentified
MDVLIERCAGLDVHRDTVVATVRRPGPGGTRRSETRTFATMTRQLEMLVDWLTEQKVTLVGMESTGIYWKPVYYVLEDRFPVWVINAEHLRNVPGRKTDVADSVWIAQLIEHGLVSPSFVPPRNVRLLRDVTRHGRRLTEERTRAIQRLEKVLQDAGIKLTSVASTILGKTGRAILAALLAGEEDPAVLAELAKGRLRPKIPALREALTHRFRQEHHGALIAQMLAHIDFLESAILETHQRIEVLLRPVADTVELVMTIPGVGRRVAEVLIAEVGLDMTAFPTAGHLASWAGICPGNNSSGGKHRPGRTRHGSMWLRIALTEAAHVAARGKGTYLAAHHAQIRRRRGTQKAIGATRHDILTAYYHIVRDKVPYQDLGPDWNNRRRSTEQQTRRLLRQLERLGVNVTIEPNTESPTYKPNT

SEQ ID NO: 508685 - protein, 346 aa, unidentified
MEHYAGIDVSLERSSVCVVDALGKIVKEAKVSSEPAALVAFFEALGFAVKRIGLEAGPLSQWLHAGLKGAGFEAVLLETRHVKAALSAMTVKTDRKDARGLAQLIRMGWFRPVHAKSMRSQEVRALLVAGKQLLGRLIDVELSIRGILRGFGLKVGAVTRKGFDARIRELVTGQATLERIAGAMLSARVALKAEYEKLHKTVLAIVRDDAVCRRLMTVPSVGPLVAITYKSAMDDPNRITKSKAAGALFGLTPKKYQSGEKDVTGGITRAGDEMVRTALYEAANVLLARITRFSKLKRWAMDVAKRRGSKRAKVALARKIAVILHRMWVDGSTYRWTETQPIAAQA

SEQ ID NO: 508686 - protein, 401 aa, unidentified
MPTVADNGTRIKRFRALKATLRTDRTRLLVGIDVAQAAHVVHLRQAHTRVVTPTLTIPNTTRGFTQLWTAIQRAQRTTGCREVVVGLEPTGTYHQAVAAFLTQQGADVLFISSSVAYWNRRTQDGTWDKNDRKDAANCADLLEQGKVLFYSQPTGPLAELRHLVKVLRRARAELASCKARWRTTLRPSLAPMGEPLPNRLRVELPAVLQAWERPAPGAPAQPHGRLSLGLAMACADLGAQVTAVQARIAALEAACTPVADRLPAYALLRTIPGIGPTLGAILVAEIGDIAWYTSFSQLRKLAGLDIIRVQTGQGAGPWRISKCGRGLLRWALYQAAGGCTRTAAGRARFAALKAKRPGDRFAGLKTMVELAAKQLRLVWGVWRSGQPYDPARAGGLGRQRR

SEQ ID NO: 508687 - protein, 396 aa, unidentified
MERAAQPQIPPTAMAEPATLLVSFELSESCWVLTLRQPSSGKLSRVSLPARDMEKLLGLLTAQRQQAERWSQRAVRVISIYEAGRDGFWLHRWLLAQGIESHVVDPASILGPQRRRKAKTDRIDGERLLRSLAGWLGGEGDRCSMVRPPSVAQEDERRLSRERGELVKERTRLSNRINGLLANQGIAGFKPLQTGAQQALDALRTGDGHALLSQLRLSIVRILQRLVLLGQQLKAVEAERDALLKVMPADAAVSQGAASAEREKRRSLMRLRSIGPEFATVLSVECFYRQFDNRRQVASFAGLAPTPWSSGSVEREQGISKAGCRRLRSTMIELAWSWTRHQPGSGLTQWFHNKVAGQGKRMRRIAVVALARKLLVALWRYVQDGVVPQGAVLKAD

SEQ ID NO: 508688 - protein, 408 aa, unidentified
MNPLFVGMDVSSKNNVAYLMKPDGSKHSSFSVQNNLGGAKILSERIVSALESVPLSDLVIGLEATSIYGDSLVYALREDGSLGRFQRKIHVLNPKQVRKFKEAYPDLPKNDWVDAFVIADHLRFGRIAKEVYMDDYRYQALRTLTRSRFDIIQNLTREKQRFANYLFLKCSGIAQAKDIQNTSATTIALMERFETVDDLANADLDELTAFIAETGRGRFADPDAAAKAVQAAARGSYRLPKTVNDTVNQAMAVSIASMRALKEQVKVLDKAIEQQFEIIPNTLTSIPGIGKVYSAGIIAEIGDIHRFDSQASVAKFAGLVWHRNQSGDFEAEHSQMIKSGNRYLRYYLLEAANSVRRCDSEFRRYYDLKFKEVNKYQHKRALALTARKLVRLVFRLLKDNRLYIPPED

SEQ ID NO: 508689 - protein, 346 aa, unidentified
MKQVIRIGMDTSKHIFQLHGVDADEQPVLRKRLRRKDMVLFFAKLPATVIGMEACGAAHYWARVLSGLGHQVKLIAPQHVKPYIKRNKNDGRDAEGLCEAMSRPTMQFVPAKTEEQQAALMLAGVRQQLIARRTQLSNAIRGYAAEFGLTTGNGLDKIEPLLAQIAQDSRVPDLARDLFAFQGKDYLRLQTELKVIEARLMAWHRANACSKRLAKIPGVGPIGATALVMKTPDPRAFPSGRQFAAWLGLTPKDHSSGGKTRLGKITRAGDEVLRGLLVAGATAVIQQAHKARGRPSRWLLDLLKRKPPKLAAVALANKNARIAWRLMATGESYDSARMSGMSASAA

SEQ ID NO: 508690 - protein, 402 aa, unidentified
MPMLSIGIDVSKGKSTVCGMKPGGEIVYAPFEVQHTREGMSELVSLLHNSGEEVRAVLESTGSYHCPVVTALLENGIFVSVVNSLRMKRFCSQSIRKVKTDRIDAMQIALYGLAYWQELQPTRLPEDTYRELQRLARQYYQMTSMLIKAKVDFNALCDQVLPGMQELMSDHAGRHKLSDFVLRYRHTTHILEMGETRFRKDYCKWAEKKGYRNCERMAAHIFATAQNGIPVLPNAPSTQIVITEAIRVLHTVEASRDAILTQMQALAKTLPEYSLVREMPCIGDTLAPRLIAEIGDVRRFHSKRALIAYAGIDAPPYQSGKFCANNRHISKRGNRYLRKTGYEVMQSYVMHKPANDPIFTFIEKKRGEGKSGKLAMVAGLNKFLRVYYGKVTELYRSLPAIE

SEQ ID NO: 508691 - protein, 357 aa, unidentified
MKVTTIGIDLAKDVFGLHGVDGQGRVAFKKRLVRRRLLEFMSQLPPCLVGLEACSSAHYWARKIERLGHRVRLMSPRFVKPYRKSDKNDANDAEAICEAVTRASMRFVPIKSEAQHEVQALHRVREQLLKSRTALVNQVRGLLAEHGIVAPLGIARARRLLLEILADPERHGLSGLFRETLQEMAERLRFFDERVGAYDDRIERRFKEDERCRRLAKIEGVGPLVATAVVAAVGNASEFKSGRELSAWLGLVPRQHSSGNRSQLLGISKRGDRYLRTILIHGARAALRRADHKRDQRSRWAMRIKLARGYNKAAVALANKNARIIWALLTRGENYRPPAISVASPTADRISLTQVQA

SEQ ID NO: 508692 - protein, 353 aa, unidentified
MMIIGCDFHPSFQQIAYAEQETGEYEERRLNHREEATAFYRSLAGRAVRIGIEATGNDRWFHRLMSELGHELLVGNASAIHASAPREQRTDKRDTRHIFKLLMENRFPAIWQPSVDNEEQRQLLLHRCRLVRMRTRIKNQLDSIAKSEGLTGSRVWKAKRRQQIEALPLTGWYAERRKDLLELLDEMDRQIEPLDKAVRAAAEQNAEAQLLMTHPGVGPVVSLAYVLILGDWRRFPRGKQVGSYLGLIPAEASSGKHQQRMGHITKQGNTLLRWLLVEAAVKAQSKDPSWHRQYIRLSMNKHHGVAKVAIAHKLAVRLYWMLRSGQNYTKIVERGSHAGQSELAGGCGFGPIN

SEQ ID NO: 508693 - protein, 328 aa, unidentified
MTMNPVLSAFNHVVAFEVAKDSLVIHVLPTDKQSVAANKPKAIRKALLVEMRRNTECGLGPLLAVCEATGGYERHVLAICVELGIAVHKAHGARVRHFARYLGLIAKTDPIDARVLALYGLKTQDLRLYLPLSPEVLALRDLKTRRDQLQQMLFAETNRLEHACHVSVSRNLKAHIASLRKALAALEAEIAAHVKACETLARKARLMRTLKGVGPATVAAILAYMPELGDLKKGEAACIAGLAPINKDSGTYQAPRHIEAGRAAVRKTLYMTALVAIQHNAVMRLFADKLKRSGKPSKVVITAVMRKLIVTLNAILRSGEPWSHAKIA

SEQ ID NO: 508694 - protein, 338 aa, unidentified
MKLYGAIDLHSNNNVTVLIDELDQVVYEKRLPNDLAVIAQQLSAYQDSLQGIVVESTYNWYWLVDGLMDQGHKLHLANTAAIQQYQGLKYTDDKSDARWLAHILRLGVLPQGYIYPKQERAVRDLLRKRGQLVRQRTTNILSIQNLLTRNTGSSMSSNRIKTLDAKQVDDLLVNPDLALAVKANLAMMQCADQQIDRLERTIKDRIKLREEFSFLKTVPGIGQTLALTIMLETGDIGRFAGVGNYASYCRCVGSQKISNGKKKGKGNTKNGNKYLSWAYLEAANFAIRYCARIKSFYQRKKAKSHGVVALKAVAHKLCRACYYIMKNRIAFDVTKAFA

SEQ ID NO: 508695 - protein, 341 aa, unidentified
MEVSVLGIDLGKNSCSVVGLDGTGRVVVRRRMRRETVIAFAGSLAPCVVAMEACCGAHHMGRALVAHGHTVRLMSPEYVRPYVKAQKNDDRDAEAIAEAATRPTMRFVELKSQEQLDMQTLHRIRDQLVGERTSLMNQIRSLLLERGHIVPQGRAKLAVRLGEMLEAEEPVLGFRIHRLVADMRARWIALDERIADLDAEFAQAALTDERTQRLLTIPGIGALNATALVAAVGDARTFARGRDLAAWLGLVPRQATTGGKPRLLGITKRGSRYLRKILIQGARSSLPTMSKSDTRLGAWVRGLLSRAHQNTVVVALAAKMARIVWALLRHGRTYEPTLLAA

SEQ ID NO: 508696 - protein, 339 aa, unidentified
MGLYTAFDLHSNNAYLGIIDETGKRLFKKKLPNKAEMIKTTLLPFKAAIEGIVVESTYNWYWLVDMLMEEGYQVHLANPAKIQQYSGLKYSDDKHDAFWLADMLRLGILPKGYIYPKESRPIRDLLRKRSHLVKLRTSLIISLQNIIARNVGSHLKASDIKVLTTDRVKPLLEYNEDLALAGRVSKQAIDSLSQQIKAIEKTIEGRIHLRSPYDHLLSIPGVGPIIGSTIMLETGSIARFPKVGNYCSYCRKVPTGRFSNDKRKGSGNPKNGNHYLACAYSEAAEHAKRYDEESRKFFNRKLKSTNAPIAHNALAHKFSRAAYYIMRDGVDFMPEKAFA

SEQ ID NO: 508697 - protein, 347 aa, unidentified
MAHFVGLDVSVKETSVCVVDDAGSVILEQKVPTEPADIITLLTSLGVSFGRIGIEAGLLSQWLVNALTAADLPVICVETRHMKALLTAQQINKTDRNDARGIAQMMRVGLFKPVHVKTLVAQEQRMLLTSRKLLQRKLLDLELDLRGTLRNFGLKVGVVSGSRYEARVRELVEGFPRLAAIAEPLLNVRRVMRQQFAVLHKMLLDTVRGDAVCRQLMTAPGVGAVVALTYRATVDQPQRFLHSRAVGAHVGLTPKRYQSGEIDYDGGVSKCGDALLRTMLYEAAQVLLTHSGKWSWLKAWGMRVAQRRGIRRATVAVARRLAVVLHRMWVDGSEFRWRRDGAVPAVA

SEQ ID NO: 508698 - protein, 356 aa, unidentified
MDLHKNTSSFSVKDKEGKVIDECKLPTEPSAIKGYLKRFPDSSLAVEPVSQWYFYGDLIQGLGIDVHLANPLKVKAIASARVKTDKIDAGVLCDLLRSNLLPEAYFASPDARYWKEMVRYRSSLIRLRTQIKNKIHSILFRNGLRHPFTNLFGVGGRKWLESLDLAEHFAFNLKQYLGLIDAFSQLIKEADERIEKVVGDNQPAKLLTSIPGISYISVLTIMAEIGTIERFASAKKLQGYAGLVPSTYASGDRVVHGRLTKQGSRWLRWTMIEIAQRQLLCKRKPGFGWYYQRIKQRRGSGAAAAATARKLLAVVWRMLKDNRPFEIVPPAPRSKTSLLRGKSGAKDAHRKNIVSH

SEQ ID NO: 508699 - protein, 340 aa, unidentified
MSLYGGIDLHANNSVIVLLNEQDEVIYRKRLPNTLPTILEQLAPYHTEVKGLVVESTYNWYWLVDGLMEAEYRVHLANPAAMQQYSGLKYTDDHSDARWLAHLLRLGVLPEGYIYPKAERAVRDLLRKRAHLVRQHTANVLSVQNIMARNTGSRFSVKRIQELTKQELTTLLAEETQVLAVTSSLMVLDCLRQQIKTLEQSVHKRLHHTPSYEQLLTVQGIGTILAQTITLETGAINRFPSVGHYASYCRCVDSTKISNGKRKGTGNVKNGNPYLAWAYMEAAQFAMRFQPEAQRFYQRKLAKSRNKTVLARKAVAHKLSRACYYMMRDLVPYEATQAFG

SEQ ID NO: 508700 - protein, 468 aa, unidentified
MSKGSGTTRGDRRRNARRERLRGLLPRDGAVIGIDLAEDKQALVLIDHDVRVLARKTVKVKVFRLGEALDWAVTAAKVKGFRQVTVACEPTGPRWMQVQRLCAERGLPLVCIQPLMSHIAREQQDYTPHKTDESDCVLIGRLAVELHCYIPEELDETWAHLRHLGRRRAQLITAATASVQRVRDFLSVAWPVVTEACAGPFGSVTWLAALRVVTARCGGDPGKLAGMGQEAFTAAVRGAVAGWGGKKAWGTISARVFAALTDTEGVVTWSRRGLLRRVADELGDLARTRAQLRAVEADMVMILGELGLSRLGDIPGLTAVGAAAILAETGDPRRYDGSSSLVKHAGMSPAGNASGAFEGQAHISRRGRPGLRLAVWRAVWPMLRYNPVMAAKYTALTRAADAAAAGAGPQHGTAAQAAARARRAKARVACAASLLRWIYCMVIHGTSWDPAVAAGRCHDTPRSQAEAA

SEQ ID NO: 508701 - protein, 343 aa, unidentified
MQAVMTIGLDIAKSVFQVHGVDAGGQVVIRRQLRRSHVLAFFHKLPPCLVGIESCASSHHWSRELQALGHTVRLMPPAYVKPYVKRHKNDAIDAEAICEAVTRPNMRFVATKTREQQSCLTLHRTRYLFIRQQTSVINAIRAHLAEFGIVAPVGRSGVEQLLGVVADASDNRLLDVARACVAALGAQLRMLKAQILQFDRLIMAWHRSNEASRRLDDIPGVGPVLATALVATVADPQAFRSGRNFSAWIGMVPKQHSSGGKDRLGSISKRGDRYLRGLFVAGALAVIRYAKIHGTKRRPWLTALLARRPTKVAAIALANKIARMAWAVMAKGERYREPVALAA

SEQ ID NO: 508702 - protein, 341 aa, unidentified
MDKELYFGVDVSKKTLDLAYYDGETIDWKNAHIQVSNDDAGFKKIGSWVAKVGKDFDTFLFCMEYTGLYNQNFRLWLESKEYIYGMVEPRKMHRFEPDLDDDQRSLDRIKTDELDAFRIAIYCEQNHKKILRNPSKLPSPVYFKLKRLLAERKQNTKQSTLYKQQLHDICAYDTDLSVERKKLLLKNMQENQKAIDKEIDSYMNEDTSIRKNYNLLTSIPGIGRIIALETIVLTENFTAISNPRKYACYIGIAPFKKESGTSVRKKTGVSKKGFSEAKADLSIAVLSAIRNNPSIRDYWIRKRKEKCGGIVLNAVKFKLVLRMFAVIKRGTPYVETDAYKN

SEQ ID NO: 508703 - protein, 423 aa, unidentified
MKLTYPICCGFDVHKTFLVATIITSEYVMPHYYQKWFSTFYNGLVAFKKWLLEYDCKDVCMESTGKYWVPVWNVLEDSCHVVIANPKWVSAVKGNKDDKKDSKWIGNLFRMGLVPSSYIPSKDIRILREFTRSRSKLVSMRSSKKNRFQNAFTVCNLTLDAVVSDMFGKSATDIENYLLDTDAVDPEHCVSLLRCSLKKKASDVVEAVSDSNMTPEQKERGRIVQEHFADIDHRIAQLDEIIGDLVAEYEGQISLLCTIPGIDRRTAITILSEIGTDMSQFGSSKRLCSWAGLAPASNQSAGKKKSVRISRAGVYLKPALVEAAHAAVKSTEKQPYYRIKFERLMKRRGKKRATIAIARMILTAIYAMLSTGEVFNPSDLKKFDMPEDLKRKQTLSSAKEAVKLLVSLGLVTAGSISLDALAG

SEQ ID NO: 508704 - protein, 334 aa, unidentified
MNYSHFIGIDISKLTLDVSVLDQKGTQVFYAQIKNTRSDLAKLVKELTKKSIPVQTSLICVEHTGVYGNHLRNWSEQRGFTLWQEQALQIKRSQGIQRGKNDKIDAYRIAMYGFKNKTSYKPTIKQRDNVLLLKELLSHRRRLMKAKMQISQLLTERSFYEKEVIKAVKSNMTHSLKGINLDLKETEKAIRKLLQEDAEFKRLYTIMNSVDGIGLISAAMILVASNEFKSITEGKKFSCYAGLVPFEYSSGTSVRSKSRVSQMANKKVKSVLHLGALSAIRIPGDLREYYLRKVGEGKNKMSVINAVRNKLVLRVFACVKENRLFEKKFNYSLA

SEQ ID NO: 508705 - protein, 315 aa, unidentified
MQKMLNIGVDVAKDAVVAGCDEQGAAVRSIPNQRTALTVWLASLPKPSRIGMEATGCYHELLADLAYQSGHTVFVLNPKDTRHYAQAVGLRAKTDRVDALLIARLIAHEHARLHPYHPATCAQRQLGRLLRRRAQLVKLKGALRQSMKGMTGLARDTSALVAQMDALIAKLEQGMDTLIASMPGPQEDRRKLETINGVGAVVSAALIEPLTRLPFRSSDAFVAFTGLDPRPRDSGRKVGKRRLSKRGPAELRRLLFNAAMAATRTDVWKPIYEHYRAHGLPTTAALVIIARKIARIAWSIHRYHTSFDPQRLKTP

SEQ ID NO: 508706 - protein, 375 aa, unidentified
MKEKVRFLGLDVHAETIAVAIAEPDGEVRSLGSIPNRADSIRKLIRKLGPAEKLRACYEAGPTGYVVYWQLTELGIQCDVVAPTLVPVKAGDRVKTDRRDAEKLARCYRSGDLTAVWVPDEGSEALRDLVRAREAAKQDQMRARHRLSKFLLRSGQRPPTGVRPWTRPYLIWVAQLRFTQIAQESTRQDYLHEVEHMRERVTRLEQAITEAVKLASPALQQVINDLQALRGIADISAVTIAAELGQVSRFGGARQLMGYCGAVPSEDSSGKRTRRGGITKTGNAHLRRIVVEAAWSYRRPPCIWYGLRRRQESICEEVKEIAWKAQHRLHKRYMKLGAAGKDQRKVVTAVARELLGFIWAIGIRAQTVASQQAAA

SEQ ID NO: 508707 - protein, 369 aa, unidentified
MAETTEAFVGIDVAKLRNAVAVADAGRDGEVRFYGEVDASPESMRRLAAKLAAKHERLHFCYEAGPTGYGLHRLLTGLGHSCVVVAPSLVPRKPGDRVKTNRRDALSLARLLRAGELTPIWVPDTAHEAVRNLVRARAAAVKDVGLKKRQVGAFLLRHSRLFPRKKNWGARYRSWLETQSFEHPADQIVLQEGIESVRLAEERLARLDRALGEFLPTWSLAPLVEALQALRGVDLVTAVTFVVEVGDIRRFESPRQLMGYLGLVPGERSTGETVRRGSITEMGNARVRHLLVESAWTYRHPPRVGKAKLPKLERVSPKVREIAWKAQSRLTARYRALTARGKKTTVTCTAIARELAAFMWAVAREARPA

SEQ ID NO: 508708 - protein, 308 aa, unidentified
MKKISSAAAQKIEKVEGQKLTIGLDVGDRSSWYCVLDEAGDVLLEQKVATTPKAMKEVFGGMPHSRIALETGMHSPWVSRLLSEVGHEVIVAHARTVRLIGESRRKDDRFDARTLARLARIDPDLLGPVQHRSRKAQVDLMVIRARAGLVRARTALINTARGLTKSYGERLRGCSPRKMNRELAEGLSPELQSALQPLLDEIESLSERIAEYNDRVQQIAQESYPEVARLEQVKGVGTLIALTYVLTLEDPRRFRKSRDVGCYLGLRPGRRNSGQSEPQLHISKEGDPYLRTMMGQSAARSGAFWSRQ

SEQ ID NO: 508709 - protein, 384 aa, unidentified
MDANHVTEPHAEDVILAVSLELAVGKWKVALHDGRRERPAVHTVAQPQPAARLQAVLDVIEQQKLKWSLPAGVRIVVSYEAGQDAFWICRALQAHGIECYVIDPASIPVERHRRRAKTDRLDAIKLVINLRAWLRGERDRMHVVHVPSPQDEASRHLMRDRGQLQKEVLQHRDRMRKLLATLGCWDEVNHKAFAGRLARDQVRCHDGTPLPPELRERLLRECERLALAEQQLAALEKTRQASLPAPARQRSDDLARLKGIGEVGASRLALELFWREFSNRRQVGACVGLVPQPYDSGESQVDQGISKQGNRRVRALLVEMAWTWLRYQPDSALTQWFNQRTQGTGPNRRARRIAIVAVARRLVIALWRYLTDGVIPEGAQMKPV

SEQ ID NO: 508710 - protein, 445 aa, unidentified
MIAAVVERCAGIDVGKRFLKVCVMVGPLSEEPRFEIRKVDCTDTNFQQLREWLRTEGVTQVGMESTGPYWVPVFNVLEPEVKVVLANPVEVKNRKGHKTDATDAWWLAHLLRHGMIRASFIPEKATRDLRELTRRRKKLIGQVAQERNRVQKQLEYGNVKLGNELSDVFGLSGQLMLKALVDEERTPEQIAELAQGSLKKKKAEIAESIRGQQLSEMQKELIRSSMRHMVFLEMEIGQLDGLIAGLIQAAQQQEPYQLLQTIPGIKQEAAGNVLAETGPDMKQFPSAGNMSSWGGICPGNNESAGRHKSRHTTHGNPWFRATLIECAWAASRTNGSSFQAKYQQLKPKIGHKRALVAVAHALVKAIYYVLSTGEPYREVKSEVLNEVKRQRIIRHHTRRLRRLGCWLPAEQLTPLKEWYVTHCIPEAETPPKKPGRKPKLAKDQQ

SEQ ID NO: 508711 - protein, 392 aa, unidentified
MVVSVGIDVSKDKHDCFIVSSEGEVLADAFIIPNTMDGFHYLLQRIRHCTAPQDKIKVGLEATGHYSYNLLGFLLDNGLTTYVLNPLRTNLYRKSLSLRKTKTDRVDARTIASMLLSDAGLKPYTDTAYHNEELKSLTRYRFDKVKERAKLKSSIARLVCILFPELEKLVPSLHIASVYALLEEFPGAKQVANTHLTRLKALLETASNGHYKRDMALEIRNAAKNSIGSQMPAKSLELQHTIRLIRELDREIDEIEEQIQSIMDELHSPITTIPGLGFRMAAMILAEVGDFTRFDSPDKLLAYAGMSPSTYQSGQLKNCYPHMEKRGSRYLRYALYNATKYVCHWDPTFTAYLAKKRAEGKHYNVAISHAVKKLIRVIYHLEKTNQQYIKAS

SEQ ID NO: 508712 - protein, 338 aa, unidentified
MDNFYFIGVDVSKKKLDFCVLFEGKVLREEQVSNHQQAVARLIGELKNDLEMDNEQFLICAEHTGQYTFPLVCACKSVECKLWLENPSQIKYSSGMQRGKNDKVDAKRIAIYASRFGDKVKYYDRPSEEIERLKQLERERALYVTDLAKYKGQMYDQKDFMPAALYRKKTKRMKGLIQELQAAIDAITAEMEKIIGSTEVLARQMELLMSIDGVGKVVALNVIIETEAFSRFDNPRKFCCHAGVAPFSYTSGSSQHSKNKVSHRANKNIKKLLHMAAVSVTHRKEGELKAYYMRKVEEGKNKMSVINALRAKIVARMFAVIKEMNFILLFTLKNLQKP

SEQ ID NO: 508713 - protein, 397 aa, unidentified
MYENTFLGGVLMIYIGIDISKYKHDCFIATETVDHSFSFENNQSGFKELLERFKPLVKQEMIIGLEATGHYGENLKSFLTHHGYSFMEINPFLVKKFGEAHSLRKTKTDKKDAQMISTYMRSVDYKAYHHQSYHISALKSLTRLRFKLISIRTKHYNMMTKVLDVIFPEFKPFMREQGYSETSLYILKRFSSPDKIAKMSDEHFDKLRRLSMGKFNYPKFIKLKELAKSTIGVTQDHQLFKLKTSISYVEQLNRDIEETEKQITSLMDRYPTRIQTIKGIGIISAAVIVSEYGDINLFSNPAEMLSYAGLDSTIKQSGTTSSTGKLVKRGSKYLRATLINICMPVMLYHSAFYAYYHKKKQEGKHHHVALVHLAKKLVRVIHHLETHHEDFDSSKLQ

SEQ ID NO: 508714 - protein, 323 aa, unidentified
MTALDATGRSLKSGAVVNQPAELQKWLRGFSEPVTVAVEACSFWPACKEAIEAEVHAIRLVHPQRVKAIASAKLKNDRVDSQTLAHLSRCDLLPEAWMADRDTQARRQQVRLRISLGQHRAALKNQVHAVLHQHNLKTEASDVFGKKGRQWLNQAALPPAARTTVDTYCAMIDHLGQHIREQEKQLKALASTDARAKWLTSIPGIGVYSAMILLSEIGEIQRFRSPKSLYSYAGLVPRVRESAGHKSYGGISRCGSPRLRWVMVEAAHVAVRCCPAAKHYFERLRKRKHPHVARVALARKLLGAVFAMLRDGECFDESTFAAV

SEQ ID NO: 508715 - protein, 389 aa, unidentified
MARNGTLAKSQELQPSFHATTELITIGIDLGDRFSHCCVLGPDGKILTEGRLRSTPETMARHFQDLPPARIAIEVGTHSRWLSQLLMEWGHNVIVANPRNLRMIADNIRKSDQVDAHMLARLARVDPQLLSPIVHRKQESYPDIIQLKARDLLVKNRTRLMNAVRGVLKSAGVRLSPCGTSYFPSKAAMCVPAELKMSLMPLLETISHLNKQIYSLDKAIESTAQNRYPETNRLRQISGVGPITALQYVLTIGDPSRFTHSRDVPAYLGLTPRRHQSGSVEQQLRISKAGNKQLRSLLVQCAQYLLGRFGPDSDLKRWGTRMFERGGKNSKKRAIVAVARKLAVLLHRLWVTGDTYHPLYNVAADPPRRDASNAVRGAEVPQKGPMYLG

SEQ ID NO: 508716 - protein, 369 aa, unidentified
MKNSMTYVGLDVHKDSIVIALADEGRGGEVREYGTIQGSVSALDSVIRKLQSRGKRHFEFVYEAGPCGYEIYRHLSAKGLNCTVVAPSKVPKAKGDRIKTDRRDARKLARLHRAGELSPVYVPREDDEAMRDLTRAREDAKIAERKARQQLNAFLLRHGFRYGGKSHWTRSHFRWISGIAMGHPAQQVVLEEYVGTVQSCTERVERLTGQIREFVPQWRMAPVVDALQALRGVSLIVAVTTIAELGDLSRFDDPNQLMAFLGLIPSEHSSGERVKRGGITKTGNGHARRVLVEASWAYRFPARVSPRLLVRHEHLPQDVREIAWKAQLRLCARFRRLMARGKPKQVVTTAIARELSAFMWAIARQIPVN

SEQ ID NO: 508717 - protein, 341 aa, unidentified
MELFVGLDVSVRTTSVCVMDTGGKVIRESKVETELEAIGALLHAIGGPYKRVGLEAGPLSQWLYSGLSAAGYPVICVETRHMKAALSAQINKTDRNDARGIAQMMRVGLYKPVHVKTVRSQEIRMLLTARKFVQTKILDAENNLRGLLRNFGLKVGAVTRLQFERRIIELLEQSPHLHLVIDPLLEVRRVLREQFQRLHKAMERLAESDDTCKLLMTAPGVGPMVALSFRAGVDEPARFSRSRCVPAHFGLTPSRYQSGEIDHDRGISKCGDAGIRWVLVEAAGILLRISKRSSPLKAWGLSVARRRGMAKATVAVARRLAIILHRMWVDNTPYRWEANAA

SEQ ID NO: 508718 - protein, 347 aa, unidentified
MRFYTNQHKFYCGIDLHARSMYVCILSQDGEILLHRNMKAAPEPFLKAVAPYRDGLVVAVECLFTWYWLADLCVDEGIPFVLRHALYMKAIHGGQAKNDKIDSQKIAALLRGGMLPQAYVYPAAMRATRDLLRRRTHLMRKRAELLAHVQNTNSQYNLPEIGKKIAYKANRDGVAERFAEAAVQKTIEVDLALITYYDELLKDLELSLLKTAKHHDANTLYLLQTVPGIGKILRLVLLYAIHRIDRFPSGQEFASYARLVKCSKESGGKRLGTSGKKIGNAHLKWAFSEAATLFLRNNPQGQKLLARLEKKHDKGKALSILAHKLGRAVYFMLKRKVAFDMEMFLQT

SEQ ID NO: 508719 - protein, 336 aa, unidentified
MNEITTLAIDLAKNVFQLHGVDARGTCQLRRRLRRAQLLGFMVQMPPCLVAMEACGSAHYWGREFMKLGHRVKLIPAQYVKPFVRGNKTDGNDAEGICEAALRPRMPSVAVKTEEQQAVLTEHRIRQLLESQRKQLGNHLRGLLAEFGIVMAKGSGSLSKGLAEAIERAPARLRPVFNEAHQRLRDLQRQCQEQTRRIEQLAGHAPLYRRFMKERGVGPIIATAYAATVGSPTHYRNGRQVSASLGLVPKQYSSGEEPKLLGISKRGDRYLRTQLIHGARAVVSRIHGRSDPLSVWLQGLVARRGANKAAVALANKTARRLWAIWRDEGAELAAAG

SEQ ID NO: 508720 - protein, 419 aa, unidentified
MNYAPLRVLPDVPPGGAVAGIDWASAGHVACVVDMSGKVAGRLAVAHDRAGIAALTTWLRRAGAAETAIERGDGALVDALLAAGFTVVVIPPGQVKGLRSRHSSSGAKDDHFDAFVLADALRTDRARLRPLVPDSPQVLALRQAVRFRKDLVRDRVRAGNRLRAHLQAAFPGSVGLFSSLDCRLSLAFLAAFPTSAHAAHLDEQALTGWLETVPARGNCAPGGVLAARLSAAAPGAGDPALLAPVTVQMAGACADVAARIRAVEDQIAAQLAACPDGHLFTSLPRAGTVRAARLLAEIGDCRARYTVPRALAAAAGVSPVTRKSGKWESHDYRHAVSADLRDAVCDFADGSRRASPWAARTYEAARARGKDHPHAVRVLARAWTAIIWRCWQDGVPYDPAKHRALQDILQDQAGQEDGR

SEQ ID NO: 508721 - protein, 466 aa, unidentified
MKNKTTTLHDCTLEGIRFGGCGNSEAMVWKLGLDIELRAVAVAMQCGRGVIGPAAKWSREQLLQWVKEKRARGEAVHTVYESCGFGYTLHEQLSAAGANSLVTTPMRLNLERKRKNDRIDARELCVRLSRYLDGQSHELRPIRIPSRCEQQRRELGRQREFWKREVRRLENHGRALRIEHEHETLEAGWAGPRKWKRLAPQCSQFVREQLTPVVAQIRSAKAQLDRLSEQIESLVKKEQIPVGLGALTVSLIEGEVCQWERFAHRKAVGSYTGCCPSEHSSGPIQRFGAIDRHGNKHLRVLLVEAVWRLLRWQPHWHARQKYLLKLRHGSKKKIAVALARQLAIDLWRWRTGRASAQELGWSLPTLPLPEQPKPVLVFTKPHQPRQSVPQGGTLLDAAADPKGSSLRMGAFHPQALPQVQARHHGRRSPLTTARIGAGDREKPPHINGKPPIAEQTDPWEKPQKQK

SEQ ID NO: 508722 - protein, 356 aa, unidentified
MDEGSWVGLDVHARSVMAGVIDQGSGEVRSLRVPPGNAETVAWLETLPAPVRVVYEAGPTGYRLARACAGAGISCVVAAPSRIRPAADRVKTDRRDAERLARLLRLGEITPVRVPEPEEEAARDLVRAREDARGDLMRARHRLSKLLLRHGAVYDATAWTRAHDAWLRRQRFQSGPLAIVFDECYGRMLDAKTRRDALDKAIAELAATPPYVDVVDRLVCLRGVSTLTAFALTVELGDWNRFRPESLGPFLGLTPSETSSGERRRQGAITKAGNSHARRLLIEAAWHQRRPPRLSVTLERRREGKPLALRAQADRSASRLHGRWHALEARGKPRSIIVVAVARELTGHCWALATME

SEQ ID NO: 508723 - protein, 390 aa, unidentified
MFFLGIDIAKLNHVASLVSDNGNIVFSNFMFKNSLEGFLSLIDKVKSIPKDDIVIALEFTGHYSDNFVNFFFNRKFNVTLVNPSNVANFRKSYGRDSKNDRIDSINIAKMLLSREYSLVTQSDIEYLSLKKLNRIRDSLVKQKSKCKILLTRNLDSIFPELQYLLPSGIHSKAVYALLKKYPSSEEIAALGIDVLTNILKTNSRGHFCEKTAYIIKSQAKSSVGFEDISLSFHISQLISSIELLEEQIRNTEKQINAIIEKLKPVILSIPGISNVACACILGEIGNISRFRSPSKLLAFAGLDPKVRQSGQFRALSCRMSKRGSKYLRYSLIYTAWNAVRNNEVFSNYYALKRSQGKNHYKALGHVAHKLVRVIYRLMKDNIPFDAEQLI

SEQ ID NO: 508724 - protein, 348 aa, unidentified
MSQSEQYVGLDVSLRETSICVIDDADKIVWRGQVGSTPEAIAPAVKQHAPHAVRIGLESGQLSSWLFHELKEAGLPVICVDARHAKAALSLKVNKTDANDALGLAQIMRVGWYREVTVKGLDCQAERALLVARTQIVSQITTLKNCVRGILKTFGRVLPKGLRSQFSDRVRAAIDGHPVLGAIIEPTLQVLEATRAQLLVYDKAVIQRARSDDTARLLMSAPGVGVVVALAYITGVEDPARFKRSSSVAAYFGMTPRRYQSGEVDHAGRISKCGDGMVRGLLFEAAKVLLSRSTRPSALKTWGEALSKRIGAKKATMAVARKLAVILHRMWTTGTTFQWNAEAASPAI

SEQ ID NO: 508725 - protein, 343 aa, unidentified
MDYFAGLDVSVKETSVCIVDDAGKIVREVRVASEPEALLQVLTNKTYRFKRIGLEAGPLSQWLYSVLAEAGLPVICVETRHMRAVLKAQINKTDRNDARGIAQMMRVGLYRPVHVKTLRSQKLRVLLTHRKLLQSKAIAIENDLRGTLRNFGLKVGMVGTVKFEARFKELVANLPDLAVLVEPLLIVRRVVREQLGILHRRVLAIVRDDDVCRRLMTIPGVGAVVALTYRATVHVPARFRNSKAVGAVFGLTPAKYQSGENDRTGAISRCGDEMMRMMLYEAAQIMLVRSAKWSWLKAWAMKIARHRGMKKAIVALARRLAVIMHRIWVDGTEFRWTREVAAA

SEQ ID NO: 508726 - protein, 357 aa, unidentified
MHTAQQISFANIHFFVGLDAHLRNWKVTIRLDGLELKTFSMNPSPLELITYLQKHYPDGIYHIVYEAGFCGFWALRIFRQHNIDCIIVNPADVPTTNKEKVNKSDPIDSRKLAREHENKSLHGIYIPDTFHEELRALMRLRYRIIQSQTRIKNRIKGLLYCQGIQIPLQFSGNARWSLNFILWLQQLQMKTSAGNFTLQSLILQLKEIREHNKNVLKQLRKEAQHPDIAPLIKALQGVPGVAFITAMYLYTEIIDMKRFANDNHLVSFVGLVPSTQTSDENVYSNGISFRQNSFLRTMMIEAAWTAVREDPAMTLKFKELTKRMNSQNAIIRIAKKLVKRIRHVWLKQEEYVYALVA

SEQ ID NO: 508727 - protein, 339 aa, unidentified
MKVTTFGLDLAKNVFQLHWVEPETGEVRRRALKRDQMMKFFAQRSASVVAMEACGSAHYWARKLIELGHEARLIAAQFVRPYVKRNKTDAADAQAIWEAVQRPEMRFVAVKDEHQQAVLTLHRVREQRVKMRTMQINQLRGLLYEFGANLPKGRQQGMAQVGAQLAQLEDTLPAMVIDALRGQLQRVQALSDDIEDIERKLALWKKEDAAAKRLMAIPGVGLLTATAAVATIGDAKVFKNGRQFAAFLGLVPRQAGTGGKVRLFGISKRGDTYLRKLLIHGARSVITHQKARAPWLEQLLARRPFNAAVVALANKMARTIWALLAHDRTYQNGVTAQAA

SEQ ID NO: 508728 - protein, 316 aa, unidentified
MATNVAARIVGIDISKAHLDVYVLSAGESARLDYTDEGLAELTGGLGDPADTLVVMEATGKLEARCAVHCAQAGFQVAVVNPRQVRDYARATGRLAKTDAIDAEMIIRFAKAVDLQASPLRSEEEKHLDELVTRRRQIVDMITSKKNRLETTVVKTLRHRIEVHIRWLERELRSADGDISDVIEMSPVWRAKEALFKSVPGVGDVLARTLIAEVPELGSLNRREIAALVGVAPMNRDSGKMRGKQMIWGGRREVRRVLYMAALTASTYNADMSLFHQRLIADGKPWKVAITAVMRKLLIVLNTVAERGTPWEHRIA

SEQ ID NO: 508729 - protein, 442 aa, unidentified
MPEIMYSAASEFVAFVGIDWADRTHAWALQAAGSTKIEQGEVAHTPETVEQLVLAWRQRFPNGRIAVALEQSRGALIFMLSKYEHLVLYPVHSTSAANYRKIFRSSGAKSDGPDAEMLLDMLVRHPDKLRPLRPDTVETRTLQLLVEDRRQLVNQRTRLSNRLTADLKLYYPQVLQWFEEPYAPVTLDFLERWPTLEELQRARPATLQRFLAEHQCRDEAKNQNRIEGMRKAIAATTDGALVTAGRMAVMAAVHLLRQLHHSIQQYDTKIDELAKAHPDFAIFDSLPGAGPVMGPRLIAAFGTLRDRYQSAADLQRYSGIAPVTEASGQQKWVHWRWSCPKFLRQTFQEWAGLTMQDCDWAAAYYQVQRDKGKSHYAAVRALAYKWIRIAFRCWKDHKPYDDSHYENALRRRTPAAPENASLELPIAWISCGGFQKIVSKNR

SEQ ID NO: 508730 - protein, 316 aa, unidentified
MTNEVKTYIGIDVGKDELEIAQRGETKSWRTDNTEEGIEHLIEWIGFKTNCQVVIEATGGLEMKAASALMLSGIPVTVANPTRVRAYAKATGQLAKTDAIDAQMIAGYAGAIQPEPQRVKGGVEMTLSALAKRRKQVLEMKTAEKCRLSTAPARIKKHIQKHLEWLEEEVAVLDEEIQQMIQSDPEWEEKSSRLETVPGVGFITTATLLADLPELGTVNRQKIAALAGLAPYNRDSGRKIGRRRIFGGRSSVRRVLYMAALSGTINNPVIKSFYQRLIDQGKPKKVALTACMRKLLTILNAMARDHSSWNPKTILA

SEQ ID NO: 508731 - protein, 499 aa, unidentified
MPSTNVAAAPILGAMKRKSIFRNESQKLDAAFIEAGLPERVLLVPLDFAKVTHYACFCDGRGTYIRKAFTVKNNQEGIDYLVDQIERTRVARSIKSKRHVIIGGEDSASYTRNFMDRLFELGYLTVRLDSKEVHRQAESVDSSTDKTAVRAIAKTMLNRDARQVGGSDPYAQLRGLTRQRRRIVHLSTAVKNRIHTHADCLFPGFLSKDSAVAAFSMASLELMANKFSAATLARKSEKTITRTLSRQGVRSAPEVAAKLKEQARNAICADDASVQLSSQLIESELRLFQTLQSSLSQLDRESARILLQLPEAFAVSIKGIGITLASSIFAETGSLSQIQRCDQINAYAGIAPRVKQTGGPESPARIGGKRRNFNRILKDYTLQAGNHLYLHGPEELLHDAARRKLAGKAVDTAMARRFLRITRALAKSHCIYLPSHLREGQTGTNAEAQTRAQYIVKTWSDFLLKWKRLGLHEEAFAPETPLGDWRIIVQEIYEIDLPI

SEQ ID NO: 508732 - protein, 341 aa, unidentified
MSIVILGIDLGKNSCSIVGLDADGSVVVRRRMRREGVIAFAAKLAPCTMAMEACCGAHHMGRSLAALGHEVRLMSPEYVRPYVKAQKNDDRDAEAIAEAATRPTMRFVELKSEEQLDVQTLHRVRDRLVGERTSLTNQIRSLLLERGHVVAQGHARLRRLLGELLDSGADALSPRMAFLLGDMRARWEELDRRITAFDAEFAAMARTDDRARRLTGIPGIGALNATALVAAVGSAATFDTGRDLAAWLGLVPRQATTGGRPKLLGITKRGSRYLRKMLIQGARSAMPSLARSDTAVGSWLRALLARAHPNVAVVALAAKMARTVWALLHHGRTYQAASIPA

SEQ ID NO: 508733 - protein, 327 aa, unidentified
MSFYVGLDVSTKETAICVVDEAGERVWAGTSRTDPDVIAAVLERRAPSVTKVGIETGPLTVWLWHALHERGVPIVCLHARHAAAALKLQMNKTDRNDALGLARLVRSGWYRPVAVRSIETHRLRALLITRDQLVGMRTALINKIRGLAKTFGIVIGPGKGGTFTRHVQAQLPDDPVLNSLFKTLLSILGTIQERSHEIAKQLARVARQNKICRLMMTTPGVGPITAISFVTTIEDPHRFRRSQDVGAYLGLTPRRYQSGEVDINGRISKCGDRLSRKLLFEAANAMLSRISLPLALKDWGAAIGRRSGFWKARVALARKSSVILHRM

SEQ ID NO: 508734 - protein, 348 aa, unidentified
MNQFIGLDGHSKSCTFVVVNEKGKVKRKAVLETEEKQLLQFVKSIPGRLHLCIEEGSQSQWLYEIFSGQVHDLAIVQGRKTRGNKDDVRDAHRLAERFRIGDLGPRIWKVPEALATLKDLVRGYEMLNTDLVRVKNRIKHLYRSRGIAYAKAGCPFCTGRGGCQKPGFHQTLELLRTQQEGLKPLKAEAQKTMVAEANRHPITRILKTAPGFGPVRSAELLSIVINPRRFRTSRQFWCYCGLAIVQRSSSDYVQKPNGQWSWAPTSQSRGLNRNFNRMAKAIFKGAAVTVLTSMPTEPLRADYDRLLTNGTKPNLARLTLARKIAAIVLSMWKNQEAYDPGKYRLTGI

SEQ ID NO: 508735 - protein, 360 aa, unidentified
MTGTMTFAGLDVHARSTHAAAIDVLTGELRRARFGAGSDEVVIWLQGLPQPVHACYEAGPTGFALYRAAAEAGVRVEVIAPSKTPRAPGDRIKSDRKDAELLARLLLAGQLTAVAVPTGEVEAARHLCRAREQVRSDLMRCRHRVSKLLLLHGRVYPEPTAWNARHRQWLSRQRFDEPATELAFLDTLAAVDGLVARKQTLDERLSRFALEGPWWPTVARLRCFRGIDTLTAFVLCLEIGDLHRFQRPAQHASWLGLVPSLDQSGESRRQGAITKTGSGYARRLLVEASWHYLRQPRIGATVANRQQGQPAHVLQIAWRAQHRLYRLHERLRARGKPRNVSTVAVARELACFLWAAATAD

SEQ ID NO: 508736 - protein, 350 aa, unidentified
MERYIGLDVHVASTTFAVIGESGKRLGSHVVETNGQALVEQLKTIPGKRHVCLEEGTQSAWLYEILSPHAEEVVVAVVSESRGQKDDQRDAFGLAEQLRTGGIKRKVFKEVGEYKELRELGRVHSMVVQDSVRVQNRVKALFRSRGVTVSGKSIYAEKSREEYLEKLPDAARGAAKTLLAQYDAVEGIRRQAEKDLVKEAHRHPISRVLESCAGLGSIRVALLIAIVVSPARFRTKRQFWSYCGLGIVMRSSSDWVRKPDGGWGRANVQQTRGLNLNHNHTLKNIFKGAATTVITQLETEPLHQDYQRLIAAGTKPNLAKLTIARKIAAIALSMWKSKEKYEPTKHRKQS

SEQ ID NO: 508737 - protein, 343 aa, unidentified
MTRFVGLDVSQKLTSICVVDDTGRRLWRGQCHSDPEQIERAVRGHAGDDASIGIETGPMTPWLVHELRQRGLNVACLDARHASAALKMQMNKTDQNDAEGLAQIMRTGWYRPVHVKSLDAHRARALLGARAQLVGMTTRLSNHIRGVLKTFGLLPGAMRGLPFDKRVEALLAERDELAPIVRPLLAAWRQLREQIAAFDKAVRALAKASPTCRLLRSVPGIGVVSVLAYVSTVEDPARFTRSRSVGAHMGLTPRQYQSGEVDRSGRISRCGDTLARTLMYEAAVVILTRVKRASRLRDWAQAIAKRSGVGKARVALARKLSVILHSIWRSGEPFRWSEQPSGT

SEQ ID NO: 508738 - protein, 419 aa, unidentified
MLPLISGCRAREVAVLFAGDDWAEDHHDVEVQDGSGRVLGRARLPEGVAGIGRFHELIGRFADPDAGPDQVVIGIETDRGPWVAALIAAGYVVYAVNPRQAARYRERLGTSGAKSDAGDAHMLADMVRTDSHQLRAVAGDSGQAQAVKVVARAHQALIWERTRHVLRLRSALREFFPGALEAFDDLTAPDALELLARAADPASAARLSIAQITAALKRARRRNTAEKAKQIQAALRSQQLAQPQVVAAAYAATVRAAVAVISVLNEQAGVMEAQVESHFGEHPDAEIFVSQPGLGMVLGARVLAEFGDDPDRYADASARKNYAGTSPITRASGKKKAVLARYVRNRHLADALHQQAFCALTASPGARAYYDQLRGRGTSHHAALRQLASRLVGILHGCLKTGTPYDEVTAWQHRLEDAA

SEQ ID NO: 508739 - protein, 312 aa, unidentified
MDAVIVGIDVSKDRLDVAVRPTGESFVVSRSGAGIDDLVGRLLALAPKLVAIEATGGFETIVAAGLAGKGLPVVVVNPAQVRSFAQALGKRAKTDPIDAAVIAHFAEATKPAPRPMPDETTRMLADLVARRRQIVEMMAAEGQRARRVTDNRLKKSIARLHKALQKELTELDASIDDHVRGSPVWAEKEDLLASVPGIGKTIARTLIAELPELGQLDRRQVAALAGLAPWTRQSGQWRGKSFIGGGRKSVRRVLFLGAMVAARHNPILKQFRDKLVAAGKPKLLAIIAVARKLLTILNAILRDQTPWNPKNA

SEQ ID NO: 508740 - protein, 385 aa, unidentified
MKPNSQMMMGEFFRQCVGIDISKEKFTACLYMYDRASDVGCCTKSINFANTKSGFNQMVKWSRKESVKGYPLTYLMEPTGVYYEHLAYHLHKIGQTVYVVLPNKARQFCESEGIKTKTDAMDARCLALMGCVSRKLKTWSPPAAIYRELRQMTRFHADLCEVRTSVTNRLEALGHTEGLSKTVRRNCEKLIEEIDTLIEKNDKAIMQKVAEDKELEARVKRIATAKGLGEATIVCIIAETEGFHLIENRKQLASYAGLDVEARQSGNDDPRHRISKKGNAHIRAALYMPALVAIRYNRQIRAAYGRVCQKHPKEKMIGVAAAMRRLLLLIYSLWKSGEVYDDTRDTTRTSRKKNPELEYGPEDSITTTEEHAGWNAVDENRQTPF

SEQ ID NO: 508741 - protein, 379 aa, unidentified
MPSCVNFWVGLDVHKDSITAAVFRNRDPEPIRVDRLSYNLQKVRRYVQRLQAEGPVRACYEASGAGYVLQRSLSDWGVPCELAAPSLIPQRAGERRKSDRRDAIKIGRDFRDDRLVLIHVPTEADERVRDLVRCRETFQREIIKSRHYILKFMRRRGFIYREGAHWTARHVDWIRSTLAPGTLADEDQIVLCEYLALLEYKLQRRDDLDRRIEALALTPRYKPLVDRLGCFRGFKAQAAMVLATELGDLRRFENPRQLMAYVGLVPSEHSSGERRRLGSITKAGNTRVRHILIQAAWHYRNRPAVGAPLRRRQRGQDPAVIQHAWKCQHRLYTLFHRLAAKKPRPVAATAVAHEMVGFLWAVLRDVDVTRLQEEVSRAA

SEQ ID NO: 508742 - protein, 419 aa, unidentified
MSFKILKFNCCGLDVHKTWIYACIGITDPNNRTEYKQARFSSFTKGLNELCNWLAKYNCTDVCMESTGKYWIPVFNILEQHNLWVTLSHPKYTKPMKGNKTDRKDAKWICDLYMCGMVKPSFIPPADIRELRDLVRYRYKLTCMRTGEKNRAQNCLTVSNLKLDDVFSDVFGKSSRSITEQILQHPGENFDVTPFIHGCCKTPIEEIQAAVDGAISNEQAVKLRQCLDHIDELNKHISEVEQEILRLSDKYEAALNLIRTVPGFDKNPMTAVQVLSEIGGDMSVFPTAKHLVSWAGCCPRNDKSDRKIKSTRISRSGSYFKPVLVQVANALIKSKKHPEFITRYKRIKARRGHKKAIIAICRMILTAIWHILSDLKPYTPEGFLESRPVKEEKILTTSQALNLLKLRGYIIKDDPLPAS

SEQ ID NO: 508743 - protein, 400 aa, unidentified
MDRNRIVAGLDVHKDSVFLCIMRYDEAVIFEKTYGTLTTQLRQMRDDMLCHGVTECAMESTAVYWVPVWNELCDYMTLRLANPHFIKQLPGRKSDTRDAQWIAECQLKKLIKESFVPNPVVQDMRKLNRRIFNLNEDLAYNKNKLDAAMQRCGFRLSNYVSNTGGKSYQSVVRAISQGETDAEKLVLLVHGRTVNKHGRDTIAGSVTGNFSPTDIAVIRQYLAMIDLINNQIDECQKALAAMCEEHFPEQYRRLQTIPGVKERAATAIIAETGADMSTFAKATNLVGWCGLKPRNDESNRRIKSNRITHGNRYLRQILIEIAWVASRTRNCFFSNFSYVQVTVKKKRKMKIQVAIARKILVAVWHMLSNEEDFIDIYLKRLEEQRLIQLQIEQLESSMAL

SEQ ID NO: 508744 - protein, 360 aa, unidentified
MTGTMTWAAMDVHARSTYAASMDVVTGELSRQRFETGAVEPVVGWLAGLPGPVRACYEAGPTGFGLYRAAVAAGVDCQVIAPSKTPRASGDRNKSDRRDTDLLLRQLMAGALTPVAVPSPTSEAARDLARAREQVRLDLMRCRHRLSKLLLRHGRVWDRTAWTKVHRSWLAAQTFEQQNTELAFIDNLAACDGLTARRQALDERLSWVATDPEFWPVVRRLRAFRGIDTLSALIIVLEVSDFTRFPRAVQLGSWLGLVPSRQQSGESDVHGSITKTGSKYARRILVEAAWHYARPPGVGRALSERQEGLPDHVLQIASRAQHRLYRIHRRMRERRKPGNVITVACARELACFLWAAAIAP

SEQ ID NO: 508745 - protein, 356 aa, unidentified
MDVHKETISFAYLTSKSKDVVKEQQIKHNEVQIKKFVNKLKSEWNEIHCCYEAGVTGYPLYRYLNSLGVNCTLVAPGKIPRQNSDKIKTDKRDAIKLARLLRSGDLESIHVPNEEDEAVRDYLRSRDSLRLDLGRNRQRLMKFLLRKGNVYSATKYWTTSHYKWLNNFHFENEILQETFNDYYSRVRVQEENLKAMDQKIQEIAKSEAFKERVGILRCFRGVDYLTAMFLLCEVCDFKRFKTAGSFMSFLGLVPGEYSSGSKRKQTGITKTGSPRLRRILTEAAWQHRFPGTGSKIVAARRTGQPALVVALAEKASLRLHKKFRNLQLRGKSPQVMITAVSRELSGFIWAAMNLAA

SEQ ID NO: 508746 - protein, 351 aa, unidentified
MEMVGGLDLHRSQITFRTVDLRTGEVQRGKIHPGARDAFRDWLGGFEPGTDAHFALEGTTGWRFAVEEIQRMGFTAHLADPAELSERRGPKRRAKTDHADCELMVNLVLEGRLPESSIPPAHILELRALVRLRKTLVDQRIEWQQRLQAQLFHQGVVPGLRLCRPEDRRRLTGMEMSPAGRQTMGTGLVMLDDFDAQLGPLSAQLVSLAKSQPGCRALEHELYGVGWLTAVAIVAELGDCRRFHSGDQAVRSSGLDITVHESNGKRPGGHLARQGPAVLRWALFEAAQCAARKASPDHAYYVRVRDHIDHNRACLSVARKICRRACRILKDLGDAAMAPPEPPARRDPKAA

SEQ ID NO: 508747 - protein, 330 aa, unidentified
MKLNHVGIDVSAKTFTVVMDHEGDRTEAFDLPNDAVGHKKLIRMATQNGLHAKVVLEATGVYSLDLALALHRAKRVEVMVANPRAVSQFAGAYLRRSKTDSLDAKMIVEFAIRMDFEAWVPPKPHIFDLRAVSRRIEGMVKMATQEKNRLHAATSFDEMSEIVRNDIEVNLRHLERRIGRLREQARELIAQHPELERAFLHITSVKGIALSAGIQILAELAMLPENMDVRQWVAHAGLDPRVFQSGTSINKPAHISRQGNAHIRRALFLPAIVAAVHEPHVKAFYEKLLGRGKTKMQANVAVMRKLLHAIYGMLKHDRDFDGEKFYVLGA

SEQ ID NO: 508748 - protein, 389 aa, unidentified
MKIFVGIDIAKLNHFAAAISSDGEILLEPFKFTNDADGFQLLVSKLESFDKNSIIIGLESTAHYGDNLVRYLVAEFYQVCVLNPIKTCQMRKNNVRKTKTDKVDTFVIAKTLMMQDDLRFITFFDLDMMDLKALGRFRQKTIKQRTRLKIQLTTYVDQVFPEIQYFFKSGLHQHAVYALLKEAPSPKEIASMHMTHLANLLKVNSHGHFTKELAKELRVLAQKSVGANDSAISIQITQTIQQIGLLDSQLEKIEAEMTDIMKFNDSVIMTIPGIGYINGGMILGEIGDIHRFSNPNKLLAFAGLDPSVYQSGNFQAKTTRMSKRGSRVLRYALVNAAWNVVRNNATFKAYYDAKRAEGRSHYNALGHCAGKLVRVIWKMLTDEVEFNLE

SEQ ID NO: 508749 - protein, 356 aa, unidentified
MSEKLNSEIAVIGIDIGKNSFHLVGQDRRGRIVLRQKWSRGQVEARLANLPPCLIGMEACTGAHHLSRKLQALGHDARLMPAKYVRPYSKGEKNDYRDAEAIAEAVQRPTMKFVATKSADQLDLQVLHRVRERLVGQRTGIINQIRAFLLERGIAVRQGLHFLRAELPAILAKRTDVLSLRMLHVIEDLAGDWRRLDERIDALSDEITTLARQDKGCERLMTVPGIGPIISSAMVAAIGSGDAFSKGRNFGAWLGLVPKQMSTGDRTILGSISKRGNRYLRTLFVQAAWVVLVKIKPEGWERYGLKSWIEAAKQRLHRNVLAIALANKLARIAWAVLHKGRAFECVKTNATAPRPA

SEQ ID NO: 508750 - protein, 343 aa, unidentified
MHIASVGIDLGKTTFHLVALGARGQVIVRKKFSRRQLMAYTANLPHSLIGLEACSGAHFLGAALREQGHDVRLIPAQFVKPFRKSNKNDFLDAEAIAEAVTRENMRFVPIKTDAQLDVQALHRVRDRLVQRRTALVNQIRGFLLERGIVFSQGLVRLRNQMPAILEDAEQNLTPRLRHLLDHLWQEWKQLQAHIEAVSNDIGAIAIADVSCQRLQQIPGIGPLVATATVGAIGNGAAFHRGREFAAWLGLVPGQHSTGGKARLGGISKRGNSYLRRLFVHGARAVLLRVKYDTGGLGRWIQQLQARRPRNKVIVAIANKLARITWAVLAKAEAYRHPPLCAQA

SEQ ID NO: 508751 - protein, 417 aa, unidentified
MRKVSEKIERIKEETLVCGIDLAKKDCCARFVDYRGMEVYRKVWFDRTEDLDVIGAHITAAMHKENKKDVIVAFEPTGHYWLNINKYFKDNAIETVLMPTYTVKQEKEVYDQNPAKSDPKDAFLIAKLTTEGKYVKSIERSEIYQNIYSGYRIYDDIQKEINRVKNKIHVWNDKYFPEIEKVFKIDSVGIKPIYEKGLLPNEINDMELTKFEELMKKDNSRISKTKIKQIKELCKKSNAIDSDEFTKYEIKRLYEKFIELEEELIEITKKLIELASQIDYVEKIVEMPGINYVSVIGIIAETGDLNNYDYAKQVLKMSGLSLKENSSGTKKGKKHISQRGRSKLRRNLKQIGISLVRNNEFFLQLHNYYTTQRTNPLKKSISVNAVMRKFVYIMLAIAKTNESFDSNKAKKQSPIFS

SEQ ID NO: 508752 - protein, 339 aa, unidentified
MEQITTVGVDLAKSIFQVHCNDSNGRMVLNKKVRRRDLLMFMSTIRPCLVGMESCCGSHYWARKFTECGHTVKLIPAQYVKPYVKTNKNDAADAEAIAEAVTKPNMRFVPIKEPYQQNIQMLHRIRSRLVGSRTALCNSARGFLMERGIIMSKGIQKLRKDLPNIISDAENELTDMAREEMHNLYSELCSIDVLVTEYDRKIQLIYDNDEACKRIGKINGVGIITATYVRAVMGDPRTFKNGRQFAAWLGLVPRQHSSGGRNNLLGLSKRGDIYLRMLLIHGARTVVMYSEGKKDRLNRWAQDKIATRGFNKACVAVANKNARIIWAMLAHGEEYKMAA

SEQ ID NO: 508753 - protein, 399 aa, unidentified
MLEFDKNKGNRDYRIQKEITHMKRILKIGMDVHTTNYTLCAMEPIIGEDDRVFATIKVTPDYKNILMFIENLKLKLGLNDEYDIQCGYEAGCLGYSLYNQLTAAGVKCVILAPTTMLTPQGVRIKTDMRDAYMIAQCLSYGGYHAVYIPTEDDDSVKEYLRMRNDHKLALKKIKQQINAFCIRYGFCYDGTKWTQAHLKWLKKLEITNGLYRETLNEYMASYEEQEAKIERYDKRIEEIAEQTKYHDKVKKLECFLGIKTHTALSLIVETGDFERFAKGNQYAAYLGLAPGENSSSDSIRRLGITKAGNSHLRQLLIEASGGICKGAVGHKSKELRARQNGNTADVIAYADKANTRLRSRYYKFIRHGKKRNVAVAAIARELACFVWGMMTDNIEMKVA

SEQ ID NO: 508754 - protein, 423 aa, unidentified
MIKLKYSICCGLDVHKNVIVATIVTTNKDGISEYKQKSFSTINSDIQRFHNWLIENNCYHVCMESTGKYWIPIFNYLENDIDVCLTHPKYVKAIKGKKTDKKDSKWIADLYKFDLVRCSFIPPKDFRQLRELSRYRFKLVCMKSSEKNRIQNCMTVSNVGIASVLSDPFGKTATEIISYLLEHTADSMDEKAVRKFIKKGAKSKSDEIIEAIKGYTIETDQAKKLELARGHLEYLDDMITQTEVELYVRIKPYYEFVEFVSTMPGMTELSSTIVLAETGVDMNIFDDAKHLCSWCGLSPSNNESAGKKKSVRIAKAGDYLKPMMVQCALAAIKSKKQPYFAIKYGRIKKRRGHKKAIIAIARMMMVCIYHMVSEKKPFTPTDYEELMNPQNHVERVVLNENNVFAYLESLGYDSSKLVKRNDN

SEQ ID NO: 508755 - protein, 357 aa, unidentified
MKNSTNKDLFVGIDYHQKSVQVCVLDRSGRVLANKSVDNDCGVIAALTARAGHRVRRVALEACNGAADLAEQLIERFGWSVELAHPGYVARMKGSPDKHDLGDAHLLADLTRVGYLPKVWLAPPWVRELRRLVRYRQQQVDQRRNAKLRIGALLRDHRLQVPVKPGMLNAWTQAWHAWLTDEALKQLPDESAWVIERQLVRIEQLQKEIAITEKRLWSFTGEDQLTLRLLDETGVGPITAWVLRAEVGRFDRFNDGKALSRFCGLSPRNASSSQRQADAGLIKAGSNLLRATLIELAHRLTRCTPRWRQLKAKLRAAGKPGSVAAAAVANRWVRQLYYRMTDQQQPNRERILAATPC

SEQ ID NO: 508756 - protein, 429 aa, unidentified
MTRINAGVDVSKNRSTVCIIDQDGKVIMRPFLVWHSTEELDFLADTLKRLNGEVRVIMESTSIYQYPIALHLKEKGIFISIVNAYEMKQFANIDFRGGKTDKKDSRTIASYGISYWDKLVEWQIPKDTYFNLDLLNRTYMNAKKHRQIILQELQHYIDCAMPGMDKELHSLNLSTKKDFMLDFVEKFWHRDEIVNMTEAEFTEVFTAWAKKKGYRPVEGKAAKIYAIAKSCIPYYPANPTVKTILQCIVDKLSGVNRTLVTIVTQMIEEAKKLPEYQIVREMPGVGDPLAARFFGSAGDIRRFKNSKALVAYAGIDSPPDESGDFSSTHRHITKKGSKVFRDTGYEIMMALRAQKRTWEKVRKNPEVYDYMLREEAEGKPRKVAKIAALNKFLRIVYARIKELYDNMALAERAKTKTRSKIRAKTKVTA

SEQ ID NO: 508757 - protein, 315 aa, unidentified
MDTEAMPLRYVGIDVGKDRIEVHIRPDAIAFGCDTDASSLDHLVTRLKPLRPKVIALEATGGYEAIIAATLSNAGLPVAIVNPRQTRQFAGALGRLAKTDRIDAGVIAQFAEMTNLEPKPPADAQLSELRALLARRSQLVEMAKAEKQRGAKAENPLTRRSRAKVLRQLQAEIARIERAIGKLIDASPVFQAKAALLKSIPGVGDVVARVFIAELPELSIVDRHEIAALEGVAPINQDSGRWRGKRTIKAGRPSGAGTVVCRLPVDDPVQQTAACVLPPPGRWWERKEDSPDRGDAQAAGDRQCHAESQKALDRG

SEQ ID NO: 508758 - protein, 406 aa, unidentified
MEGPIITVDVSKGSCHYQPFIENGHPMRKPKQLSATIDGFQKLGQTIKDLEAKTEREDIPVIFEATGVYHRPLQKYLDDHRIRYYIISPLLSATYRKTDLHSNKTDVLDCAHIAKAYYCEKELRQYQAQQQEYKRLYQLSRIYESELVHLRKRKVSLRSMLDIIYPRIDKTFKGNQNLYDPIPMEILKRYPHPSLLLSHREDTIVKNVGHRTGHLKGYTERIVHKIYEKAKECYSGCDIDDIEVLKLPSLIENVQEQKKKCDSLLKEMIEIARTCPYFASVVSIVGIGENLAARIISELGDVSRFDNRAAIVAYAGLNPKIQQSGDIDGLHLKISKKGNKHLRCLLYLGAQCNYRLRKEDPLYEFTKKKRQQTQCPLSSKAAYTASAHKLLVIIYSLCKNGTLYHS

SEQ ID NO: 508759 - protein, 359 aa, unidentified
MLHRTIPTTGLTAAFQLVEEAQRVAEPFGAVPVCVFEATSIYWRPPRDLRVRLGLPTATVSAVQVKHVRGTQIRKKKNDAIDSLQVATLFKNGASHASRIPPEPMASLRELCPAHLFFAEFLVAAQNRRTAQRCVRHPESRRPCTRVTQRTPMTLMTQGLIAPARLLTLPLEELTQLLRQVSQDRHGVEEARQVRQSALTTLAMPPAEAAVSYGLALLGRSSLPVADQILPPLEHRIRELLAQVPFRHHLDEIPFFGPIVIGTILGELGHPGWFRTADDVVAWCGLDPAVFASAGKQAAGVPLTKRGSRYGRRILWLAAQNWCKHTAIGRRFFRRSRFGKGLSYGATVCAFAARLARLS

SEQ ID NO: 508760 - protein, 413 aa, unidentified
MQVVYAHCAGLDVHKKTVSACVSVCEGGGGAKRQQRRVFGTFSRDLLALADWLKEQGVTHVAMEATGVYWRPVWAVLEGQFEQMLVNPHHIKAVPGRKTDTKDCEWIADLLQHGLLKGSFVPPTPIQDLRDLTRYRAELRQSQNRVANRIQKLLEQANLKLSSVASNTLGVSGRRILETIIAGTADPQQLAQLARGRLKDKIPQLEQALEGRVRDHHRLLLAEYLDEWEALGQRIVRMEAEIDKQIGPFEAAVTLWQSVPGVDRVTACNLVAEIGVDMKQFPTAEQLASWAALCPGNHESAGKRKSGKTRDGNKWLRRSLCQAAWAVTRKKDCYLSSQFKRLAGRRGVKRAVMAVAHTMLIIGYHMLKTGQGYHELGGNYLDQINKDQLQRYLVKRLQRLGLKVTLESATAVA

SEQ ID NO: 508761 - protein, 350 aa, unidentified
MVILGVDAHKRTHTLVAIDDAGRKLGERMVAATTDGHLQALHWATRWAERRFAIEDCRHVSRRLEADLLAAGEAVARVPTQLMASARKGGRERGKSDPIDALAVAWAALREPSLPTAHLDGPARELRLLVDHREDLVAERTRIQNRLRWHLHELFPEFEIQPRTVKRLHVLDTLERRLADVEGTVASIARELIGRVRELSLRANGLERQIVRLVRQLAPSLLALAGCGPLSAAKLVGEVAGAGRFRSKATFARWNGTAPIPVWSANDGRYRLNRGGNRQVNAALHRIAITQWRGDGPGQAYVQRRMTTGDSKTEALRLLRRRISDEVYKRLLTDQTPIERSQPERPALVS

SEQ ID NO: 508762 - protein, 428 aa, unidentified
MSYRIAGIDVHKKMIVVVIADVMSEGAEYDFEQRKFGATPTELQILAEWMTQQEVQEAVMESTAQYWKPVWGALERYWTPECKKREGAGPMSGTLHLAQAKSNRGPKGRKNDFADAQRLVKRLAAQELVLSFVPPPEQRLWRTVTRKKYQLTRQVVQVKNQLEAFLEETHIKLSSLISDLLGVSGRRILKALAEGETDPASLANLADQRLRATTAQLRDALGACTDLNAVYRRLLKMTLEQLRLLEEQIEQLEKECAGLLRAQRDAVERLAEVPGLGVDSAQQIIAEVGADAANFESAKDFSSWVGVCPGEEETAGESRSSRSPKGNRNLRRLLNQGAQCAVRVKGSIFELTFRRQLPRLGWKAAIWAIAHRLGRLVWKLLHDGVRYIEKGPAVSERSKKARTARMIKELRAIGYHVQPLNPEMGAAR

SEQ ID NO: 508763 - protein, 338 aa, unidentified
MEAYAGIDLHSSNSYIGVIDEQDQRHFSKRLPNSLSQILVALEPFKENLEAVVVESTYNWYWLVDGLEQEGYKVHLANPSAIKQYEGLKHTDDKWDSFWLAHMKRLNILPEGYIYPKEERPIRDLLRRRLLFVRQRTSQILSLQSTIARNLSLKMSGNVIKKLSEEDVEDLFDSPYLVLTAKSNIAVIQFLTNTIRVIENAVKSQAKLRKEFQLLKTTPGIGDILALTIMLEVGDISRFAKVGNYSSYCRCVNSKRLSNGKKKGENNRKNGNRYLSWAYVEAANFAIRFSQEAQKFYQRKMAKTNKIIAIKALSNKLSRASYYIMRDQVAYDAGKLFG

SEQ ID NO: 508764 - protein, 369 aa, unidentified
MEQSTEIFVGIDVSKARNAIAVASEGRDGEVRFVGEVDSSVESMRRLIKRITAKHAQAHFCYEAGPTGYGLHRLIVSMGFPCSVVAPSLIPRKPGDRVKTNRRDAVALAKLLRAGELTAVWVPDESHEAMRDLVRARAAAVETLRVHRQHVSAFMLRHGRTFPRKTTWGARHLRWLQEQKFDHPAHQIALQEMVEAVRISKERVERLEAAIEEFIPEWSLSPVVQAFQTLRGIDLIVAVTCATELGDLRRFDNPRQLMGYLGLTPSERSTGDTVRRGGITKAGNGRVRHLLIESAWTYRHPPRIGKVKLYKIEAAPPRVREIAWKAQTRLTARYRALSARGKKTTVVCAAIARELVGFMWCVAREAQIL

SEQ ID NO: 508765 - protein, 329 aa, unidentified
MKQIITAKKSYCGIDISADTLDICYQQQDGTLCFEKCVNGPDGFKHIWRLTGKLYHFVMESTGVYQLPLCFFLEGKKAQYSVVNALQIKRYIQMKLERNKTDKKDAQHICMYGLEHHPECYQMPNQLYFECRAINNAIETFTKDITAFKNKMHATGKLEIDTKVISAAYKKILRDLQAELKKLETELYRKLEAWQPVLVKQVKSVVGIGKRATAILIVSTQGFKHTNSYQQLISYAGLSPKEYSSGSSIRGRVRICKQGGSLLRHTLYMCALNAKETNAACKALFERLVAKGKNKKLAVIAVANKLLKQVFGVVKNGSLFDRNYRQEMA

SEQ ID NO: 508766 - protein, 351 aa, unidentified
MLIVGCDYHPSFQQIAWVDTESGECGERPLSHSNGEVEKFYRNLKEQGVKVRVGIEATGHARWFERLLAELGHELWVGDAAEIKAKRVRRQKNDREDARLLRTLLVENRFPRVWLPDVGNRDLRQLLWHRHRLVQMRTRVMNQLQAMALNEGVRRKRGLWSKTGRAQLESFQLMPWATRRRKDLLELLDGLTPRIAALTAAVEKQVEQYPEAQRLMTHPGVGPLTALAYVLIIGSPERFRCGKQIGSYLGLIPCEDSSAGRQRLGHISKQGNSLLRFLLLESAQATVRSNPQWRRQFLHLTMRRGRQIAVVALARKLAVGLYWMWRKGWDYEKSLQFGSHVGQPGTRYGVK

SEQ ID NO: 508767 - protein, 364 aa, unidentified
MYYVGLDVHFKRSSLCILDCDGKLVKRLEVKGAWARLFEEVDRSVPRPFAVCYEASCGYGYLHDQLAKRADRVSVAHPGQLRLIFRAKKKNDRVDCTKLAKLLYLDEVPQVHVPDLDVRAWRGLIDYRRRLVGRRAAAKTQIRALLRGLGIAVTVKGLWTTKGIEWLAGQAMTSADGLRRDVMLDELAQAEAKVIKVERELNRIAKGHAGMALLMTIPGVGPRTAEAFVAHVDDVKRFGRVGQVGSYFGLVPCQDASADRNRLGHITKDGPAGARWLLAEAAWQGRRRSPTIGAYFERVMRDDPDRKKVALVATAHYLVRVMTAMLRSGEAWREDPQCVARARAKETERGKEKEGPAADVKETR

SEQ ID NO: 508768 - protein, 353 aa, unidentified
MMVFGIDPHKQTHTAAAADAVGRKKAEKTVKARPAGYRELIAWARDLEPGERTWAVEDVRHVASGLVRELLAAGEEVRFIPTRLMAGTRRGGRERGKSDPIDALANARACLREDAFLPAARLNGRVLEVRRLADHRDDLVAARTRVTNRLRWLVHDLDPGLAPAPRALAGAKGRRLLDQGLRALPACAGRDIAVSQLAAITRLTEQIRGIEKALEALLHDLCPRLLQVCGIGIVSAARILGETGDIRRFRSPGAYARHNGTAPIPVSSGTGPGGPQRLNRGGNRQLNAAVHRTALTQARCHDGARALLERRAGEVRETRKAALRVLKRHLSDVIYRALNADAWRLDEPSQHAA

SEQ ID NO: 508769 - protein, 348 aa, unidentified
MTLTIVETRAVTGGVDTHADTHVAAALDSIGGMLGVREFPATPVGYAGLLGWLGGFGTVHLVGVEGTGSYGAGLARHLGAAGVRVVEVDRCDRQDRRRQGKSDPLDAVSAARAALSGRALGVPKGRDGAVEAIRALMVAKRSARGERTQTINQARALIVTGPDELRARFARHSPAALVAELAALRPRAGDVPGYATQIALRELARRVEFFDAQLHRLDALIVPLVTTHAPGLLAVYGVGPDTAAMLLVAAGDEPARLRSEAAWAHLCAVAPIPASSGKVTRRRFNPGGDRQANHALWRIVITRMSAHPPTRAYVARRTAEGLSKKEIIRCLKRYIAREVYPHLRPAGG

SEQ ID NO: 508770 - protein, 347 aa, unidentified
MRFYTRQHLHYCGVDLHARTMYVCVLDQEGNVLVSKDIASAPEPFLELIAPYREDLAVAAECMFTWYWLADLCAREGLVFVLGHALYMRAIHGGKAKNDRIDAHKIAALLRGGMMPQAYVYPQAMRATRDLMRRRNYLMRQRAELLAHITNTNHQYNLPALGVRPARPAERSGLAEHFAEVPVRKSVEVDLSLVEHYDRQLLPLERYLESNAQAQDPVALAIVRSVHGMGKVLGLSILYEIHDIGRFSRVQQFLSYCRLVKPTKESGGKILGHSGKKIGNAHLKWAFSEAAVCFLRANKPAQALRARLMAKHGKGKSLAIIAAKLARAVYFMLRRSEAFDAERFFAH

SEQ ID NO: 508771 - protein, 486 aa, unidentified
MIRSVGIDLSRTGSHQVYCLDEQARPCDSFSTDSSLEGLEKLEERIFSDGSCPTIVFEPTGLAWIPLAAYLRARHPECRLVKARLQKVAALRRYLRSRTKSDRVDGITLAKMPFIDSEQLDEAYLPPVKYHALQRLTRQRERLMKSITIRKNRIGSIVNGYLPGLRKAFAHEWSERARVFYRQCLNPYQVSHNGKRALEELFIGIKARGALVESGRVYRECLRLVELYKRSEPAGMINEEFFDDLQDEIACELRLMEGEEEEVKRVSERIEELFRELHPDEHLRTIPGIGVRTAQVFLAVIGDPERFRNQSVFANYTGVVPGASQSADTESKGLRMTKAGPAMMKRALFQAGDIGRRYDPQLAYLYYREMVNHGKTHLQAMGAVMSHLGARILAVLRDNRPYEIRDIQGQPLSRRAAMELVRSVYTVPESVRKVRRRRKSNEGRLTDRRTHEAAKAPQSGPLVPPQKKVYPVEDLQSIVNRGLDIN

SEQ ID NO: 508772 - protein, 361 aa, unidentified
MNVIHYIGLDVHKKTISYCIKTADGRIVREGKLQATRGALRSWAEDLGEPWCGAMEATLFSAWIYDTLKPYAQRLVMGHPARMKAITAGKKKSDTIDARTIADLLRCDLLPTCYVLPPEMRDLRRLLRYRNMVVQQSVRMQNKMAGLLMESGTPFVKDKLHGKKYFSELMESLEEVPQSVKDLLRMSRGSMEMFESTQKQIVKRLLSEHALQQRVERLKSIRGVGPITALTWALEVSDPHRFSSIGDAVSYCGLTAALRLSAGKEQRGPISKQRNAWLQTVLIEAAKLAPRWNPQLAALHARQLELGHPNRATLQVARKLVAYLLAVDKSGQPFQVLTPPPTVETSTKTKRRKRASMAKAA

SEQ ID NO: 508773 - protein, 313 aa, unidentified
MNKGTFIGVDIAKDSFEFVAYGDDRHFNMSNDGTGIRQAVEQIQKLSPELVVLEATGGYEHPLVAALSIAKLPVVVINPRQVRDFAKATGQLAKTDAIDAAVLAQFAAVIKPDLRPIADADMLLLKEVVSRRQQLVEMLVAERNRMGIAHNPSVKADIQAHIDWLRKRLNEADGELLRQIKESPVWRAKDDLLRTVPGVGPMTSVALLANLPELGRLNRHQIAALVGVAPFNRDSGMMRGKRAVWGGRSSLKAILYMAALSATKWNPAIKTFYERLCASGKPKKVALTACMRKLLIVLNSMMKNNTAWRCAEA

SEQ ID NO: 508774 - protein, 355 aa, unidentified
MESTKYVGLDVHQEAITIAVMNSAGKLIMESIIETKTNTILQFFQGLRGDVHVTFEEGTWAAWLYDLLTPHVTKVVACNPRKNALLKEGNKSDRIDAKKLAELLRIGALLGVYHGENGVRTLKELSRSYLTISKDLGRVMNRVKALYRSWAIPCAGTQVYAPRHRSEWLGKITEVGVRRRAEHYYQQLDALQTLRREVRKDLLLESRKHNATKLLRQVPCIGPIRAAQLVALMQTPHRFRTKRQLWTYSGLGLETRDSAQYRYVEGQLQRSKKPQQLRGLNSNHNHDLKNIFKGAATMATVSAGPFHDFYEGLLTKGMQPTMARLTLARKIAAITLIVWKKGARFDPEHLKQQAA

SEQ ID NO: 508775 - protein, 367 aa, unidentified
MEKSSTVFVGMDVHKESIEIAVADAKEARHYGRIAGDAAAVDRAVRRLRSVHRRPVFVYEAGPCGFWLYRKLAAQGLPCMVVSPSMTPRNAADRVKTDRRDALKLARLARAGELEPIYVPDAKDEAIRDLVRTREDAVSMQRQARQRLQALLLRNEIRYVGRSSWTAAHRRWISGLKLPEPAQQIAFEEYVQAVEEAAARLERLSGAIQAQLGGWRWRPVVRALQALRGVSEIHAVRIVAELGDFQRFDSPRKLMAYLGLIPSEDSSGARRRQGSITKAGNSSARRAMVEAAQAYAHPARVSWVIARRQTKLSKTVTDIAWKAQLRLCARFRKLSARRLPRNKVIVAIARELSGFVWAIARQLRPTH

SEQ ID NO: 508776 - protein, 369 aa, unidentified
MADRITYVGLDVHKDSIVVAVAAGGLRGEVREYGRIANTPTALDRLLRKLGGDGMRLRFCYEAGPCGYGIQRRLSARGHECVVVAPSLIPKRAGDRVKTDRRDAASLAKLHRAGELTAVWVPDARHEAMRDLVRARLDAVHSLRRARQQLSGFLLRHGCHYGRPAWTRLHRRWLAGLKFEQAVHHIVLEDYIAAVEAAEARRNRLTAQIEAMLPDWTLAPVVAALQTMRGMALVNAASLIAELGDLSRFANPRQLMAYLGLVPSEHSSGSSVKRGGITKAGNAAARRLLIEAAWSYRFPARLSRELLLRQERQPRLIRDIAWKGQVRLCARYRRLARTGKPANIVTTAIARELAGFVWAIARQVTLTTD

SEQ ID NO: 508777 - protein, 349 aa, unidentified
MSTTAPLASIGIDIGKEVFHVVGFGTDGKIAFRRKIKRLALVETFRRLPPSVVGMEACLSAHFVSRVLRQLGHQPRIIPAIYVKPFVKGQKNDYNDAEAIAEAALRPNLRVVREKTQDQLDLQALHRVRSRLVSRRTATINQIRAFLIEQGIAVRTGATALRNSLLAILEKRQDEISCRMRGLIAGLYEDWICLDERIETLADEIEAIGEKEANCRRLKSVPGIGPLISTAVVAAIGTGEAFERGRDFAAWLGLVPRQYSTGGRSILGRISKRGSKYLRTLFIQAANVILMRPRNWERFSFGVWLRNAAPRLHRNKLATALANKLARIAWSILRNEKTFDAPQHEVAAI

SEQ ID NO: 508778 - protein, 405 aa, unidentified
MDIIIDKGCGLDVHKGTVVACIMGAGMKKEIRTYTTMTNDLLRLKGWLQEAGVTHVAMESTGVYWKPVFNILEDNFEVILVNARHVKNVPGRKTDVQDSEWLCRLLRSGLLKGSFIPPRGIRELRDLTRYKRKLIQAMVAEKQRVEKVLEDANIKLSSIASDTFGASGKKIIEELIKGKLGAEKMAELSKGRLRRKRESLKEALVGEVREHHKFMIKASLRHIRAMEQILLGIERKIQEKIERDYKEEDELLQTIPGVKENASAVIAEIGVDMDIFPNEMHLSSWSGMSPGNNESAGKKKPGSTTYGNKCLKAMLIEFAWAASRTRDTYLRSKYHSLVGRRGKKRALVALGHKILIMCYHILKYKRPYKELGGDYLDKRRKDRITRSYIKRLNHLGYEVILQEAA

SEQ ID NO: 508779 - protein, 349 aa, unidentified
MDNHTQYLGFAGVDLAKKVMQIHFVTEDGEITDKSAKRAEFLDFFRNRGKCLIGMEACGSSQDWARKLEAMGHEVHLMSPKAVKPFVSGQKNDHNDAIGIYKAMFNGVRRVPVKSTEIRDLQTLRRIRSQVTKDKVKEINHVRGLLAEYGIVMGKSLNAFNKDISSALEILTERGDVSPLVAEELRTTVEAIKAKIERQKKLDQEIEQLARGCKNYENFLKTPGVGPFTAAMLCVLLCDPSIFANGRQFAAYIGLAPRSRGSGGKNYVTGIPSKFNCDSESRAVLVECAQAIARCKNKSLWVEEILRRKPKKVALIAIANKLARQVWAMANKGESFKEPLHKRWVICYN

SEQ ID NO: 508780 - protein, 338 aa, unidentified
MRLYAGIDLHSNNNVIVIQNEKDEVVKRRRLENTMWTVLGFLEPYRDDLAGVVVESTYNWYWLVDGLQDQGYRVHLANTAAIQQYEGLKHGDDDSDARWLATLLRLGLLPEGHIYPRAERPVRDLVRKRSHLVRTRTSYILSVENLVTRNTGRCLKGEAVKKLTPEAVDELGLEPDLGLAIHANVAVVSCLQEQVERVERAVLSKVRLRKAFKRLLTVDGIGKVLALTIMLETGDIQRFGSAGNYASYCRCVNSVRWSNGKRKGQGNTKNGNKYLAWAFVEAAHYAIQWNEQIRRYYQRKCAKTMRVVAIKTVAHKLARACYHILHDDVNFDVNRAFG

SEQ ID NO: 508781 - protein, 404 aa, unidentified
MIFVGLDWAEDHHDVCVMDEAGEVLGKRRIADGVEGVAELHALVGTHAQEPNEVVVGIEIDRGLIVAALLSAGYEVYAINPLAASRYRDRHATSGAKSDPGEAKVLADLMRTDRHNHRQIAGDTELVEGVKIIARAHQNAVWGRQRQVNALRSSLREYYPGALAAFGTDLSSSDAISVLSIAPTPLLGRQLSRSKIISALRRGGRTRNVEKRAAEIQIALRAEYLEAPPGIGEAHGEVARSSLSLIEAYTKQIATLEVSLDERFEQHPDAKVVLSLPGLGTVLGARVLGEFGDDRTRYAGSKSRKNYGGTSPVTKASGRSRVVLARYARNRRLATALDRWAFCSLTHSDGARRYYDDLRARGKTHGQANRQLANRWVGILHHCLERDELYREDIAWPRGPELAA

SEQ ID NO: 508782 - protein, 322 aa, unidentified
MDAVWVGIDVSKAWLDVGIWPEAQSWRIANDAAGVAELAERLRPLGPRAVVLEASGGLEALAAGELHAAGLLVAVVNPRQGREFARALGTLGKTDRLDALVLAQFAQSSQSNGRLVPLRLAEEAELELKALVARRRQLLGMLVAETNRRERAPKVVRRSIVPSIKGLKRAVAEVEQQLKQVLAGSPTPQRKAALLTAVPGVGPQLSCTLLAELPELGRLGRRQIASLVGVAPHPHESGQFKGRRLIWRGRARVRTMLSMATLSAVRHNPLLRVQYRALLARGKAKKLALVACMRKLLITLNAILRDSTAWNPNYIVDFQHSR

SEQ ID NO: 508783 - protein, 405 aa, unidentified
MEILVDRACGMDVHKATVVACIMGTGIKKEIRTFTTMTNDLLRLKAWLTDNRITHVAMESTGVYWKPVFNILEESFEVILANARHVKNVPGRKTDADDSAWLCKLLRSGLIRGSFIPPKEVRELRDLARYKRKLIQAIVSEKQRVEKILEDANIKLSSIASDTFGASGKRIIEELMKGELKPEAMAELTKGRLRSRKAEMKEALVGNMEDHHRFMIQAHLTHIAMMEELLATVEKKIQETIERHFKKDYELLKTIPPVKDSASVIIAEIGVNMDPFPTEMHLSSWSGMSPGNNESAGKKKPGVTTHGNKHLKTILTEFGWIASRMKGTYLWSKYHSLVGRRGKKKALVAVGHKILVMCYHILKHKVPYKELGPRHLDERRKDRIAKSYIKRLSSLGYAVTVKEAA

SEQ ID NO: 508784 - protein, 401 aa, unidentified
MEQFIGCDAHKKFSVFVAVNEKGQAGEALRVMHDRQLYREFLARLPPHSVIAVEASGSYGWLVDEMERAGHHPKLANPLEAKRRMALTKKTDKLDARGLAILLRNGTLPEVWIPPSELRDQRELLRLRIFLVRLRTRVKNRIHGTLARHNVQVPGADLFGVAARLQLGTRLPELPVHSREAIEQELATLDFLETQIESAEQRLEMIMNVSVEADLLKTLPCVGKILSMILMLEIGRVDRFPTAAHLASYAGLVPRVHSSGGHTRMGQVCPNVNRNLKWAFVETGNLVVINQRGLAGTHVVRLYHRIKRGKNHQKAVVAVARHLAEAAWWVLTTQEVYREPRVARQVLSSTQGKRVYRTSPTRLKDDCETPSAEEAHAEVEGGDMCPTKERKLRVSGIGEMN

SEQ ID NO: 508785 - protein, 386 aa, unidentified
MKQNIIHIGLDVDDTQYHGSAFNKDTGEVIDFKSRPTLKGLLQQLDRMARHFKGHKIKLCYEASYVGYCLQREKVRADTAREAALGYLISNDIHCDIVSPSSIPSPRGKAIKTDRIDAGYLAQFYANDLLTIVQPPDEEQEQDRDLLRSRQKVMQQRNQLRKHLQAVLRRSGLHYKAETGNKSHWTKHHYCWLVRTIDGLPGSLKVNLELLLRQLKALNEVLTEYGQQIEVLASVPRYQPAVQSLICYKGIKNIFALTMITEIGDIKRFSHPRKLVSWIGMDIREYSSGGKHNRFGITKHGNRYIRTAFIEANQRGYRTAKIGQDLKSRRKHIAPELVNIADRCLRRLNKKGNRLLLAGKHPNKVKVACAREMVGFVWESLNKVAA

SEQ ID NO: 508786 - protein, 466 aa, unidentified
MENNYILYVGMDVSKGKADAAILKVSDRRSVKPKFLRKKLSFKFVKSEVASFLETVRSYSDVNCTSICFALEVTGIYSTNVYDYIKANLYENESIKFLNTDFVNQWRIAHNIAKSDPLDAQTISTIIGTDSDVQYVNDNVFENKNGYQDLKALVHRHYQIKKIYSQEINRLIAQCDCLFPELQYVFEPKSAAFIAVLSSYPTTHDIINASRVEVFDVVYEATKHRCSMDKVDKLFELCQDTLVPDDISSYGKSIILDLVENIKNIKGQLKSIERYIKDIASLNPAYKLLLTITGCGPITAATVIAETGNIRRFKNADCFVSYSGTSPRNKRSGTSVETMGKISKKGSRYLRHAIYMIAEFARRHNPVLKHQFERIKNGNKKRHKLANIAIANKIARYIYSIMKNKSSFVILHDHIMRLPEETRDTFFNSISLDFPKNTRKQIYQYSDINGELHRFVYIKTDEMIPA

SEQ ID NO: 508787 - protein, 412 aa, unidentified
MKTIIGIDWSESKHCVHIYNEAGSLLTRLEIPHSLEGFAQLRRRIAAINSEPSNCLIAIETSHNLLVDYLARCGYTLYILVPSVVKSNRGRQGSSGAKDDDRDAQLLGDILRTDRGRLIPWQADGPLVRQMRSLLSWVDDLTAAIIAQHNRLRANLLRYYPQPLVAFSSLTGQLALHFLTTYAAPADLEGLTLAQLTAFCRQHRYYQWQRLPTMLANLLTPAPQLDEEVVPAYRQQTVFLAQQLLSLSQQKKEAIAQINQLFDQHPDGPIFASLPGAGELLAPKLLVMFGDHRSRYPHRAILPAIAGTSPVTVASNRSRYVKFRRACNHHFRQTAQQFAQASTRQSVWAATYFSQACCRGHSKSHAYRCLANRWLHLIWTLWQTHQLYDEDYHLRQVARHRRPDRGLTSAHR

SEQ ID NO: 508788 - protein, 354 aa, unidentified
MRLYVGLDVGLEETSLCIVDSEGQTVREVKISTEPAAIRSALEGCADRLDRVGVEASSLGIWLYRELQPAGVSIIVVEARHMRVSLSTMRNKTDRNDARGIAQMMRLGWYRAVHVKNIDMQKMRSLLANRKLLKRKLIDIENHIRGTLRAYGLLMGAVGRRGYEARVRELLKHSDPIFVMTIEAMLDVRRAILEGYDRLHRVLLQVVQHDLVCRRLMTVPGVGPVAALSFKVGVDDPRRFARSRTVGAHFGLAPRRHQSGTSIDYEGRISKQGDVAMREALCEAAASLLLRVRKWSALRAWGLRIAKRSSMLCAITAVARKLASILHRMWVNETDFHVGFGAKVTQRLRLKPAR

SEQ ID NO: 508789 - protein, 402 aa, unidentified
MNFSVGFDWASQEHAVSVLDATGQVCWQGRVEHSADGLAELLRQLARFGPPAGLPVAIERPSGLVVDILMDAGHPVVPIHPNALKASRPRYSAAGSKSDPGDAFILADLLRTDGHRFRPLQPLSDATRALRALVRSRDDLVVQRGALANQLRALLERFWPGAAAIFADIATPIALAFLSRYPTPHSAERLGEKRLAQFLTQHAYCGRRPVPDLLARLRTAPLSQTGELEAEASGEVVRALVAGLLPLLAQIQQLSAAIAAALSQHPDGALLQSLPLRGSVNAAQILAELGDDRTRFPTNEQLAAEGGVAPVTRESGKHRGVAFRRACNKRLRQALTTFADNSRHGSPWAAAIYAAARRRGCRHPHAIRILARAWIRVLWRCWQDRRPYDVTHHRGAQGAAAA

SEQ ID NO: 508790 - protein, 311 aa, unidentified
MNTKNDPIHYVAIDVSKSTLQVQDDRRAFAVGNDPNGHRKLRDFLKTCANPLAVFEASGGYERALLQSLHKAGMPLAMVNPARVRDFARSEGVRAKTDPIDGKMILAFAKSKALRAMEVPSEACTKLAALLDRRGHLVEQLAREKNRLQNSEPFIHRSIKRMIRILEKEIAAIEKTIDQLVGSDPALKSRSEIIGSVKGVGNITAWTLLAYLSEIEEINRNRLVALAGIAPFNRDSGKFSGRRSIVGGRAKVRKCLYMAAHTASSCNPVIAAYVQGLRDRGKPYKCAIVAAMRKLLIHIQSLMKNAQLSPC

SEQ ID NO: 508791 - protein, 370 aa, unidentified
MAKRSMFVGMDVHKDSIDISLAEDGRDGEVRHYGGIPGDLEALAKVLKALRAPTRRLRFVYEAGPCGFGIYRYLTAQGEDCVVVNPSSMPKRSGDRIKTDRRDGDALARLHRAGELTAIYIPTDDDEALRDLVRAREDAVGLATQAKHRLKAFLLRQGRRYPGRAGWTQPYRRWLADLSFPLAPQHIALQEYRDTIDETERRVERLTDQLRQHTPAWRWAPVVDALQALRGVSFVTAVSLVAEIGDIRRFAHPRQLMAFLGLVPSEYSSGPSVRRGGITKAGNPHARRVLAEAAWAYQGIPRIGRQMLYRQETLPKAVCDIAWKAQLRLTARFRKLVARGKAKPKVATAIARELTGFIWAIAREVPPPVA

SEQ ID NO: 508792 - protein, 371 aa, unidentified
MNSLIHIGIDVHKDTYSLCSYSFQTSQAFGQTKIGSDNKLVIKYVEKLMKRHPEVEVLCGYEAGPTGFGLYRDLHKANIPCVVMAPTSLPRAVGNRVKTDRLDALELAKHLAYGTYSAVRVPTSEDEAVKDFTRLRNTRQQALKRAKQNLLSFLLRRQRRYTEGSSYWTLTHHRWLKQQQFTDPLDQETYNEYLQELYDQEEKVARYDARIEELSRLDAYRERVEKLRCFKGIDTHTALSLVCEIGDFSRFATAAQFSAYLGLVPREDSSGQRERRGGITKGGNIRLRMLLIEGANAATRGNLYGAKSKKLKARQAGNTAQVIAYADRAQRRLHRTYNKLVLNSVPRNKAIVAVARELSCFIWGMMNDCID

SEQ ID NO: 508793 - protein, 388 aa, unidentified
MLLDHLADGPATIRTQFGAIFVSLELSRSNWLVTSLSPGTGEKLSKHGLPAGDVAGLLKLFAELKRKAQARTGESYPIVTIQEAGLDGFWLHRVLEQEGIESHVVDPASIATPRRRRRAKTDRLDGETLLRALLAYKRGEPRVCAMVVAPSPEEEDRRRLCRERRTLIDERIVHVNRIKGLLFAQGIAGYAPLRRDRRSQLEALRTGDGRALPSHLKTQISRELDRLELLIEQIKVVEAEQDALLAEASKPAGKAAAADPVTMLLALKGMGPNFAAVLWSEAFYRQFANRRQLAAYAGLAPTPWRSGSIEHEQGVSKAGNPRLRTTMIQLAWLWRRHQGQSALARWFEAHSQRGRKSAIVALARKLLVALWKYVTAGVVIEGAAMKSA

SEQ ID NO: 508794 - protein, 367 aa, unidentified
MVYYLGLDVSQKQTALCLVDDKGVIVAEGKALTDPGDIQAWIKTKGFALTSIVRAGLEAGAMSSWLCTELVKSGLPVMCMESFQAYQFLKTQRNKTDKNDARGLAQLVRMGESFIKEIVIRSQGRQELRTLLTLRQQLVTQKLALENNITGALKPFGLVTPRGRACQKTFHARVLETLRRAEERNIHVRQSMTLSLAVHETLCQQLVNFNKQIMEAVRNDPVCRRLMTAPGVGPIVACSFMTAVDNPKRFRGADDIGAYFGLTPRQYQSGETDIRGPSSRRGNTMTRTHLVQAATTLLTGKKSSALKAWGMKLARKKGFCKARIAVARKLAVILHKMWINETDFCWTTSQADKISPAAPVSAILQVS

SEQ ID NO: 508795 - protein, 345 aa, unidentified
MKVTTVGIDLAKSVLQIHGVDGRGKAVLRKQLKRADVPKFFANFPPCLIGMEACGSAHHWARKLAEFGHTVKLMAPQFVKPYVKTNKNDAADAEAICEAVGRPNMRFVAVKSAQSQAVLAIHRARAGLVKARTAQANQIRGLLAEFGIVMPQGIVHIAKRVPEILEDGENGLPGLMRGLIARLTEQLKLLDTQVEELEAQIRGWHRENEASRNLAEIPGIGPLTASAIVASVGDAKSFASGRQFAAWLGLVPRQHSSGGKARLLGISKRGDVYLRTLLIHGARTVVRHAEHKADQADGWLRRLMARRHKNVATVALASKNARMVWALLAHGRKFQTDYTSVIEAV

SEQ ID NO: 508796 - protein, 315 aa, unidentified
MAMPVSVSKPIVGVDVAKNELVIYHAELDLLEAIPNNKAAIKKWLKALPGAVAIAIEATNTYHLEFADLAYEAGCVIYMVGGYELSHYRKGVMVRAKTDALDAQLLARYLRKEADELQPWTPPSPLYRQLLSLFRRRAALVQARVSLTQSWANEPQLKASFAEQMKSMQRLEGLIEKMISDRLKEAGLLGQLKRCMKVEGIGFLTGARLITTFQRGDFRNADAFIAFLGMDLRVSKSGQKDNRRSLSKRGDSEARRLLHNAAMAASRTAAWKEFYQAQRARGYSTTQVLVMLARKLARVVFALMKGQTEYQPKIG

SEQ ID NO: 508797 - protein, 386 aa, unidentified
MICVGIDVGKNIHYACVRNDRQTTLREPFAVQNDEAGFAKLYAAIRKYQKEEVIVGLEATSVYGENLITFLAGHGYKIALINPIQTSALGRGNIRNAKNDKIDSRGVCKFLATEEYRLLQPGELQMLELRGLCRFRQTLRKTTCRLKTQLTSYLDLGFPEFHLAFSSVHGKGAHAALMEYPTAKAMAKANVVKLSGILQKASRGRLGRARADDLKLLAKRSVASDSRDMSLQIQLTIPQIRLVEEQIKAVEKQIEVIYNELNSVIRTVPGIGMITGAVILSEIGDIKRFSNPGQLIAFAGLDPIVRQSGKFRASSTRMSKRGSSLLRYALIRSAWHVSNNNETFRVYYQEKIAQKGGHYKTLGHVAGKLCRVLFKMLRDDMAFNLP

SEQ ID NO: 508798 - protein, 309 aa, unidentified
METTVGIDVSKDRLDVHVLPSGEAFSVSNDHAGMEELAGRLAALSPTAIGLEATGGYEQLAVATLADAGLAVVVVNPAQVRAYANALGKRAKTDAIDAAVIAAFIAATKPELRPLRDAEARMLADLVTRRRQIVQMIVAEENRARTIGARQAQKSIKRLLAALRRELESLDADLDDHIRKSPLWRAREKLLSSVPGIGATIARTMIAEMPELGSLDRRQIAALAGLAPWTRQSGTWRGKSFIGGGRSRVRAVLFMAALVAIRHNPTLKAFRDRLVEAGKPKIVAVVAVMRKLLTILNAIIRDQKPWQTA

SEQ ID NO: 508799 - protein, 354 aa, unidentified
MKNKIPAITIGLDLGDKKHAICVLNKAGEIVEERSITNHRESLRRLSQKYPKSRIAMEVGQHSPWISRFFEALGHEVLVANPRKLSAIYTSTRKSDQSDAYMIARLARVDPTLLHPIQHSTEEAQRDLLQVKLRDNLVRQRVDIISSIRFTLKSMGVMIASPNTNCFAKRCRKNLSAVDPKLLAMCEASLRVVDELTKSIRELERKIEELCVESYPETEYLQQIAGVGPITALTFVLTIGDPARFESMRDVAPYLGLVPKRDQSGETDKQLGISKAGDAYLRRLLVSAAQYILGPFGPDCDLKRHGLKLAGKGGRGAKKKAVVAVARKLSVLMLTLWYNEDIYEPLRNNDSLAA

SEQ ID NO: 508800 - protein, 415 aa, unidentified
MNRLIERCAMLDIHKSQITACVRVPDDAGGRRQEIREFATTTSGLLTLADWLRSFAVTVVGMESTGVYWRAVYYLLEDEFECRLYNARHLRHVPGRKSDVQDAEWGCQLVEHGLVRPSFVPPRPLRELRDLVRYRKAKIQERTREVQRVEKTLQDAGIKLSSVASEVLGVSARRMLEALISGTHDPEILAELAKGTLRKKIPALREALQGRFTGHHALLVSQMLAQIDFLDETIATLSDRIEELTRPFSRELELLDTIPGVDRRAAEMLLGEIGPDMSQFPTEHHLASWAGMCPGQRESGGKKHSAATRKGSKWLRGTLTESAKAIVRTKGTYLSARYHRIKSRRGHAKATIATAHKILTAAYHVLNQGVPYHELGEEFFYRRDTEATERYRRRLIKQLERLGHQVTLEPLPEAA

SEQ ID NO: 508801 - protein, 314 aa, unidentified
MIIPPRCVGIDVSKRTLDIFDDGLGRTERIANASRPITEQVARWRCGHVFVVFEATGVYDRVLAEILRKAGIRFARINPARARDFARADGRLAKTDAIDARMLADFARVMVPADNPAPEPIRDTLALLAKRRDQLVRMRAQEKNRRSEAHDPALIEDITCHVDFLDKAIKTIETRINALIKAEPEISEQARLMRSAPGVGPVASMQLIAQMPELGRIGPKQIAALAGLAPLNVDSGTYRGRRTISGGRKRVRDALYMAALNAVRRDGIFRTFYQKLRTAGKPAKLALIAVARKLLTTLNAMLRDRTIYLQPQPT

SEQ ID NO: 508802 - protein, 350 aa, unidentified
METAYDGRQVVGMDLHRRRSVLVRMTEDGRRLGTARITNSPAELRKAIAAAGTDPRVVLEATYGWYWAADVLQAAGAEVHLAHPLGVKAFTYRRVKNDEKDAADLADLLRMGRLPEAWIAPAEIRELRELTRYRLKLVQRRSGCKDQVHAVLAKLGVPVTCADIFGVWGNTWLDGLALPQPYAGKVASLRKLIAELGTEITLLDTVIADLLAGHDGYRAIQALPGIGPVLAAVIVAEIGDICRFSCPAKLCCWAGLTPRHRESDAKVARGHITKQGSPILRWAMVEAIQHQPATSPVRAAKDRIIARRGKQAKNIAKTAAARHLLTAVFYAMRDGQARSLATRTAAQHAA

SEQ ID NO: 508803 - protein, 346 aa, unidentified
MLHVGLDLSRTRLDYQALAEDGLAVDAGAAPPDADGLDGLAERLSHRGEPVRAAIESMNGARFVHDRLELAGWEVEIADALKVKGLAPLACKTDRIDAWVLAELSRRDLVPAIWLPDPEVRAERERARWRLHLVRHRSRLKHRVHSTLLAWGRPRPVSDLFGARGRELLERFEIPEPWRPNLELAVSMIDSLDREIAACERELRRMGADHRYVPLLTTIPGIAWVLGYTIAAEIGEIRRFASPRNLTGYTGLCPRVYQSGERDRRGPLSKQGPKYLRWALMEAALHACRHRPYAERHARTKRRLGKQRGPKVAQIEIARKLAEAIWHMLTRNQPFAPAGAPPALAA

SEQ ID NO: 508804 - protein, 314 aa, unidentified
MENLAGPFFVGVDISKDRLDVAVWPSLEAFTVKRDAEGLAELCRRLKVIAPVTVAMEATGGFEAVVAASVAAAGLPVAVINPAQIRSFAAALGQRAKTDPIDAGVIARFADATRPKIRALADEETQLLSELVARRRQLIEMRTAEKQRLGRTPSRPLRKSIERIIKALDRELASLDGDIDGAVRASPVWREKEDLLSTVPGIGPAIARTLIAELPELGTLSRKQVAALCGLAPFTRQSGQWRGKSFISGGRTAVRAALFMGAMVAMRFNPPLKAFRDRLVQAGKPKKVAIIAVARKLLTVLNAILREQKPWQPA

SEQ ID NO: 508805 - protein, 433 aa, unidentified
MSESSATSSTDSFLHFAGFDWAKDQHDVVIVTREGRIIDQFQFEDSAAGWSQFRDRIAPRLPLAVAIETNCGPAVERLLQSSVGVYPVQPKAAARYRERKVPTGVKNNFIDAWSLADALRLDGHTWRPLQPDDPLIQELRLLCRDEVALIEQRTALINQLQQAIYEYYPAAREAFDDWTLPAAWEFIIEFPTPEKLIRAGKKRWEKFLKSRGLARPQTYSKRLEIFATAQRFRGTAPVTAAKSRLAVALAKQLLALEEQLRLYRSRIRELFDQHPDHELFGSLPGLGDKLAPRMLAECAGDPQRFPSTQELQCVAGSAPVSFESGQMHKVRIRRACNKFLRATVHLWVNLSRSYCVWAETYYQKKREQKMSHACALRCLAQRWLKILWKMLQTKTPYDEALHTKNQTEHGSWVLALLPHRSSQNSVDNLHPVC

SEQ ID NO: 508806 - protein, 351 aa, unidentified
MTEILKSVITAIGIDIGKNWFHVIGLDGRGAIALRQKWSRGQVEARLANMPACLIGMEACVGAHHLSRRLRLLGHDTRLMPAKYVRPYSKGQKNDFRDAEAIAEAVQRPTMKFVATKTADQLDLQALHRVRERLVSQRTGIINQIRAFLLERGIAVRQGLRFLRAELPGVLATRCDVLAPRMVRIIEDLAGDWRRLDQRIEALSGEIDALARLDVGCERLMSVPGIGPIIASAIVAAIGTGDTFTKGRDFAAWLGLVPKQFSTGDRTVLGKISKRGNRYLRVLFVQAAWVVLIRSKNWERYGLKPWIEAAKRRLHRNVLAIALANKLARIAWSVLAHGRDFEASKVAEAAT

SEQ ID NO: 508807 - protein, 386 aa, unidentified
MPQPKDDLSRSLVALEQDKTLIAVVELSSATWLVGGMVPGIKREPLKKLAPDQEALLTLLHRWRDEAIAAGHAITRLVVAFEAGRDGFWLARWLRSRGVEAYVIHPTSIPVSRERRRAKTDRLDIGLLKRSLLGWLRGEKKHASMAAIPTLEEEDAKRPTREREQLVGKRTGIVNRMKAALVRLGIRGFNPKLRKAPERLATLRTPEGCPIPPNTLAELTREMAHLRFINDQIKQIEVERLRQLKHAPQQGSNAKVLQLEQVNGIGVETADMLTHEVLSRDLRDQRAVARYSGLTGSPDESGSRRREKGLSKMGNARVRRGMIQLAWRFLSHQRDSALAQWYQASVAAGKKRKTMIVALARKLLIALWRFLTTGEVPEGVVLRPTP

SEQ ID NO: 508808 - protein, 439 aa, unidentified
MARNQSRQRFELVHPHCAGIDIGSREHWVAVDRDHEQPVRSFSTFTDDLIKLADWLETLKIEVVAMEATGVYWIPLFELLDARGFKVYLVNSRATRQISGRKSDVLDCQWIWQLMSHGLLRGAFRPDDAICSMRALIRQRASKVRNQAQTLNRMQKALSQMNIQLANVISDISGVTGMKILRAIIAGERDPAVLAELTDRRIKASKETIARSLHGNWRLEHLHALGQEVECYDFFEQQIGACDKAITDALSQLPEREEAPQPSRKILRSPHRCAADQAALHQSLWRVMGVDLTAIPTIGVDTALIIAGEIGPDLSRFPTMEHFCSWLGVAPPTRISGGRQLSGKSQKTLNNAAQALKQAASNARNDKSFIGASHRARLARMDTSCAIKATAHQLARLIYAMLTKGQPYVEQGIEAFEERSKEKQYRALLRKHGNWDWTW

SEQ ID NO: 508809 - protein, 416 aa, unidentified
MAEEVEWFVGVDWGSQSHQVCLVDARGECLGERAVAHGGLGIEELCDWLIARTGAAPEVIAVAIEVTHGPVVEALLERGFCVYGINPKQLDRFRDRFTVAGSKDDRRDAWVLADSLRTDRHAFRRLSNDEPVIVQLREWSRMADDLQQERMRLASRMREQLWRYYPQMLEIADDLAADWFLDLWQRAPTPARAGRLRPTTIERFVRTYRLRRWQAPEVLRILKQKPLSVAPGVVEAASQHIGTLTARIRLVNQQLKAAHRKLDDLCAQLIPSVEDQPGQQCPHRDVAILRSMPGIGRTILAVLLGEVWQPLRRRDYYALRTLSGVAPVTRRSGKTCVVVRRYARNKRLEHALYHWARVATQHDACSRQRYGALRRRGHSHGRALRTVADRLLSVACTLLEQQTLFDPAYQVRDAAA

SEQ ID NO: 508810 - protein, 359 aa, unidentified
MYGLKHQKEKRSMDHFAGLDVSVKETSVCIVDDVGKIVREVKVASEPEVLLAVLKKPAYRFKRIGLEAGPLSQWLFSALAEAELPVVCVETRHMQVVLKAQLNKTDRNDARGMAQMIRAGLYRPVHVKTLRSQKLRMLLTHRKLLQSKAIAIENDLRGTLRNFGLKVGIAGTVKFEARIRELVENLPDLAALVEPLLIVRRVLHEQISVLHRRLLAIVRDDAVCRRLMTIPGVGPVVALTYRATIDVSARFKNSKAVGAVIGLTPSKYQSGEINRTGAISKCGDEMMRVMLYEAAQVMLTRTNKWSWLKAWAMKIARQRGMKKAIVALARRLAVIMHRIYGPAVRCKREFERNGHFGPR

SEQ ID NO: 508811 - protein, 342 aa, unidentified
MEHYAGIDVSLECSSVCVVDAKGKIVREAKVASEPQALVDWFGSLGFGLERIGLEAGPLSQWLFAGMKRASLAVELLETRHVRKAFEAMPVKSDRNDARGIAQLMRLGWFRPVHCKSMSAQETRSLLTARKLVQSKLHDVENSLRGILRGFGLKVGKTTGQKFAGRIEELVAGHPHLQTIAKALLAVRAVLRAEFAAFEKQTRRMVQSDMQARLLTSVPAVGPIVALTYASAIDDPTRFKSSKQAGAHFGLTPKKHQSGETDYTGRISKIGDASVRTALYEAANVMLTKPVKGCSQLKRWAMRIKRRAGTNKAKVALARRLAVIMHRMLADGTPFNAAAAAA

SEQ ID NO: 508812 - protein, 338 aa, unidentified
MALYCGIDLHSRNCWLAILDTRLKVVEEAKVGNDLEELLQVLEPYRADLEGVAVESTFNWYWLVDGLEDAGHRVHLTNTWAVKQYEGLKYTDDRHDARWLAHLLSLGILPEGYIYPKKERPARDLLRRRSFLVRKRTSFMLAMRGAFECRTGLRVNSNDLKNWTTMDVEAHVDDPAAAFGVTCLLEPMHALSSQIKKIEKEVLARGRVRPEFAPLETVWGIGKILGLTIMYEVGDISRFRKVGNFTSYCRLVNTARLSAGKRKGSGNRKNGNPYLSWAYSEAAHHAVRHHPEAQKYFQRKRSKTNGIIAIRALAHKLARASYHVMRDHVDFDPERLFA

SEQ ID NO: 508813 - protein, 374 aa, unidentified
MIYCGIDWAEKTHDIALVDDTGQLLAKRHITDDAVGYKILLELLAEYGDTEDNPIPVAIETSRGLLVAVLRAGKRQVFAINPMAAARYRDRTSVSRKKSDPGDALVLANILRTDMHAHRPLPNDSDLGRAIAVLARAQQDSLWNRQQLSNQLRSLLREYYPAALAAFEPWRNGLCRPEARQLLKAAPTPARAARLTRTQLEAALKRAGRKRGITAESERLRDVFRDDYAHQPTLVEDALGKQMLALLVQLEAACTAADDLAEAVEEAFPQHPDAEILLSFPGLGVQLGARVLAEIGDDKTRFADARGLKAYAGASPITRASGKKSSITRRWVKNDRLNHAGYLWAFAAITASPGAKAHYRRRRDDHGDWHRSPR

SEQ ID NO: 508814 - protein, 364 aa, unidentified
MMRFYGEQRRFYCGIDLHASKMYVCVLDDQGNVVLHRNMRAEPEGLKRALAPYLESVVVGAECMFSWYWVADWCRKEGVEFVLGHALYMKAIHGGKAKNDRIDSEKIARLLRGGTFPLAHVYPKEMRGTRDLLRRRNLFVRRRAELLAHVQNTFTQYNVRTASGRGRDRLREGDVGSSFEDPSVQVMLDADIEVIERLDEIIADLETHVLEHAKVHDAARLHLLQTIPGVGKVLSLVMLYEIQDVNRFENIGQFASYARLVACAKESAGKKQGSGGRKIGNPHLKWAFSEAAALMIRNSPEAKAFMEKMTRQRGKARAVALVAAKIGRVAYWIMKRKQPFDARQFWKSSLPKGIPPMEGVAMTP

SEQ ID NO: 508815 - protein, 403 aa, unidentified
MKKKKVSLEVVNPYAAGIDIGSRSHFVAIGQDADEVREFGVYAEDLQELAAWLLENGIKTAAMESTGTYWQNLFSTLQAYGIEVFLVNGKFTKNMRGKKSDVMDCQWIQKLHTMGLLSSSFLPDSTTETIRTYTRHRLSLIQLAADTSKKMQKYLRLMGFRLDVVVNDICGLTGIAIINDICNGNLNPKLLSVHRHYNCRKSIEEIEKALHGNGRKDYMFALIDEFEMYQILKTKIEKCDKEIESLLKEIIEKNENKKYHIAEAKPHKRITKNTNKQLDLNQVAFQYFEGIDLMKIEGVSHATVMTIISEIGLEGFSKFHTSKQFVSWLRLSPNNKISGGKVLSNQIARGSNRLKIALRQAANCIGNLKETHLSDFFRRICIKRGRASAVSATARKLGVIPWQ

SEQ ID NO: 508816 - protein, 344 aa, unidentified
MSKVTIGLDIAKSVFHLVFMNQSGRVLRKKKLRRHQMLSYFSQLEPCIVVMEACGSCHYWCRELTKAGHEVKAIAPQYVVAYRKGNKHDYNDAEAIAEASQREGMRFVPFKSQDQQDIQLMHRIRERMIAQQTALSNQIRGLLSEYGIVYARGVATLVKELPLTLEEADNGLSMLARRQFQGLLNDLRELREHIKEMDKELKAFSQSQPVCERLMSMTGIGPLIATALYAGIGQGQAFNSGRHLAAWLGVVPKQHTTGDNPRLLGISKRGNTYLRTQIINGARAALRHIGDKTDKVSEWCRACLARMSFNKACVALANKMVRMAWAMLHYQQDYQPGLINKVAA

SEQ ID NO: 508817 - protein, 412 aa, unidentified
MDVLHTHCAGLDVHKQTVVAAVRVPEPKKKRGWRVITQTFGTMTADLLALSDWLLTQGVSHAAMESTGEYWKPVYNILEANFELLLVNPHHIKAVPGRKTDVSDAEWIAELLQYGLLRASFVPPKGQRALRELTRARTTFVRERATLVNRVQKVLESANLKLGDVARDVLGVSGRAMLEAVIDGHARPEQMASLARGRLRNKHAQLVKALEGRVEAHHRFILTELLSQIDTLDETLERFNAQILDACVPFEHAVALWDTIPGVARTAAEIIVSEIGTDMRRFQSAEALSAWAGVAPGNNESAGRQRSGRTRQGNAALKTILVQAAHGASRTKGTYLAAQYHRIAARRGRKRAIMAVAHSILVIGYHLMQRDEPYHELGADYFDRRNPEMTAHRLVRRLEYLGYQVALQSPSV

SEQ ID NO: 508818 - protein, 339 aa, unidentified
MDHFAGLDVSVKETSVCIVDEVGKIVREVKVASEPEALLAVLKNPVYCFKRIGLEAGPLSQWLFSALAEAELPVICVETRHMRAVLKAQINKTDRNDARGIAQMMRVGLYRPVHVKTLRSQKLRMLLTHRKLLQSKAIAIENDLRGTLRNFGLKVVMFEARIKELVEDLPDLAIMVEPLLIVRRALREQFVILHRRLLAIVRDDEVCRRLITTPGVGPVVALTYRATVDVPARFRKSKAVGAVFGLTCSKYQSGEIDWSGRISRCGDEMMRMMLYEAAQSMLRSKKWSWLKAWAMQIARRRGMKKAIVALARRLAVIMHRIWVDGTEFRWTRQQAAAAA

SEQ ID NO: 508819 - protein, 408 aa, unidentified
MQVEHPVCCGIDVHKDTLTACLRRVDANGHVSKEGREFATTYTSLLALSDWLVEQHCPVVAMESTGVYWKPVYHVLAGTVEVFIGNAHEMRSRPGKKTDKRDAAWIAELLAHGLIRPSFVPPPAIGALRDVTRTRVALVQTRSQSKNRVHKLLEDTNLKLGSVVSDLFGVTGRRMLAALVAGERNPQVLASLALGTLKHKRPQLELALTGQFTAHHGTLLALLLELIEMLDRQIATLDQQIGELVAPLHAQIAQLDSIPGVDIIAARDILAEIGTDMSRFGDAARLASWAGVCPGNHESAGKRYRGKTCKGNRYLRRVLVQCAWGARKTPTFLGRTFRRLEVRLGKKKAALAIAHKILVIVYHLLALGTCYEEARYDQWNPRQEARERQRAIKALERLGYTVTVERAA

SEQ ID NO: 508820 - protein, 346 aa, unidentified
MMIIGCDFHPSWQQVCWLDTETGDTGEQKLVQATGDAERFYRQLPAPALIGMEATGNSHWLVDLLAELGHELWVGDAAQIRASYVRQQKTDQRDAAHIMKLLLEGRFPRIWMPSSAVRDLRQLLLHRYKLVIMRARVKNELQHLCLNKGVQKKRKLWSQAGQKLLRELPLKPWAARRRDDLLGLMAMLDRQIEPLDRAVTEQAQQDKMARLLQTQPGVGPITALAYVLTMGDVSRFPRGKQVASYLGLIPREHSSGGRQRLGAISKQGNRMLRMLLVEAAQIAVRYDPQFRKEYLHRCHQKPKAVAKVAAARKLAVRLYWMLRTQTPYPEIVRIESSPRVALVGAS

SEQ ID NO: 508821 - protein, 366 aa, unidentified
MRKVSTTLVKQSRKNSQQLTIGLDLGDRNSWYCVLDEAGQIQLEQRVRTTAKGLGEVFGGMPRSRVALETGTHSPWISRLLRELGHEVIVANARKVRLIGESRKKDDRLDAQTLARLARIDPGLLCPVKHRSAQAQADLMMIRARAGLVRVRTGLVNTARGLAKSYGERLRGCNVRNMNPEKAEGLSPELQAALAPLLAALESVSERIAEYNERIEKLAQESYPQVAVLKQVKGVGTLIALTFLLTLEDPHRFGKSRDVGCYLGLQPGRRNSGQSEPQLHISKEGDPYLRTLLVQGAQHILGPFGVDCDLRRWGLKLAERGGRNGKKRAIVATARKLAVLLHHLWVSREVYEPLHNNNRVAVTAAA

SEQ ID NO: 508822 - protein, 548 aa, unidentified
MHTDLGQDSLLAKMLGNQGCFAEPGRRTGHILTRGLNDHRGISVTTHVDLPDGNDWLHPHQGGIFLYGFATGYSSSRIAWDLQAVPLLKYEALYFGIDIGKAKHVAGFVSSTLLERHERFEACPALAFDNSRRGFHALFERLRGLAQVEHCFVLMEKTGHYHKPLQQYLQELDIPVYLVHVQERPKGMLKTDKRDALSLANHLYSQLELGVQFSSKTQLVRRAVPSTPAAAQLKGLIRHRYELVRESTQRKNKLTAICDELFPEFVQILHDPNLPTALALRERFPTPQAIATASFTVLQEVRRKTRFLSDNKLLELQELAMNSIGIKDLVRQRSLVLEQSQLIRELRLLQEHIEQLNGEIKTIVENAREAQILASMGIGPIQVATIIAAIGSIENFPNAGSLKSYFGWAPVVAQSGKTMDQTTQTHGGTRTIKQMMFLIVTMVIRQETEWAILYQRLVQTKCPYDDRRGVRTGKLRVIGRVAGQMIETMYALLKTDAEVLSKVPQGKEPPPPFLYDPELHRKHREGHYRPLKSSPRPQVITLLPDLQK

SEQ ID NO: 508823 - protein, 358 aa, unidentified
MKIVGCDYHPEWQQIAVLETETGEISEHRLRNGDGEAERFYRALPAPALVGIEACGNSEWFRELLQRLGHEVWVGDAAEIRASCVRKQKTDRRDAEHILRLLVEERFPRLWMPTAEQRDLRQLLIHRHKLVEIRTRVKNGLQHLAMNRGVQKKSSLWSVRGRAELKNLALEGWTRQRREDLLELLEGLDRQVGQLDEAVEQAAVGHAQARLLMTQPGVGAVTALAFVVTIGDVSRFAHSGQVASYVGLIPSEHSSGGRQRLGAITKQGNRFMRQLLVEAVQTTCRLDEGFRREYQARCFHKPKAVAKVAAARKLAVRLYWMLRQNVGYPEIAHIESSSRVPLAGKQAAMLIERSRTRR

SEQ ID NO: 508824 - protein, 341 aa, unidentified
MKECIGLDVSMKETAVSIRRNGERVWRGKCVSDPAVIAQLVRKRAPTVDRIVFETGPLSVWFYHALRAEGLPAICIDARHAKSALDMAPNKTDANDADGLAHLAEIGFFREVRVKGFDSMLARTLIAARNRLVRITVDLSNHIRGFMKTFGLLIPAGKGSTFEAHVRRLLSDQPKLATILLPMLDAWCATRLQAARLARQIAAEARQNDGCRILMSIPGVGAITATSFITAIESPDNFRKSRSVGAWVGLTTRRYQSGEIDYKGHISRRGDHHLRGLLYEAASVILTRSSAESDLRTWGLKLRERIGFKRAAVALARKLAVTMHAMLRDGTLFDRGLKPTA

SEQ ID NO: 508825 - protein, 429 aa, unidentified
MAGVVIGVDPHKGSHTAVALSEAETMLGQVRVSARGDQLDQLRRWAQDWPDRTWAVEGARGLGQFLAQQLLGAGEHVVDVQPKLAARVRLLNTGAANKNDPNDARSVAVAALRSRDLGEVSAEDDTVVLRVWARRYRDLGSLRTQVVCRLHAVLCELAPGGFSKHISAPQAIRVLDGLVAHGAVAQARLELARDLLADLQRIDAQRRDVKRRTGRAVAAFPTSVTELYGVGPIVAAAILGYVRDIRRFSTRGRFAAYNGTAPIEVSSGNRTVHRLSRRGNRRLNHAIHMAAVTQISHRGTTGRAYYQRKIAEGMGRKAALRALKRKISDALYTRMIGDVRNRAADAARKDPGGHSGSDSVSSAAGSHPATPALRTSHSRATPNPRTATGEQAMLTSRPAPDRRRTSRRAAGVQVEPRPGTRRGRGQDRP

SEQ ID NO: 508826 - protein, 425 aa, unidentified
MKSTRIQTTNQRIERITMQHAIIGIDIAKDVHAAQVTDFRGRVLTPRHLSFANTREGFEKLLRWTCDVQDKHHLSSLIIGMEPTGHYWFNLANWLREQGITVVLVNPVTVHRNKENRDNCPSKNDPKDALNIADVVSRGFYTDYTPEAAVFKRLKAVMSDREFWVKQQVSLGNRIIRWIDLKFPEFRSVFPDWTVLRSLASLRAFPLPSDLQGLRTDDVIEAWRKQGMKRAGGVSGKAKAARLLLVAAHSIGDIQALEEARRDLQRLLDAYEYAVKSLEEIEQEVKKLLGCIPLAGQLRSIKGLGAITIAALLACAGDLRNYAHGRQLLRRAGLNLAERTSGKFKGQIKLSKRGDSMLRKYLYLGVLGLVGQHPDFKRWHEYNLKKGMKKMASITKLIGKLARILIGMVQKGEPYRSEIAVHRVA

SEQ ID NO: 508827 - protein, 366 aa, unidentified
MEYSTIISLDVSDRTSKVCVMTKIDGRKRILEETTIQTTKDAFRAYLSAKNPTWPVVFETGTHCRWMEKTVKSLGMKPIVANPAHMRMVTESNTKNDRNDARELAKIALADVELLHPVSLRSEICQQMLRLLKARDVMVAVRTKFVNQLRGFAKSMGFRLPSCSACKVHLLDKLQWPEDFENVAWPIMDVLEMIETKIKAYESQIKKLAACPELKDKIERVREVYGIGLLSGCALVASIDADPDRFAKARYAGAYFGLVPKLRQSGEMDMQCHITRAGSEFVRNLLVESAQIALRENAKDTDIKLKALRICARGGKIAKKKAVIAAARCIVVTAVALLKRPDKEYIPLSEKGRLEFEAMRVMETVA

SEQ ID NO: 508828 - protein, 346 aa, unidentified
MTMLEARRVTGGVDTHLDVHVAAALDPLGGLLGTKSFEVNPVGYRSLLSWLESFGAVGKVGVEGTGSYGAGLARFLRQHGVSLIDVDRPNRAERRRSGKSDPLDAVEAARATLSGRAKSVPKSKDGAVEAIRVLLVAKRSARQARVKAVTQVRHLVITAPDELHRRMKGLSVSALVEEGAKLRPSRSTDPVVAATKAAISSLVHRIQALESELDELAEMINALLVATAPDLLAMFGVGPDTAAALLVCAGDNPERLRSEASFAHLCGAAPIPASSGKSIGRYRLDSGGDRQANSALWRIVMVRIAHDPETTAYFERRVKEGRTKREVIRILKRYVAREVYHHLSRG

SEQ ID NO: 508829 - protein, 415 aa, unidentified
MIENFEIKMKFFVGIDLGGEDHKVCIITEGGDILCRSTFAHSGAGLDALLNWLAQSTGPDPCAVGIGMESPRGVMVEALLERKYSVFSINPKQLDRFRDRFSVAGAKDDHRDALVAAHSLRTDRPCFRRLVPEHPKVLRLRELSRADDQIKEELQRAANQLGDFLRRYFPSLLTLCPGADERWLWALLERAPLPSQAARLTLSRLQKLLNQHRIRRFSAEHLHSLLQTKALPLAPGSGEAIAEQVMLLLPRLVLLRQQKSELDEKTDQLLEEMASDENYPEHRDVTILRSVPGLGRVFSATVLSEAHQALTDRDYRALRGLAGVAPVTRQSGKSRRTSMRRACNRRFRTALHNATAVHVQYDERARRQYAELRRQKHTHGRALRGVGDRLLALVISMLKHGTLYDAERRKVATVT

SEQ ID NO: 508830 - protein, 421 aa, unidentified
MAVPREISLTRWVGRAIGLDVHRDFCEVAICEDGLVRAAGRVSTTPEALSVFADSLQLTDRVALEVTGSCWEVARILKPGVDRVVVVSPDDTGIAAARAKTDKLDAKALALLLWRGELDAVWMPDERCQVLRRRLQRREQLVHARSRAKNEIHAVLQRRLKGQPPCSDLFGVKGRQWLGDLELPLEERESVDAGIRHIEFLDVEITAVERLIAQQALVWPEILRLMTVPGVNVICAASFIAAVGDYQRFRTSNKLVAYLGLDPKVKQSGDTPARSGRISKRGSGQARWALVEAAWSTVLQPGPMHAFYERIKARRGHGKAIVATARKLAVLFWCMLTRGEDYAHQQPSLTKKKFRRLEITAGAPKYTPGASGIWKANDAVRDAERALAIQAEASYKRMVQDQQAGGPARKVGASVTVEHAS

SEQ ID NO: 508831 - protein, 412 aa, unidentified
MEQIHDRVAGLDVHRDEVAVCVRTPGPRGGVHTEKARFSTTTGGLAMLAGWLAERAVTLTAMEATGVYWKPIYYALEDRFELWLCNAHHVKNVPGRKTDMSDAQWLADVAAHGMVRPSFVPPPPVRELRELTRYRKTQVDARAAEIARVEKVLQDAGIKLTSVASKVLTQSGRAMIEALIAGERDPAALAGLAKGKLRPKIPQLTAALSGHFGAHHAVVAARILAHLDSLDDAIAVLDGQIAARVAGDYQSAARLLADVPGLERRSVEVIIAETGADMSRFPSPAHLASWAGLCPGNHESAGKRRKVATTPGNPWLRRTLIESARAAARTRDSYFGAQYRQIARRRGPNKAAVAVAHSLLDVIWHLLTTGEVFADLGADYFTSRQDKEHQTERLVRQLQKLGYTVQLAATTT

SEQ ID NO: 508832 - protein, 341 aa, unidentified
MKTFIRIGVDLAKNFFQVHAIEQEGAAAVARKLTRTKFREFFKGVAPCRVGMEACGSAHYWARELGAMGHDVVLMPPAYTKPYVKRGKNDAADAGAICEAMSRPEMRFVPVKSAAQQAVLMLHKTRDLLVKQRTMNVNALRGHLAEFGLIVAKGIHRLEELLALARAETTLPDDALAAVEMLALQIEQLDTRIASLAKSIGKTNAKSPTSQLLLEVPGVGPLIASAMTASYPDPGVFKSGRDFSASLGITPNQYSSGGKEKLGVITKKGNRYLRKMLVVGCTSVLRVAAKYKGGLAEWIVSMRSKKPERVVAVALANKLARICWAIMSTGEGFREELFTRA

SEQ ID NO: 508833 - protein, 337 aa, unidentified
MTITTVGIDLAKNVFAVHCVDQHGKTVLVKPKVSRAALPELIASLPPCVIGMEACSGAHYWARLFRQYGHEPRLMAAKFVSPYRMAGKSGKNDAADAQAICEAVRRPHMRFVPVKDESQQAMQCLHRIRQGFIEEKTATYNRLRGLISEFGVIAPQSTDALRHMVSEQKSSLPLQVQQCVNDLLEHIDRIEDNITEYDRILSRMAKTDHRSQRLMELKGIGPTTACALVASIGNAHDFKNGRQLAAWLGLTPSQYSSGGKSKLGRITKAGDSYLRTLLVQGARSVLIGAEKRTDLFSRWVCSLVDRRGYWRAVVAIAAKNARLCWASLHGTVANSRW

SEQ ID NO: 508834 - protein, 345 aa, unidentified
MEQVSRIGMDTSKHFFQLHGVNATEKVVLRKKLRRKDMVAFFEALAPTVIGIEACGAAHYLARLLGSFGHEVKLIAPQLVKPYVKRGKNDGADAEALCEAMSRPTMRFVPVKTTEQQAALMMVGLRDRLIRNRTQLSNSIRGYAAEFGFTATKGKAHLVTLLERIQADESVPALARELFAAQAAEYARLQAQIDEVDAKLMAWHKANECSRRLAKIPSVGPIGAVLLMMKTPAPELFRSGREFAAWIGLTPKDHSTAGKVRLGGITRAGDEALRSVLVVGATSIIQHVRRGGRGSPWIVDLLKRKPPKLAAVALANKMARIAWKLMITGESYVAKSTLATLASAA

SEQ ID NO: 508835 - protein, 341 aa, unidentified
MKNKSFIGIDISKNVIDASIFCEGTPIKDFPHAVFNNSRKGFGEMCTWLKKNHVVLSNCLFGMEFTGSYSMELEKFLNARKYQFCMLSTHVVKHHPMGPRDKSDKIDSAKIADFLYRYDGTECVKPYKMPDKTMQRLKALTKERKFLVEQRTCFMNRRQLCTTKEAAQLYDGYIKEFSHDIENIELKMQNLLEADDSLSTTYKNLLTIPGIGFVNAMNVIVITRNFTAFETARQYASYIGVAPHFHTSGTSVRWRPRPSARCDGQAKADLSMAASVAVQCDAELQSFYNHKLGDKQDSDTKRKALNAVKFKLVLRMFAIGKQNRKWEPLDSKSSNEKLAIS

SEQ ID NO: 508836 - protein, 393 aa, unidentified
MRFAGIDVGSKSHVVAIVEEAGGVLLKPLAFTEDAAGYERLFTQLGESIDLLVAMEATGHYGRNLFAALSTKGFRVALVNPVRTRRFAQEDLARAKTDSIDALGIARFAAQKRPTITPLRDEVTDELRELVRFHDRLTQDIGDRVRQLHRLVALCFPEFTRHVRTLDSQRATLILHEYPTAAAFDDGCITTLAQLSKDHSGRVGESLARKLVEVAKVSVARHHGPSYRGEVRFVCADIDLLRRKLQDLNSDLDAAVRQHAVASLLTTINGLGFLSAARIIAAVGDPADLRDSAALASYVGLVPRTSQSGLRRPTSASLSPLGNARLRRALYMTTFAAVRVNPWLRSFYERLRAKGKLHKVALIAAERKLVTVVYSVAKNRRPFVPGIADPSQK

SEQ ID NO: 508837 - protein, 403 aa, unidentified
MNAVGIDVSKGKSMVTILRPFGEIVSSPFEIKHTSSDIHSLIKLIHSIEGESRVVMEHTGRYYEALAHQLSAADLFVSAVNPKLVKDFNNDSLRKIKSDKADSVKIARYALDKWQSLEPYSITDELRAQLKVMNRQFHLYVKQKTAMKNNLIGLIDQTYPNANTYFNSPTRSDGSQKWVDFVSTYWHVDCIRKMSLNAFVEHYQNWCKRKKYAFNKSKAEEIYTKTKELVPVFPKNEITKHIIRQAVDQLNSTSVTVETIRTLMNETASKLPEYSIVMQFKGIGPSLGPQLMAEIGDVTRFTHKGALTAFAGVDPGVNESGSYAQKSVPTSKRGSSNLRKTLFQVMDVLIKTMPQDDPVYQFMDRKRTQGKPYYVYMTAGANKFLRIYYGRVKEYLSVLPDPS

SEQ ID NO: 508838 - protein, 402 aa, unidentified
MNCVGIDISKGKSMIAVMRPFGEVVVSPFEVLHTDSELSKLARLLKSLDGETRVVMESTGNYHAPVAWLLHDAGLYVSVVNAMLVHDYGNNSLRRAKTDKKDAVKLANYGLDHWLTLPRYVPEEDTRLMLKSCYRQYQQYSKVRTMLKNNLISLLDTAFPDANRLFTSPPRADGSEKWVDFVAAFWHCECVCGLSEKAFTAKYQKWCKKHGYNFSEDKALDIYASACGHFGVMPKTDTAKLLVEQAISQLRATSAALAALKQEMQSLAASLPEYPVVMEMFGVGPALGPQLMAEIGDVRRFHSKKALVAFAGIDAPPYQSGQMDIRSRSISKRGSASLRRTLFLVMGVLLQCAPMDEPVYQFMSKKHSEGKPYRVYMMASANKFLRIYYASVKAYLDSMEYD

SEQ ID NO: 508839 - protein, 418 aa, unidentified
MSRTLTKKLAIIKPGMLLMGIDLGKRTNVAVVIDQQARQLSRFSFGHDQEGYAYLIRQLQRICKQVGTEEILVGMEPTGYFWKLIAAELDRYGIKYRLVNAYTVKKHREGDQLDRSKDDNRDAFAIADLLRTGKFTETQRLTGVYAELREYHVTYYRLTQEIGRLKGLLDTTVGQCFPELRQLFKSLTGKTVQAMLRQHAAAQAISQLSASEFLTRVETDFTGKRLQRKKLYQAHQLAQVSVGLADRGAHQVTIRCLLDELALKEAQLAEVKEHLMTCFLSCPEAEYMLSLPLGDVTTARILAEIGDPRRYSSAKQLVKLAGIQPTPNHSGQKTRSPTPMSGKGRAALRTMLFFGCLHLIRTDPAFIAYYQHLKTRPKNPLSGLQAIGVLMGKVLHILWALIRQQTHYDPASWQLVYQ

SEQ ID NO: 508840 - protein, 320 aa, unidentified
MSKKKSTSFIGIDVSKRLLEVAAHQSDYQFRCANKASAFGELIVELIALRPARIVLEATGGLEIPVVAALHAAGLPVVVINARQVRDFAKAPGQLATTDRLHARVLAHFAAAIKPPLRPIKSKDELELDALAGRRGQLIEMLTAEKNRRVSAATETVRKEIKEHIDWLEDRIAELDEQLQTLLKSSKLWRVKDEVLQSVPGIGPVVSFSMIADLPELGTLNRQQISKLVGVAPLNRDSGQQRGTRHIYGGRARVRSMLYMAALTATRCNPVIKEFYERLLANKKLFKVAITACMRKLLAIINVMVRDCTRWKTKDDPVST

SEQ ID NO: 508841 - protein, 342 aa, unidentified
MQTTSAKELYAGADLHGNNVFLSICDREGTEVFRRRVRTTLDAVNEAMDPYWPQVQAMGIESTFNWYWLVDGLREQNRDVRLGNPAKMKQYKGLKHADDASDARWLAELLRLDIFPESYIYPKEVRSIRDALRRRQLFVRRRTQVMLSLQSLLERYGFKAPGSRALQQWTQADVEATGLDPFVQLQLRTLLEAVQCSERLAGQIESAVLGFIEPNPSFEQVQTVPGIGKALGMTIVLESGNFARFPNAGCYASYCRAVKSERSSNSRKKGENNKRNGNPFLAWAFVEAASFAPRFYPEIQSWYDRKKKKRNAIVAKKALAAKLSKAVWHVMNGEEYVMGMLF

SEQ ID NO: 508842 - protein, 336 aa, unidentified
MTELTRIAIDTSKSVFTLHGTDADGRAVLRRNLRRQDMVPFFARRPPMEVVLEACGGSHHWGRVLAGLGHTVRLIPPQYVKPFVKRGKNDRNDAEAISEAAARPEMREVAVKSARQQANAMLLSVRELLVRQRTQLVNALRGHAAEFGHVGRLGRQGVAKLLADVAEDAELPTPARDALALLGAEIGRLDARLAEVDARLVAQHKQTPTSQMLAEVPGIGPIGALSLVLRVDFSQFKSGRHFAAWLGLTPREHSTGGKTRLGGISRAGDERLRQLLVLGATAVIRQVKPGRASAWLIALLARRPRKLVAVALANKMARIVWAMMATGEAYRQPATA

SEQ ID NO: 508843 - protein, 318 aa, unidentified
MLIHYIDIAKRNFVIAVSSLSKTKTETNNPKGIAHTIEYLKKHKVALVVTESTGGLEIPAAKAIRRAGIAVIIANPRQTHQFAQSQPLTKTDAKDAKMPAFFAQMKAQKEDSQTMPYQPPTEAEEVLEALVNRRNQSADMRTAEKNRLHQVHETQVGSVKQLIAHFDRLIDELDKQIDNHTHTHFDGKDQVAEQIKGIGSITTATLMAMLPELGRLSHKRIAGLAGIAPHPREGGETKFKSRCFGGRSAVRKALYMATVAATRFEPLIRDFHQRPLSEGKPYKVAVTACMRKLLTISNARMRDYFAENDTAENGIRTA

SEQ ID NO: 508844 - protein, 339 aa, unidentified
MNNVSTIGLDLAKKVFQVHGVDGTGEITVRRTLRRSQVLAYFGKLAPCLVGMEACATAHYWGRELSKLGHTVRLIPPAYAKAYVRRNKNDPADAAAICEAVARPAMRFVTIKTAEQQAAAGVHKVREMLMKQRTMLMNSLRGLMAEFGIVVAEGPRHIGELVAILADPDDRRIPAPLQGGLVRIAEALRHLERQIEVIDKQILDWGRGNAICRHLITIPGFGPILSTAMAAIVVNPATFRSGRDFSASLGLVPRQDGTGGKVKLGPISKRGNGYLRRLLVSGAMSVLSGKRAKQNPWLVRLLATKARKVAAVALANKMARIAWAVMMRQEDFRTVPAAA

SEQ ID NO: 508845 - protein, 347 aa, unidentified
MRFYNRQHRHYCGIDLHVKTMYVCILDAAGQVLVHRNVPSIPEAFLEVVAPYRADLVVAAECMFTWYWLADLCAAEGIDFVLGHALAMKAIHGGKAKNDKIDSHKIAVLLRGGMLPQAYVYPAAMRSTRDLIRRRLHLVRKRGQLLAHIQNTRAQYNLPVFGRKLAYKANRGGVVEHFADASVQKSIEVDLALIDHYDALVTDLELTIVREAKRHDADAFHRLRSVPGIGKVLALTILYEIHDVTRFDRVQEFASYARLVKCVHQSAGKTLGTGGAKMGNVHLKWAFSEAAVLFLRHTKDGKKILAGIEKKHGKEKALSILAHKIGRAVFYMLSRATVFSMEKFLAA

SEQ ID NO: 508846 - protein, 460 aa, unidentified
MTKKNTTSRKSKSKARKSVLERINPNAAGIDIGANSHFVAIPEDRAEENVRKFGPFTSDLHRLADWLTEHHIETVVMESTGVYWIPVFQILEQRGFEVKLVNAAHVKNLPGRKSDVSDCQWLQQLHTFGLLNGSFRPKDEVCVLRTFLRLRDTLIKDCSSHVLRMQKALTEMNVQIHRVLSDITGYTGMAIIRAILTGERNALTLAQMKHPQVKASTEQIVKALEGDYRPEHLFALQTAVELYDVNHLKITECENKIAQQLEQFETKLDFDQVLEQSGALKARSAKVRLELQRQAYLTSVCGVDLTRLPGLSTLAVEVIISETGLDMSCWKSEKHFCSWLKVCPDNRISGGKVLPSKSRKTKNRAAGMFRLAAQGAMQSKTAIGAFIRRIRTRLGAPTAINAGAHKLARLFYRMLKFGAAYVEQGQTYYEQRYKDRLLHNLSKRAKELGFQLTPCEPPTV

SEQ ID NO: 508847 - protein, 326 aa, unidentified
MEDQEKLYCGIDVSAETLDICYETGEDKMISFQTTNDRKGFSEIIKEVGKNHHFVMENTGVYHVELMFYLHDKQVLFTIENALKIRRFIQMQLDQSKSDKKDARWICIYARNQKPNPTEKPDSEYFECRAINNTIQNLTKEITQLSNRIHVLNRTPYDTKLVMKTLTNILKKIQEEKKKLEKELQAKLKSWQPKLLTIVSSIKGIGKRAAAELIIFTQGFKGMEDYRQLISYAGLSPTDYTSGTSIKRRVRISKQGGKQLRHILYMCAMNAMQTNRSCRELYQRLTAKGKNGKLAIIAVCCKLLRQVFGCVKNGIPYDDNYGKVFG

SEQ ID NO: 508848 - protein, 338 aa, unidentified
MAKEPIAVIGIDLGKNSCSVAGLDMNGAVVLRRRMTRETLVAFASKLPACIVAMEACCGAHFLGRTFAAQGHTVRLMSPEYVQPYVKSQKTDDRDAEAIAEAATRPTMRLVTLKSEAQLDLQVLHRARERLVTARTRLINQLRAVLLERGVILPKRRAPLRHRLHELMAGELPISPRVMRLLQDLRDEWASLDDRIGAYDDELAAMTRENQQARQLATIPGIGVINATALLAAVGDGSAFAKGRDLAAWLGLTPRQHSTGGRTKLLGISKRGNKYLRTQLIHGARAALTHPRGSAHGYTNCSRGLTPTSWSSRSPPSWHALSGRCCVTVAPLNTKLLQ

SEQ ID NO: 508849 - protein, 371 aa, unidentified
MKQQTKSSNITVGLDLGDRRHRFCALDERGEVVEQDSICNDRVSLRKLAGRYHGALGVMEAGAHSPWISRFLEALGWRVVVSNPRKVRAIYQHERKSDQRDALMLARIGRMDLALLYPVRHGTAEAQQDLLRIKLRDSLVRARVAVINSVRFTLKSLGYTVRNPSSARFHKVVMEEVPESVREMITPSVQALAELTARIKMLELEINTLAQMKYPQSAQLQQIPGVGPITALYFVLKIEDPNRFAHVRDVGAYAGLCPRRDQSGESDPQLRISKRGDAYLRRLLVSAAHYILGPFGPQSALRAYGLMLAADGTARAKKQATVAVARKLAVLLLSLWKSQQPYQPFPGACLNGEQEDRRSGTIALHRMEATD

SEQ ID NO: 508850 - protein, 344 aa, unidentified
MQHYVGLDVSVKETSICIVDKAGKVIRDVKVATEPVAILAVLTEEALAIERIGLEAGPLSQWLYSALAEAGLPVICVETRHMKAALSAQINKSDRNDARGIAQMMRVGLYRPVHVKTLASQKRRMLLTSRQLLQGKALDIENDLRGTLRNFGLKVGMVGTVKFEARIHELVADHPDLAAIVEPLLIARRVLREQLGVLHRQLLEIVRHDEVCRRLMTTPGVGPVVALTFRATVDVPSRFTSSKAVGAAVGLTPRRQQSGEIDRMGGISKCGDALMREMLFEAALVLMTHSRKWSWLKAWGMKIARHRGMKRAIVAVARRLAVIMHRRWVDGTEFRWTREEATAT

SEQ ID NO: 508851 - protein, 343 aa, unidentified
MQAITTIGLDIAKSVFQVHGIDAEGKVVIRRQLKRRYVLAFFQKLPSCLVGIEACASSHHWSRELQALGHTVRLMPPAYVKPYVKRQKNDAADAEAICEAVTRANMRFVATKTPEQQSCLMLHRTRHLFIRQQTAMINAIRAHLAEFGIVAPVGRNGVEELLGVVADPSDKRVPEVARACLAALGAQLRMLKAQILEFDRMINAWHRSNDTSKRLDGIPGVGPALATALVASVADPKAFRSGRNFSAWIGLVPKQHSSGGREKLGGISKQGDRYLRSLFTAGALAVIRYAKIHGTKHRPWLTALLARRPTKVAAIALANKIARMAWAIMARGERYKEPVALAA

SEQ ID NO: 508852 - protein, 317 aa, unidentified
MNNSENQTLINIGVDVGKANLDIALHPSGQFFTIPNSRTHIRELVKILKGFPIERIVVEATGRYEHALVQACSKAGLPIIVVNPVSVRRYAQAIGVLAKTDRIDAQVIAQYAAKLEPEFRSIPDKTSHKIRDLLARRSQLMEMSTMEKNRLQIMPKSLHSSIKSLLKTLQTQIKSITRQIEQEVAKVDHWQTKTDILTSVPGVGKVLAFTLLSELPELGELNRKEIAALVGVAPINRDSGKLTGKRRIRSGRHRVRTVMFMAMLSAIQCNPVFKQFYERLKAQGKPPKVALIACMRKMVVMLNTMVKNQEPWREKTA

SEQ ID NO: 508853 - protein, 347 aa, unidentified
MTEAYGSRQVVGIDLHRRRSVIVRMTEDGRKLETVRITNSPAALRREIARAGEHPRVVVEATYGWYWAVDVLEEAGAEVHLAHPLGVKAFSYRRVKNDERDAADLADLLRMGRLPEAWIAPAEIRELREITRYRHQLVKARTSVKDQVHGVLAKLGIPVTHTDIFGVHGQAWLDELPLPQPYAGKVASLRQLAGGLTAEIGLLEQVLGDLLAGHEGYAAIQHLPGIGPVLAAVIVAEIGDIRRFPGPGQLASWAGLTPRHYESDTKVIRGHVTKQGSRMLRWAVTEAIQRQPAGTRPRQVKDGIIARRGKEAKNIAKVAAARELLTLVFYGMRDGHVRRALQRGQAA

SEQ ID NO: 508854 - protein, 407 aa, unidentified
MSYELHNVVGIDVSKGKSTIAVMRPFGEIVISPFEVTHTSSDLKVLADTLNKLDGKTRVVMEYTGKYYQPIARYLYESGLYVSVVHAKIIHDFANNSIRRIKTDKADAVKIANYGLSNWDVLPSYTKEDDTRLVLKTLNRQYNHLMNQYVVARNVLISIADQTCPGLNEVFTNPRKADGRIKWAEVYRRFWHCEYITGFSRNKFISLYNNWCVKNGFRGSDEKASELYLLAKECVPTLPKTEYTKKIVEQAASELISLSDAMASVHREMLSIAKTLPEYPAVLSINGIGETLGPQLMAEIGDVRRFSKRSNITAFAGVDAPPFQSGKFDSKSRRISKRGSCELRKQLFQVVRIIVQLNLFDDPVYQFVMRKKAEGKPYYVYMVAGCNKLLRIYYARVKEYLATESMI

SEQ ID NO: 508855 - protein, 421 aa, unidentified
MSKQNVEIAAFIGLDWADQKHVLTLQEAGSDQRHRFTLDHTPEALQSWIQLLRNRFGGKPVAIAIEQTRVGLIYALMHVEFIHIYPVNPQTAAKMRQAFYPSGAKDDPTDADLLLEILMTHRQHLRVWVPDDVLTRSIQLLTEGRRRLVEERTALTNQLTAALKEYFPQAVDWFGDLNTARACAFLQRWPSLQDLKQATPSSIRKFYKTQGYRGQDKLEQLITNIKDAQPLTEDDAVLLASAMMVHALVMAIPSLTDSIERYDQQIAALFDQHDDSTLFGSFPGAGPALAPRLLAAFGSDRDRFECAADMQQLSGIAPVTEKSGKGIWIHWRLACSKFLRQTFHEFAAQSIFQSDWARAYYDQQRQRGKSHHAALRALAYKWIRIMFRCWKTRTSYDEAQYCNSLKIRRSPLAAELAAAEK

SEQ ID NO: 508856 - protein, 341 aa, unidentified
MKSSVISIDLAKNIFQICVLDEMRQVLFNKKVKRSELIHELRQFEPTVVVMEACYSSNPWGRRIEKLGHEVRLIPPFIVKPFVIGNKNDANDALAIAEASLRPKVRFVAVKSTEQQDIQSLQRIAERLVKVRTGDVNQLRGLLSEYGTVVGLGISTLMNAMPDIIEDASNELTVTARSFIQRIYENIKRTSLQIEEVKIQLIELVKDKQAYKLLLTVPGVGPVIATAIMAAVGDVNVFKNGRQLAAWIGLTPSQYASGEKNRMGKITKRGNSALRKYLIHGARTVLNWCEKKDDVLSCWLKKLKERMHGCKAVVALANKLARIIWSVLSSKQSFDVTKACA

SEQ ID NO: 508857 - protein, 359 aa, unidentified
MREQRNKISFRGQKIYVGIDVHLKSWSVTVLSETSVLKKFSQHPSPEALYGFLTRSYPGAEYHSVYEAGFCGFWIHERLTALGIDNIVVNPADVPTKSSEKLRKSDAVDSGKLARSLRANELKGIYTPDSVSLEMRSLIRLKNSITKDTTRQKNRLKSQLRYLGIEIPQEFLTPFSNWSKRFFAWLKEIETLTPSGRQALDIHIRHLEELRRQKLEMTRALRTLAKTDRFREPLRLIMSVPGFGQATGMAFLSEICDITRFRNAEQLAAYIGMIPMCHSSGEKDGTGDITIRKHAVMRCNLIEAAWVAVRQDPAMNLFYTEQCKRMPKSKAIVKVARKLVNRLFFVLKHQTEYVNSIVS

SEQ ID NO: 508858 - protein, 427 aa, unidentified
MLNNDYNKQYERRQRIKKTTLVTGIDIGADFNAVGFMNKEGNVLGRLPKVYNSREGFDKFVRTTEELKAKHGLKDVLIGLEPTGHYWRKIAYFAKDQGYAVRFIRTTSLKHERELNESSSAKSDTKDALTLTNLTREGKYIDTVIEDGASRQLRTLSKVREKILRQNTGAKNTLHAVLDDYFPELKQLFYAMNTKGLWAVLENCPFPEDVLKFEKTAIADIITKASRSKTDGARKAAALYLAAETSIGLKRVGDADRYRLTVCLNEVKRTERMLQEIKKEMKELLKHLPAAQSLLSIPGIGHLSAAIFLGELGNPAYFHHAKQIIKYAGYDPQESDSGKRIGRKVISKKGRWLLRKYLYLMSVSAVNHSKFFRKYYQRRLKIKNRFGQLLKKKEALCAVAIKLIKVIFALLRDKREFQDTVSFALAA

SEQ ID NO: 508859 - protein, 385 aa, unidentified
MAPPRMPEAVIGLDVGKSSHWACVATRDGEVLLSAPVANREDDLDSLFGRFPDALVVVDQSRNIGALALARARAAGMSAAYLPGLAAHGAARLFAGDAKTDERDAMVIAKTALGIPDALLPVGDPGPTIAAARALAAQRNFLTCENTRNKNRLRSILLESCPAFEALVDLSDGPQLRLMASLGGAWSVADAGPRRAAALTRGAARGKIEALVRSTTSSTRPDASVVAAEDRAVKLLARRISENSAEIEAITAEISALLEGDDTYRCLLTVPGIGPKTASELAISIDIEDFPSHDRLASYCGLAPRNRQSGTSISSVTASRQGNKRLKNLLIFSCNCLTRTEGRWGDYYTRCRERGMSHGKALKALARKRLKVIYAVMRDRVPYAA

SEQ ID NO: 508860 - protein, 357 aa, unidentified
MTPITPDDAAIGEVAGGVDTHADTHTAAVLDPVGRILGTAQFPADQAGYTALLDWMGTFGRLGRVGVEGTGVYGAGLARLLHDTGVQVIEVDRPDRRTRRFQGKSDPIDAVAAARTALAGERTGVPKRRDGRVEALRNLRVARRSAIDQRADAQRQIRALIVTAPDELRTRLRGLPARELITACAALRPDPADAASPETAAEIALRFLARRHQHLTAEITELDELLQPLVAAINPELVAANGVGTDVAGQLLVTAGQNHDRLRSEAAFAMLCGAAPIPASSGRTHRHRLNRGGDRNANAALYRVVICRLRWDPRTRAYAERRTKEGMSKKEIIRCLKRYVARELYQIITTNDLRLAA

SEQ ID NO: 508861 - protein, 389 aa, unidentified
MFYIGIDVGKFNHCACVVSSEGDVLIEPFFFPNNLEGFQSFIKTVKKYKSPRHIVGLEATGHYGDNLVSFLVSHDYEVALINPLITDAKRKSKIRKTKNDKKDTFLICSVLFDRDYTRVTQRKLDMKQARELTRYHASITEDINQKKNRLQKCIDIVIPELNIWFKTKYSKAYMAVLKEFGSSYNLASANLAHLKKVLKPKSSGSRVDIDASTLRDNAKKSIGENNEVITLEIKMLIENIELLASQLKTVDKKIEELAIKLDSPIFSIPGIGIYSGMSILSEIGDIHNFSSAVKVMGFAGVDPGTYQSGEYSAPQTALSKRGSRYLRKSLYQCILAVCKYNLTFNKYYKLKRSQGKSHRCAQGHSVRKLIRVIYKLLSENIPFDEKPLI

SEQ ID NO: 508862 - protein, 463 aa, unidentified
MQDSNKRKGGAGGTKQIEGLPVIRRRVAGLDLGSERHWVCAPTVDGGGREIAVFGATTPELIRMAKWLKERNVQSVAMESTGVYWIAPHEVLEAEGLEVVLVDTRQLARVPGRDKKTDPVDCEWIQRLHSCGLLMGSFRPKEAVCMLRTLVRDKANLLAEAGDWLRRMQKSLDQMNVRVHRAVADLQGATGMAIIEAIVAGERDPRKLAKLRDQRCHKSEQEIAEQLSGHWREDHLFSLRQALKMYHSIQQRIADYDQEILQKLAAMQREEFRDQPAPKVKNPQKAKAIKKRGEEPMREALYRMSGVDLTGIDAIGVGTVEVVLSEYGPDLSRFPTEKQFVSHVTLAPHKPTSGGKPVKKKKKRNSASTRVAATLRMAALSLRHSDTALGAYYRHIARRTKGDVAVFATARKLATLIYRLLRWGQPYVDEGAAAYEERYKENHIRGLMARAEQLGYQLTPITA

SEQ ID NO: 508863 - protein, 358 aa, unidentified
MKIIGCDLHARQQTIAMLDTDTGELEEKTLEHEGDAVREFYSALRGPILVGIEATGSMQWFLELMEELGIECRVGHPAKIRKAETRKQKHDRRDARLLLTLLAENRFPTIWMPSSEQRDLRTLLRHRHQWVRLRSRVQHTLQSMALNYGLRRGRSLWSQAGQHALWVLPLAPHASERRAALLSLYPRLQESIDHLDQRVGQQVQQHPQARRLMTHPGVGPITALATEVFLGDPLRFIDGKALASYIGMIPSEHSSGRRQRLGAMSKQGNALLRYLWCEAAMHAVERDPELKRFYRRKLVQKGLGKARVAAARKLGIRLWIMMRDQIDYQEFCRRGKARQESGSVHAGMPDLDSGPAAQ

SEQ ID NO: 508864 - protein, 381 aa, unidentified
MNDPIQSAAAAPHRPWGVAGIDPHKHTFTVAVLDERGGLHGVASFPTSDQGLAMALAWLAEVELDLDRVGVEGSAWLGVHVATFLAAAGYDVREVQASRTAERRRRRRRAKTDAEDAEAIARETLAHPDLPPAGKQHLPDLQWDELVALRNRRRGLLAQRQRLLNEAESVLVLLPLVVRAVLPATSRVRPRLRALGAGAADGLELTAADRVNLGWLADSAGDIGQLDQRIRQLDERIPVVLQRLGCTLAEEVGIAAVGAMELLVEVGDPTRFASEARFARWCGAAPLAVSSGEGDREPERHRLDLGGNRQVNSVLHTMHVTQARCYQPAKDYLRGKRAEHKTSREARRAHKRQLANVVIRHMWTDHERRATVSNQTNAQIA

SEQ ID NO: 508865 - protein, 358 aa, unidentified
MQSNKKSFKGQKIFIGIDVHAKTWAVETLTESGFTKRHAQEASAKVLFDFLSKNFPDGEYHAVYESGFSGFSTYYQLKEYGIHCVVVHAADVPSTQYEQVMKTDKIDAGKLARALRKGDIKPIYIRERENLDDRAVVRLRKTIQKQLAGYKTRVKHLLHTNGVKLPARFDKPGTHWSRAFMNWLKDEVVLLSSTRLSLDLLINQVESIRKNLLEATRAMRILAATDKYKANYELLLSIPGIGFNVAMCLLTEIYDFKRFGNENCFAHYLGLVPTCHDTGDKHSTGGKTFRGNKLLGPMIIEACWVAIHKDYGLSQAYCSYKQKMKPQLAIVKVARKMSNIIFSVIKNGKKYEPYKWEE

SEQ ID NO: 508866 - protein, 369 aa, unidentified
MSTSVVYVGLDVHKDSIVIAFAREGRDTAESWKTIPSDGTRLRKALKMLVKNGEILKVCYEAGPTGFGLYRRLREVGIDCIVVAPSLVPGKPGDRVKTDRRDARKLAHFLRSGDLTEVYVPDEAVEAIRDLERARDDAKCAERVARHQLSKFLLRHDRRWEGTTWTQKHRDWIRAQEFGHAAQQRVLEDYLKTVEDIAERVERLTVQMGELVQETTLAPLVKALQSFRGISVVSAVTIAAEAGDLRRFATAGQFMSYVGLTPSEDSTGKRRRQGAITRCGNSHLRKILVETAWHYRHVPLMSKELRRRNQGVAAGVRRIAWDAQKRLNKRLYHLVHAGKNVQKAITALARELAGFVWAVGQEETLVEAP

SEQ ID NO: 508867 - protein, 321 aa, unidentified
MGTEVFAGIDVSKDTLEVAMEPQREKMSFAQTEDGLSLMADFIQSFSPCLVVLEATGGLERAAVATLAARSLPVVVVNPRQVRDFAKSKGVLAKTDKLDALMIAQFAQAIRPELRPLKTAEAQELEALLSRRRQIVQMLTAEKNRLHSAPGWTREDISLHIAWLEKRLAKIEEELGAMIRKSPVWRVKDELLRTFKGVGPVLSQSLLNDLPELGRLNRKKIAALVGVAPLNRDSGKFRGRRMIWGGRAEIRSVLYMATVAAIRSNSVIAAFHERLIKAGKAPKVAITACMRKVLTILNAMMKNQTPWRSLTQNMLDLQHSC

SEQ ID NO: 508868 - protein, 346 aa, unidentified
MLKYSLGIDVSKKDLHACLSVIDSAQQVKIQATRKFTNQPLGLKELQAWLNKHRKQSEVPLIIVMESTGVYYEKAAIFFHKAGYNVAVVLPNKAKKYLQALGLKTKNDHVDAEGLAKMGAQQCLEPWVPMDEFFYELRALTRHHQDLHEMKTSINNQLHAIQHSSYSSKEVLKQLKKLITTMDKQIKDTEARIAKHLGSNTIVARKLAHLMAVKGLGLMSIATVLAETNGFTLFKSIGQLVSYAGYDVIENQSGAKKGKTRISKKGNSHIRRVLHMPAFNVVRYSTGNFRQFFERLLSRQNQKMKAYVAVQKKLLVLIYTLWQKNEPFCPCIIKASRDKEAALSFA

SEQ ID NO: 508869 - protein, 359 aa, unidentified
MSKYIGFDIDDKKIVACVVEKGKSDVYETIGSDIESMRRFLKKQKRAGSRIELAFEISGQAGFIYDSLIDCVDQIKVVNPSKMTWIYRTSKKNDRLDARKMAVLLSIGELPSVHMPSREVRQWRQMILHRRKIINGRTQVKNRIRALLKSEGFRRPLHGGGWWKKVNRLWMQRLCEDRARQGDLWSVQLGNLLDELGMLEGQVVRVTKYLDEYLERQPGGKLLMSIKGVGPRTSEAVLAYTDDVSRFADSKAFCSYFGMTPRLDESGSCRRLGHISKEGPSVVRWVLIESSWKVIRYSRELRRFYERVLAGQDNRKKVAIVAVGRKLLSIMRAMMVTGELFNEDLVCRQCQTETWKRSA

SEQ ID NO: 508870 - protein, 423 aa, unidentified
MEVLHERAAGLDVHQATIVACVRIMAGTKALRECRSFATTTAGLLDLLAWLTERRCSHVAMEATGVYWKPVWNILSEGAFELMVANAAHIKNVPGRKTDMNDATWIADLAACGLIKASFVPEESTQDLRSLMRTRKQLSREQTRHVQRIQKTLEEANIKLGSVICEVMGASGRRMIEAMIAGVRDPRKLAALAHRQIKATPKELYDALHGRLTDHHRFLLELHLGQYDALNAAIERIDRQLDAAIAKMDEEVAAGHATFRALITLLCTIPGVSTLAAITILAEIGRDMSRFTTAGHLVAWAGLCPGHNESAGKRKSSRLRKGAPWLKTMLVQCAWAAKRKKDSYYRAQFNRLCGRRGPQKAICAVAASLLTAIYHMLKDGTEHQDLGIAYFDHRSIEVRTKRLVAQLAKLGYQVQLQPLAAAA

SEQ ID NO: 508871 - protein, 444 aa, unidentified
MAFSGMILIREVADAPVIMGISKPAGLESPSREVKIVNPLFVGIDVSSRSNVAYLMKPDGSKHSSFSVQNNLGGAKMLSERIVSALSSMRLSDVVIGLEATSIYGNNLVYALREDGSLSRFQRKIHVLNPKQVKKFKEAYPDLPKNDFVDAFVIADHLRFGRIAKEVYMDDYRYQALRTLTRARFDVIQNLTREKQRFANYLFLKCSGIAQEKDIQNTSATTIALMEHFETVDDLANADLDELTSFIAEAGRGRFVDPNATAKAIQAAARGSYRLPKTVNDTVNQTMSVSIASMRALKEQVKVLDKAIEQQFEIIPNTLTSIPGIGKVYSAGIIAEIGDINRFNSQASVAKFAGLVWTQHQSGEFEAEHSQMIKSGNRYLRYYLLEAANSVRRCDSEFRRYYDLKFKEVNKYQHKRALALTARKLVRLVFRLLKDNRLYIPPEG

SEQ ID NO: 508872 - protein, 377 aa, unidentified
MITKIHGIDRHKKTSTISVLNREGEEISLVKTVRDLREYIKKLGSEDAVVLEASNGTFYWADQIEATGAECYILNPYKFKIIKESWKKTDKIDARNMSNALWVYVITGKFNLPLVHNPGKDIRELRKLFAEYQLLNKHQVSYKNYLQALLSDDGVVLTEVEKEMLFNTEKSEKVLDILQITEATRLNIMINLKLLWVVLEAKEKIKKTILFFGQVFEKEIDLLLTIKGVSALMALAFIADVADVKRFKKVKQMNSYLGVVPGVKSSAGKTYTGRINRASRKLARSIFTQSIHHIINSNDYYEGKYQELKYRSGAGKARIAFIRRIFGVMRRMLINEEKYKWFREDLYTKKKKDYKLAVSKWKGIEFKINCKEIKLRA

SEQ ID NO: 508873 - protein, 396 aa, unidentified
MISVGIDVSKGKSTVCIMKPCGEILESPFDIGHTADELDSLISLIKSFDEETRVVMEDTGHYHLPVATYLSSHNIFVCCVNALRMKKFCSQSIRRAKTDKIDSIKIASFGITYWNELVKAYPSNVIYDELKFLARQYYQVTGMLVKSKVNFSNLLDQVMPKINDVLSNQGENHKLTEFVSRYIHFQNILDMGEMKFTSDYCKWAKKKGYRLNERKAAEILALAQNGIPTLPNSQSVKIAVSEAVKLIHSIEESRNTILAQMQDLCNTLPEYSVVKEMDCIGDTLAPRIIAEIGDVRRFKNKHSLIAYAGIDAPPYQSGAFHASERHISKRGNSYLRKTGYEIMQSLIKHKPADNAVYDFIQKKRSEGKCGKEAMIAGLNKFLRVYYSKVMEFYSEH

SEQ ID NO: 508874 - protein, 358 aa, unidentified
MDTVKRNKVDFTGQPIYVGLDVHKKSWSVSISTQYGQYKSFSQPPEVDKLVHYLQHHFPGAQYLSAYEAGYCGFWIHDRLREKGIGCLVVNPADVPTKNKERRTKRDRIDCRKLSRSLRNGDLEGIYVPPRGKLEDRSLIRTRLSMVRKQTRCKNQIKSMLLFYGVVIPEEKEMGHWSRRFIRWIEGIRMERASGDMALQIHLEELSHLRQIIAKLDRAILALARTEEYRPWVLLLRTVPGISTLTAMILLTEIGEITRFPSIDELTSYVGLIPDTKASGEKEHIGGITQRSHSQLRWMLIEASWKAVQKDPALMMAFDQYCKRMRKTKAIVKIARKLLNRIRYVLKNRSEYVPAVLE

SEQ ID NO: 508875 - protein, 400 aa, unidentified
MKNVLAIDVAKNKSMVCLISEDGVVYIEPFEFNHNLNEFNLLELKINFFNLNNITVFMESTSTYHLPVERFFKERNFQTHIINPIHAKNNKSSLRKTKTDKEDCLSLATLFFKENIKNYNDDKEDLYSKLRELSREVFSLDEGLTRLKNRYIQTLNLTVPEASNYFKGQALYGKTALGLFYEFPHSEIIKNKRSDAFAYNMAKTQNRHLNYYKKKADIIKEASINSYPGVSVSSNEIYNLKQLITLLKAHAKEIDKTKEKMISLAKESPLFLIILSIPGIGELSASLLLAELKDVTRFNNVKQINAYCGLDPSIIQSGKSVNYHGPISKRGNKYARKVLFNCSSNIITTSARNNTDNSIYVYFRKKQSENKHHYESIIACSTKLIRIIYTMCKNNSSFID

SEQ ID NO: 508876 - protein, 412 aa, unidentified
MLKIVYPICCGMDVHKSFVVACIATTNDHGVTNYKSKRFSTFTGDLRRCADWLSENNCKDVCMESTGKYWIPIYNILEPTCNIVLAHPKYVKAIRGKKTDKRDAKWIADIFKHDLVSGSFIPPADIRQLRDLVRYHWKLTNFNVGEKNRAQNCLTVSNIKLDDVFSDVFGKAASAITTRLLESNEPFDVKPYLTKNIKKPIEQIQAAVDGEMCAEQAEKLRIIRSHMDSLELCKLNLESLILSTAEKYIPQLNLVMTAPGIQSFAAIGIISEIGVDMSVFPTSKHLCSWAGLTPQNNESAGKKKTTRISRAGAYIKPLLVQCALCAIRTKQFPEVRNRYLALKKRRGHKKAIIAIARMLLTAIYNILKWNEVYNSELYRKADRPPAHREVSVEEAVFILQRQGYLVTAPAVT

SEQ ID NO: 508877 - protein, 433 aa, unidentified
MNTSHPYDLVIGLDRSDKKADLHLITTATGQRRSQTIDTAPEALWEWLLELRQQHPQARVGLCLEQPAVHLIAFLESYDWITLYPINPITLQKFREAFVTSRAKDDAKDAFYLAELLLTHHDQFQPWAPEDSATCAVQQLVFHRRAVVDERTGLTNRLIALLKQYFPQALVLCGEDLWRPLATRFLLKWTSLQTVQKAKPATLKAFYYLNGSRSAKLMEQRLALVAKAVPVTDETALIESVALRVQLICRQLQLVQQTIQSYEKQIAAAYAAHPDREIFASLPGAGPVLGPRLLASMGSQRERFGAAADLQHYTGIAPVTKRSGGSCYIHRRYLCPKFHKQSFHEYAKESILWSRWAAAYYLQQRTKGCPHHTAVRALAYKWQRVIFRCWQNRTPYQEARYEAALRKSGSPLVALFDKVELGKSPFKNPVKKS

SEQ ID NO: 508878 - protein, 358 aa, unidentified
MKRSRTSSYVIGGVDTHKDIHVAAIVNDSNQVLSSEYFPTTRHGYKEMLKWMSSFGKVSRVGIECSGTYGLGLLRYMQSNGIEVLEVTAPDKVDRRKRGKDDTIDAENAAHAAYCKLRTVTPKTRDGMVESLRILKGCRKTAMAARTVALQMIRTSIVSAPDEIRDTLRHMTRMTLIRTLASSRPDLTVYKNISSAYRIVFKSLARRYLELHDEIADLDKMISSIVDALAPELIEQKAVGYESAAQLLITLGDNPERLNSESSIAALCGVSPIPASSGKTNRHRLNRGGDRSANSALYIIAIGRLRTEQRSKDYVKKRIADGLSKMEAIRCLKRYIAREIYYLLKNRNALVNSIQIPT

SEQ ID NO: 508879 - protein, 405 aa, unidentified
MKEFIAEGQQDVGSATALVGVRQVLEQAGDVYGAYIGMDVHKDTIAVAIAECGRGAPEYYGEIANTPKKVAKLIERLSARLGGERLLWVYEAGPCGYGLYRQIIETGHDCEVVAPSLIPQKAGERRKTDRRDALGLARLSRAGELTAVWVPGPEQEAIRDLTRAREDMKKLELKARQTLGAFLLRHGKVYGGKSKWTQAHFRWLETVTFDWPVQQIVLQEYIEAVKAAQRQVASLEQQMHAALPQWSLAPVVEGLMALRGVSLISAMTILAELGDISRFDSPRQLMAYLGLVPSEHSSGSRRRQGAITKAGNSHVRRILTESSWNYRFRARKTRDIQKRAEKTSVAVQAIAWEAQKRLCGRYLHLLRAGKIKQQVTTAVGRELAGFIWAIACEVMGKPHGSRATA

SEQ ID NO: 508880 - protein, 425 aa, unidentified
MKFTQNERILQINNETLVVGIDIGKESHYARAFDYRGIEQAKLLRFSNTAQGYEALEEWMQRILQQKQKTEAIVGFEPTGHYWFTLGDYLQNKGHKLGIVNPFHVKCTRELDDNNQTKSDRKDPKTIAMLVKEGRFRDVYIPADLYQELREAVYERERLQEQLVGISNRVVRWLDIRFPEFTGVFKDWSAKTALITLKHLPTPAKIVSTGAEGILTIWQGNLKRSSLKKAERLVRAARESIGRTAGSEAATAALSNLLAQYELIAEQKQVQETLMAELLYKVPHADKILGIKGVGMVTAAVIVSEIGDIRRFRDPRQIVKMAGLSLKENSSGKHKGRTTISKRGRRRLREGLFRVMIPILATNAEFRAMHRRNLTRGTNPLNKMQSIVALCGKLVRVLYAILTKGRAYDADKMIGDMKRSMQDAA

SEQ ID NO: 508881 - protein, 345 aa, unidentified
MEITTIGLDLAKNVFQVHAINGSGEVVVRKALRRAQVLRFFERLAPCLVGIEACGTSHHWAREIRRLGHEVRLMPPAYVKPYVKRGKSDASDAEAICEAVSRPTMRYVAIKSCEQQAALTVHRTRDLLVRQRTQLVNMIRGLLAEFGIEIRRGITHALSLAERIVAGEMPGIPALAAKMIASLAGQILDLQARLREIERELLAWHRSSDIARRLATIPGVGTICATAFAASVTDPHQFRSGRQFAAWLGLTPLQHSSGGKERLGRISKMGDKYLRRLLVVGMTSLVRRAKYKPDAVDARLAHLLSRKPVRVVTVALANKTARVIWAIMTRGGTYRAPQPAGAVVA

SEQ ID NO: 508882 - protein, 369 aa, unidentified
MLYDVAGFQTFVGVDLHKCTVTLKAVSAAGESTAHLTISTKSVEKIEGWLRSLPQPVWLAVEACPFVEWFIDRYRDCVGRIDIADATELACRRGKRRKNDPNDALDIARRLARGECPLGFIADPTLMQLRKLGRHWRQLSRLISRSKHAMKSMLNAANLRGPKFDGAGAQRWLLAQGHLLKPVQHQAFSDYLDHVLLVERQREKLRRQMHWADRSEVFARTELLLESVPGIGDIWGLIIAAEIGPFDRFPNTDALEFWAGLTADLKESAGRTQSGNITKAGSAVLRWALCQAAVTLCHCDARQEAIRQRLIKRIGKAKANVAMGRRLLRTLYAMVRDQKPYRCEQPIDRTTRLNKARTARKPKAADKAA

SEQ ID NO: 508883 - protein, 317 aa, unidentified
MTQTPTYYAGIDVAKDRLDVVLRPSGEYMEATNDERGIRSVVRRLRKENVALAVLEATGGLEQPAAAALALAGVPVAIVNPRQLRDFAKATGKLAKTDRIDAAVLAHFAEAVKPEPRPLADEHARELSAVVLRRRQILAMTTAEANRARTAPKAVRKRIEAHLRWLRKELARVDGELERVVKESLVWKEKAVLLMSVPGVGPTLSATLLAELPELEHLDRRRLATLVGVAPLNRDSGTLRGTRTVWGGRSGVRTTLYMATLCATRHNPALREFYGRLVASGKPKKVALTACMRKLLTILAAILRNRTPWQPRVLATS

SEQ ID NO: 508884 - protein, 392 aa, unidentified
MIYVGIDVAKNKHDCFAMNSDGEILIEKMTIQNNFDGFSSLFNSISQFNESFENIKVGLEATGHYSNNILNFLTSKGFNVYVINPLQTNLYRKGQSLRKTKTDKLDARFIATMLITENLKPYSNLSYHISELKSLVRHRFRLVQERSKFKTSLSRLVTLVFPELEQIVWSTSQNSVLYLLNELPSVKDISECNLKHLTSILEKYSKGKYSRDKAIEIREFARISIGTNSRSLSFELKQVIQTVLFLQSQIDDIDKELKTLVDELNSPIMSIPGISYVSAAFILAEIGDINNFDSPAKLQAFAGLEPSTYQSGKYTATHSVMVKRGSKYLRWALLNATRLVCMRDKTFNEYKNKKLAEGKHYFVALSHTSKKLIRVIYYLLKTNKSYQLSKVA

SEQ ID NO: 508885 - protein, 349 aa, unidentified
MLYVGLDLSRKRLDWQALVAGGGRVGEGACPPDRDGLAHLVRGFDREYGRGPVLAAIESMTGARFVHDQLELAGWDVRIADAQRAKGLAPLACKTDRIDAWVLAELARRDLVPEIWLPDPEVRGERERARFRLQLVHKRTSLKNRVHAILFQHGLRAPVVDLFGVGGRRFLERCQLPEPWRASVAASLYLIDVLEEQIDAIERELRRLGAEHGYLQLLMSAPGIGWVLGYTIAAEIGKIERFSRPAKLVGYTGLCPRVRQSGEVDRRGALSKHGPPYLRWALIEAAHNAIRVHPPYRALAERQRARLGRQRGGSVAAITIARKLAEASWWMLTRNQPFAPAGARVPLTA

SEQ ID NO: 508886 - protein, 310 aa, unidentified
MAKNVHFVGLDIACDDFVASIYQSPKQSIITKEGIENTFEGFNVFIQWLKEHRLSKTNSIICMEATGVYSEAIAHYLVSQGFRVSVEPPLKVKRAFDPVGHKTDPVDSRQIAEYAYRYSDELRFWQPRDGIIEKIKHLLTAREQFIKQSTAIKNAMKAYQKHIVQVALIVKAHRQTLREIKKHITEIDKELDRIIRQNPSISKMNNQLKSIPGFGLLLSTSLITLTGAFSDISHYKTLAAFLGICPYQHKSGKSIYRQPHMRSFGPARVNCLLLLLSLLQLIMMFSKSTMCANLLKARIKSSCLTIFRIN

SEQ ID NO: 508887 - protein, 451 aa, unidentified
MSSENMTLEVVNPNAAGIDIGSRSHWVAVGQNAEDVKEFGVYSEDHEALCQWLTKHKVTSIAMESTGTYWQNLFSSLVAHGFDVILVNGRQTKNIKGKKTDIKDCQWIQKLHCLGLLSSSFLPDSTTDIIRTYSRHRQNILQQSARTVLKMQKYLRLMNLRLDVVVKDIVGETGTKIISAFIAGERSGKKLAENRHYNCRKSEEEIAKALQFNGRADYMFALKHEWETYLHLQQQLNEVDTQIKELLTNIIDKDDNKKQHVATQKTHKRKNKNTLRGTDMNQMAYQYFEGIDLMAIEGVNDATIMSIISEIGLEGIKKFETSKQFTAWLRLAPNNKISGGKVLNHHIPKGSSRLKIALRNAANAIGNLKEGHLSDFFKRICYKKGRTTAINATARKLAVIIWNMLVKEMPYESPTQYLFLDEKRKLGLVKRIKKQIAKFELQPEQLGFAIT

SEQ ID NO: 508888 - protein, 417 aa, unidentified
MDEEVYYERCAGIDVHKKLLVVCLRIGRKTEVREFGTLTHEIREIVAWLRANGCQMTAMESTGSYWKPIYNIFEQEGLPAMICNAHHIKNVPGRKTDVGDAQWIARCLSQGLLNPSFIKDREQRELTDMTRFRKSQIEERSRNINRLQKFLEGANVKLGSWLSDIEGKSATELLELVIGKQDFTVDDVAERMHGRMKSSPEELFLSLEGSITPAQREFFAHVMAVIREQTAQIEKTDAMIQRSLNANYQAAVEALDTIPGIGRVSAEQIIAEIGIDMSRFKNQHRLSKWAGVCPGNNESAGKRKSGRTPPGNKTLKSTLTQCAKSANKNKKSFFSAQYSRLVVHRGKNRATMAVAHSILIAIYFVLSGHQFKDLGADYYIQFNREMKINSHVKQLSKLGVTFPDDVLRTAILCPPDG

SEQ ID NO: 508889 - protein, 384 aa, unidentified
MNKHSMIFIGLDTHKEFHEVAYCEEQRGATPVHYGRIPSSKVSVKKLLRQFESKYPGATLHVVYEAGPCGYWIYRLITSLGHCCYVVAPSLIPKKPGERIKTDRRDALKLVRTLKSEDLTPIYVPEPEDEAVRDLSRAREAAMKDLKEAKYQLKALLLRNNIRYEGTANWSKKHLRWLTELILPHPAQQIVLQEQLRTIEERIRRLERLDNELTHHVHQWRYYPVVKAIQAMRGVRLLVAVGVVAELGDLHRFDHPRKLMAYLGLVPSEQSSGGKRHLGAITKAGNGRARRLLIEGAHSYRYPANVSTELQLRQEGLPKDIVDIAWKAQLRLCKRYQRMSKKGKHYNLIITAIAREMAAYIWAIAKEVVLTPVNPKLRLSRVPA

SEQ ID NO: 508890 - protein, 337 aa, unidentified
MKYCGIDLHGNNNWLVIIDENDRVLYSRRQANDLARILAVLAPHRSELSGIVVESTFNWYWLVDGLQEAGYRVVLANTAAIKQYEGLKHRGDESDARQLAHLLRLGLLAEGYIMPKAVRAVRDLARKRMQLVQQRTTQILTIESSLSRHRGWKLSSNRIKCLRQADWDEMQLEALPLLGLKANVAVLQTLQAQIDSLEKALAEYCRSEPGYQLLRSASGIGEVLATVILLETGSIERFADAGHYASYCRCVGSAYLSNGKKKGEGNRKNGNRYLAWAFVEAANFAVRHCEPARRFYQRKKAQRNRTVAIKAVAHKLARACYHMLKLQQPFCVQRCFA

SEQ ID NO: 508891 - protein, 404 aa, unidentified
MWYAGVDWADQHHDILVIDEMGRRIGVLRVDHTPDGLSKLNAFLETITGPEQKEQMACIVETNHGLLIASLLEAGWPVYPVNPRTVDRHQAASGAKTDLIDAYLLAKTGRADLADLRRLTPDSEVVAELKALTRDQDALIQMQTRLVNQLTAALKAYYPVALQLFAKLQQHSALIFLQTYPTPQVVMAASVEQMTEVLKNAGHTTAEKVAPKIFQALHQPHLTANVITTRTKSRLMLALVAQLLPLVEQISEYDKEIERLFLTHKDHEVFSSLPRAGKRLAPRLLAEIGDECQRYADASSLQALAGTSPVLYQSGNYAKAHRRLGCIHPLRNALHQFAWQSTQQEGWARDYYQRKRAEGKSHSVAVRSLSNVWARIIFAMLNKHEPYDSATFEAAQRLHARHAA

SEQ ID NO: 508892 - protein, 348 aa, unidentified
MKITTSGIDVAKSVFQVHGIDEHGKVTLRRQLRRAQVVLFFSNLEPCLIGMEACASSHYWARKLAALGHTVRLMAPQFVKAYRKNDKNDGNDAEAICEAVQRPSMRFVPVKSPQQQAELAVHRIRQRLMGERTALINQLRGLLAEFGVVLAPGAHQVRSKLPALLENAGESVPPLALELIRELYEELRLLEQRIAEHDRRIERLYRGNGLSRKLGELAGIGALTATAFTATVAHAAQFKNGRQCAAWLGLTPRQDSTGGKNRLLGITKRGDVYLRTLLVHGARSIMRHSAKRDDPKSRWVEQLRRRRGDNVAACALAAKHARILWALMVQEQASQLQQPIAYADARHT

SEQ ID NO: 508893 - protein, 500 aa, unidentified
MKTKRSKAKIRVGQKKLSGICREPEQKLEILRPNAAGIDCGAQEHYVAVPPDRASAGQPTVRRFSAFTEGLDAVVDWLKDCRVTTVAMESTGVYWIPLHQKLETAGIEVYLVNARHVRHVPGRKTDVQDSQWLRQLHRFGLLNASFRPEDIICRLRSLHRHRDNLVSSSASEIQHMQKALQQMNLHLHHVVSDITGLTGLRIIDAVLAGQRDPEQLVRLRDRRVYKSTPQEMQAALVGDYRGEHLFVLSQSLQAYRFYQARIEECDREMEPLLEKLAQQIEATSANLMLDALEPSGSKGESNRPEQLPEPKPTSGPKSKRKRKPRANEPKIQLAGLLERICGIDLTQVVGLNVLNVLLIVSEIGVDMSKWRSAKAFCSWLGLCPGNKISGGKLLDSRTRQVVNRVADALRLAAQSAGRTQTCLGIFYRRKQAHLGAPKATTATARKLACLIYHLLKNKQPYQEPDSASYQLRLQKSALSKLQRQAIALGYTLLPTAPVPA

SEQ ID NO: 508894 - protein, 339 aa, unidentified
MKLYAAIDLHANNSVLAIQNEEDRVVHECRLPNELPVILSHLAPHKEHITGIAVESTYNWYWLVDGLISEGYAVKLVNTAAVKVYEGLKYTGDEHDARHLAHLLRLGLLPTGHIHPKEERAVRDLLRKRAQLVKCRTMQILSIEGLAARNSGKRISADNVRKLDEARISEICGGSRELALAMQGNLTVMRCLDEQISQIESVVLKQAKLKPEFKMLLTVDGIWHSLGMTIMYEAGDMARFETVGQFASYARCVSSTRWSNGKKKGEGNRKNGNKYLAWAFIEAAHYAARYNERIRNYYERKAKKTNKFIAAKAVAHKLARACYHVLKEQTPFDSARAFA

SEQ ID NO: 508895 - protein, 372 aa, unidentified
MQQYYLGADVSKGYADFVILDSKKQPVEKNFQMDDTFVGHCHLYDRLHEFYINHPDSKIYAAVESTGGYENNWFNSLIKFQSSFDLETARLNPLGVHANSKADLKRNVTDKISAQNVAEFLIAHSEKVSYQQEDYLASLRKQWGFIKILTKQSTQILNQIEPLIYSANPELLVYCKNGMPDWILKLLLRYPTAANLSKAKASSVAGIPYVSSAHAKELIATAKQSVASSTDRITGQLIAATAKQILHLKKTIASQTKIMAKDCSLPEVDLLKTFSGINDLSAIGLMIEIQSAERFPSVKKFASFFGLHPVFKISGDGTSGFRMSKQGRKEPRRILFMVALTSIRSNPLIREIYQDRVQKGMEKNGCYWPVHA

SEQ ID NO: 508896 - protein, 338 aa, unidentified
MKLYAGIDLHSSNNYISIIDEEDQRLFQKRLPNNLEIILPALEPFKESLEGVVVESTFNWYWLVDGLQDHGYKVHLANPAAIKQYEGMKVIDDKYDAFWLAHLKRLDLLPEGYIYPKEERQVRDLLRRRLLFVRHRTSHILSLKSSISRNLGVSMSVREIKKLECKDTEKLFDDAYLALAAKNSISLIRFLTERVKEIEKEVLFHVKVRPEFRSLLTMPGIGKILGLTIMLEVGDIKRFPTVGDYSSYCRCVKSERSSNKKKKGEGNRKNGNKYLAWAYVEAANFAVRSYPEFQSFYNRKKSKRNGIVAIKALSNKLARGSYYVMRDKVPYEASKMFR

SEQ ID NO: 508897 - protein, 342 aa, unidentified
MAIVGGIDIHRAQLTFDYVDLDSGEVFRGRIAPADRAQLRQWLDRFAGRTDVAFALEGCTGWRYVVEELHRAGITAHVAEPAETAARRGPKRRAKTDRSDAQLLRDLLLEGRIPESWIPPQPVLEARALVRLYKDLLDERTGWLQRVHASMFQMGVPDLDVSTMSAAGRDRITAAQLSAATRTAVDVAMRQVDRLTAEMTMVREQIHAIGRRQPACRALQAAHYGIGPLTSVVIWAEMGDTRRFRSSDDAVRHAGLDVTVYSSDGRRSAGHLARQGPPMLRWALYEAAVYAGRPSSPDHAYFQQVKARLDGQLALLSMARKLARRCHHTLRNLDDQVLAPAA

SEQ ID NO: 508898 - protein, 465 aa, unidentified
MTIYSVGIDFHQGQHRVRCLDDRAQPCDSFGFQTTPEGLTTLEEHIFKDGSNPIIVFEPAGIPWLTVAAYLRSRYPDCRLVKAKMQKVAALRRYLRGPVKSDRIDALTLAKMPFIDPEQLEEVYLPSAEIHALQRLTRQRKRLESDIAGRKVRIEMIIDGYLPGVRKAFASPWSTQVRAFLRARLNPFAVVLDGEKALSTFLSKAASRDKGVRAESHQIFQACQAVADICKVAEPATTINEEFFVELQDEIARELRLMETEEAESDSLEGRISEIYHKLHPSNNLCTIPGVGEHTAPIFLAAIGDPARFRNQSAFANWTGVVPRSRQSSNMEAKGLRMTKAGPSIMRMALFQSGDIGRRWDPQMAAIYYKQMVSHGKNHKQALGAVMSHLGARVLKVLLEDRPYELRDIDGKSVTRDYAKRLILTKYHVSEDIRRERRRRNSKIGKIGETATNRINEATEAPQPV

SEQ ID NO: 508899 - protein, 410 aa, unidentified
MELLHRRCCGLDVHKETVVACLRLVSDGKVTTEVRTFQTTTADLLRLSEWLAANACTHVAMEATGVYWKPVWHILDDGEFTLVLANAAHVKNVPGRKTDVNDAMWLAELLAHGLIRASFVPDSQTQEMRNLLRTRKQLVREQSSHVLRVQKTLEDANIKLDSVLSDLMGKSGRAMIEALIAGETNPVKLAALADRRAKASHDEFREALRGRVTKHHRFLLRLHLNQIDALDAAMATVDAQVEANLGPFRTAVDLIISIPGIKNLGAHVIVSEIGIDMSRFPSDAHLISWAGICPRNDESAGKRRSNRLRKGAPWLKTTLVQCAWAAVKKKNSYAQAQFHRIKARRGPKKAIMAVAASLLTAIYHMLKDGTTYQDLGSNHFNRRSSDQQKNRLVKRLAELGYAVEITPITA

SEQ ID NO: 508900 - protein, 407 aa, unidentified
MTTPAPAVYIGLDVGKSDHHAVALTSNGETVYDKALPNDETRLRAILDELLKTHGPVLLVVDQPATIGALPVAVAQSCAGVEVAYLPGLAMRRIADLHPGSAKTDARDAAIIAEAARTMPHTLRAIRVDDEQIAELAMLAGADDDLAAQITAASNRLRGLLTQIHPALERVLGPRITHPAVADLLGRYPTPAKLKTAGPGHVRARLRKHAPRLAAPLTEEIFQALGQQTVVVAGTEAAATVVPILAEQLAGLIHQRNKLATQVEAVVEAHPLHPVLISMPGVGVRTAARILTEVVGKDFADARHLASYAGIAPITRRSGTSIRGEHAPRGGNKRLKRALFLSAFASLHHPASRAYYDRKRAQGKRHNQALIALARRRTDVLYAMLRDGTLYEDPTMPQTPSTVALAA

SEQ ID NO: 508901 - protein, 286 aa, unidentified
MSQEKYIGMDVHQATISVAIMDGRGKLIMECILETKAGTILEFIQGLRGSLWVSFEEGTSAAWLHDLLKPHVAHLVVCDPRKNALLKDGSKSDRIDARKLAELLRLNKLHPVYHGEHGVRTLKELGRSYLTITQDLTRVMNRIKALYRSWAIPCSGSTVYAPRHRAEWLAKIQEPGVRRRAERLYQQLDLLQPVRQQARHDLLRESHRHPAVKLLRQIPAIGPIRAASLVALLQTPHRFRTKRQLWAYSGFALETHDSGEYRMVSTLTMWKKGVDFDAQQLNRQAA

SEQ ID NO: 508902 - protein, 472 aa, unidentified
MIALDAQRRRGVTTRCPCYSDAADGWSPRRSGRFGHLIETCCEWSLFRGVSAELSTGAGSIEERCAGMGDIVEVAWVGIDAGKVSHHATLVDADGTIVWSRQVRNDQAAVEQLIAKAAATATTVRWAVDLTSAGAALLLALLIAAGQRVVYVPGTVVNRMSDTFAGEAKTDARDSYVIAETARLRRDLTELITPNELVAELALLAAHRADLMADWVRGVNRLRELLTRVFPALERSFDYTTRSALILVSRYSTPDAIRDADADQLAAYLRSEEAHRPSIPGMVAKAHAAAAAQTVRLPGEAATAALITRQARKLLDLDREIKDLDKQITERFRAHPQARIIESMPGMGPILGAEFIAITAGDLAAFGTAARLATYAGLAPVPDDSGKRKGVRHRPRRYHRRLRHVFYMAAFSSLKTDGPSREFYARKRSERQRHTRAMIALARRLVDVLWALLRDNRTWQPQPPTPLPATAA

SEQ ID NO: 508903 - protein, 322 aa, unidentified
MSAPVLGIDIAKQRMEVALLVDGKVKNKSFKNTTEGFEALGLWLKKLGISKVQACLEATGNYGEELAIYLHEAGHSVSIVNPARIKGFAQSELIRTKTDKIDAGIIARFCLAMKPEAWIPPSPEVRLLRALVRRVDSLIGMLTQEKNRLATAHESVIPLIKEHMGYLNKEIKKVRGQIADLIDQNPNLKQKGELLASIPGIGKATIPVILAELDNLEKFNHVRELVAFIGLAPKETLSGSSIKGKPRLCKVGQGRLRKALYMPALVSIQCNPVMIAFYNRLKERGKNGKVIVCAIMRKLVHVIFGILKSGKKFDPNYKPVFA

SEQ ID NO: 508904 - protein, 391 aa, unidentified
MKLYTGMDLHSNNTYIGISDEDDKRVFKGRFPNQLSVILKVLEPYEEMIVGIVVESTFNWYWLVDGLMENVYKDRVHLAHPAGFQPYKGLKHSSDKTSAFFLGKLLRLGILPEGHILPKNDRHLRDLLRKRLMLVQQRTEHLLSLKSLLNRNFCLSPNRNELKQISQEYIDALIRNEHLNLSAKTNIDVSGHLESRIKQLEKKILADTIEKPYYLKLLTVPGIGKVLALTITLETWDIKRFKDDGNYASYSRCVSSKRISNEKNKGSNNRKNGNKYLGWAFVEAANFMKRYCPEAEAFHRKKCLKENYTLATKALACKIAKACFYIMRDDTAFDVERMFGKPLKSKKDKGRGSKPDRGLAAKPCAPIGKTAAADFTSDNNNPDIEKMQDKN

SEQ ID NO: 508905 - protein, 316 aa, unidentified
MDAILECCAGLDVHQETVVACILFGSLESKPKKTIRTFSTTTSDLLALTDWLEEEKCSHVAMESTGVYWKPVWNILEAGSFQLSLANAQRIKNLPGRKTDVKDAEWIAQLLRSGLIEGSFVPPAEIRDLRDLTRYRKKLLQDATQEKNRIHKILQDANIKITTYISDIFGVSGRNIMESLMDGEVITVEKLNQMVKGKVKSKIPGLADALNHRLRSHHRDMIRYSWSHLKFLEQSLINVEQKISECMAPYQQEVELLTSIPGINQTSSAIMIAELGADMSVFPTDSQLSSWAGVSPGNNESAGKKKEGVFPQETKR

SEQ ID NO: 508906 - protein, 420 aa, unidentified
MEVNKVDYAAWIGIDWGSEQHAICLQAAKSSSLEQYTLEQKADSLHTWFANLRSRFGGRMVAVAIEQSKGALINFLLGLDFVHIYRIHPLSMKDYRHALYPSGAKDDPTDAELILKFARLHQDKHRPWVPDEVDSRLLLRLVEGRRKTVNKRVRLTNELTQLLKEYFPQALEWAGELDRVMACDFLMKWPTLQKLQKSKPDTVRRFYTRHGSRSRTLIDTRIEQIRLAQPLTTDRAIVESSVLMTKTIVLQLRTLIKAVADFEESIEAVYQKQPDSEIFSSFPGAGPVLGPRLQAAMGADRNRFEDSEEVTKYSGIAPVTEISGKKKWIHRRFACSRFVKQSFHEFAGQSIIGCAWARAFYESKRADGMEHHAALRALAYKWIRIIFRCWKDHVQYNEQKYMESLRRRQPAWLSFLPAAT

SEQ ID NO: 508907 - protein, 392 aa, unidentified
MYIIGIDIGKNHHEASIVSPEGKQIGHSLRFATTHKGADSLMSFIFNNIGNSSCIFGMEATGHYWYPIYSFLKARGYTIYVINPIQSDSLRKMYIRQTKNDSIDSFLIAEVIRFGQFGTTSMADENILAMRQLCRYRDSVISSRTEIKLRIGTIMEQIFPEYEKQFSSLWVSTSIGILEKYLTPENIENAPIDELFEIIKDKSHNRLTRAKAISIKEAAADTFGIKIAQDAFSFQLKQLIDRMNFLDKQIEALDCQILEYYEKFDCYLHTIPGIGMIAAATILAEIGDINRFKSSSALVAFAGIDPTVRQSGEFSSTHNHMSKRGSPYLRHAIFLAATTCSFHNSPLNAYYKKKREQGKHHLTATGAVARKLTTVIYAVLRDGKPYEPKKFC

SEQ ID NO: 508908 - protein, 317 aa, unidentified
MSNPESFVGIDVAKGWLDVAWLTGETLRIDHAEKAIAGLVERLRSQPPALVVMEATGGLETGVASALAAAGLAVAVVNPRQVRDYAKACGRLAKTDRIDALILAAFAAAIRPQVRELPDEHTRALGDLLARRRQLVEMRVQEKLRLQRASNVQRASLREHIVWLDERIGRLDIDLTHALRSSPAWRDKDDLLKPIPGVGSLTRVTMLALLPELGTLSRRQIAALVGVAPFNRDSGQHQGGRVIWGGRAQVRRTLYMAAVAAMRCNPVIRSFYQHLRSQGKPAKVALTACMRKLLVTMNAMLKHHSAWSNRLDTQHSC

SEQ ID NO: 508909 - protein, 373 aa, unidentified
MPRYSTAFGMDVHLRSTTVCALDAETGEAVTRRFRGNPWGEVAEWMSGFPGPSLAAYESGYLGFAPQRELSGLGVDCVVAAVSRVPRSAADLSSKNDRNDAARMAKAILSHDVTPVWVPSPEIEGLRDLAGAHDAATARLAAAKQRLLAFLARRGYAYGGTTPAGNPRRYWTYDFLRWLDKVRPADDGGIRALAALRNEVEAAAETRDDLLAEYRAAVAAGPLSAEVEALQSIKGCGFALAAAFASEVGDFSRFRSGRQVTSYFGLAPKQRSSADSVRLGGISGAGDALVRRLAVEGSWSYVQASHQPKLMPKGSGVPLEVRMHGRKGSERLLRRREEMLARGMPQAKANAATAAELVRWLWALGAMCREATE

SEQ ID NO: 508910 - protein, 425 aa, unidentified
MSCLLARPASTNPIGIDTEGSSIMTATPSTAPGIFAGADTHADTIHVAAIDGFGRELDDREFPTTPSGYRDALAFLVSLGRVEVLGIEGTSSYGAGLNVAAQAAGIIVREVIRPEATVRRMQGKSDPIDAYQAARAAMTGRAKTAPKDEDVEGLRALLNARRSAVKARTAAMNQIHAQLVTAPVEVREKYRNLKDKHLVDALAVCRPGARSGTVAHVLLSLKLLAQRHRFLTEQADLLEGQLRDLVAAINLNLLSAPGIGPVTAAHLLITAGGNPERLVSESSFAALCGTAPVPASSGKTTRYRLSRGGDRHANAALHTIATVRMSHDARTRAFVTAQRAKGRSNPELLRILKRAIAREVFKLLQAPTALADIEDLRRVRREKNLPLRVVVEALGTCQAHVSRIERGVAFDRDFTQRYRTWLQAA

SEQ ID NO: 508911 - protein, 321 aa, unidentified
MTYIGIDVSKDSFVVAYSPDKNSKTKTFKNTTKGIHEFIRTISKEEHHCVMEATGNYSALLVYLLSEVGVTTSLENPLKVKNFARAMLSTVKTDEIDARMIALYGEKMQPAPYKLRSDAILTLKQKRTVIRQLKKQLIATRNLKGSMEVLPFFDAKCRKSVEKTIAFLEKQIKDLEEDLATLANSEYKKQMDLLTSVKGIGITLAAALIMATGGFTYFDNAKQLTRHLGLSPTYQQSGTSVNFKGHINRNGDSSLRSQLYVAACSSIRCNTECRACYDRLRSNGKPGKVAVIAVANKLIRQAFAVVTQEKLYVDGYISSKK

SEQ ID NO: 508912 - protein, 381 aa, unidentified
MTNITTYVGVDAHRKDLFIAMLIGDQKTPVTWTVPNEPNAVRRLVRKLEREAPGPVCVCYEAGPCGYALQRQMTTPRVNCQVIAPALIPRKPGERIKTNRRDARKLAELLRAGLLTEVRPPTLEDEAVRDLCRARDDAREDFQRCRHRLGKLLLRRGLHFSGRNWTRAHRQWIESLEWAQPAERVVVDDYLLAIDQLGARLTELDARLTDIAQSEPYRERVGWLRCFRGIDTLTAILILAELHDFRRFHSARALMSYLGLVPGEDSTGEKHRRGRITRTGNALVRRLLVETAWHYQHRPGVGVALKRRRKGQPGRVIAIADKAQQRLCRRFRRLMEQHKPAPKIAVAIARELAGFLWAALQPAPVPAVNDTTRTRTRRRAA

SEQ ID NO: 508913 - protein, 375 aa, unidentified
MKEKVRFLGLDVHAETIAVAVAEPDGSVRSLGTIANRAESIRKLVKKLGAVDRLRACYEAGPTGYVLYWQLAELGVECEVIAPTLVPRKAGDRVKTDRRDAERLARSYRAGDLTAVWVPDEGSEALRDLVRAREAAKQDQLRARHRLSKFLLRTGRRPAAGVKAWTLGYLAWVRQLRFQQVAQESTRLDYLHEVEHMAERVKRLEQAIAKAIQVASPELQEVVQGLQALRGVAQISAVTIAAELGNISRFNTPRQLMGYSGAVPSENSSGQRTQRGSITKTGNAHLRRIAIEAAWSYRLRPGIGPALRKRQEGVPEEIKEIAWKAQHRLHQRYMRLTAAGKDQRKIITAVGRELLGFIWAIGIKAEAMSKQPMAA

SEQ ID NO: 508914 - protein, 408 aa, unidentified
MQRGRVVAEPASENGAYSSSQEAGEREVTLAAGPRRVGAASRRQSRPAAGIVAGQTGRFLARGSTSFRSKGPLSCSLVKLEPLKEPLSSHRKKESTMPATAEPDYVGLDISKDRLDYALSEQQLGQCPNDPPGHAVLLGQLRRLRAARVICEASGGYEHGVVGALLEAGIEVCLVQAARVRAFAYAEGLLAKTDRIDARLLRRFGQKLNPRLSVPTDPAARALRELLEHRRNLTEQLSEVEGRLPLAGQTLSPLLQRQQKFLVAELAAVEKLIRDHIDHDPDLRQKSERLQQVKGVGPVLAATLLAHVPELGQIDSAKLSVLVGVAPFANDSGSARMARHIRGGRAVVRKVLYMAAVCAARCNPVLAAFYRRLRQAGKPAKVCLVAVMRKLLALLNRLIAEPNFVLSS

SEQ ID NO: 508915 - protein, 316 aa, unidentified
MNHKETFIGIDVSKKQLDVAVLPDAKNKVYPNNEQGIDHLTGFLKSLAPTLIVLEATGGLEMPCVGVLAAEGLPVVVVNPRQIRDFAKATGRLAKTDAIDARTIARFGEAVRPEIREIKSPETQELAALNTRRCQIIQMITSEKNRLATATKWTREDIKENLAWLKERLNGINDELNKSIRNSPVWREKDDLLQSVPGIGPVASATLLSQLPELGTLNRRQIAALVGVAPLNRDSGIMRGKRCVWGGRAGIRTVLYMATLVATRFNPIIAAFYRRLCNAGKAHKVALTACMRKLLTILNAMVKNNSHWSPVCPANS

SEQ ID NO: 508916 - protein, 369 aa, unidentified
MNRLFVGMDVHKEKIVLFGFPKDGHTPVVRETFPGEATRVVKRLVKLSREWKIEACYEAGPSGYGLARDLVEAGLDCRLVAPSLIPRRPGNRVKTDNRDALELALALRAGTLAFVRIPSREEEEVRGLVRCREDIARQARVLKMTISHWVFTRGHRLTTGLKRWTPRHWSWLRSLPLSALERETLDHYLDMLFLQEERRKQLEHRICELGDRPEYRERVKRLMALKGFSCLAAMRVIAEVMEFSRFKNASSFMKFTGLVPSEYSSSDRIRRGRITKGGNSHLRHVLVEAVQRAHSSVRPGRGLLKRLQEVSGPLRQVALRCLARLHHKFWALTRRGVSVGRVRVAMARELAGFVWALMVFPAVEVSTAA

SEQ ID NO: 508917 - protein, 411 aa, unidentified
MQVVHEKCAGLDVHKKTVVACVITPKNKGGWEKEIRTFSTMTKDLLNLSDWLTSKGCTHVAMESTGEYWRPVFNILEGNLEVILVNARHIKAVPGRKTDIKDAQWIAELLQHGLLRASFIPPVEQRDLRDLTRHRSNFVRERVNLVNRVQKVLEGANIKLGCVASDVLGVSGRAMLGAIVDGNSSPEVMAELAQGTLRQKQDLLVEALEGRVRPHHKFILAQLLGIIDGIDETISQFDREIEDYCRPFAEAVELVDTIPGVAKRTAEIIVSEIGTDMSRFPSAEHLAAWAGLAPGNYESGGKTLSASTRKGNRFLRTILVQSAHALARTKTYLAAQYRRLSARRGKKRAAVAVAHSILVIAYHLISRHEPYRDLGDDYFDQKRPESVKKRLVKRLEKLGYQVNLEPIPVVS

SEQ ID NO: 508918 - protein, 333 aa, unidentified
MLYAGIDIHKSVFQAVVLDPDTGELTESRFQPTREQLADWATEWQGKLASVAIEATTGWRWVARDLAQHRFEVHLVDPGRASALQGRRRRPKTDRLDARWLALLLARQLLSECESWLPPAEIQRLRDKTRLRKTLAGERTGWAQRLHALLTHEGWPCARGRLLTGEGRRWVDALNLEPYVRTQVEVMLAMIAALEQQLELLERELRNFARADQRCQALETIFGVGPILACHLLAEIGDAHRFQRARQLVRASGLDPTVVESADSKRRGRLAKQGSRHLRWALVEAAQHAHRHTSPDHALYTSAVRRCGRGRARLTVARKIGHRAFHVLRAEAA

SEQ ID NO: 508919 - protein, 334 aa, unidentified
MKKFEFFLGIDISKNTLDYCLLDDQCKVLEKGKVNNEPVSLSKFFLKFENEYCCKTTLLIVFENTGIYSKPVARFLNENKWCYSEVSALEIKRSKGVSRGKSDRVDAHQIAQYGFRNLDKIMLCTEPELIHQQLKILNTEREKMLSAISSFSRTGEAEEFLGKEVFKVVKTHNRQTLSALRKQLKQLDDKISALLRSNEDLKKKQELLKTIPGIAEVGSLYLLLATKGFTRFKNWRKFACYCGIAPFEYSSGSSIRGRNRVNPLADKKMKSLLHLLALTSIRHDPELKLYYERKKEEGKHSLLALNNVKCKLVSRIFAVIKRETPYVKTHQFVN

SEQ ID NO: 508920 - protein, 348 aa, unidentified
MIMLGIDAHKRTHTAVAVDELGRQLGVKTTRATSSADHLDLMRWADQFGSDRTWAVEDCRHLSRQLERDMLAAGERLVRVPPKMMAHAREAARTYGKSDPIDALAVARAALREPNLPTAYLDDGAREVRLLVDHREDLIGERTRHINRLRWHLHEIDPTWDPKERAFTTMKHLAETQARLQETTTVVARIATDLVDRIRALTIDINAVEAELDDRTAAIAPTLREVHGVAAVSAAKFIGEVAGIERFRSRHAFARHNGTAPTPVWSGNTERHRLSRAGNRQLNAAIHRVALTQARSHPQARDYLDQRLKAGATRKEAIRSLKRRLSDVVYRAMLADAANQKRTQTLAA

SEQ ID NO: 508921 - protein, 346 aa, unidentified
MMIIGCDYHPSWQQVAWVETETGECGERKLVHATGEAKVFYQQLGSPALIGMEATGNSQWFIELVEDLGHAIWIGDAAQIRASYVRKQKTDKRDAAHMLRLVVENRFPRLWTPDREQRDLRQLVLHRHKLVEMRSRVKNELQHLAMNKGMQKKATLWSQAGQQRLRELPLKPWAWCRREDLLGLLGMLNQQVGTLDQAVQKAAEEHAQARLLMTQPGVGPNTALAYVLTLGDVTRFQRGKQVASYLGLIPREESSGGRQKLGAISKQGNRLLRSLLVEAAQIAVRFDPGFRKQYLHRCHQKPKGVAKVAAARRLAVRLYWMLRTQVAYPEIVRIESSPRVPRVGAS

SEQ ID NO: 508922 - protein, 411 aa, unidentified
MRLVVGDDWAEDHHDVELMDAAGRVLAKRRLPEGVAGMARLHELVGQQLGEDAEDAEVVVGIETDRGPWVAALIAAGYVVFPVNPLQASRYRERHGVSGAKSDPGDSHMLADMVRTDSHQLRPAAGDSPQAAAIKVVARTHKTLIWERTRQTQRLRHQLREYFPAALEAFEDLDATDALELLGKAPDPARAAKLTRAQVSAALKRARRRGITGKTDAILAALRGEQLAQPPALTAAYAATVRSLIAVITAVSEQVKILQGQVEAHFGRHPDAEIYLSQPGLGAILGGRVLGEFGDDPHRYTDARARKNYAATSPITRASGKKKIVAARHIHNGRLIDALMAQAFAALNASPGARACYDDLRNRGIEHNDALRRLANRLVGILHGCLKTRTPYDEETAWSHRENLPQSSVAA

SEQ ID NO: 508923 - protein, 356 aa, unidentified
MERVLGLDVHAASCTLAVISQAGKRLTDFPIETNGHALVEAIRRIPGRKHLVFEQGIQSAWLYETLSPHVDEIVVAGITESRGQKSDRRDAYGLAEKLRTGALAKRIFKAPREFSALRELSRMHITLVHEVVLVQARIKSLYRSRGIPVAGLSVYGARHREAWQQRLPASARLRAVPLYAQPGFLVEQKKQIERDLLREAKKHPIVRILETAPGFGPIRSARLVPIVVTPHRFRTKRQFWSYCGLGIVMRSSSDWVRKAEGSWIRSQVAQTRGLSRHFNGVLKDIFKGAATTVLTQRDKGPLYERYEQMLEAGTKPNLAKLTVARTIAATVLCMWKHEEEYQPERIRRSMTTDRGV

SEQ ID NO: 508924 - protein, 355 aa, unidentified
MAIVAHTHPFVIGVDAHARNHAVAILACPTGEVVDDAQFPATVAGLQRAVSWVARRTGGDLDVLWVIEGVGTYGARLARVAAEAGYPVAEAGRMNARANRGVGKSDPLDARRIAQAVMAVDVAMLRRPRADDGVRAAVRVLVASRDHISAERTAAVNALTALVRVADLGIDARRPLTAGQIAAMAAWRARDEDLATAVARKEAVRLAKRVIAADRELAANTKQMTDLLNRSPARVLLDQPGIGPVTAAVALAAWSHPGRVRSEAGFASLAGVNPIPASSGNTVRHRINRGGDRRLNRALHMAAVTRIRMDPRTRSYVERRTTEGRTPREIRRCLKRYLARQIYRQLNAAQTPDPA

SEQ ID NO: 508925 - protein, 414 aa, unidentified
MNSWNEITHYAGFDWAKDHHEVVIVDRLGQIVADFQIEHNAQGWQRWREQLVALGPGVAACVETSQGTVVECLLDSDATVYPVSPVSAKRYRERKVPSGNKTDHVDAWSLADALRVDGHGWKALAREDPLVAELRLLCRDEVALIEERTALINQLQQALYEYYPAVLEAFEDWTKPAAWAFVEAFPTPQALAAAGKRKWEKFLHSHKLARPETYQKRMEIFGRACQFVSGHALTRAKSRLALARARMLRVLQNQIDAYRAEIEKLFAKHPDHDLFGSLPGAGPKLAPRLLGEIGSDRARFEDPTGLQCLAGTAPVSYQSGQIHKVNIRRHCNKPLRHAVHLWANLSRKSCPWAAVYYDALRQRGKSHACALRCLGQRWLKILWKMWQSGTRYDPDLHTKNQIKHGSWVLKIQPA

SEQ ID NO: 508926 - protein, 390 aa, unidentified
MERPMQKLNDLSRSLTALEPDGTLIAVIEMSLSSWLVAGIVPGVERQPLKKLAVDESTLLKLLYRWREEAEKAGRRIERIVVAFEAGRDGFWLARWLKACGIEAYVIHASSIAVSREHRRAKTDRLDTELLKRSFLGWLRGERDHCKMVAIPTIKDEDAKRPNRERDSLIRERSRIVNRMKAAFVRLGIRGFNPKLKRAAGRLDGLRTPEGEPIPPNTSAELRRDMERRRLVSDQIRQIEEARLERIEQAPSDGPHAMVRLLARVIGVGIETADMLVHEVLSRNMRDRRAVARYAGLTGSPDESGRKRREKGLARSGNARVRRGMIQLAWRFLLHQKDSALTRWFRARTENARGIRKPMIVALARKLLIALWRLVREGVVPDGVVLRPAQ

SEQ ID NO: 508927 - protein, 344 aa, unidentified
MLFYCGIDLHARESVLCIIDAQDTIHFRDKVPNQLSHILEIFHSFNPKPKVALEATLNWYWLVDGLQEAGFEVKLAHPFGLQVIKKAKVKTDNRDAFHLARLLRLDALPESYIYPKETRPLRDLLRKRQKIVSLRAAEYTSLHRTLLQHGIVDIPATQAKEFNSRDIEHYFEHPVIQCRCAMELERMQFYTRQIKILEEIILGNTTEEPDFLLLQTIPGIGKLLAAIILYETGDVNRFPTAKQYCSYSRVVPGIAQSSNTVRRGKGSKQGNPYLKYAFMRAAALAVRFDGPIRRFRLKHLNRRRSKARKLISVSIVAHKLAVAAYQILKYKKTFQVESMFGPYI

SEQ ID NO: 508928 - protein, 355 aa, unidentified
MDSKKYIGMDVHKESISIAVRNEAGKIVMECVIETKASTILQFIDGLRGDLQVTFEEGTSAAWLYDLLKPHVTKLVVCDPRKNASMREGNQNDKIDARRLAELLRLNHLHPVYHGEHGLRSLKELVRSYLTITKDLGRVMSRVKAIYRSWAIPCSGKQVYAPRHRAEWLGKITEPGVRRRAEFYYQQLDALRTVRQQVRRDLLAEGKKHPAWKRLCQIPSIGPIRAAVLLGILQTPHRFRTKRQLWTYSGFGIETQSSADHRRVDGQLERAKKQISIRGLNRNCNHDLKNLFKGAAIVASSKPGPFQEFYTTLLTKGLRPEMARLTLARKIATIVLIVWKRGACFDAQHLKPQTA

SEQ ID NO: 508929 - protein, 350 aa, unidentified
MITIGIDPHSRTHSAAALDHHGRILAELTVGSNARELDRLARWISGMGPERVVAIEGARGFGLALSRRLLVAGETVVDVAPALTMGERRAARRPGKDDRGDAVAVGRIALRERSLPRVYPEVTGTDLKLLVDARDQLVAEATRTRNRLHALLVAIAPGYHEQVRDLTSSTALMVARRLASRARGTDRVRSTLACAAISRLRSLSGEIGALERELTAALDREAPANLLAICGVGPLVAAKILGEARDVGRFSSSSAFASYAGTAPIPASSGTVIRHRLDRGGNRQLNRALHTVALTQARRDDRARAFLVRKRGEGKTPREARRALKRHLAVAVYRALVLDAEEARSAGVLT

SEQ ID NO: 508930 - protein, 394 aa, unidentified
MFLVGIDVGKLSHMFCIMDSSNGEILVSPVSFKNNKQGFDFLMDNIKPYPKDKILIGMEDTGHYHFNLLKFLLDSGFTVALINPITTDLTRKMQLNPTKDDNLDTMTICDVLASSPRKKGYRISKINNFEFYEQKRLTREHHDLKEQLNVYANKLQKCIDIVFPEYNSLFKSKYGTVYMKVLKAFGCANAIAHADIRNIRKCFETNRNGRTISLTPEKLKEAAKHSIGFPSKAEVIEIRHLIDLIELIKEQINDVDIKIEEFSTQLNSPILTIPGISHFSGTSILAELGDLRNYSKASQIIKFAGVSPYKHQSSQYEAQHTAITKKGSRYLRKTLYQVILPVIRYNPVFNEYYHLKLSQGKGHRCAQGHCVRKLLRIIYHLVITNQPFDSTLLK

SEQ ID NO: 508931 - protein, 360 aa, unidentified
MAKARSLVGLDVHATKIAAAVLDAETGQLQTFSMSGESEKTAGFCAGLPAPVRVAYEAGPTGYGLARELAKRRVECVVAAPSKIPRASGDRVKTDRRDAEHLVRLLLAGKLHAVRVPGVEEEALRDLVRAREAVRVDLMRSRHRLSKLLLRHGIRFDDGRAWTERHRAWLAEIVLDWPAAQATLLDVRGAIDALCHRRDGLEREILGLLPACPWVVQVSRLRCLRGVDTLTAVGLCAEIGDFERFARAEQLMSYIGVVPSESTTGQQRRLGSITKTGSGHARRLLVEAAWHYRARPNIGRALADRQEHQPPEAVAVAWSAQRRLHRTWTRLEARAKRRTIIAVAAARELAGFAWAITQIE

SEQ ID NO: 508932 - protein, 338 aa, unidentified
MYYTGIDLHKFTSYLTTVDSAGKIIKQADLKNVDHNFIQYFDSIPGQHKTTVESTMTWYWLNDLLCSIDIPLTLAHAKYVKAIAYAKVKTDKVDSHTLAQLLRMDYIPEAYKISNDKRVLRDALRARLKIVQRHTSVTNSMHLLLAKYNYDSPSQLTGIAEYQYEQLVDVEELLKEQILDLEKQLYPSLIPNEDIQRLLWIPGIGKMNAFNIVLEVDDINRFPDVKNFFSYCRLVPSARNSAGKSKQRSSKDGNKYLKVVFMDASVHAVQYYPVIKKYYNSKLRKKNKFVAKSIIAKEIAKIVYYTLKYKTNFNNNFKGIELQHKKSLQWPRVVSPDA

SEQ ID NO: 508933 - protein, 312 aa, unidentified
MDKHNTVGIDVSKAFFDVCFLDNKENKRYNNNIKGFEKFLLDLKEHSRSKIVMEDTGCYHKRLQAFLYSSLEADRAVIVANPKRIRDFAKARGRLAKTDKLDAVIIAEYGSVMGNTGKMQRSKTAEKLHTLCVRRRQLSNILKQELNNKESCLDKEMAKSIMKHRAYLEQELQKIERLITKEIASDEELKEKAKCLRSIKGVGVVLTATLLADMPELGHLDKRQIAALVGVAPMNCDSGNMRGKRFIRGGRPEVRNMLYMATFVGIRFNAVLKAHYEALVARGKPFKVAIVACMRKLLIYINSLFQKNFSYA

SEQ ID NO: 508934 - protein, 339 aa, unidentified
MSKRSIQIQETLSCGIDVSAKSLTVAIQRVGQPVEQKCFANNPAGHGTLIAWLRKAKSPIRVSLEATGIYSLDLAFALNAATGIEVAVLNPKVANRFAQTIRRSKTDAADAEVLAGYTHRMPFKAWIAPSASSMRLRSIVRHVESLSVQSAQNQNRLHAARGSTSTPGCVVQDLKRSVASLELRIHRLRREAITLVRRDDLLRKRYELLVSIPGIAQVSAVQLLAELSTLPSDLTVREWVAHSGLDPAHEISGSSVRKASRISRAGNRHLRRALYMPALVASRCDPHVKAFFESLLARNKARLQALIAVARKLLHAIYGIFRSGLKYQGTKLFPWITLS

SEQ ID NO: 508935 - protein, 346 aa, unidentified
MEHYAGIDVSLELSSVCVVDAQGKIVKEAKVASEPEAVVAFFEALGFAVKRIGLEAGPLSHWLYAGLKEAGFETVLLETRHVKAALSAMTVKTDRKDARGLAQLLRMGWFQQVHAKSMASQEVRALLVGRKQLLGRLIDVELSIRGILRGFGLKVGAVTRKGFEARIRELVTGQATLERIAEAMLSARAALKAEYEKLHKAVLAIVREDPVCRRLMTVPSVGPLVAITYKSAMDDPSRIAKSKAAGALFGLTPKKYQSGEKDVTGGITRTGDEMVRTALYEAANVLLSRIARFSKLKCWGMDVAKRRGSKRAKVALARKLAVILHRMWVDGTTYRWAAAEPIAAQA

SEQ ID NO: 508936 - protein, 385 aa, unidentified
MAQSEDMSNPPTALAQNDTLICVVEMGLKSWLVAGLVPGIERQPLKKLEADESALHRLVLRWKAEAEKAGRPISRITLAFEAGRDGFWLARWLKSRGIEAWVIHPTSIAVSRDHRRPKTDRLDTQMLMRAFLGWLRGEPGHCRMAAIPTLEQEDAKRPTREHETLVGERTRIINRSKSALIRLGIRGFKPGLRKASERLASLRTPEGVPIPPNTLAEMHRDMARLAVIQSQIAEIAVARLERLEHATDAPHAMIRLLARVIGVGVETAEMLVTEVLSRNLRDRRAVARYAGLTGAPDESGSKRHEKGLAKTGNARVRHGMIQFAWRFLLFQKESALARWYRARTENAKGSRKRMIVALARKLLIVLWRFVTTGEPPEGVALRVAA

SEQ ID NO: 508937 - protein, 313 aa, unidentified
MAQSVITAGIDVSKPYLDVALYPKRETIRVGRDASGLAELAAWLTQHDVHRVGLEATGGYERMVMDRLSAAGFEVIRLNPLFVRRFAEAKGRMAKNDQADARTIAQFTAVMLDNPKPGRRTDLDALAEHLALRRQLSDWATDCGNQLEHLTDRALRKQLEALRANFERRKLAIEVKLARMIAERDDWATLEQRLRSVPGVGPVLAQTLIALLPELGQLTRRAIAGLVGVAPYDNDSASHSGERHIKGGRSAVRDVLYMAALVAKQHNPMIAAFAKRLAGKPPKVILVACMRKLLTILNAMVRDGVGWKATKPA

SEQ ID NO: 508938 - protein, 354 aa, unidentified
MVDKVTEAAVVGGVDTHKDLHVAAVVDQNNKVLGTQYFSTTRQGYRQMLAWMTSFGTLKRIGVECTGTYGSGLLRYFQNAGLEVLEVTAPDRMERRKRGKSDTIDAECAAHAAFSGIRTVTPKTRDGMIESLRVLKTCRKTAISARRVALQIIHSNIISAPDELREQLRNMTRMQLIRTLGSWRPDASEYRNVTNVYRISLKSLARRYLELHDEIADLDVMIAAIVDELAPELIKRNAIGYESASQLLITAGDNPQRLRSESGFAALCGVSPVPVSSGKTNRYRLNRGGDRAANSALHIIAIGRLRTDAKTKEYVARRVAEGHTKMEAIRCLKRYISREVYTLLRNQNRRINSI

SEQ ID NO: 508939 - protein, 345 aa, unidentified
MDKIITIGLDIAKQVFQVHGVDAAGGLVLSRQLRRGEVLKFFAKLPGCVVGLEACASAHYWAREIVALGHEVRLMPPTRVKAYGRRGRKNDRADAAACCEAVTRPSMCFVPIKTPDQQAALMLHRARQMLIEQRTRLGNAIRAHLGELGIVARKGAGGLAALLQMLQTAQDERVPAAIRPILQPLVEQWRCAAAQIAGLDRQIAAWHASNEASRRLATIPQIGPIIASALLATAGDATRFKNGRQFAAWIGLVPSQNSTGGKQRLGAITKAGDRYLRQLLVVAASGMIRRVRANPLLSPWLAQLLARKPAKQAAVALANKLARIAWALLATGQTYRTPTPAAAKP

SEQ ID NO: 508940 - protein, 430 aa, unidentified
MFRKAEKMRDRDRRKNKADSVKQITGLPVVQHKVAGIDLGSERHWVCAPTLEEGGREVADFGATTCELIRMAKWLNARKIESVAMESTGVYWIAPHEVLEAEGLKVMLVDTRQLARVPGRDKKSDPFDCEWIQRLHSCGLLMGSFRPKEAVCMLRTLVRDKGNLVAEAGDWLRRMQKSLDQMNVRVHRAVSDIDGVTGMAILRAIVDGERDARQLAKLRHWRCHKSEEEIAEQLSGHWREDHLFSLRQGLKMYDAIQERITDYEMRQALYRMSGVDLTGIDAIGVETVQVVLSEYGPDLSRFPTEKQFVSHVTLAPHKPTSAGKPVKKKKRNSASTRVAAALRMAASSLRHSETALGAYYRHIARRIGGDVAVFATARKLATIIYRLLRWGQPYVDEGAQTYEQRYRENRIKSLTARAKELGYQLTPTTA

SEQ ID NO: 508941 - protein, 364 aa, unidentified
MSYRNDQSKKSSTAFDQASTLVTVVELSRNSWLVAGVVPGINRHPLKKLAADENELLALLHRWQQQAVKAGREIKRVVVAFEAGRDGFWLARWLRARGIEPHVIHATSIAVSREHRRAKTDRLDTEHLKRVVLGWLRGEPNHCRMVAIPTIEEEDARRPNRERETLIRETTRLVNRMKACLVRFGVRDFDPTLRKAADRLEKLITPEGVRLPPLTLAEMLRDIARLRFLREQIRSLEKARIMRLKADPTTRTNAMVHLIARIFGIGIETADTLVHEVLSRNLRDRRAVARYAGLTGSPDESGNRRREKGLARAGNVRVRRTMIQLAWRFLRFHTNSGLAQWSNKRAADGRSSTRKTMIVALARS

SEQ ID NO: 508942 - protein, 376 aa, unidentified
MKNTIMCGADVHDNSMTARIAVNKESPETRVFQYTTNGRRNLLKYLKLVARKHGADRVVVAYEASSLGFGFCDECTDAGIECYVLAPTKMPKSEEDRKRKTDRRDAQKILEQLRAHILAGNELAKVWIPDLETRDDREVIRMRLDVGQKLTSAKTQVRTLLKRNGVEKPKDVGKAWTVSDRHWLHRLTEPESELADGACVGLASPLRQIAFLEKEIEELDKEVEVLANTERYKAAAEALVEQLKGVGLLTAMVFLTEMGDLRRFKNRKKVGAFIGLVPSSNETGEHNDRKGHITRQGPARVRKVLCQASWARIGSDVDESKVHARIVEKNPKKKKIATVACMRRLGVRMWHIGMCAQIEAGVYETKKLPCSKRIAV

SEQ ID NO: 508943 - protein, 404 aa, unidentified
MNNVAGVDVSKGKSVVSVLRPFGEVVAKPFAVGHTGSELKELADYLKSLDGETRVVMEHTGRYYEPVARFLCEEGIFVSAVNPKLIKDYGNNSLRKVKTDKADARKIARYGLDNWAELRQHTPMDTIRMQLKTLNRQQGLYSKTKTMMKNNLIALLDQTYPGVNALFDSPVREDGSQKWVDFATAFWHVNCVRAMSLTAFTERYRKWCKRHGYNFNQIRAIEIHTQAQELIAMLPKDALTKTMIRQAIDALNAVSKSLEQLRREMRTLAAQLPEYPVVMAMRGVGDSLGPQLMAEIGDVTRFTHRGAITAFAGVDPGADQSGAHEAKSNHTSKSGPPELRRALFLVMDCLLKTQPKDDPVYRFMDKKRSEGKPYLVYMTAGANKFLRIYYGRVKEYLASLENAD

SEQ ID NO: 508944 - protein, 345 aa, unidentified
MDLHKKTSTFCVKDYDGDVIKQAKVLTDRNQIREFFNSLGQPASVALEPVSQWYTFADLIEAMGNDVHIAHPLKVKAIASARIKTDKIDAGVLADLLRANLLPEAYFSPKEVRNWKELTRFRSSLINLRSQVKNKIHAILHKHAIIHNFSDLFGVGGTKWLQNLTLEEPFRTSLTEYLSVVESLTGQIDAAEEKIMRTVTEHPQAKLLTSIPGVKFVSALTIMAEIGDITRFPDAKRLMGYAGLVPSTYSSGDVTRHGKITKTGNKWLRYIMVEVAHHQQKCKRKPGFGSFYLKMKNRKGASTAAVATARKLLAVVWRLLTDKREWSATAPDCGKSGPSASNISS

SEQ ID NO: 508945 - protein, 409 aa, unidentified
MDVIVERQGALDVHKEQVTGCVRVPDQQGQRVSHVAEFKTTVRGLLVLRDWLKAHRVTQVTMEATGVYWKPVWHVLEDDFELVLVNARHVKQVPGRKTDVSDAVWLCQLAEAGLLRASFVPPKPIRALRQLTRYRKAQISERQREANRLHKALEDTGIKLDCVATDILGRSGRAMLDALVAGTTDPEVLADLARGRMRAKIPALQEALEGRFEALHALLIGTILTHIDFLDEQIQRISDAIEEQLAPFSAAVDLLCTTPGVRRRTAENILAEIGVDMCTFPTAGHLASWAGQCPGNDQSAGKRRSGRTRRGSKWLDVALKDAALAAIRTDDSYLQALYRRKKPQLGHGRAIGAIKHSIICACWHMLSTGEIYHDLGGDYYSRRNPQRQIGRLVAQLERLGQNVTLQAAA

SEQ ID NO: 508946 - protein, 389 aa, unidentified
MFYVGLDVASEKHDCCILNEKKKIFRSFSISNSADGFDSLLAALAELSSDEIKIGLEATGIYSENLSVFLRRKGFDVSTINPLLIKKHQCATTLRKTKTDKADAKGIAQFIAEEGFQPDLPVSYHIQELKSLSRARFSVVQDRSALKNKVKRLLVLLFPELLGEFSDIFGNSAAALLKQYPSAARLAACHCDALAALLRKTSRGRFGRAKAEHLRQLAQNSVGNHSSAKAMELRMLLKRIDLLSEQIAEYDREIKIIMDKIDSPILSIPGISYTLGATIAAEIGDIRRFSSPAKLLAFAGLEPSIYQSGKFVPTSGKMVKRGSPFLRWALLQAAGYAPNYSSTFALYRSKKAAEGKPAAVVRSHVAKKLVRIIHSLLTHSTAFSDQLPA

SEQ ID NO: 508947 - protein, 422 aa, unidentified
MEVRNMSEYAALVAIDWADQQHAVCLLDLSTGEREQTIVKHTPAALQEWALSLRQRFAGQPIAVCLEQSRGPLIYALLQYDFFVLYPINPATLAKYRQAFSTGHGKDDPTDADYLLDLLQLHRNRLRPWHPDDEKTRTLRLLVEQRRRLINDRTRLSNRLTALLKGYFPQVLDWFEDIRTVLVCDFLERWPNLSALQRARPDTLNKFFRSHHSTSNSTNQRRLAEIKSALPLTKDEAVMTSSVINVKALVAQMKTVIAAISEYDRHLEALCQTHQDYELFASLPGAGPIHAARLTAALGSDRRRWQSADELVTFAGIAPIIERSGKQFRIRWRYFCPKFFRQTFHEFAAQSIQDSFWARAYYSSQRAKGKDHHAAVRSLAFKWIRIIWKCWHTRTPYNEIVYLETLRKKGSSLLKFAADYQQ

SEQ ID NO: 508948 - protein, 347 aa, unidentified
MITFGVDAHKRSHTIVAVDELGRKIATRTIGTTTSEHLQALAWAVQVTPAGHDRRWAIEDCRHMTRRLEADLLAAGEDLVRVPPKLMAHVRDSARSYGKSDPIDALAVARAALREPDLPVARLDGAERDIRLLVDHREALIRERTALVNRLRWHLHELDPGTEITARGFRQLKAYTLVERQLADKTGIVARLARDLNARARDLTHTIRELEKELQQLTLEHAPALLAIPGCAALTAAKIVGETAGIDRFTTSDAFASYNGTAPLPVWSSNTPRHRLSRTGNRQLNAAIHRIALTQARHHQPAKDLIKRRVESGKSGREALRVLKRHISRTVYQALRTDQQTQLTLAA

SEQ ID NO: 508949 - protein, 336 aa, unidentified
MYSGIDLHSNNSVVAVIDDADRVVAQKRLPNDITTIVGFLARWRDQLAGVVVESTYNWYWLVDGLQDAGFHMHLANTAAIKQYEGLKHSGDETDAQHLAHLLRLGILPTGTILPREHRVVRDLARKRMQLVQSCTTHVLAVENIMARQLGGRMTSNQIKRLTGDTIDSLPLAADIGLAIKANVAVIATLQSQIEVLEKRLQERVKPRAQYGLLTSVPGIGQTLATVILLETGPIERFAEVGNFASYARCVDSVHTSNRKKKGEGNVKNGNKYLAWAFVEAANFARRFCPEAKRFHERKKARTNNIVATKALAHKLARACYHILKEGKPFDVTRCFA

SEQ ID NO: 508950 - protein, 459 aa, unidentified
MARRNRRGKRNRSAQPQQVYPNAAGLDVGATEVYAAVRAERDEEPIRSFPTFTRDLHALADWLSAREVDTVAMESTGVYWIPVYQILEARGFEVVLVNARHVHSVPGRKSDVSDCEWLRYLHSVGLLRGSFRPADEVCAVRSLLRHRDGLIKTAARSVQHMQKACDQMNVHLHHAISDLTGYSGLAIIDAILAGEHDPARLAALAHPRIRASRDTLIKALEGDWRSEHLFTLRHARQTYAHYQQLISECDEEIEARIRAFERTLPPPATSADLQSPQAPKRSPEAPEPTPQSFNLPAHLTRLFGTDLTLIPGIGSATALVLFGELGSDLSRFPSASQFASWLNLCPQTKITGGRVISSQTGPGVNRAAQALRMSTQSLYRSRSALGDFFRRRRASVGTPQAITDTAHKMARIIYHLVTRHVLYDDAVLLREQHQDRKRRERRLRNQARTLGFDLVPDIA

SEQ ID NO: 508951 - protein, 378 aa, unidentified
MEEITRARIARVGVDLAKQVIQVHAVDASGRRVVARAFKRDQFFAWCTQLPAGCVVAMEACSSAHHWARKLRAQGLDPRLIAAHFVTPYRMEGKGGKNDATDAAAICEAASRPSMRFVPVKTCEQQGVMRLHRMREGLKEERTACINQIRGVLTEFGLVFGKSPKVLRAVLADIIEDASNELSTTARLVVQRAFEHWRELDEHMIWCDRQVGQHVRASPAAKRAAKVIGIGELGASALTAGVGDFTQFKSGHQFGAWLGVVPRQASSGGTIRLGRITRRGDDYLRTLLIQGAKAAVMSAGKRNDPISQWLVQLTARVGWQKACVAMANKNARILWAVMTREEGFDPKHVSVKPQAKQSARQPVAAPPPGSAACAACAD

SEQ ID NO: 508952 - protein, 416 aa, unidentified
MGFDCGEDEHQAVLLDGEGQEAFRVAMTNRRDRIEEGFALILLRVPTGAKLVVAVESTRSHGRLVTEVAKGLGCEVWQVNTVALNHFRAVEGQPRKDDVRDAYLCARMVYLRMQGARMKVEISDEERVLSRLTRAYSRIMEARTRALQALHAILLELAPEVLHRHWDGPKVNSKAMLYLLERWPGFRGLERAQLRSIEKILHSCRYGDRAADVAKWLRDVARRIGMSNEERRIVTLEMQNAVEQIRSCDAALGQLKQEISERVQRHPVGVRLLEMPGIGVIVAGVLIGELLPVARTSREAQSATYSGVTPLGRKSGKSLNTSSLTRGVNKWVLHALYTSAVAAKKCSAIDRAYYEKKLLGYAGHKKPHVAAFIALGRQRHKVIFKILTTGARYDKETLISSHLERIKDQQQHEAAA

SEQ ID NO: 508953 - protein, 470 aa, unidentified
MGGEGSPPFRGVDLVSQTSQILYPADARMRLLNANANEHPLRIKLSAHIRTGIFMEPQRNKVCGIDVHKRFLIATILSRDRKKDTQRFRITLEDLLKFRDWVIENGCEQVAIESTGIYWHPVHAVLEGKIDLIVANAYKIKHTPGRKTDVSDSEWIAELCLNGMIEPSRIFPKDDRELRRLTRAREGYVKQMTQEKNKIHQSLDSACIKLASVISDIFGKSGMYLLNCVLDGIDIDEIIEGIPSGRLKKKADQIKESIKSRLEISQVILIRGSLSLMRSIQERIDELDGEISARIQYRKNDLAIAMSMPGTGFVSATAILAEIGNYTDFKKPEQLAAWCGLVPSLYQSAEKTILGGITKQGSKHIRRMLIQVAYAISRTKDSKLRKFFLRIQAKKGSKVAAVALARKVLCILHHLLMNKEMYLEDKDKKNMRRKPLAQPSPIEMPIQEMIDCIVRAGYVVTKSDSIGGFG

SEQ ID NO: 508954 - protein, 363 aa, unidentified
MSGRGRSGSGPPRPSRRAYKASWTAAAVDASSQPLATIRVPLSRDGYRALRRFAGRWPGSTWAIEGASGLGAPLTTRLRTDGLDVVDVSAKLAARVRLLSTGHGRKNDDADAVSVGIAALSARTLNSAAVDGAVSALRAIVEHRDDLVKTRTQTVNRLHVVLTNLVPAGGPRELTADQAAALLRGIRPRDTAGRTLRGLAVDLVAEIRQLDRRIAKAAINIQNAVTGSGTTLTELCGIGALTAGKILGRVGTIHRFRSAAAFATYTGTAPIDVSSGDVTRHRLSRAGDRQLNLCLHVMALTQIRQDTPGRAYYLRKRTEGKGHKEAMRCLSDLVYRQMVRDATRLAAGPGGHSGAALPSSAAS

SEQ ID NO: 508955 - protein, 318 aa, unidentified
MAQITKIVGLDIAKDKVDACIRSASAERTFANTAEGHRELLRWLSEHAVGRAVMEATGGYEQSWAELLERAGVEVVIVDPRRVRHFAKSAGQWAKNDPIDARMIAWFGETFANLTGKPRDKERQVLEQLVKARQGLIGMKDRIVKQGVHKQPTEVRKAYRAATKALATQTAKLEAAIAGGIEHNTEFAKRADIIQSVPGLADVATSGLVALMPELGHVDNQAAAALLGVAPYDDDSGDRRGHRHIKGGRHRLRRLLYMPIVGAATQHNPVLKAYYERLLARGKPEKVALVACMRKLITILNTMLKRGEKWDPAKYARA

SEQ ID NO: 508956 - protein, 329 aa, unidentified
MQNSINYIGVDISKAFFDVAVPDGQAYHYYKFDNNPDGFEALLKVVPSEGIVVMEASGPYYLRLANYLTKQGIGVSVINPLVIRRFCQMRMTRAKTDKKDSSMIAAYGRIEKPGLWQSPQEHVVALQQLEALLANIRKEYTAVSNQFESFMSSGMLNKELEEIITKELAHKQELIDKLTAQIEELAQKHYSSMLADLESIPGLGRKTAIMLIVLSGGFSRFSNYRKLSAYIGLSPRIFESGTSVKGKARICKMGMSRIRAMLYLCSWSAKRYNKSCSQLYERLLAKGKPKKVALIAVANKLLKQAFAVATKQTRYNENYLTLMQSAVSG

SEQ ID NO: 508957 - protein, 314 aa, unidentified
MNASEEINVGIDTGKSQLDCYIRPLGEAFSVANTVEGVRDALRQLKKLKPTRIVIEATGRLELPFVIAAQKAKLPVCVVNPLHARRFAGAVGKLAKSDPLDAQIMAHFGEALKPDTTAIKPQETRLISDLLARRSQLLGMATMEKNRLSILPKVLHASINRILKQLQAEVKKIEALLDKHIEQVPEWQEKRDLLLSVNGVGKVLAYTLLSDLPELGQLNRKEIAALVGVAPMNKESGDYKGKRHIRGGRAKVRKVLFMAIMSAMQSNPKLKRQYTELKAAGKPPKVAMVACMRKLITILNTMVKNGEHWNPELA

SEQ ID NO: 508958 - protein, 419 aa, unidentified
MSFKILKNNCCGLDVHKTWIFACIGITDSHRRTEYKHARFSSFTKGLQELCDWLAKYNCTDVCMESTGKYWIPVFNVLEKNNIWVTLSHPKYTKPQKGNKTDRKDAKWICDLYMCGMVKPSFIPPADIRQLRDLVRYRFKLTCMITSEKNRAHNCLTISNFKLDEVFSDIFGKSSRSITEQILQHPGETFDVAQFVDGRCKTPIEEIQAAVDGALSTEQAVKLRQCLNHIDELEKHQAEIEREIFRLSDKYEEVLNLIRTVPGFDKNPMTAIQVLSEIGGDMSVFPTAKNLVSWAGCCPRNDQSNQKIKSTRISRAGSYFKPVLVQVANALIKSKKHPEFTTRYRRIKARRGHKKAIIAICRMILTAIWHILTDLKPYTTEGFLESRPVNDSKILTTSQALNLLKQRGYVIKDDIVSVP

SEQ ID NO: 508959 - protein, 380 aa, unidentified
MKIIGCDFHPAVQQIAVFDRETGEYSEHRLSNGDGEAERFYRALSEPCLIGIEACGNSHWFIDLLERLGHEVRVGDAAKIRASYVRKQKTDKRDAGHILRLLLEKRFPQLWTPSRQQRDQRQLLIHRHKLVQMRARVKNGLQHLALNQGVQRKDKLWNKAGQKMLNALPLEGWTAVRRQDSLALLIQLDEQIGQLDKAVEQAADSDPRASLLLQQKGVGPITALAFALTIGDVSRFEHSNQVASYLGLIPAEYTSSNKRRLGSISKQGNGFLRMLLVEAAQTVTRLDPQFHQHYVHLCRNKPKAVAKVAAARKLAVRLYWMLRTEQEVQKAVLIGSSSGVPLVGESQTEELIERSRIQQRAGSAGNDGKRKPRVSPIPSA

SEQ ID NO: 508960 - protein, 323 aa, unidentified
MQTPSAVLNIGADVAKDAIVVACSEGSFPVREVANQRPAVLALLKGLPAGSRIGVESTGTYHELFAEAAHQLGFLVFLLNPKDTHHYAKAVGLRGKTDRVDAELIARMVAHEHTKLHTWIPPTPQQREIDRLIKRRATLISLREAVAMSLYDLGEFTADLKALRTRFNQLIARIDLRVKALVEASPERKQNFTRLCTITGVGPVVGTALVNTLERVPVKSADAFVAFTGLDPRPDDSGQHRGKRRLSKRGPAELRRLLYLAALSAVKTKPWRQLYEHYRARGLSSTAALVILARRIARTAWSIYTYKTEFDPARLTNPVLRTH

SEQ ID NO: 508961 - protein, 394 aa, unidentified
MEKGFIGVDISKDTFSVAGLDGEGKECFSGSYSMDSEGFCKFLEIVTVHCLDRQKVLVGMESTGCYHINLFSFLTSQGIQAMVINALLIANFAKRSLRKTKTDKKDARTIARFLMENREEISQLSLSPDLQDLRDLARERESVSHLITATKAEIKRVLRTTFPELESVGDLFTRSMLGFLKEYPSARLVKMAKLKNLAKVLNQPRVGNKLSFSVEDILRAAHSSIATVSPAKEVILQGKIATLLHLQERLEELTKLLTDFCKATRVENWKILRSIKGVGPKTAVPFLAEMGSIENFSSHRKLIAFAGMDPSVCQSGKYIGKSKLSKRGNRHLRRAIYLMTAAVVSQNAFFKAYFLRRKKEGLVPQKALLATAHKLIRVIFAMLSHRTYFQPKMA

SEQ ID NO: 508962 - protein, 354 aa, unidentified
MQNDRQSSETVILGVDTHLDIHVGAVISQAGKLLGTHIIQTNQAGYLELLDWARSFGSLERAGIEGTGTYGAALTRYLIKNSIYVVEVNRPDRSKRRLEGKSDPLDAENAARTVLSGSSKAIPKMQSGACEALRIISVARRSAVKACTQAINQLRALLVSAPQDVRDKLWKSKPHECVTACINSEVSEHSSLRIALCSTLRSLAKRWMALTEELNELDESLDKLTRKYASNLRSQFGVGPQTAATLLAVAGDNPERLKNEAALASLCGVNPLPASSGKTVRHRLNRGGSREANNALWTIALVRMRSDPRTRIYVDRRTGEGLSTKEILRCLKRYIVRELYPLILSDLAYANRRS

SEQ ID NO: 508963 - protein, 347 aa, unidentified
MNKNWFIGIDVSKKMLDASIFVAGEVINRFPHIQVRNDKEGFKKLLRWAKERGIKSHDVLIGLEFTGYYSDALEQFLTQKKLCYTMLPTTVVKHYQRGTRDKNDKTDSAKIADYLFRFQDTECIKQRVLPSKAMQELKALRSERKFYVRHRTDCENRQKVAKSKDEQKNLQKLIDLYNKEIELIEQKMAEVVTSDEEIYLTYTRLLTIPGVGPVNAINTIANTQNFTAFETARQYARYVGVAPSEHSSGTSVRWRGRPLPHCDLQAKADLSMAAMRAVEFSFEMSMYYERKLGNRTEDKDVKRKALNAVKFKLIRQMFSIAKQHRNFKSLEQLQTKVERHSTEQQVN

SEQ ID NO: 508964 - protein, 412 aa, unidentified
MQTLIERGCGLDVHQATVVACLLIVRKDGKVQKEMRTFGTATRELVGLRAWLLSEGCTHVAMESTGVYWKPIYAILEGALEIVVANAQHIKKVPGRKTDVKDAEWIADLLCHGLLRSSFVPPKPIRELRDLMRYRRKLVESQAAERNRLLKVLETANIKLANVATDVFGMSGRLMLRALIEGKATPQEMAELAKGLLRKKIPELQLALEGKLEEHHRFLLELQLQRLEAAEKDLAALEQRIRQKLEPYAAQLALLDEIPGVDWTLAAVIIAELGVDMTVFGNVSQLASWAGVCPGNNESAGKRKSSRIPSGNVYLKSGLVEAANAAARAKGTYLRDKFFRLKARRGYKRAVVAIAHKILVAIYHMLSQQVSYNDLGDLYLDKLNKNHLTRNLVHRLERLGYAVTLTLQQKAA

SEQ ID NO: 508965 - protein, 329 aa, unidentified
MDRQYVGIDFHRRRSVIVRLNSAGERLAVARVANDPFEFASAIAAAGDAPAVVIKATYGWYWVVDLLQDLGATVHLANPKALNWGDRRVKNDVVDATDLADMLRMGRLAHAWIAPAAIRELRELVRYRAKLVQLRSGLKAQVHAVMAKEGVLPGTLDMFCQRGELQLDAMDLGRNYAVRVQSLRELIGHYDRDIVTLERDIHQHLRGDRGYQAVQAINGVGRTIAAILVAEIGDVSRFPTPAHLCSWAGLTPRHHESDTKTRRGKISKQGSRLLRWALIEGISRYHGGDVLKHSYQRIAKRRGTNKARVAVGLPVGDHPSMLLAPMASS

SEQ ID NO: 508966 - protein, 342 aa, unidentified
MSTDYDGRQYVGIDLHRRRSVIVRMTPEGQQLGWSRIDNDPVALGLELAKAGPDPEVVLEATYGWYWAVDALQATGARVHLAHPLGVKGFAYRRVKNDVRDAADLCDLLRMGRLPEAYIASRGERELRELVRHRAKLVALRTGLKAQVHGVLAKQGLLPPCSDLFGVAGMAWLRAAPLDLVYRQRVVSLLELINAYDAEVEMFRTMIAHRFRGHRGYRVIQQISGIGPTFAAIFIAEIGDITRFGRPQKLTCWAGLTPRHRESDTTVRRGPITKQGSTLVRWAAIEACQRTRPGTKLATDRARIIAARGRNIGVVAAARKLLTYVYYGLRDGEIRALAKGAA

SEQ ID NO: 508967 - protein, 423 aa, unidentified
MVTAGPEGRPGMDVVAERCAGLDVHRDTVVATTRVPGQRRGSRRGETRTFATTIAGLERLADWLGEQAVTLVGMEATGVYWKPVFAVLETRVECWLLNAQHLHNVPGRKTDVADSAWIAQLVEHGLVRPSFVPPPLVRDLRDLTRLRTAITQERTRAIQRLEKVMQDAGIKLTSVASQAYSKTARAILSALLAGVCDPVELAGLAKGRLRSKNARLVEALANRFRVTHHGVLVARLLAHIDVLDEQLVALDHKITALVAPVGDLVELICTIPGVSANTAHVLLAECGWDMSVFPTAAHLASWAGICPGNNASGGKRFSGATRPGSRWLRKALTQAAQAAARSKGTYLAAHHAQIRGRRGHAKAIGATRHDILVAFWHIVRDGVPFQELGPDWAARRFSVEHRANRLVRQLQALGMTVTIEPAP

SEQ ID NO: 508968 - protein, 387 aa, unidentified
MFGPLDKRAKKEIRTFGTTTKELLQLQDWLAEYNCTDVAMESTGVYWKPVWNILEGSFHLWLANPQRIKNVPGRKTDMKDAVWIAQLLRCGLIEASFVPPEDIRDLRDLTRYRRKLLGDATAEKNRVHRILQDANIKLTTYVSDIFGVSGRALLESLVNGEVLEPHEVERMVKTQLKRKVPQLIDALNGRIRFHHRKMIQKHLKHLAYLEKEIEVLESDITQLLFPYQEAVDLLVTIPGIQKDAAAGILAEIGCDMTMFPSEGHLASWAGVSPGNNESAGKKKSTRTRNGNKGLKSILCQAAWAAAKAKNSRLSSFYHRLVKRRGPKKANMAVSHLLLRIIYQMLLRNEPYSELGWDYLPQKEKSVDYWVQRIKTLGYNVELQPDIA

SEQ ID NO: 508969 - protein, 348 aa, unidentified
MTISMIGLDTAKHVFQVHGVDAAGKAALKRKLRREEVIPFFEQQERCTVVLEACGAGHHWARMLTQLGHEAKLLAPEAARPFVKKGKKNDAADAAALCAAASQPEIKFVPVKSLEQQGVLALHSVRTLLVKQQTMLANAMRGLAAEFGLVVAKGVHRLDELEAQVQAEASMPATAKQAFAELHGHSQAAATRIAGLEAQIVAHARQDATARRLATIPGIGPITASLITATVGDTIGSFKSARHFAAWLGLVPRQHSTGGKTRLGRITKAGNSEIRRLLVLGATSMVFRAGQWNSTAGAWLRGVLERRPVRLATVALANKMARIAWAVMTRGETYQAKGRAPAAAAAVA

SEQ ID NO: 508970 - protein, 395 aa, unidentified
MQVMNPVCCGIDVHQKSIVCCILDGPLTSNEPKKYQTSFGTTTKELKAALDWLLEHQVTHVFFESTGQYWIPLFNIFSDSDLELVLANPQHIKNVPGRKTDVKDAEWIAQLGRCGLINQSYIPSQEVLQLRYLTRYRISVKQRLTQIKNHIHVILQRGNIKITSYLSDIFSKTGQALLTLFINGEVINEDNVESCIHGRIKASTRQLIEAMEGKLSTVDRFLIKECIEEYKLQKKISDELNKEINEYILDHFPEEYQLLLTIPGISDNCCATILAEIGPNVEAFKTDKNLASWAGMCPGSNESAGVKKSSHTTQGNKYLKQALVMSVLSVQRAKEETFLLFYQRISSRGSKMKAIIACGHKMLRIIYKILQSHRPYNSQKALGLRQQTNALSLTI

SEQ ID NO: 508971 - protein, 338 aa, unidentified
MEYGAIDLHARQSLIRIVTAEGMVVLERTIPTRAEKFHEVFGDRAPLRVLVESSTESEWVAQCLERCGQEVVVADPNYALMYGHRGRHIKTDRRDVAALAEANRLGLFRAVHRVSAAQRQRRRTLRIREHLVRTRTQLINLLRAQLRQEGYRLPSGAAEAAVARYRRLSVPEAVTTALTPLITVLDSLAPVLDAADAEATTTAAADPVATRLMTVPGVGPITALTFRAALDDVTRFADAKAVSAYLGVVPREDSSGGRRRQGAITKVGPSSVRTLLVQAAWTVWRQRRRRTALHAWVEQLAARRGRRIAIVALARRLARILFALWRDGTVYQAVMLPV

SEQ ID NO: 508972 - protein, 346 aa, unidentified
MQPVIGCDAHKKFSVFVSIDQDGKASRPVRVDHDHSLYCEFLRTLPPGSDIAVEATGHWYWIVDAMEAAGHHPHLANPFEAKRRMAKSNKTDALDAKGLAILLHCGTLPESWIPPGALRDQRELLRTRMALRDLRTVLKHRIYAAVDRYGLHPEAISDLFGAKGRAYLAAILKQLPPATAQMTATQLGSIDQLEERIAVIEQSIAERLKSSPEIRLLRTIPGLGPILAPLVWLEIGNVERFPRAEHLASYAGLVPRIIASGGHIRHGGTCRNVNHYLKWAFVEAANIAIRMKACRHQHIGLLYQRLFPAKGHGRAAVAVARHLAEAAYWVLRKRQSYRAPQPHVAG

SEQ ID NO: 508973 - protein, 370 aa, unidentified
MSYRNTTHYVGLDVHKATITIAVAEAGRESPRVVATVPHEMKALGKVLSKFGPRPSVHCCYEAGPTGFGLARWLRAAGWGCDVIAPSLVPKKSGERIKTDRRDAARLAQSHRSGDLVAVFIPDETTEAIRDLERARDDAKKAERVVRHQLSKFLLRQGRHYPGKTAWNDAHRAWVAAQEFVEPAQRYVLADALAAVESASLRVAQLTDRLRELTETWRLAPLVKALQALRGVEFVTAITLAAEVGDFRRFATAGDFMGYVGLIPTEHTSGAQRRGGPITKTGNSHVRRLLVESAWHYRRKPRLSKAVRERSVGLSPKVCAIAWKAQSRLHNRLCRLRGRGKNPAEAVTAVARELAGFVWAIAREEVLLAS

SEQ ID NO: 508974 - protein, 358 aa, unidentified
MLSLKLKSDYVRTPEDWPPAAVSAAGREITRSHARQMVAIREAKRVALKAGKPSVQLICEASGGYEQPLLESLAEQELAVTLVQAVRVRQYARAAGILAKTDRIDARVLAAFGAALRPKATPPLSRQQKRLRELESQRRHLSQVLRAEENRLAQLQCTELRSLGRSLINKIQKQIDAIEECISSLIAQDQTLCTKAQKLTAITGVGARTAALVLAQMPELGQLNRRQAAALAGLAPFNHDSGSLRGRRAIFGGRRALRSGLYMAALAAARYNPILSRFYQRLRAKGKPHQLALTAVMRKLTARPQSHPQAFRAPLENNTVTYDVCAEHCTGGCCQPLLRLGSARALACWRAPLAIAVQ

SEQ ID NO: 508975 - protein, 339 aa, unidentified
MLYVGIDIAKNKHDVTALNVPGKTVLKPLTFSNNKAGFELLDLSLRQLNQDCLIALENTGHYAFNLLNFLHEQGYKVYTYTPLLIKEFAKSLSLRKTKTDKKDAHGIALKLLSDPNREQFQHDNRQVELKILTRHIHRLKKKQSDWKVQYTRCLDIIFPELDKIVEKHSEYTYQLLTCYPNPQKRLEAGFDKLIEIKRLTASKIQDILSVAPRSIGTTSPAREFEIIKHYKRLIDKAETCVNDLMAEFNSVITTVTGIENRLGAVILAEIRNIHAFDNPAQLQAFAGLDSSIYQSGQIDLAGRMIKRGSPHLRWALIQAAKACPRFSPAFKAYLKTKLE

SEQ ID NO: 508976 - protein, 427 aa, unidentified
MDYTQNCKIEQVKESTLVIGIDVGSETHYARAFDWRGRELTKKVFCFSSDIEGFSAFYEWAGQISNRTAKTDIMIGCEPTGHYWYTLEAFLKKNGLRLVFVNPASVKRVKELDDNSPKKTDRKDPKVIAKLVIDGRFIEPYVPEGIYADLREVVSSRDRILKELNCCSNRIQRWLSIYFPEYKKVYKKFDSESGMRVLEEAPLPCDIIALGCDKIVQIWRRYKLRAVGMKRAKTLVEAAHNSVGKHGGNGARVELKMLLEDYRVKSLQLEKVTQSMQSLLMQVPHIEKLLAVKGVGVVTAAGFVSEVGDIGRFDSPKQIQKLAGFEIVENSSGKHNGKKTISKRGRRKLRKILFQVVLPLIRSNMEFRNVYDYYTTRVKNPLKGRQAIIAVACKLIRIFYAILSKGVDYDPSKLLSDIRRPQDYIAA

SEQ ID NO: 508977 - protein, 340 aa, unidentified
MQKVVKFYLGIDVSKSWFDLSVMIVIDHQKQPILTERFDNTADGIKQLDKWLNSQQVPFSENSLLVIENTGVYHRLIWEYCSSHNLPIHIGNATHIKWSHGIARGKNDKVDSRRLCSYAYKNADELRATPVFNPVFIKLKDMMTSRSRLISHANSIKVYLGELKLSNSKEIQKIMEQAHKAAVDGLKKSIKHLDTQILQIIKEDDHIQKNYQLLTSVPGIGHITAVYIICCTNNFSSKIKGKQLASYSGVVPFDNTSGTSIKGRSKVHKMANKDLKKLLHLCALVAIKNYPEFKQYYERKKAEGKHTMAIINAIRNKLVLRAVAVINNQKEYVDNYKKAA

SEQ ID NO: 508978 - protein, 455 aa, unidentified
MVVVHPDAGAIDAGSKTHFAAVPAGRDPEKRTVREFGAWTSDLWEMGKWFKLCGIKTVVLQSTGVYWIAIQEVLEKFGIEVFVVNARGTKNLPGRKSDVQECQWLMKLHTYGLLRNSFRPPEEVRGVRTLWRHRERLVEDAGRAIQQMQKALLIMNIQLPHAISDLSGVTGMAIIRAILEGERDPRKLAQLRDRRIKASEEEIVQSLQGHWRNDVLFELKQVVEGYDFIEKQMLECDQQVCRYLVGQVEKRPAVPAGEAEGSEKGGKQKRGKRGKRKRTRSRWKDPVGFDLRTVLHRLFGVDLTRIDGIDVMTALKIYTELGPDLRAFPDEGAFCSWLELVPRRDITGGKVIRQKARQSKNRVAGALRMSAESLSESDSYLGARYRRMRGHKDGKPTVKAMAHYLARLVYRMLTKGEEYVDRGAKYFEKKREEREMIGLQRKAAQLGLKLVPANS

SEQ ID NO: 508979 - protein, 340 aa, unidentified
MLYVGLDVHKEFCQASILNEKGFEEDNLRFPTTRRGLESFLDRFEDASFVLESTGVWEFVYEIIEEKGFPVKLAHPLKVRAIAEASVKTDKVDARTLAKLLRLDMVPESYIPPKEIRDLRRLTRLRSYLTQTNTGLKNRTHAELLTRGIHRPDDLVKPFTQKSNDWMRSLDIPGVDVQLNMIEAVQGQISLVNEMIRREYDRREEVRNLTSIPGIGIYSALVIFAEIGDVRRFPDPEHLCSYAGLTPTVSQSASSVHYGGISKEGSKQLRWILTEVVHSHHRFEPSSNLSRFYDKIARKRGKQKAAMAAARKLLHIIYWMMLTGETYHSHGFNPVLKPAA

SEQ ID NO: 508980 - protein, 411 aa, unidentified
MEIVHTRCCGLDVHKKTVVACVLISQEDGLIERQVRTFKTMTADLLALADWLSSLNVTHVALESTGVYWRPVYNVLEDDQRTLLLVNPQHMRAVPGKKTDVKDAEWLADLLRHGLLRASFIPPAPIRVVRELTRYRKTAVQSRADEANRLQKTLEGANIKLASVATDVLGMSGRAMFAALLDGERDPDVLADLARGKLRAKLPQLRQALVGRVQPHHLVLISQILAHIDFLEEAIAQVQAEIERCLPPFDEALELVQSIPGIKEVAATAILAEIGTDMSRFPSAGHLSSWAGLCPTNKESAGKRMKGPANHGNVWLRAIMGEVAWASIRTKASYFYAQYHRLARRRGKEKAAIAVAHSLLVVIYHVLRTGQPYQELGVDYFDRLDSARVERHHVRRLEQLGFTVTLTPTAA

SEQ ID NO: 508981 - protein, 394 aa, unidentified
MEDVLRSCCAGLDIHQKVIVACVIRSVEGKKCPEKFFSQFDTTTRGLLELSDWLTSYEVTHISMESTGVYWKCVWRILQNNFELQLANPRHIKNIPGKKTDMKDAEWIARLTRLGVVPTSFVPPEPIQELRDITRYRKHLTEDLNREKNRGHMVLQNAGIKLTSVIKDIYGKSGRALLYALVEGKEINEALILECVYTTLRRKVPQLIEALTGFMTVYYRKMLALHLKQIECLEKQLRVTEELIDEYLFPYEEYVEQLEEILGINCKTAAVVLAEIGIDMSVFPTESHLASWASVSPGNNQSAGKTRSRRVGKGNSYLKKVLSQGALAVSQGKKNRIQAFFFRIRRNAGHKKAVVATVHLVLRIIYHMFSKQSQYKELGEKYLQNQKVVVPAKY

SEQ ID NO: 508982 - protein, 337 aa, unidentified
MKSYLFIGIDISKATLDVCILSASGSMEIHYHEFSNSLKGFIQLLKWLKEKSERVAVEDWRVCMENTGIYSLELNCFLHEKGIWQSMENALQIKRSMGVVRGKTDKADCKTIALYAYRFYDKLKPYVLPNRTLLRLRVLFSQRERLVSIHSQLLVGNQSMKGYAKELVKDIEKQNQTLLKNLADQIKTIDKSLKDCLQQDEELQRKAKLIQSVPGIGQQTASYLLILSRGMQSFATAREFACYSGCAPFPHTSGTSIRGKTKVHFIANKKMKMLLHMAAMNAITFNEEIKAYYQRKVAEGKNPMSVLNAVRFKLICRIFSVVKRNEEFQKDYKKIAA

SEQ ID NO: 508983 - protein, 344 aa, unidentified
MNKITVIGLDLAKNVFQVHGVDDAGQVVCRKKLRRAQVLAFFARLRPCLIGMEACGGMHYWSRKLSELGHTVRPIAAGFIKPYLKSNKSDALDAEAICEAVQRPTMRFVTPKSPEQQAVLHLHHSRQLLVGQRTALINHLRGMLLEFGITVPVGPNTLRRQLPQILEDGDNELPMVTRHLLATLSEQFHTLDERVETLEDQIKAWHRSNEDSRRLAEIPGIGMMTATALAAAVGDARAFRNGRELAAWLGLVPRQASSGGRQRLLGISKRGDRYLRTLVIHGARAVVRYANAAIKAGKAPKNPWLAQLLTRRHPNVAAVALANRNVRVVWALLTRQERYQPQWA

SEQ ID NO: 508984 - protein, 386 aa, unidentified
MTHLNNVSQSNIDYDQTLVLALELSSKSWVLAAQVPGLPQTKAKRTIVPDKNALLEAIATYRSRAAAAGHSINRVIAVYEAGWCGFWLARWLTTHGIEVHVVQPSSVAVDRRMRRAKSDGIDAELLLRTLLAWIRGEPRVCSMVPIPDEADEDARRCVRERTELVSERVGLVNRVGAVLATLGADGYNPLLLSRRRRLAELRTGLGDPLPPNALAKIERLLTRLELVLAQIAELERERDAVGEAEAPDHAGKMIQQLTRLRGIGVQSATVLVREAFVRRFANGKALGSYAGLTSTPYSSGGVDREQGIGKAGNRRLRTVMVELAWLWQRYQPGAAQVTWFRERVGSTGRRVRKVMVVALARKLLIALWRFAVDGVMPEGAVLKPST

SEQ ID NO: 508985 - protein, 345 aa, unidentified
MKYFAGIDVSMEESSICVLDPLGAVVFEGKVATEPEAIAEALSKADCNAAKIGLEAGALSPWLCHELRALGYEVICLDCRQVHQFLKVKRNKTDRSDAKGIAEILRLGAEAPVHVKSYDSHAQRALLKTHIELVHIRQDLENTIRGILKPFGLRLPRGNRPSLPERVRELCRDFPELEAATASLLRCRSRVQEELSLVDKKLAAKVRGDNDCQRLMTVPSIGPITAVAFKSMVDDHGRFAKARAVGAYVGITPRRYQSGEVNYMGRISKRGDKMMRTLLYEAATVLLTVVKRFSSLKAWGLKLAKRIGMKKARVAVARKLAVIMAAILQDGTEFCWNNTTETTKA

SEQ ID NO: 508986 - protein, 323 aa, unidentified
MSSPSPAINIGIDVAKATLDIAVHETHSHWTSKHEFTEFATLIKQLRSLTPTRIILEASGGLEHLLVSYLATAGLPVIVINPRQVRDFARATGQLAKTDRLDAFVLARLGATLQPAVRPLKSAETQALEALVNRRAQLVEMLTAERLRLQQAQQQRRQAIVADLKAHISWLKKRLKQCEDDLSQLLRSSPLWRETDRRLQSVPGVGPITSLVLIAELPELGQFPNKQLVALCGLAPHARDSGKWHGKRTTRGGRARVRTALYMAALVATKHNLVIKTFYQRLLRAGKEKKVALTACMRKLLVILNAMFRNQTSWQTPQLVPGA

SEQ ID NO: 508987 - protein, 369 aa, unidentified
MEKTIKNIGLDVHKNSISIGIADEGRDGEVRYYGKIDNDMNQLDKVVRKLISKGAVLRFVYEAGPCGYTIYRYLTKNAMDCVVIAPSKIPQQSGNRIKNDRRDCLSLARLHRAGELTPVHVPTEEDEALRDLVRAREDATRAVRTAKQQLGAFLLRHDIVYSGRTKWTKAHFNWLADIAMPHPAQQIVFQEYIDTVTNCCNRVQRLTEQIRFQSGQSRQHELIEALQSMRGISLIIAATIAAELSDLTRFENPEKLMAFVGLIPSEHSSGDRVSKGSITKTGNGHVRRALVAAAHAYRFPARKSRAIRKRQEDLPEGVIDISWKAQCRLCTRYQYLTAKGKNVNVTKTAIAREIAGFSWAIAQELSKAA

SEQ ID NO: 508988 - protein, 357 aa, unidentified
MKGGLMSSVKNLGELVDLVIGVDTHEQFHVAAAVDAVTCGVLDTIKIPADPAGYQQLINWANGHPGNHGWAIEGTNSHGIGLTRALAGELVVEVDRPVRIKRRNGAKSDVIDAVRAARDALGREQLATPRAVTGDRAALQALVTARKLAVAQATDTERQLRSMVLTAPDALRSRLPNRKTAPMVTQVLKLRSRSDDDPLTTILLPICKELAQRARSLRLYSKTLERQILALVKSWRPDLLDLQGVGPIVAANLLLVWSHPGRVHSEAAFAMISGTAPIPATSGTQQTRHRLNRSGDRHLNQAIHTIVLCRQRHDPATKTYIERRTTEGKTKREIRRCLKRYVARQTFRILEKGLDET

SEQ ID NO: 508989 - protein, 402 aa, unidentified
MNAVGIDVSKGKSMVAIMRPFGEIVSTPFEIKHTTRDINSLVELIKSVEGESRIVMEHTGRYYEVLAHQLSEANLFVSAINPKLIKDFDNDSLRKVKSDKADAVKIARYALDKWQNLKQYSVMDELRNQLKTMNRQFGFYMKHKTAMKNNLIGILDQTYPGVNTYFDSPARSDGSQKWVDFASTYWHVDCVRKMSQNAFVDHYQNWCKRKKYNFSKSKAEEIYGKAKELVPVLPKDDITKLIIKQAVDQLNSASITVESLRTLMNNTAAKLPEYPIVMAMKGVGPSLGPQLIAEIGDVSRFTHKGAITAFAGVDPGINESGTYAQKSVPTSKRGSSDLRKTLFQVMDTLIKTKPQDDAVYQFLDKKRAQGKPYYVYMTAGANKFLRIYYGRVKEYLSSLPKS

SEQ ID NO: 508990 - protein, 316 aa, unidentified
MQTTVLYIGADVAKAELVISVAGQRPCIIANTATGITRWLKTVSEHALIAMESTGSYHALLAQLAYLHGLTVYILNARDVFYYARALGSRAKTDNIDAEVIVRYLQEHQSSLQAWQPLTPEQQQLRQLLSRRAQVITHQSALRQAFTDVDLSGVDTQALQHGFDVVLASMDQQIQHLIANDPQLERGYQRLRSVSGIGQQTAALLTELLNRIPFANADALVAYSGLDPRPNDSGAKRGRRRISKRGPALLRRQLYLAAMSACRSAACKPLYEAYRARGLAGTESIVILARKLLRIAYAVWKSGQAFDPSKLSPKTA

SEQ ID NO: 508991 - protein, 324 aa, unidentified
MPQSHAVNVGVDVGQEQLVVAVDGEAETWTVANDAVGHDALIARLRPRVPTRIVLEATGGYERAVVAALGSAALPVIVVNARHVRDFARAPGQLAKTDAIDAQLIARFAAKIEPPVRPLADAALAELDALMLRRRQLIEMLVMERIRLHQAVGRPQAAARLSLRKHVRYLEQELGRTDRELGTLIEASPVWRVQDALLQSVPGVGPTTARTLLAELPELGRLSRQAIAKLAGIAPLNADSGKWRGQRRIRGGRAVVRSALYMAALVGARHNPMIRAFYQRLVARGKAKKVALIACARKLLTLLNHLLATGAHWHAPPVAPQPLA

SEQ ID NO: 508992 - protein, 438 aa, unidentified
MSNKVIFNLDELFISVGIDVGADFSWMSIALPNQQFVGKPYKILHNSIDSLTTAVSKIKEAEELYSLESRIFLESTGIYHYPLFCYLHDKGFNCSVINPIITKNSTNINIRKVHNDRFDSKKAALVGLKPDLKVSLMPSDLALNCRNLCREYYDLMDNRSAYVNKLQGELRMAFPQYLGIFSKVTINTSLTLLETYTSPSAFLKADKQEIIDIIKSTARFGLTYAQNKYNAIIQAATDANQFGYIIDSNIKRIRLYISFIRKYDEEINSILESLHELVDANEDSDFVKQIHLIETFKGAGFLSAVSIMGEIGDFSAFSKPKQLFAYFGLDPAVKQSGKFEGTKVQMSKRGSAIARRVIHTLTLQSISISRNREAKNPVLREYYLKKCDSKPKLVAMGAVSHKVCNMIFAILRDNKPFKIIAPQEHIKQYNSAKCDIAA

SEQ ID NO: 508993 - protein, 315 aa, unidentified
MTQTSITTAGIDTSKAKLDIAVHGRTERWQVANALPGWRALAASLAKAGVTRVGIEATGGYERGVAEHLRSAGFTVLVLQPLQVKAFGQVHLRRAKNDALDAILIAACAAALDPPEVAPDPRLTELADYLTFLEQIEEDIRRFKTRLEHIDEPALRRLVNGDIARLKARRSTQMRDIAKRLRAYDDLAKRLKLVLSIPGIGERTALAIVIRMPELGRVSREEVAALAGLAPFDADSGQHRGQRKIAGGRSRLRRSLFAAALPAAFRWNNALIALYARLMAKGKAHNAALIACARKLLIYANTVVQRGTPWTEKAA

SEQ ID NO: 508994 - protein, 341 aa, unidentified
MSDYSYFCGIDLAKNHFSLHAVDQNGKVILHKSVTRSKLLTTIANMPLMRIGVEACGGAHYWARTLNKLGHDARIMAVKYVIPYRTKGKNDLNDAVAICEAVQRPSTRFVPVKSPEQQAILSVHRMREHWVRERTALMNRMRALLFEFGLIIPVGRSSLMKHVPLMLEDAENELPHLARTVIADAYHHLGELNQRIADTEQVFESFAKVSANVQRVMKVRGIGPQTATAILASIGNGSQFDKSRDFSAWLGLVPKQYSTGGKPRLGRITKHGDKYLRTLLVHGARTVIANLGDKQDKLSQWCRGVLERRGMNRAIVALAAKNARIIWSLLHNQTEYENYAA

SEQ ID NO: 508995 - protein, 413 aa, unidentified
MRRLIDRCAGIDVGQALLVVCVRVVTEQGELDEEVRSFGATTPDLEALRDWLTAVGVTHVAMESTGVYWKAPYYMLEDDFEVMLVNAAHLKHVPGRKTDVIDAQWIAEILSYGLLRPSFVPPRPFRELRDLTRYRKALTRARTGEVNRLHKVLEDAGVKLATVATDVMGVSGREMMRALIGGVADPQVLAELARARLRAKLPELRRALTARFREHHAFLLARMLAHIEALEHDIEVVSERIAELIEPWQGQVMILDSITGVGSRAAEVILAEIGPDMSRFPTAGHLASWAGRCPGQRESAGRRGSAKPRKGSPWLADVLTECAWAAVKTKDTYLSAYYRQVMRRQGKQKAIVAVTHKILVIAWHLLSSGALYDDPGAAAVRKTTEEQQRRRAIRQLEALGLEVTVRLREGDAA

SEQ ID NO: 508996 - protein, 343 aa, unidentified
MQAITTVGLDIAKSVFQVHGVDAEGGVVIRRQLKRRYVLAFFQKLPPCLVGIEACASSHHWSRELKALGHNVRLMPPAYVKPYVKRQKNDAADAEAICEAVTRANMRFVATKTPEPQSCLMLHRTRHLFIRQQTAVINVIRAHLAEFGIVAPVGRKGVEELLDVVADPSDKRLPEVARGCLAALGTQLRSLKAQILGFDRMIMAWHRSNETSMRLDEAPGIGPVLATALVATVADPKVFRSGRNFSAWIGLVPKQHSSGGKDRLGSISKQGDRYLRSLFMAGALAVIRYAKIHGTKHRPWLTALLARRPTKVAAIALANKIARMVWAMMARGEHYKEPVALAA

SEQ ID NO: 508997 - protein, 400 aa, unidentified
MLLFFEVITMIFVGIDVAKDTHYAAVSDDSGAVLVKPFAFQNNAEGFCLLLKKLSEFDRSKLLIGLESTGIYSENLICFLYESGFRLAVINPIQTATLRKTAIRKTKTDKVDTMLIIKSLMVNSYRLYSQRDADSLKLRTLCRFRQNLKNSKARLKIQLAGYVNLVFPEFGKFFKSGIHIAASYALLKKYSSPKEIAALRTSTLCTLLSNASHGRFGKDTAEALKSLALSSVGVKNPYISIQIAQTIAQIELLEQQIKDLNSAIEEAMESINSVLMTVPGIGAVNAACILGEIGDIKRFSKPCKLLAYAGLDPTVRQSGQFTAKSTRMSKRGSALLRFALINSAWQLTLNDTTFKAYYDLKRSQGLNHYGALGHVAHKLTRVIFKLLTSDTPFNPAKLVA

SEQ ID NO: 508998 - protein, 345 aa, unidentified
MNRIIKIGMDVHTTNYTLCIFEPSFEHDGTVHCITQVKPEVKNIIHVIETFKKKHENEELNIVCGYEVGCLGYSLYHELKEKGVKCVILAPTTMKTEKGGRKLKNDYRDAKMIAECLAYGGYSAVHVPTELDNSVKEFIRMRDDIKENLKSIKQQIIAFLTRNGKQFEGKSFWTRKHIDWINTVSFSEPLLQDTLKEYMIEYNHLFDRVETLDKQIEEISLKEEYVEKVQQLQCLIGIKTHTALSLIVETSDFNRFKKGNMYSAYLGLIPGDDSSGGQENKLGITKAGNSHLRKLLVEAAQGYTRGKVGFKSKVLKSRQENCSSEVVAYADRANERLRRKYYRMT

SEQ ID NO: 508999 - protein, 511 aa, unidentified
MDVIVERCAGLDVHRDSVVAAVRVPGTGKSRRRRAQQTRTFGTTIAQLEQLADWLAGFAVSLVGMEATGVYWKPVFWVLERRFECWLINAEHLHNVPGRKSDVIDSRWLCELLELGLVRPSFVPPPEIRRLRDLTRLRSTQAEERTRAIQRLEKVLQDAGIKLTSVASKTYSVSARAMLEALLGGVSDPARLAELAKGRLRAKIPQLTEALANRFDTTHHGVLVAGLLAHIDALDQAVATLDARIASATDAELIDLLSTIPGVKRHIAEVLIAECGLDMSVFGSAQRLVSWAAICPDTNQSGHRRRPGKTRHGNPWLRTALTQAAHAAARSKNTYLASHYRQIRGRRGDAKATGATHHDILIAYYHIVSDRVPDRELGPDWLARRHSPEHRTRRLVKQLEALGHTVTLEAAAQSTDPGTTTTARRACGPTARAWSQPPPNPAGIHTTGDRRFESVRGLPNSSCLAAVSVFRGGDDWRFRRPPSVHQRPPLDRGGADALEQRPAAHRRERSH

SEQ ID NO: 509000 - protein, 461 aa, unidentified
MSRKRPAGKQKGSVQKKVDWKALEIMHPDAAGIDVGGSEHWVAVSPDRDPDPVRRFGCFTADLREMGQWLLQKGVRSVAMQSTGVYWMPVFEVLEQHGLEVYLVNAQHTKNVPGRKSDVQECQWLLKLHAFGLLNNSFQPTDEIRIARTLWRQRGNLVAEASSVIQRMQKVLTEMNVQLSNVLSDLSGMSGMTIIGAILEGERDPWALAALVQPEVRASPEDIAKSLEGNWRQELLFVLRQHVELYRIYQAKITDCDLQLRKHLESLGSKLDLKTQPIGSRPKGKKNSRNAPSFDLRTELYRITGIDWAQINGIDVLTAQTVIAEAGADLSAFPSEKQFASWLGLCPTNEQSGGKILNRRTRKVVNRATVAFRSAAMTLLRSQSYLGAQYRRLRTRLGAPKAITAMARKLACLFYRLIKHGQQYVDKGTEYYEARYREQQIRSLAKRAQKLGLQLVIPKTA

SEQ ID NO: 509001 - protein, 414 aa, unidentified
MEQKLIYLGIDWADDHHDIVITDDSAKTLNQFQIDHTPDGFDQLHANIANYQKSPADVLIAIETNRGLLVHELIRTGYTVYATNPKAVNRYKDRHVLSKAKSDILDAQALAHLLRTDRHRFKALVPLPEDYRLLDRFCGDLRKLIDEKSRIVNQTISCLKEFYPKALELFSLNSQIFIDFLKAFPDHDTLRACKKKTFLAFIKKHRYPYPGKIEELWETIQSSTLQADTVTARAGKLRLLMLLDQLENLKIHCTHYEQEIQKILDTLPESNSIQSLPGVGDRLAPELVADLGPNGKDTHHRFHCAEEIAKLSGCVPIVKQSGKWEKVSIRHACVRSLRRTFHDWAFTSLKSSTWARAYYDYHKARNQSHFTILRNLGKKWIKILFAVWSKGTTYDEALHIQNLKARNIPWAMAL

SEQ ID NO: 509002 - protein, 374 aa, unidentified
MNKFSKYVGLDTHKDTIAVAVCEANRDKARYYGEIPNTPQALEKLIKKLSPEGEVLSFCYEAGPCGYGIYRQLSALGHECEVIAPSLIPVKAGDRVKTDRRDSESLARLHRAGELTAVWVPGPEQEAIRDLTRAREDMKALARQAKQRLGAFLLRHGVSYDGGKSKWTKTHFNWLSGVKFEQPIQQIVFQEYVDSVKQLQSRVEDLEKEMEKGLTGWSLAPVVKALMALRGCKLITAMTIMAELGDLSRFDSPRQLMAFLGLVPSEHSSGNSTRRGGITKTGNGHVRRVLVEAAWCYRFPARKTAHLQRHAGMSSEAVQAIAWKAQKRLCGRYQHLLNRGKLKVQICTAIARELVGFIWAIACEVNGKKARSVI

SEQ ID NO: 509003 - protein, 337 aa, unidentified
MNLKRIGLDTSKAVFTVHGVGQDERTALRCNLKRGGLEDFFAKLPPTVVALEACGGSHHWGRRLTALGHEVRLIPPQYVKPFVKRGKNDRNDAEAISEAAARPEMTVVAVKSAEQQAGAMILSVRELLVGQRTQLVNAIRGQAAEFGVVAAKGVSNIGRLLEKIAGDTEIPQAARDMLALLGARVTELDSQINQVELQMMQQHKANPVSRMLDAVPSIGPIVALTCALTVDASQYKSARHFAASLGVTPKERSTAGRQRLGSISKQGNERLRRLLVTGAMAVIKYARPGSKTASPWLLKLLERKPRKVAAVALANKTARIIWAMISSGEAYRRQPAG

SEQ ID NO: 509004 - protein, 337 aa, unidentified
MNTQTTKQLHVGVDVSQETLDVSARHDSGEPRSGQFANTSAGHRQLITWLTKGGRSARVVLEATGVYSLDLALALDAAKRIAVMVVNPRAARKFADACLQRSSTDATMAVALQEYAARMKFVPWTPPSAAVRELRALARRIATLTEEKTRELNRRHAAGASANTPAVVRNDVAVNVRHLQRRIADLERHAVALITTAAPLQAAYQRLLSVCGIAQTTAIQLLGELLVLPADMTARQWVAHSGLDVRHVDSGRSVHKVPRISKQGNAHLRRILYMPALTAAQREPHVRTFYEQLVAAGKKPMQALVAVMRKLLHAIWGMLKTNTDFDGSKFRKLREAA

SEQ ID NO: 509005 - protein, 392 aa, unidentified
MQISVGIDIAKELHWVTAIDADGIVRLDRKLENTPAATAGLIAELTALGGTARIGLDVVGGIAGLLEAMLAEAGFALVHVPGLAVNRARQGTVGGEHKSDPRDARVIADQVRIRRDLRPIEPATELDLELRLLVGRRRDLVDAQTQRLGRMHDLLVGIFPGLERILDLTTKGPLVLLSKFVTPAELRAAGAKRLVRHLQAAGGLPKVEALAARALAAACEQTIAVPAERMTARLVKELAAEALATRARLAALDRELEALLARHPDAALIRSLPGMGAVLTAELLVEAGSFARFRSADALAAAAGIAPVLRQSGKVRFLRRPLGGNKALKRVFYQSAFCSLSHPDSRAFYDRKRREGKRHHQAVLALARRRINVLWAMLNSRQAFQPGFKMAA

SEQ ID NO: 509006 - protein, 343 aa, unidentified
MYFIGLDVHKKTISYCVKDAAGRVHQEGKVAATRRDLDQWVRVLPQPRMMAMEATIFTGWIYDYLLPHAEQVKVAHPVMLRAIAAAKKKNDTIDASKIADCLRCDFLPECHMASTEIRDRRRVLRYRNLVIKQATQMKNRVSGLLMETGVSYNKQRLHKVGYFGELMSTNEEISDAVRPLLNLSRGMIRRSAKLEYDLVSSLERDPLLKERLRRLRTVPGVGPITALTWALEIGDYTRFRSNKQAISYCGLCADEKSSADKVMRMPLSKQRNKHIQRALVEAAKLAPRNSPELALVRDRELDRGNRNRATLAVARKMVCYLLAVERRKQDFVSSGQILATSAS

SEQ ID NO: 509007 - protein, 344 aa, unidentified
MPEVTTIGLDIAKNVFHAHGADERGHALFSKKLSRGKVLDFFAAQPACTVALEACGGAHHWGRELRDMGHTVRLIPPAYVKPFVKRHKNDAVDAEAICEAAQRPNMRFVAVKSEEQQAAALVFRTRDLLVRQRTQLINAIRGHLTEYGWVAPKGPSYVAMLADLLDEEEMGSSLPPAALAMFRVMLDLLAALDDRIADLDREIARRAREDAVSRRLMTVPGVGPITATAIAALAPPAETFAKGRDFAAWLGLAPLQKSTGGKQKLGAISKMGERTLRRLLVIGSAAVIKQAARRGAPKGSWLEQMLARKPRMLVIVALANKMARIVWALLIKQEGYRAPAAVTA

SEQ ID NO: 509008 - protein, 420 aa, unidentified
MKSTKTKKVRFINKKTMITALDIGKRFHYAYFRAPNGKDIKPFIVYNFRKDFNKFWKKLCQFKREHKLEDIVIGFESSGPYAEPLFHFLRKKPVRLVQINPMHSKRLKELTGNSPNKTDKKDPRVIADVISLGHALTLIVPEGAAAHLRRLSQARERAMKRRTAALNQLQDLMFIIFPEFLFIMKSISTKTASYLVERYPTPEEIVTLGIESLGTIIKKISRGKFGQQRAEELFNAARKSIGVNDGKRSIVMEIEYLISQIGADNKFIANLKRQMEDYLEEIPYSNNLLSIKGLGIVTVAGLIGEVGDFKKFNTISEIMKLAGLDLYEVSSGRHKGQRRISKRGRSLMRKLLYFAAINAVKSNGIMYEPYQKMLDRGMPKMKALIAISRKLLRIAFALSRDDTVYMENYSNIHNQIKLAA

SEQ ID NO: 509009 - protein, 310 aa, unidentified
MDAVYVGIDVSKDRLDVCVRPSGEAFVVARDGRGLEELVERLHALAPRLIAVEATGGFETIAAAAIAGAGLPLVVVNPAQVRHFAQAVGRRAKTDPIDAAVIAHFVEAVKPELRAIPDEAQRLLAELVGRRRQIIEMLVAERQRERRASIARVRKSLSRHIKVLEKELPEIDDDIGTLVRDTPAWRGKEDLLVSFPGIGPTLARTLLAELPELGALDRRSVASLVGVAPYTRTSGRWKGKSMIAGGRAYARSAIFLAALVASRHNPMLKIFYQRLLAAGKPKMVAIIAVARKLLTILNAMLRDKKRWQFA

SEQ ID NO: 509010 - protein, 333 aa, unidentified
MNTIGIDVGCKELVVVVMVNGKARKAKSFDNTSLGHQSIIQSLIKLKGETRVCIEATGVYHFDLAVALSRANDIEVMVINPKAAHNFAKALMTRSKTDAIDAENLAIYAERMPFEAWKRPADECIGLRATARRIAALSKQKTQTKNQLHALESTLETPALVIEQTEQLIDILDAQIKTLRDSALTIIHQNEGLVQAYTLITGIKGIAQASAIQILSELMILPEDMTARQWVAHAGLDPRIFDSGSSVSKKPRISKVGNKYIRQALYMPALVASRFEPNIKGYYHHLIDDNGLKKVQAVCAVMRKLLHAIHGMLRTNKEFDGTRFYTIPVMTDS

SEQ ID NO: 509011 - protein, 342 aa, unidentified
MKHYVGLDVSQRETAVCIVDETGRLIFEGRAKSNPGALAELIRRKAPFAERIGFETGAMSSWLWHELRRIDLPVVCIDARHAKAALSVRMNKSDENDARGLAELVRIGWYREVKVKSAESQQVRSLLVTRSRLIEIRRAIENQIRAMVKEYGLLFDRAIGSMFRRKVGELVDAEHALNDVIAPLLSIHEQVCGEQEKLDKRIAALARADETTRRLMTVPGIGVVTALTFRHTIDDPSRFRSAATVGAYLGLTPRRKQSGESDTNGKTSKWGDRLLRTYLFEAASVLLHRTKKWCTLKAWGLRLAKRIGIKKAKVAVARKLAVILHCIWVDGTTFEWSAQKTA

SEQ ID NO: 509012 - protein, 471 aa, unidentified
MITQSKTSRVAKPKSKKNQRLKLPGHLRHIHVNAAGIDLGAKEHWVCVPEGRAERTVRTFATHTVGLERMADWLLECQVDTVAMEATGVYWIAAFQVLERRGLKVHLVNARQIKNVDGRKSDLLDCQWIQQLHTYGLLRGSFRPEDQVCALRSYLRHRDSLVQERSTQVLRMQKALQQMNVLLHRAVSDITGLSGMAILRAIVQGQREPAQLASLVHRRVRKSQGQIAECLSGDYRPEHLFVLQQALELYDFYTQKILGCEERITEYLAGFETKESQSPLPKSAKARSGSRQAETHKEQQRAQLYRVMGVDLTAIEGIGPLHAQIILGEIGRNVDAWRSEKHFSSWLGLCPDNRISGGRVLSVRTRRVKNRVATALRMAAASLERQDSGMGAYYRRIKARLGPAAGKTATAHKLARLVYRMLKYGEAYVAVGQAEYETKFRQRQLQRLQSQASTLGYQLVAADVSPHSAAS

SEQ ID NO: 509013 - protein, 332 aa, unidentified
MLINTYVGIDVSKLTLDVFIRESKLHKQVKNNLSGFNSLLKWLETQTLQSLDTVLVCFEHTGLYSLPLALFLEERNMHYSMISPLEIKRSMGITRGKNDLIDSKRIAEFAFRFKDKVSETKLPAKDIRKVHSLLTLRDKLVTNMKGYAMTYNETLRTMRKEDFPELFSTYENMVASLKAEIKKVENAIKTILKNNLQLWTSYKLVTSVKGIGFIVASYLIVYTYNFTRFDTWRKFACYSGIAPFDYQSGTSVRGKTQVSSIANKQIKTMLHLASICAIHTDAELREYYHRRQTEGKTKMAVINIIRNKLVSRVFAVIKRGTPFVDIKKYAMS

SEQ ID NO: 509014 - protein, 319 aa, unidentified
MTAALAAGVDAGKRYLDFGIEPSRKHFRVANAAAGIEDAITRLRGAGVRKVVLEAIGPFAHAAVKRLVAEGFEVGLINPRRIKAFREAEGKRAKTDRLDARLIARFAVQMTDALRPVPSESQQALKALATRRRQLVEMIAMEKTRLKQVAEPWLCESHRAAIAALTVERKRIEADIENRLAADPAATRKMTILISLPGFGPAITNTLITDLPELGTLDRRAIASLAGLAPHPSQSGTSAGRNQIGGGRPCVRTALYMAGLVASRCDPRFRADYKAMRADGKPAKVAIIAVARKLLVLANSLVKRDTLYDAGYSPDTTIH

SEQ ID NO: 509015 - protein, 317 aa, unidentified
MTHSTTLAAGIDTAKDTLDVAVHPSATRLTVANRPSGYKRLVIELRRTGVGRVGIEATGGYERGVVNYLREQGFEVILLQPLQVKAFAKLKLRRAKNDAIDAALIAACTALVDPPQARHDPRITPLADVLTFVEQVEEDIARAKTRLEKTAAPRLRQMIAADIKRLAARRESQLRAIARALHRHADLARRLELVESIPGIGRRTALAIVLRMPEIGTISREQAAALAGLAPFDDDSGKHKGERHIAGGRDRLRRSLYAAALAASFRWNAALIALYRRLIARGKPHKLALVACARKLIIYANTVVQRGTPWLTQATHA

SEQ ID NO: 509016 - protein, 347 aa, unidentified
MRFYTGRHGNYCGIDLHARWMYVCILSHEGEIVYHENLPARPEPFLKAIAPYRHDLVVGVECIFTWYWLADLCRNQGIEFVLGHALYMRAIHGAKVKNDKVDSMKIAALLRGGTFPMAYVYPPEMRSTRDLMRRRTYLVRRRADLLAHIQNTNSQYNLPEFGRKIAHKMHREGLAQAFPDLQVQRSIAIDIELIDHLDRIIDGLERDILRTATKHDPQALRILRSVPGIGKTLSLTILYEIHCIDRFERVQDFCSYSRLVKCAHESAGKRSGKSWGKIGNIHLKWAFSEAAVLFLRVNPDGMKYKQRLERKHGKAKALSILSHRLGRSVYFMLKRNKAFEMATFLAN

SEQ ID NO: 509017 - protein, 414 aa, unidentified
MKIVYPICCGVDVHKRMLVATIASTDSNNMTMYTTETFLTSNSELEQFRNWLISNQCFHVCMESTGKYWIPVFNILEKDIHVILTHPKYVRAIKGKKTDKKDSKWIADLFKFDMVRSSFIPPAEVRAMREIARYRFKLICMRSSERNRYQNSMTISNISLANILSDPFGKTSTLIMDYILSSDTFNEDYCRSLIQKSAKKKTGLILDSLNGFKIQSDQHFKMKVAKAHMDYLDQKIIATETELFTRVHPHYPLVQHLAEIPGITELSAALILAEIGVDMTVFEDAKHLTSWAGLTPANNESAGKKKSVRISKAGQYIKPLLVQCALAATKSAKEPYFASKYLNLKKHRGHKKAIIAIARMMLVCIYHMILTGETFNPSDYEELQNPKPARQEMTVSNALAFLEAQGFDISKLVV

SEQ ID NO: 509018 - protein, 315 aa, unidentified
MNQTNWVGVDTHKETLACYKDGKFKEFKTNKTGFESAIQWAGMTSVWAIEGSYCYGKPFTAHLIRNGCEVYEVNPLLTKTWRRILSVSNPKNDYGDAKVISLFADKANLQKVSLETIQLKEKITARNHFIKDRTRMINAIKMLFSTRGLELPFKDLTTIKAGKWLSNQEDLVIKHYGKALTDFNQAIKDFDKEIEKSLPEKAQKLKQLKGVGDLTAAIIYTETKGKIVSEAALANYAAVAPVENSSGKSKKHKNNKTGNRKLNSAFYRISLHQSIWDEEGKAYYERKLKEGKTKRHARKCLARQLVRIVFNLLKD

SEQ ID NO: 509019 - protein, 472 aa, unidentified
MGKGSGNGTTRGDRKRNARRERLRGLLPRGGAVIGIDLAEDKQALAVIDHDVRVLARKTVRVKAFRLDEALDWAVGQARAKGFEQVTVACEPTGPRWMQVQRLCAERGLALVCIQPLMSHIAREQQDYTTHKTDESDCVLIARLAVELHCYIPEELDETWAYLRHLGRRRAQLITAATAAVQRIGDFLSVAWPAVTETCAEPFESKTWLAAMQLVTSRCGGQPARLAAMGEEAFTAAVRAVVRDWGGQKAWGPISRRIFAALTDTEGAVAWSRRGLLRRVADELGDLQRIRAQLRAVEADMVAVLDELGLSRLADIPSLTAVGAAAILAETGDPRRYDGSSSLVKHAGLSPSDNASGAFAGQAHISRRGRPGLRLTVWRAVWPMLQHNPVMAAKYQAMTRAADAAAAEAGPQQGTAAQAAARARRAKARVACAASLLRWIYCTVVHGTSWDPAVAAGAASCHDARQDQAEAA

SEQ ID NO: 509020 - protein, 397 aa, unidentified
MIEVCSFKSINALTGAKRRLALKKNTKTTRPRKNAAQKTATRMSPRRTVGIDLGDQTSHYCILNEQGDVVSEGTVRTTESGLEEQFRRMARARIVLETGTHSPWVSRYLERLGHEVLVANARQVRIIYDNDRKTDKVDARTLARLARVDKSLLHPIRHRSAEAQADLAVLRARDQLVSVRSTLINCIRGMVKSVGGRLPSASGAYFSTKVRDQLPGCISGALLPLLEEIENLTIRIRVYDKQIEELAKTKYPKTELMRQIPGVGVVSSLAFALTIDDPNRFHKSRDVGSYLGLRPKQSDSGSSKPQLSISKAGDHLVRRLLVNCAQYVLGHWGPDCDLRRWGLSLMAHGGKNAKKRAVVAVARKLAVLLHKLWVRGEVYEPLRQASKATQTQAVPAA

SEQ ID NO: 509021 - protein, 390 aa, unidentified
MQAITLHLGLDVHKDSITLALAQDGPKGEIRLFGTITNDLRALEKALARIRKAHPGALLEVAYEAGPCGFGIARRLQQLEVPCLVAAPSLIPKQPGAPFKTDQRDARSLARLLRAGELTAVYVPEPTDEAIRDLCRARTDAVDDQRRCRQRLKSFLLRHGYRYQGKANWSQPHLRYLRGLVLAHPAMKTILEEYLQGMDDAHERVQRIEASLRTLLEQWRLRPAVDALMAMRGFQWLAALITVSELGDIHRFAHPRQLMTYLGLVSVEHSSGPRQHLGGISRCGNGHARWLLTECAEHYALPPKVSKELSARQEGQPAPVRALSWKAQNRLHLRFTRLLARRVQRNKAKVAVARELCGFVWALLRMQAWYDATEMRKHAGKIKVDPYVAA

SEQ ID NO: 509022 - protein, 409 aa, unidentified
MRLFVGLDVSSFDMKVCILNGEGEKLNAFTVTNDLPGATLLKELLLDCIGDQEVDVLKIGLESTSVYSFHPSMFLHHDEDLKVFGAKVFVMNPKQIANFKKSYSDMNKTDEIDAFIIADYLRFGRNQMSVVKESQYVALQQLTRSRYQLIRMMTKEKQHFLQHLSYKCNTFSQEVDSSVFGNAMMELFLEKYSLEELAHLPLEELAAFLQEKGKNRFGDPKCVATSIQKAVRSSYRLDKVVEDSMDVILGTSIEVIRTFQKQIKEIDKAIKKLMAGLTHTLESIPGIGPVFAAGIIAEIGQIDRFDDEAKVAKYAGLYWRKHQSGRFTAEDTSLSRNGNHYLRYYLVEAANSVRKQVPDYRDYYVKKYSEVPKHQHKRALVLTARKLVRLVDALLRSHQLFTPERGVKI

SEQ ID NO: 509023 - protein, 444 aa, unidentified
MPTTDYQVETSQFAAWIGIDWADQEHAVCVVDAATGRSDTSTLAHDPGAIEDWAAELHNRFPGPIAVCLEQSKGALIYALMKYDFLVLYPINPKQLACYREALAPSGAKDDPVDARLLVEFVRRYPDRLRPWRPDDQTTRLIAILNEDRRDLIDLRTQLTNRLQSRLKLYFPLVLELFRGRTKLYAPVVCELVLRWAALEELQHADPEEIDAFFQLHHLHQKSIQQNLAKIALAKPLTEDEAIVRSGRLQAQSLARQLVDLADAVARCEAELEKLMETHPDAPLFTQLPGAGDALAPRLLAAFGTDRERIDSAGDMQTYSGIAPITRRSGKSQFVTRRWACPNFLRQTFHEFARCSIAKSVWAAAYYRLQRDRGKKHHAAVRALAFKWIRILYACWKNHTLYNEFHYMQQLQRQQSPLLAYVGTGPVRRPSARPTNQNTLRIST

SEQ ID NO: 509024 - protein, 338 aa, unidentified
MKVTTVGVDLAKSVFTVHGVDEHGNATLRKTVRRGKLLELFAQLPVSVVGMEACAGAQHWARELGKLGHDARIMAAEFVEPYRRGGKNDANDAAAICEAVSRPQMHFVALKSVEQQAVLAVHRLRQGLVEERTALANRLRGLLTEYGVVVAMGLDRLRHALPEILEDGDNGIPSIAREVFADAGQQLRELDARIAAYDRRIAALARASAPAQRLMKIEGVGPVTATALVASVGDARVFRNGRQFAAWLGLTPRQHSTGGKQRLGAMTKHGDVYLRTLLIHGARAVLRVTAKRSDAKSRWAESLRRRRPDNVAAVALAAKHARIIWALLARAHDYQPAA

SEQ ID NO: 509025 - protein, 322 aa, unidentified
MYDNFVGIDISKYFFDASVEVSGKLRHHQFPSTEKGFEALLKWCQKWQVGSAHFCMEATGAFWVEIATTLHEAGFAVSVVNPACIKRFAQSELKRTKTDKVDAGIISRFCRAMSPSLWQPISAELQQLQKLARRVLDLTKIRQQEKNRRSSKSLDGVTLESVERTLKFIEAEIVKLKQQIERLYKKYPQLQHKRELLLSIPGVGPETANTVISEVPCIEMFSSAKQLVAYAGLAPKEITSGSSIRGRTRISKTGRSRLRTVLYLPSVSARKYNPVIHAFCDRLLKNGKAPMKVVGAAMRKLLHIIFGVLKSGKPFSADFIVA

SEQ ID NO: 509026 - protein, 452 aa, unidentified
MLEDSMAQRKRPAKEAAITLTHPNAAGIDIGSAAHFVAVPPDRDDEPVREFASFTADLHRLADWLDACSVDTVAMESTGVYWIPLYELLESRGFTVLLVNARHVKNVSGRKSDVLDCQWLQQLMSFGLLRGAFRPSEQVCMLRSLCRQRTMLLRSQGRFVQHMQKALTQMNLQLTNVISDVAGETGQKILRAIVAGQRDGLALAKLKNSRIRASEDEIAKSLQGTWRAEHLFALKQALDAFDFCSTQLTECDAQIEIQLHALHVREDEPAKGKKRGRSRNAPKFDLRTQLFQMCGVDLTRIDGIDVTTALVVVSEVGPDMGKFPSDKHFASWLGLCPGTKITGGKVMSGKTKRCANRAAQALRLAAAALRSSQSALGAYYRRMCARMDKPKAVTAAAHKLARLIYAMLASGQEYTDRGQDYFEERYRQRVLHNLAQKAKTLGMQLIAVPQPA

SEQ ID NO: 509027 - protein, 345 aa, unidentified
MNQCNVIAIDLAKDIFQVCIMNSHGKIGLNQAFSRAKLKRWLPQQSLSVVAMESCGGASYWERLASSFGHQTLMMPPRQVKPFRTGQKTDTNDVVAIAIASRAPNIKPARSLTIEQQGLQCVDRMRDMLDKQKLQLSNQLRGLLLEFGIVINKSVRSFKERLPEILEDVDNELPVPMRQSLYQMWELYGRLEDDFDVLDLRLKQLTDQDNECQRLVKLEGVGPITAVRLKLQLSHGDHFKNGRQASACIGLTPKQHSSGGKVKLGSISKVSCDRALRSCLYLGARSVVSRLKNRPAKSEKERWLKALIERRGVNCASIALANKTVRTAYVMLKNGSDYKPVPIAA

SEQ ID NO: 509028 - protein, 360 aa, unidentified
MTTVSMHDADIDHQVEDVVLGVDTHKDIHVAAVLTLTGSVIAHASFPTTAAGYQHLIAWARSFGVAQRAGVEGTGSYGFALARRPQAEGLTVLEVNRPDRAVRRRRGKTDTIDAENAARAVLAGEATAVPKTADGPVEMLRVFKIAKDSAIKARTQSINQLKALLVSADPALRDQLTRLSNPRLITACAALDPSTALATAHATLYTLKLLAERIQYLTAQLDELAKHITSAVEAAAPALLQQPGIGPDSAAVLLITAGDNPERLTSEASFAALCGVSPIEASSGKSNRRRLNRGGDRQANAALYRIALSRLRWDPRTQDYLAKRTSQGKTRREIIRCLKRYIAREVHRLILNSSSPSPQP

SEQ ID NO: 509029 - protein, 359 aa, unidentified
MKQVKQLDFTGKTIFCGADVHKNSWSICLMMEGRILKRYSQPAKVEALERTLKSQFPGARFQAVYEAGFCGFSPQRQMAERGIDCIIVNPSDVPTMDKEKQQKSDPVDCGKLARCLSTGMLTPIHIPSVQQQDDRCIVRNYLQFVKDQTCCKNRITSALYFQGITPRMEDDTGRITYWSKNYTRWLKELPMATPQARKSLDLLIRSFEYTREQVLQTTRELRTLALEDRYKDQVALIRSVPGIGQISALLFLTEIGDFNRFRGIDQLCCYIGLIPNTQSSGEYDRASDLSYRGHPKLREILIEASWKAISLDPAMTVAFSHYCKKMKKNQAIIKIAKKLLSRIRFVMMHQTPYVSSVVQ

SEQ ID NO: 509030 - protein, 379 aa, unidentified
MTRSAAVTTGEHTLYAALELSKNSWLLAIQFPDRDNPSLHPIKGGDADSLVAKLDAARERLAKLVGQLPTVTLCYEAGYDGFWLARLLEQRGIDCLVMEPASLQVNRRARRVKTDRIDVENLLHTLIAWRRGERHVCSMVIIPSVDEEDLRRSHRERDRLVRERTAHINRIKGLLFGQGIRGINVKRHYKTLTPADLVTGDGRPLPERLSREITREIERLALVQEQIAVIEHERDRALNPCEATERKRRDLLRLKGIGPAFSAIFARELYYRRFANRRQVASYIGLAPSPYDSGEGRRSQGISKAGNGFVRYAMIQAAWLWLKHQPQSALSKWFRRRTEGHTGRMRRVMIVALARKLAIALWRYLELGLIPEGAILSAR

SEQ ID NO: 509031 - protein, 428 aa, unidentified
MKYNQNFKISQITDNTLVIGVDIAKKKHYARAFDYRGIELDKVIKFKATSSGFESFIEWSESIAKKHGKDKTVVGIEPTGHYWYTFGQAVMDKGLMLVQVNPYHVKRSKELDDNTPSKSDYKDPKTIAFLVKDGRYQIPYMPEGKYADLRKANNLREEWVQKIIIVKNKITRWLDIHFPEFLNVFSSWEGKTALMTLEKIALPEEIAQQTAKQILCLWRQEVKRGVGIKKAEKLLIEAKSSVGIREGAQIAEYEIKLLIREYMEIRKVLDDIESVLEKTVLTIPGADHFLEIKGVGIKTVAGFFAEVGDIRRFTSAKQIIKLAGLNLRQNSSGQHKGKTTITKRGRSRLRAMLFRAILPITATNEVFNKLHHYNISQKEKPMKKMQSLISLCCRLIRIVYSLITKGQRFDPERLLKDIHRNHEVPVAA

SEQ ID NO: 509032 - protein, 402 aa, unidentified
MNAVGIDVSKGKSMVAIMRPFGEIVSAPFEIKHTASDINSLVELINSVEGESRIVMEHTGRYYEVLAHQLSEANLFVSAINPKLIKDFDNDSLRKVKTDKADSVKIARYALDKWQNLKQYSVMDELRNQLKTMNRQFGFYMKHKTAMKNNLIGILDQTYPGVNTYFDSPARSDGSQKWVDFASTYWHVDCVRKMSINAFIDHYENWCKRKKYNFSKSKAEEIYGKAKELVPVLPKDDITKLIIKQAVDQLNSASITVESLRTLMNETASKLPEYPVVMAMKGVGTSLGPQLMAEIGDVSRFTHKGAITAFAGVDPGVNESGSYEQKSVPTSKRGSSDLRKTLFQVMDVLIKTHPQDDPVYQFLDKKRAQKKPYYVYMTAGANKFLRIYYGRVKEYLASLPES

SEQ ID NO: 509033 - protein, 351 aa, unidentified
MKELMAGIDLHSNNIMVGIMNREGGRVAHQKLPCKLEGILSYLAPYKERLERLAVESTYNWYWLVDGLQAAGYPVVLANPAGFSPYSGLKHADDKSDAFFLAELLRLNILPLGYVYAAAQRPVRDLLRRRISLVQQRTALLLSFKSLYTRTTGGALTLSRVKELAVPAAQELYEHPANQLIAGVQLEHIEQLDASIARLEKAVLPVAQAQPGYARLQTLPGVGVILGLTITMEIGDIRRFAGPGEFASYCRTVRSLRTSNDKKKGENNRKCGNKYLAWAFVEAANFARRYDAPCRQWFDRKAARTNSIIATKALACKLAKAAWFMVAEDTDYDGRRVFPHLAAGPTKNMKP

SEQ ID NO: 509034 - protein, 333 aa, unidentified
MQNFYFIGIDVSKKKLDICVMSNSKVLKEEQVSNHPQAIATVIAGIKEELSMSNDNLIICAEHTGQYTYPLICACKSVGSKLWLENASQIKYCSGVTRGKNDKVDARRIAEYAMRFFDKAKPYQRPTEELMRLKQLEAERSLYLTDMAKYKAQLSDQEGFMEDKIFKRKAKRLKEMIKSLEKTLKEIAQEMADVIDSSEGLSRQMRLLKSVEGVGPVVAMNMIIATEAFTRFDNPRQFNCYVGVAPFAYTSGSSQHSRNRVSQRAVKYIKCLLHMAAVAIVHKKTGDLKTYFERKVAEGKNKMTVLNAVRAKLVARMFAVIRNNRVYQPILSV

SEQ ID NO: 509035 - protein, 398 aa, unidentified
MTRKNTLKSLPTDTEFRVVGLDLAKIDVSVAAIPVDDNTPSLVDRMTYADLLDWAGKISPTLFPMEPCNGYSLLCLQLENLGHEIKVISGSTVSMWINTHLSGQKTDLNDAIALARLAVSDAELTPIRHKSITEIRIQTVQAVRQQLMSQRSKSIVSFKALAQQWGIPCAAGHRNLKKLRESIEAKVDLITRPVANAMLFLLDAVKSLDRQIGQFNQTLQELVMSDERGRLLQSVLGVGTQISARVITVVGNIERFNSPRSLVAYVGVAPRNFITGHKNLTKKKHGNCPDLSHKGQGKISRRGDKLLRSLFIQGAACLYMQFCKDQLPECQLKRWILKQLASQKPYGKLIVSLAAKLIRIVWAVLTYGEKFNIQKAGMTRSMWSEMALETPLNKEVPA

SEQ ID NO: 509036 - protein, 451 aa, unidentified
MDPGFLEHLRLSPRAVIGSGARFLEFLLRGPHVDDATLEEEMELLHRRCCGLDVHKETVVACLRLVADGKVTTEVRTFQTTTADLLRLSEWLAANDCTHVAMEATGVYWKPVWHILDDGEFELVLANAAHVRNVPGRKTDVNDAMWLAELLAHGLIRASFVPDTQTQEMRNLLRTRKQLVREQSSHVLRVQKILEDANIKLDSVLTDLMGKSGRAMIEALIAGETNPAKLASLADRRAKASHEEFREALRGRVTKHHRFLLRLHLNQIDALDAAMATVDAQVEANLGPFRTAVELLISIPGIKNLGAHVIVSEIGIDMSRFPSHAHLISWAGICPRNDESAGKRRSNRLRKGAPWLKTTLVQCAWAAVKKKDSYLQAQFYRIKARRGPKKAIMAVAASILTAIYHMLKDGTMYKDLGRNHFDRRSTDKQKQRLVKRLAELGYVVEIKPLAA

SEQ ID NO: 509037 - protein, 392 aa, unidentified
MQDATGRRLGKARLPEGIGGITQLHALLGVLLPEAAEPDQVVIGIETDRGPWVQTLVAAGYQVVAVNPLQVARSRERHGTSGAKSDAGDAHTLADMVRTDHHQLRRIAGDSDLAAAVKIVARAHQTLIWDRQRHLLRLRSVLRESFPAALVAFEDLTAPDVLELLGKAPDPASAARLGTAQIAAALTRAHRRNVADKAAAIRAALAAEQLGQPPVVAAAYAVAVRAQVAVLAAVNAEIERLQAQVSAYFGRHPDAEVYRSQPGLGDVLAARVLGEFGDDADRYAGARARKNYAGTSPITQASGKKKVVLARYARNDRLTDALHQQAFSALQASAGSRAYYDALRARGIGHHAALRQLGNRLVGILHGCLKTRKPYDEATAWPQHADTDQAAA

SEQ ID NO: 509038 - protein, 375 aa, unidentified
MVCVGIDVAKDKHDCFILNSEGEVLADVFTIANNREGFETLMQRIRSCTTPTDKIRVGLEATGHYSYNILGFLLDKGLPTFVINPLHTNLYRKSLSLRQTKTDRIDARTIAAMLMSDVDLKSYTDTAYHNEELKSLTRYRFDKVRERAKLKQSVSRLVNILFPELEALVPTLHMASIYAVLSEFPGAKQIADAHLTHFKAVLTETSKGRYNREKAVEIREAARCSIGSAMPAKSLELQHTIRLIRELDKEIIEIETAIKAIIDEMAPPILTIPGISYRMGAMILAEIGDISRFDSPDKLLAYAGLSPSTYESGKLKLPVPTPTWRSEVLAICDMLFSTPQNSSVIGNLPSLPTLQRSEPRASITTSLSLMPPKSS

SEQ ID NO: 509039 - protein, 342 aa, unidentified
MDVTTIGLDIAKNVFQVHGIDVAEKVVVRKQLRRSQMLAFFKGLPPCLIGLEACATAHYWARELTKLGHTVRLMPARDVKAYVKRNKNDAADAEAICEAVQRPTVRSVQVKSAEQQSQLMLHRTRDLLMRQRTQVINALRGHLAELGITAAHGIAGLKELLKIVANDEDDRLPVDARASLVVLAAELQAMQTLIGSLEKRIMAQHKKSEASRRLQTIPGIGFIGATAIAATVTDPKSFQSGRDFAAWIGLVPRQDSTGGKQKLGPISKQGDRYLRRIIVVGAHAVLKIAKQHPEKYPWLTQLLARKPFKVVAVALANKMARVAWALLAHGGKYRRPALVAAQ

SEQ ID NO: 509040 - protein, 348 aa, unidentified
MTTVAERFDHVVGIDTHARSHTYCLVDTRTGAVVDTATFPTTTAGITRATSWITRHSNRTSLLAAVEGTSSYGAGITAALAATGIGVAEIRPLSRPSRARTGKSDPIDAEGAARAVIGEHLDRLAQPRRTGDRAALRVLLAARSLMDQQRTANRNALTALLRSTDLSVDARRPLTDAQIAVIAGWRTGRDDAPVRVFREEARRLARTVLDQTELLRINHRQLAQLTEALAPGLQSIPGVGAVTGAILVTAYSHHGRVRSEAAFASLGGIAPLPASSGNTTRHRLSRSGDRQLNRAIDVVVRTRLSCDPATRVYAARRRSEGLSGREIRRCLKRYVCRALYRELRTRMA

SEQ ID NO: 509041 - protein, 462 aa, unidentified
MEHVPVVGIDLAVTAASELAVATGATIEATHRVASTPRGLTEGIAKAAKGRSVAIVVESTAMAWFIAAVAAVRSGVEYSLYRVSGRKSAALRAFYRSHTKTDHIDARVLARMPAVDDSLLTYRLPAPSELAMKRLVVSRHKLTTETTKLQNRMRSLLAWAAPGMINAAGGTVSTGLVRVLGRWSDLTSLAKARVATIALQGDWSRERAEAVRAAATEAVAFYEGHVDFSAVGLELELSLAQLGFLTSQVDRLEERIAALHTELYPRDRLLSIPGIGPVVAGVVRAVVGDLSRFANQASFRAYTGLVPRENSSGEVRQRGRISKAGPSVLRWALYLAGDAARHCDPALAALYRRLMVERGRTHTQAVCAVASHLAGRIYAVARADRDYLWRDLEGNEITREEARAMAQSLRVDSETRARLRARCEGGPRTPYARQPEVPQDVTQPSGDKLIEAALALASKAGH

SEQ ID NO: 509042 - protein, 434 aa, unidentified
MEEAEDEPLFCERAAGIDIGKQMIMVTIRVPSDRRKGGRQQETREFGTTRRQLLQLAGWLRAWGVERAGMESTSDYWKPVYFLLEREGLDCVLYQASQVKALPGRPKTDKLDCVWLAKVTERGSLAGSFVPPEDIRRLRTCTRYRRRLTQARTAEKQRVEKLLEDAHLKLSSVISDIHGVSGRDMLNAVIAGERDPRVLAEMARGRMRRKTAALEEALDCTFLTPEHVFVLSMMLRNIDHYTAQIAVLNERTAALCEPYEHQIARLDAIPGFGATNAQDLIAETGVDMSVFPAAGHLCSWARVTPRVTESGGRRKGKSATGRGNPYIGAALGEAASSAGRTHTFLAARYRRLIRHMPKKKAQVAIMRTQLAAAHALLSDPQAEYRDLGPGYYEQQQDARRLTRGHVRGLERLGWKVTLEPVDPGTGELTARTAG

SEQ ID NO: 509043 - protein, 462 aa, unidentified
MTKRRQSQVRPKLGSRSLTQLNPAAAGIDVGASEHYVAVPPERDEQAVRRFGAFTEDLHKLAQWLLQCGVQTVAMESTGVYWIPLYQILEDYGLEVKLVNARHVKHVPGRKSDVQDCQWLQQLESFGLLSGSFRPEAKICVLRSYMRQRQMLISHASRYIQQMQKALTQMNLKLHQVISDLSGQTGMRIVRAILQGERDRLKLAALKDRRIKSSLGTIAKALEGDYRAEHLFALRQAVELYDYYQQKIAECDQEILKQMQSLETRAVTDAVPPTPLKRKPRSQHHPLPFDSQAELYRILGVDLTRIDGLNEATAQLILSELGLELCKKWPSEAQFCSWLGLCPNNEISGGKVLRRGTRKVINRVANALRMCAESLLNSKSALGAYARRMRAKRDSKIAISATAHKLARLIYRTLKYGQEYSDIGQAQYEAKYRINALKSLQKRARQLGVQLIDLPPGSVVVP

SEQ ID NO: 509044 - protein, 348 aa, unidentified
MKYYIGLDAHSTTSTFAVVDESGQCVLRETVKTSEQSLVHVINRINGERHMTFEESSISQWLYLQLKDKVDNLLICNPTYVAKKQGAKTDFRDALHLANELRTNHLQPVFHDTSHWMEIRTTVSGYLDIVEEIVRFKNRLKAVFRAEAIQTDENSFYKNSSRVKEIKNPAAKFVAEKLFDQIEFLEREKEKYKEVFEKNRKRYKPIRNLMTIPGISIIRANIIAAIVCQPARFDNKHKFWGYCMLVRHIQISNGRIYGNKRFYGRRELRNVFLGAAENVMRLDGELRDRYDALRAKGADHKDAKVNLARQIASIALCLLKNNDTYNENYAEYLRERKKLRKDFFEQSL

SEQ ID NO: 509045 - protein, 337 aa, unidentified
MTSLPDSTSAPVTIGIDVAKATLDIAIGLKSPPLSLTNDSKGFDALLTHLATHQVTLVVMEATGGLETAAAAVLQTAGYAVAIINPRQARDFARAMGQLAKTDRIDARILAQLGEVIERSPERDRFVKPLPSAEQQALAALVTRRRQLVAMQGAEGNRLAQGAPAATRKSIDTIIEALTTELERIDSDIAGHVQAHFADLSSLLDSAKGVGKTTISTLIAEVPELGQLTRREISALIGVAPINRDSGRMRGKRTIFDGRGSVRRVLYMAALVAVRFNPVLKVFYERLVAAGKPKKVALVACMRKLLTILNAMVKTGKPWDGAPLCSRLRRSSAQTRR

SEQ ID NO: 509046 - protein, 344 aa, unidentified
MEITTIGIDLAKHVFQIHGVDSRGKAVLTKQLRRDQMAAFFVQLPPCLIGMEACGGAHFWGRKLQQMGHQVRLMAPQFVKPYVKSNKNDRADAEAICEAVGRPNMRFVAIKNTDQQAVLALHRVRQGFVRARTAQGNQIRGLLAEFGQIIPQGLAPLRQRVPEILEDASNELPGSFRLLVQRLLDHLKVLETQISELNAQILAWHRTNAESQKLEQIPGIGPITASALVASVGDAAQFSCGRELSAWIGLVPRQHSSGGKERLLGISKRGDVYLRTLLIHGARALVQLAQLHPERYKWLAALIARSNANIAAVAVANKNARIAWAVLAHERPFMANYSAASNLA

SEQ ID NO: 509047 - protein, 426 aa, unidentified
MARTRATRRCFGLDVHRDFAQVAIWQNGVVTQAGTFPTTPEQVRAFADSLGPRDEVALEATGNAWAIATVLTSRAGPVVVSNPAKTRAIAEAKIKTDKVDAAILANLLAADYLPPVWLADADTAALRRQVLRRAHIVRQRTRLKNRVHAILHANLVPRCPAADLFGIKGRAWLAEQDLPADEHAAVSALLRQLDFHAEELRLIDRDLGQVALDRPEVRRLMTIPGVDATVALSIVAAVGDFTRFRTPEKLVCYFGLNPRVRQSGGQPASHGRITKAGPAHARGMLVEAAWSASKAPGPLRAFYQRVRARRGMQIAVVATARKLAVLCWHLIIKSEDYAFAMPSLVAHKQRKLELRAGLPTQHGNRKGNAASYSLKDVRAAERDSAARAEAIYQRMVASWQPARPARKPPKPKVIAVGVAASKGTRL

SEQ ID NO: 509048 - protein, 432 aa, unidentified
MNDQNTTAATPPAPPDYAAFVGLDWGDEKHALSLCAAGSAVVEPATLEQTPEALADWATTLRTRFPNRKIAVAVEQARGALLAGLSQYEHIVPFPVNPKSLARFREALYPSRSKDDLVDADLLLELLVKHREHLRAWQPDTIQTRQLALLNEQRRHFVDHRTGLTNQLLSHLKAVFPQAPKLLGEDLASRLATDFLKKWPTLQAVQKVKPAVLRQFYYGHNSRSEELIALRLELAKNAVALTSDPALLAAHSLSIQTLAAQLEALRPFLQQYDQQIAELFGAHPDAPIFQSLPGAGPVLAPRLLTSLGTDRSRFSEPVALSSYSGIAPVTEKSGKTQHWVHVRWSCPKFLRQSWHEFANSSIKFSAWAALCYQEFRKKMDHHEAIRKLAYKWQRIVWRMWQNRQPYDEARYLATLQKRGHKLFATPPVKSGE

SEQ ID NO: 509049 - protein, 375 aa, unidentified
MGHDSTVYVGLDVHKESITAAYAVDIGEVELLGKIGTSKTDIDRLCQRMQSKATHVRIVYEAGPCGYGLYRQPLQKGFDCMVCAPSLIPKKPGERVKTDRRDAIKLVRSLRAGDLSPVYVPGVEDEAFRDLARAWAAAKADLKHARQRLKSFLLSHGIRYTGSANWGPAHRRWISTFAFPNHWQQLAFDECRRTIEDRLGQCDRLEAALREAVVNWRFYPAVLGLQAMRGIQFTSAVGMLAELGDLSRFEHPRQLMAWLGVTPSEHSSGDRRRQGSITKNGNSYARKLLVEAAWSYRYPARVSPDIQRRHEGIPRPIIDRAWDAQLRLCRRYRKFAARGKNVNIGVVAVARELAGFIWDISRLAMSLAIPMDARP

SEQ ID NO: 509050 - protein, 346 aa, unidentified
MSRSDSIFGTGMPVSPHSQGRSQEDHSMFNLGIDVAKAKLDCALRLPNGKHRNKVVENNHKGFVALSEWLLKHDAGSPRVCMEATGTYWERVAEYLAGRGMLVSVINPAQIKAFGASRLVRTKTDKVDAQLIADFAHERQPEPWLAPSPAEQALRAMVLRLEALQTMRQQECNRLDVAREAVRQGIVDHITWLDGQIKELIQAIKRHIDDDPDLRGKSELLDTIPGLGERSIPVLLSYYANPERFDSAKQAVAFAGLDPRQHESGSSVRGKPRMSKVGHSFLRKALYMPAMVTVYRTAWGKRFGQRLSAAGKAPKLIIGAMMRKLVHVAFGVLRSGKIFDPTLHAA

SEQ ID NO: 509051 - protein, 352 aa, unidentified
MGVYIGVDLHVRTQSVCWCDTATGEQQEYTLDHERDDVRAFYAQFAAPAVVGVEAMGYSLWFHQLIEASGHRLLVGDSLAIRQFARRRQKNDRRDARLLLDLLLHDDFPAVHVPTPASRDVLALLRYRHRLVRIRTMLRNGLQAVALSHRLRLGPRLFTARGQQQFAALPLEGAYAAQRQHSLLLLASLADQIRAVEDELQTRAQTDARVIRLRSHPGVGLLTALAVVHALEPVTRFDRARRIAAYCGLDPKEHSSGEVQRFGHISKQGNRLLRFLLIEAARTTIRDDEDLRRFYFRIESRKNSAVAIVAVARKLALRLYRMLREEIDYHEFRRRGRDARRAREDTSPQMPG

SEQ ID NO: 509052 - protein, 387 aa, unidentified
MYFVGIDISKYKHDCFITTETGTVIQQSFSFTNSKEGFDELLSILNSLDNSKEIRIGFEATGHYHMNLMLFLEKNNYSFMELNPFLISKFIETLTLRKTKTDKKDAMHIACYLKTKDYKPHPKQFYHKQSLKALSRRRDAIVHQKSYYLVQLTNILDLTFPELKPFFKNKFSATFLYLLNKYKTADKIANMEDYETLTKVSRGKFSYPQFLKLKDLAKNTVGTENDIFAFQLETFLDLFSSINKKVDVIDDKISQIIKELNPKTLSIRGIGFVTCAAIISEYGDVSRFASPDAMVSFAGIDCSIVQSGTSEYQGKMVKRGSSHLRYYLLLAAEKVFMWEPIFTAYYYKKRDEGKPHSVALSHVAKKLVRVIYKIETENIEFNSSKLR

SEQ ID NO: 509053 - protein, 365 aa, unidentified
MANVINWIGIDDHANKWSIAHYEGQKSEPTREWELQPGVSGYRKLIGWLKGLKGTARVVYEAGPCGYELHRRLRRSGIDCAVAAPSLTPRKPGDRVKTNSRDARKLGRLLRAGELTLIAVPDARQEAMRDLIRAREAANTDLLRARHQLKQLLLRYGHRYEGTAWTKRYWEWVNQITLSEEWTEEVLRRQIVVIEQRLQIVAEYDRSIEVMAQRTEYADLVRALSVLRGIDRLTAMTIVAELGDLRRFPTAPQLMAALGMVPSEYSTGDKTRRMAITKTGNAHVRRVLVEAAWHYQRFANRPGPLIRRRRKGQPAQWLAVAQRCDDRLKRRFARLTSRGKRSTVAAVAVARELAGFIWAIGQVAY

SEQ ID NO: 509054 - protein, 345 aa, unidentified
MDVAAIGIDLGKSTFHLVALDQAGQIVLRRKLTRRKLVDLTATLPSTLIGMEACGGAHFLARLLREQGHDARIIPAQFVKPFVKSQKNDFLDAEAIAEAVQRPTMRFVPVKTEEQLDMQTLHRVRDRLVGCRTALINQVRAVLLERGLTFPKGRASMAHVVAELVAADTDEVTAATRELLALLWQEWQELQTRVEDLTARIEQAAAQDEVCRKLTAVPGIGPLTATALVSAVADGSMFRRARDLSAWLGLVPQQRSTGGKTKLLGISKRGNGYLRRLLVVGAQSARLHLNRERHPRLGGWLTRLEQRAHRNTVVVALANKLARTAWVILRQGRDYDPAFGLPVEA

SEQ ID NO: 509055 - protein, 410 aa, unidentified
MVKENFIYVGIDLHKETHTAVMIDCYNQKLGEITFPNRPADFPKLVTKVKKCNTDGKEVVYGLENAYGYGRALAVWLIDKGYLVKDVNTAISHRQAKHRGAMYRNSDSDDAKAIALATLNMLDKLPDACPNDAYWSLGQLVHRRDNIMKQRTRLVNQLHEQLCIAYPSYKQFFNDISRPTALYFWEHYPSRKYLKGKSVEDLRAELVPVSHNKCSTKTCEKILDAVASDKVKNNAYQDARDMVTLSIVSDLQHYDSQLTEVDKMLEQMYKMLGCTLTTIPGVNVITAVKILAEIGDIKRFSNANKLAQFAGIAPLHLSSSGKGKDVISKQGNRRLQATIYFLAIQMVQISSKGTPRNPVVRAYYEKRKAEGKTSQQALICISRRLISVIYGMLKNGTEYRMPVVENAGEK

SEQ ID NO: 509056 - protein, 340 aa, unidentified
MNVTIGIDPHKATHTAVAIDRDETELATITVRATRRQTERLLGWAEPFEQRTWAIESAGGLGYLLAQQLVDAGEHVLDVPATLASRVRVLGTGKSDKNDPNDARSVAIAALRAPGLRAVQAADHAEVLRLMAKRNQDIGDLRTKLVCRLHNVIAALAPGGIAKELNASDADAVLGAFEPSTPVEHTRHQVALELLEDVRRLDSQLKESHRRIKSAVRASGTSLTEVYGVGPVLACALIGYTGDVRRFANRDQFAAYNGTAPIEVSSGGRVAHRLSRRGNRQLNHAIHMVAICQIRQLHSEGRAYFERKVDEGKTKKDAIRSLKRQISNTVYRQLILDSKR

SEQ ID NO: 509057 - protein, 357 aa, unidentified
MGKATENLARVTRIGLDLAKTVFQVHGVDAKGEVVIARKLRRGTMLEFFGRLAPCMVAMEACGSAHHWGRQLVALGHAVNLIPPAHVKPYVRRNKTDAADAAAICEAAMRPGQRFVALRSIDNQAAVMRHRVRELLVGQRTALLNALRGHLSEIGVVTAQGAQHAYRLKRMLADGADENGEIVIPEHVRVALAPLAAQIDALDQAIAAIDDKLIETVKADEKARRLMTIPGVGPVIATAVVATVGEVSSFASGREFAAFLGLTPRQHSSGGKERLGRITKMGDRYLRKLLVVGATTVLHHAIGHNDSLRCWARQTLERKGGRAGFKLTAVALANKLARIVFAVLRSGEVYDDRPVAA

SEQ ID NO: 509058 - protein, 407 aa, unidentified
MELPAIFPCVVGLDVHQAKISACAMIEQPDGTLTVEHREFGAFKRDRRALAEWVRTLGPDLVVMESTGIYWKSPYAALEQVGIAAWVVNARHVKNVPGRKTDVADAQWLATLARAGLLRASFVPPADIRHLRLIARQRQKLSGMLASEKNRLHKLLADAGIRLNVLVSDIHGQAGRAMVKALIEGQPLPEILDLAGRLRASREELFEALQPEQLSDAHRFVLSEIMAHIEELEARMGRFEQTLLAGLAAWEPQLVLLQTLPGVDRIGAAMLLVEIGTDMASFASAEKLASWVGICPGNNESAGKRKSGKIRKGNAWVRRLLCEFAQAASRSRCGLKEKFQALSIRKGHKKAIVALAHKMLRIIFAMLKNHTPYQDQAVDYEALLVQRNAPRWIKMLAKHGFISPAST

SEQ ID NO: 509059 - protein, 372 aa, unidentified
MSTKAKKESKKESKKKVLKYGIGIDMGKQKFHGCIKREDEDGHQKVVATKQFENIPSGHKSFYEWVNKHRKDKSVVYQILIEVTGVYHENLLYFLYDKGLEVCVEMPKRVKRFLESTGQKSKTDKLDSKGIAQMACERKLKRWQPLSKHIRELRALLRHRKSLIKSKVQFQNQLHAINYSSLEGKAIKRSLKSSIKRLAEQIKKLEKQILQMAQKDKELYEQIEMIVDSISGLGLISVLTIVAETNGFSEFKSVKQLESYAGFDVIENSSGDHKGKTKISKRGNVHLRTATYMPTLTIIGQKTGLFYSFYLRIVKRSGGIKKKAMVAVQRKLLVIVYTLWKKKEKFDPNYEWKKQNQNEENKEKLEAQLVTQ

SEQ ID NO: 509060 - protein, 410 aa, unidentified
MEVLYPHCAGLDVHKETVVACARHMVNGTVKREVRTFRTTTKDLLALSEWLASQQCTHIAMEATGVYWKPVWHVLSDGDFTLVLANAGHVKNVPGRKTDVNDATWLADLMAHGLIRGSFVPDAQTQELRGLLRTRKQFVRERASHVQRLQKTLEDANIKLDSVISDIIGLSGRTMIEALIAGESDPDSLAALAHRRIKAPPAALREALRGRVTDHHRFLLQLHLQHIDALDTAINAIDREVDSHVEPFRTAVLLLTTIPGVSDLSAQVIRAEIGGDMSRFPTVGHLISWAGLCPKNDESAGKRRANRMRKGAPWLKTTLIQCAWAAARKNRSYLQAQFHRLRSRHGAKKAIGALAASILTAAYHMLKDGTLYHDLGPDYFDRRAKTVQTRRLVTRLQKLGYAVQITPLEA

SEQ ID NO: 509061 - protein, 344 aa, unidentified
MFGMDCHISTLDFAVVNEGGRLVKASSVATSVNGFMEFVKNVPPPRTIYMEEGTLAAWALETCIRFKEKLVITDAKKNHWIGSSGQKDDPLDALKLAQLARGGYVKEIHHPVGQRRRFRELIEAYHDTVRSTTRIKNKIKAKFRQNGIQCTGVTVFLETYREEWREKLPQEVTLLLILEGLWRQLDQSEQTEKELLAAARSQAKFYPEIKHFEDLPGIGFISAATISSILETPFRFANKRKVWMYAGLGIMTRSSGGKIYSEKLSTDYNRLLKYTLKQAAEVAIQAKDNPFRHKYLDMTLLHGIAPHRAKLTIARNMLVTMWAMWKKGEKYNPEAREKVVHKQV

SEQ ID NO: 509062 - protein, 396 aa, unidentified
MISVGIDVSKGKSTICILKPGGEVVKPPFEIEHTADELDSLVSLINSFEEETRVILEDTGHYHLPVASYLSSHGFFVCCVNALRMKKYCSQSIRRAKTDRIDAVRIASFGITYWSELIRAYESPDTYDELRFLARQYYQITAILVKAKVNFSNLLDQVMPGISNLLQNQGDNHKLTEFVSRYIHFQAILDMGEKKFTADYCKWAKKMGYRCNERKAAEIFALAQNGIPSLPNSQSVKIAVSEAIKLIHSTEESRNTILAQMQDLCKTLPEYSVVRDMNCIGDVLAPRIIAEIGDVRRFRNKHSLIAYAGIDAPPYQSGAFNASERKISKRGNAYLRKTGYEIMQSLIKHKPIDDPVYDFILKKRSEGKCGKEAMIAGLNKFLRVYYGKVMELYSEH

SEQ ID NO: 509063 - protein, 361 aa, unidentified
MNGTMTWVGLDVHARSTHAAAIDSLSGELRRARFGGGTEEVVEWLGGLEGPVRAAYEAGPTGFGLMRAASAAGIDMQVVAPSKTPRASGDRVKTDRKDAELLARLLLAGQLHPVTVPPAWLEAIRHLARTREQVRHDLMRARHRVSKLLLVHGRVYPGKTAWNQTHKRWLAQQSFEHEPTELAFIDLLAAVDGLTARREALEERLSRLAQDERLWPTVSRLRAFRGIDTLTALMLHLELGGDWGRFSSPRKLSSWLGLTPTLDQSGESATQGSITKTGSGIARRLLVESAWHYSRQPRIGATLANRQAGQPDHVLQIAWRAQTRLHRVGKRLRERGKPHNVATVAVARELAGFLWAAATAP

SEQ ID NO: 509064 - protein, 337 aa, unidentified
MKRYLGVDLHRLQFTVCTMDEVGNKSRKQWKIEQLPEFVAQLQGEDELAVEATGTTARFHDAVVKHVARVVVVNPHQFRVISESVKKTDRRDAEALALYLSKGLLPEVRMKNRQQRELQHLAETRDMLVKQRSALKGKINNLLAANGIYLKREALSSAKALEGVLTSQVSAVVKAELRVLVDQIRSLSNSLSELDDLLEEEGRRLPGHRNLTSIKGIGSLSATILLTAVGNVGDFADEGKLAAYLGLVPKVQNSNETERSGGITKRGNKLARTALVQCGLIAQRYSPYLKRFYERIKSRRGGGKAKVALARKLVKLVYDTLKNNWVFADFPSFTLAA

SEQ ID NO: 509065 - protein, 375 aa, unidentified
MGKNTRFVGMDVHAETIAVAVAEGRDEVRSLGTIANRPEAVRRLLGKLGNLQNLRVCYEAGPTGYALYWQLSQLGVQCEVIAPSLVPMKAGDRVKTDRRDAERLARSYQSGDLTAVWVPDAKHEALRDLVRAREAAKEDQLRAKHRLGKYLLRYGQRPAEGCKAWTAAWWQWVRDLELAHAEQNTTLVELILEVDHQAQRVARLDGAIDRAVEIAPPELRAVVDALQALRGVAKVTAVTLATEFGCFSRFERATQVMSYTGMVPSEHSSGSKQHRGAITKTGNSHLRRVLVEAAWHYRHRPRICQRQKSLQEALPPKVAAIAWTAQGRLHRRYWALSNKSKPSAKIVTALARELAGFVWAIGVETEKQLAATRAA

SEQ ID NO: 509066 - protein, 419 aa, unidentified
MSFKIIKNNCCGLDVHKTWIFACIGITDSNNRTEYKQARFSSFTKGLNELCDWLAKYNCKDVCMESTGKYWIPVFNILEQHNLWVTLSHPKYTKPMKGNKTDRKDAKWICDLYMCGMVKPSFIPSADIRELRDLVRYRYKLTCMITGEKNRAQNCLTVSNLKLDEVFSDVFGKSSRSITEQILQHPGEAFDVAHFVHGRCKTPIEEIQAAVDGAISKEQAVKLRQCLDHIDELNKHISEIEQEILRLSDKYETALNLIRTVPGFDKNPLTAVQVLSEIGGDMSVFPTAKHLVSWAGCCPRNDQSNQKIKSTRISRAGSYFKPILVQVANALIKSKKHPEFTTRYKRIKARRGHKKAIIAICRMILTAIWHILSDLKSYTPEGFLESRPVKEEKVLSTSQALNLLKQRGYIIKDEPLAVS

SEQ ID NO: 509067 - protein, 326 aa, unidentified
MTHETSMPGIYVGIDVAKDKLDLAQSDADDVLQFENNDRGIAQIVARMTQAKPVLIVVESTGGLERPLVTALLEADLPVSLVHPGRVRNMAKALGIHAKSDRIDARVLYLFGQKAQPRIHAKRSEKREQLSDLVACRRQLCTTRVQQSNRRGASHSPAARKSIDAIITALDRQIASLDRQIRRLIDADDDFRDLEKILLSVPGVGPKLAAALLADVPELGTIDRQPICAIVGVAPFANESGTIKGQRQIRGGRAHVRSVLYMGALTAIRCNPLLKDFAKRLQDKGKRQKVILVAAMRKLLSLINVMVRDRLTWDQLNVVKKLSNNP

SEQ ID NO: 509068 - protein, 359 aa, unidentified
MSHMSAWNYATEIPTVTIGLDLGDRTSRVYEVSATGECLREASVPTTPSALAKYFGPRSPCRVVLEVGTHSPWVARTLTELGHEVVVANPSAVYGKGRRRKRNDRLDAEFLARQGRADVKLLHPIQHRSAAAQADLALLRARDQLVRTRTALINHVRGAAKAVGARLSRCSAEVFPRRVQSEVPEALQLALTPLLEVIAGLTRRIAGYDRQLAAAIRERHPVAARLQQPAGVGPLTALAFVLLVEDPHRFPKSRDVGAYFGIVPRLDDSSTSTPQLRISKAGDELGRRLLVSAAHYILGRFGPPCDLRRHGEAIAQRGGKNAKKRAVVAVARKLAVLLHRLWVSETTYDPNYLAKGRAA

SEQ ID NO: 509069 - protein, 328 aa, unidentified
MFQVHGVDERGKPVLRKQLRRAQLLEFFANLRRCVIGMEACGSAHYWARKLSSLGHEVKLMAPQLVKPYVKSNKNDRNDAEAICEALGRPNMRFVPIKNPEQQALLGLHRVREGLVAARTAQVNQMRGLLAEFGLIIPKGIAKMRTHVPEILEDGANELPGLMRELLARCYEQFLVLDARVHELEARIVRWHRENETSQRLAKVPGVGPLTASAYFATLGEAQSFKSGRQAAAWLGIVPRQNSSGGKQQLLGISKRGDVYLRKLLIHGARAVLRQLKPEQAHSWLAQLTKRRHHNVAVVALANKNARILWALLAHGREYQHDYVSVRP

SEQ ID NO: 509070 - protein, 356 aa, unidentified
MTIVAHAHPFVIGVDAHARNHAVAVVACPTGEVVDEAQFPATVAGLQRAVSWVARRTGGDLDVLWVIEGVGTYGARLARVANDTGYAVAEAGRMNARANRGVGKSDPLDARRIAQSVLAVDEGMLRRPRADDGVRAAVRVLVASRDHLSAERTSAVNALTALIRVADLRIDARRPLTAAQITAMAAWRGRDEDLATAVARREAVRLAKRVIAADREIAANTKQLTDLLNASPARVLLDQPGIGPVTAAVTLAAWSHPGRVRSEAAFASLAGVNPIPASSGNTVRHRINRGGDRRLNRALHMATVTRIRMDPRTRAYVEKRTAEGRTPREIRRCLKRYLARQIYRQLNAAEIALNPT

SEQ ID NO: 509071 - protein, 482 aa, unidentified
MKHKQQEKTKEATCGPTQSHWQQMNRKQRREMTRKIQSEDISLEVIHPDAAGIDIGNESHYVAVPPARDSQPVRRFGCTTAELKEMALWLKQSAIRTVAMQSTGVYWIAVYDILEEAGLEVYLVNARDTKNLPGRKSDVQESQWLMKLHTYGLLRNSFRPSQEIRTMRTYWRQRNDLVRSAGRHIQRIQKAMTQMNIQLANVLSDVSGMTGQAIIKAILSGERDPHKLAAFRDPRVKASEEEIARSLEGNWQGDLLFVLQQEQDGYEFCQKQMAECDQRLEQYLQQREDRSAGANLPEEKRQDRRKKKKGNKPLFDLRSGLFRMTGTDLTRIDGVDVMTAITILSEAGCDMSKWETEDHFVSWLRLCPDNRISGDKIIGKGRLPTNNRVSTALKMAASTLRLSKTYLGAQFRRLRSRLDTPVAIKAMAAKLARLVYRMLRYGMKYVDRGAEVYEAQHRQLQIKHLKSKAAKLGFQVIQVPAT

SEQ ID NO: 509072 - protein, 348 aa, unidentified
MTLIGCDLHTRKQQVAVLHTETGEVVEQELLHAGDAVEQFYRTLPRPVTVGIESTGYALWFHELMQRLGHTLLVGEAAKIRAMVVRKTKTDRRDAQHLLDLLKHERFPAVWIPDPATRDLRALVTHRVRLVRIRTMVKNGLQAIALNRRLALGSKLWSQRGRAQLSALDLPRHTAQRREDSLELLTWLEAHITGLDARIADAARAHPGARLLLTHPGVGALTALATVLVLGPAARFPGSKHVVSYVGLAPAVSASADTCHLGQITKQGSALLRWVLGQAAPLAARADDDLHRLYRTLIHRRGRPKARVAVARKLLVRLFIMIRDQIDYAEFRRRGRLPPRPDLHPRPV

SEQ ID NO: 509073 - protein, 416 aa, unidentified
MKTLHKRCAGIDVHKTEVVACLRVITHRKVEREVRRFPTTTHGLLELAEWLESARCTHVAMEATGVYWKPIWHILDGRFALILANAAHVKTVPGRKSDVNDATWLADLLAHGLIRPSFVPPAAIQELRDLTRSRKQLTREVAQHSQRIQAVLEEANVKLCSVITDILGASGRRMLKAMIAGEADAHKLAAMGSERLGCAPETLVEALTGRMREHHRFLLAQHLQTTEQLEKTIAAFDARIEEKLVPFRDTVERLKEVPGLGSTVTEFVIAEIGLDMSLFPSAGHLLSWAGFVPRLDESAGKSRSTRIRKGAPWLKPVLVQAAWGAARKKNSYFQAQFLRLKARHGAKKAAIAVAASILTTVYHMLRDGTCYQDLGPEYFTVATRRKPRPDWPIASAISATTLKLGLLHEAPDRVSS

SEQ ID NO: 509074 - protein, 331 aa, unidentified
MAKNFFQIHAIEREGGSPVTRKLSRNKFREFFSRTAPCRVAMEACGSSHYWARELGAMGHEVALIPPVYVKPYVKRGKNDAADAAAICEAMSRPDMRFAPIKSAAQQAVLMLHKTRDLLVKQRTMGVNALRGHLQEFGLIAPRGIHRVGDLIALARGRADLPEEAKQAVEILAWLGEELDAKIDALEKKIAQGAAKNPASRMLKQVPAIGPLIASAMAAFVPDPGVFKSGRDFSASLGLTPSQHSSGGKQKLGGITKKGNRYLRKNLVVGCTSVLRVAHKYKGALAEWIVAMKAKKPERVVAVALANRLARICWAIMSTGECFREDIYAKA

SEQ ID NO: 509075 - protein, 323 aa, unidentified
MVNLEKKVVGIDVSSKFLTVSFKNEKDQEMVYNVSNLKTGINGFLKKLKTEEYKIVVEATGSYSSKILHYASSLGFDVYQISPLTIKKYAEVKNVISKTDDEDAKLIRDFGEKMEMSLYKPKKENLEYLDQELNLWQDLEQEKARFSLKLKSLRQKARLNENVIKHYESLIKGIEKNIEKLLKRLPKLEDEELKDNKKLLKSISGIGEKTSLLLLVATNHFKDFGHPKSVSKYFGVAPRMYHSGNKKITIGKCRTTKGHIRSILYICSWSAVKSNAQCKALYERILEKGKCKKLALMAVCNKLLRQAFGIIKSKQEYQPDFAK

SEQ ID NO: 509076 - protein, 389 aa, unidentified
MKIFVGIDIAKLNHFAAAISSDGEILIEPFKFTNDADGFQLLVSKLESFDKNSIIIGLESTAHYGDNLVRYLVAEFYQVCVLNPIKTCQMRKNNVRKTKTDKVDTFVIAKTLMMQDDLRFITFFDLDMMDLKALGRFRQKTIKQRTRLKIQLTTYVDQVFPEIQYFFKSGLHQHAVYALLKEAPSPKEIASMHMTHLANLLKVNSHGHFTKEQAKELRVLAQKSVGANDSAISIQITQTIQQIELLDSQLDKIEAEMTDIMKFNDSVIITIPGIGYINGGMILGEIGDIHRFSNPNKLLAFAGLDPSVYQSGNFQAKTTRMSKRGSRVLRYALVNAAWNVVRNNATFKAYYDAKRAEGRSHYNALGHCAGKLVRVIWKMLTDEVEFNLE

SEQ ID NO: 509077 - protein, 312 aa, unidentified
MEKLSYGGIDVSKDCLDVVVLPEGWFFSVSNDTAGWAELVARLRPLAVSAIGLEPSGGYERGIIRALLAAGLSVRRINPNKLRQFARARGVLAKNDRLDARLIAEYVAIMPTRVVQRDDAVERLAEIVTMRRQLCDEHVAVENQAAHLEDAMLRRLSKRRLIRLEADIRLLDKRLAEMVATNAAFAQLYELLTSMPGVGPVLAFTLIALLPELGKMSRKQIAALVGLAPYDFDSGKLRGHRSIYGGRMPIRNVLYMAALSASRHNPALKAFSNRLAHANKKSKVIIVAVMRKMITTLNAMLRDNAAWQPQSA

SEQ ID NO: 509078 - protein, 345 aa, unidentified
MDHFAGLDVSVKETSVCIVDDTGKIVREVKVASEPEALLAVLKNPAYHFKRIGLEAGPLSQWLFSALAEAGLPVICVETRHMQAVLKAQINKTDRNDARGIAQMMRVGLYRPVHVKTLRSQKLRMLLTHRKLLLSKAIDIENDLRGTLRNFGLKVGMVGTAKFEARIKELVENLPDLAVLVEPLLVVRRVLREQIEILHRRLLTIVRDDEVCRRLMTVPGVGPVVALTYRATVDVPARFRKSKSVGAVFGLTCSKYQSGEIDRSGRISRCGDEMVRVMLYEAAQVMLTRTNKWSWLKAWAMQIARRRGIKKAIVALARRLAVILHRIWVDGTEFRWTREPATAAA

SEQ ID NO: 509079 - protein, 414 aa, unidentified
MSHLIAGIDVHKKMLAVVIADVGGEGVGPFQHRRSGATPEELRVLGVWLAELGVQEVVMESTAQYWKPVWQELEGRFHLELAQAQSNRGARGRKSDFLDAERLVRRYAADELTLSYVPDPEQRLWRTLSRTKQRWCREKSRLQSRLEALLEEMRIKLSSVVSDLLGVSARRMLEGIAKGETDAQRLAEMADPNLRAGKEQLCNVLQAVGHLDPRYRRVLKQYLDQLELNERQVQELEVQLAESLQPHAEAVERLAEIPGLGVDSAQQIIAEIGPAAEKFPSAGDLSSWVGTCPGQDVSAEKSGSEASPKGNQSMRSILDQAANAAVKAKGTVFEARYKRLRGRDPKRQNLAVWAVAHHLCRVVCKILHAKVRYEERGNRNNPRADKRRAARLLRELKLLGYQVKATPLASEIRG

SEQ ID NO: 509080 - protein, 465 aa, unidentified
MGAGKMNRKQRKELGRKLQSANPGLEVVHPRAAGIDVGNGAHYVAVRPEQDAEPVRRFECFTADLHRMAGWLEACEVKTVAMQSTGVYWIPLYEILEQRGFEVYLVNARHTKNLPGRKSDVQESQWLLKLHTHGLLNNSFQPTAEIRVVRTYWRQRGEHVRGASTCIQRIQKVLTQMNVQLANVISDLSGLTGQAIVRAILAGERDPRKLAELSHPRIRAGREQIAKSLEGNWRSELLFVLKQEMEMYDTYQHKIAECDRELEATLKKFGVPERASTEQPKIPNTKKTKRIQRNAPGFNLTSELHRITGVDLSRIDGVNAIVAQTIISEVGLDMTRWKTEAHFASWLGLCPDNRISGDKVLARGTRHVINRAATALRMAATTLIKSQSYLGAQYRRLRTKLGAPKAITAMAHRLARLVFRMLKYGQEYVDKGTQYYEQKHREQQLHLLKKKAATLGFQVVETGVA

SEQ ID NO: 509081 - protein, 395 aa, unidentified
MFIVGIDIAKRAHVVSVMTSEGQIVCRPFSIRNNCSGYNLLLERLRKISNIKSMFTIAMESTAHYWLPLYTRLRREGWNVLVMNPLQTHAVRELLIRETKTDAVDAQLIADVVRFGRVRSSSVPQEELLALRELCRNRFYLMDLASDLKRKITALLDQVFPEFETQFDSIFCKSGLAVLRRYPTPERLAKAQLGKLTEILQSASNGRFGEWKAREVRECARISFGLPDSEGVYSTLILMYLEQMQHLIDAAATLERHILEHFSRFQTTLTSIPGVGPVLGAAILSEIRDISVFSSSDKLAAYAGVDPRVKQSGETKLGGVHMSKRGSPYLRRAIWRASVVAVQHDPMFKAYYEKKAAEGMRYMNIIGHVTRKMTAVIFAVMRDNKTYQPIMPSAA

SEQ ID NO: 509082 - protein, 315 aa, unidentified
MSDSLAQVAGIDIAKDHLDVHLHPSGATRRVSNDQAGHKALLGWFARQPIERVVFEATGPYHRGFERALSAAGVPFAKINPRQARRFAEATGRLAKTDRVDAALLARLGALLQPEAREPKSPVLDELTELVAARRALVKDRTACRNRAKIVTIPLLKSQAAQRLRQIEAQIAALDRLCRERVAADQTLSQRLSILTSIPGLGEATAIALLADMPELGQLEPKQAASLAGLAPVARESGTWRGKSFIRGGRAQVRQALYMPALVAVRFNEPLKTKYRALTQAGKPAKVAITAIMRKLIVLANALLHQNRKWAPHLA

SEQ ID NO: 509083 - protein, 343 aa, unidentified
MQIAVLGIDLGKNSCSLAGLDNTGRVVMRRRLRRESVIKFAARLPPCIVAMEACCGAHHLGRILRSQGHEVRLMSPEYVRPYVKAQKNDDRDAEAIAEAATRPTMRFVELKSEEQLDMQTLHRARDRLVGERTALINQLRAVLLERGIVVPQGRRKLEQHLAAMLDEGEDVPLSPRVRALVVDMRAEWRELDRRIGAFDDEFAARARSDEAARRLATIPGIGVLNATALVAAIGTGEAFRRGRDLAAWLGLVPRQASTGGRAKLLGISKRGNKYLRKLLIHGARSVLRPLSRSATPLGAWLRGLLARAHVNTAVVALANKLARIAWAVLSRTRTFNAGAVMVA

SEQ ID NO: 509084 - protein, 413 aa, unidentified
MKLFVGIDVSSEKLDVCFLDSSDTTLKEVTLPNNINGASSIKDDVLQFHQSFNYEKIVIGMESTSIYSFHPATFLSEDLELKSLGLVEVVIQNPKSIHRYKGLFEEDKNDRIDAFRIADFLRIERFNKTVLKEERYVALQRLTRSRYQMVHQLTECKQHFLENLYYKCNTLSKELDTSVFGATMLDLLSDALTLDEMAEMELEDLANLLQEKGRGRFSDPQKLAKTIKKAIRDSYRLGKVVQESVDMVLATYARLIQTLKKQIKDLEKSIVALFEIVTEAQCLKSIPGIGIVYAAGIVAEIGQIERFENEAQLAKYCGLYWKKNQSGNFESERTPLTRTGNQYLRYYMVEAANSIRRHEDTYRLYYQKKYDEVPKFKHKRALVLTARKLVRLVDTLLRNHQLYTPERSVSLKS

SEQ ID NO: 509085 - protein, 410 aa, unidentified
MEVLYAVCCGLDVHKASVTACLRAPGDRGDRRQEVRTFGTTTGELLRLVDWLRAAGCTHVALESTGIYWRPVYNLLEDHVELFLVNAQHVKMVPGRKSDVRDSEWLAQLLELGLLRRSFVPPAAQRELRDVVRYRKRLIENRTREANRLQKVLETANIKLGSVATEILGVSARAMLKALIAGVHPPDQVAELAKRSLRRKRAALAEALTGRVTTHHRFLLAQLLRHIEFLDDAIAACDREIVTRTAAQADALTRLDTIPGVARRTAEVIVAELGGDMTRFPTAGHAASWTGLCPGTNESAGKRLSGRTRQANRTLRAALVESARAAVCKRDCYLAAQYRRLVKRRGDKKAIVAVAHSILVIAYHVLRDGHSYHELGGDYFDRMSTDRLTRYHTRRLAALGYAVTLTPRAA

SEQ ID NO: 509086 - protein, 475 aa, unidentified
MNIKGTKKKNQVVTVNIFEQQELLKKAEVIREKLTASTWRELETNGKFGKNEKRSFISDDMLILGCDIGSDTHYVRAIDTRGRELSKSAFPFSNTLEGFQSLMDWATKIAASNDKKQIILGLEPTGHYWFCLATWLIGNGISVVQVNPYAVKQTKEVEDNSQLKDDRKDPKLIANLVKDGNFGMPYLPEKLYADIRRLSMLRDQINEDRIRDLNRLHREMKIYFPEYKDAFGKIDGAFCLEVLKVAPFPEDLVTLGVEGIRQIWHEAKLRGRGYVNATSIFENAKKSIGIQDGAESSKVAVKWLVHRMLESNEQLADIESRLHQMCMDIPYAENILAISGIGKNTLSGILAEMGDISRFDDVKEIQKLSGLGLVACSSGKHKGETKISHRGRKRLRYWLFQAAKSAVAHANEFKELHAYYTTRKDNPLKKKQSLVVIACKILRVIFAILTKGTPYDPKKMLGDIVRPNEQSVQVA

SEQ ID NO: 509087 - protein, 418 aa, unidentified
MKDIKPEKGKKINRKTLIVAFDVAQEKHMVYIRCPDGREEKPFVVFNRREEYEQMWERISQTREAYGVEEVVVGFESTGPYAEPLVHYLMKKEVKLVQVNPMHTKRVKELRGNSPNKTDEKDTEVIADIIELGNYLTVVIPEGISAELRRLTQARERAVGRRTMLVNQVHGLVSVIFPEFLTVMKDIKTKTAHYVLKHCPRPQDIVGLGYERLVETLKKISRGRLGKERAEVLYEAAVNTVGVREGQGSIVFEIKQLMAGIEETGRLIDEIEEKMREYLKEIPYSRCMLSIQGVGEVTVGGLIGEVGDFTKYKTIAEITKLAGLDLFEVSSGKHKGERHISKRGRPLMRKLLFYAAINVVRKGRIMHERYERYLQRGMPKIKALTAIARKLLGVLFALVRDQSEYVRNYEGIPLKKVA

SEQ ID NO: 509088 - protein, 337 aa, unidentified
MANDMRQGTVAGIDVSAATLDAMRVGSEGTVAVEQFANTAAGHRRARRWLAAGGGPVRVVLEATGVYHRALTRTLAATAGVEVMVANPRAVAAFAQALQPRTRTDRTMASVLCAYAQHMAFRPWHSPPAAAQQLQLVARRIAQLTGTQTQEKNRLHALTASGEAPAAVVHDVRQELRALERRLALLTREAQRLIDAAPLLRRAFQRLVSIPGIAQTSAIQLLGELAVWPPDLTVRQWVASAGLDVRVVQSGTSVHSRPRLSKVGNARIRAALYLPALSAVQHEPHVRAFHQALVARGKAPQQAIAAVMRKLLHAIYGMLKADAAWDGARFRRLPQAA

SEQ ID NO: 509089 - protein, 415 aa, unidentified
MEVLFSRCCGLDVHKSTITACVRIQDVGAKPRKIVRRFGAMTGDLRALANWLIEQGVTHVAMESTGVYWKPVWNILEGQFTLVLANAQHVKNVPGRKTDTKDSEWLAELLQHGLLAGSFVPPRLIRDLRDLTRTRAVLTQESSRLASRIQKVLEDANIKLASVASDTLGKSGQAMLEALIAGQDDPEQLADLALGTLRGKIPQLRRALEGLIREHHRFLLKRLLAQWRFVESETELIDQRLEQIGREEAPIAEAVARWDTVPGVDRIAAWGLVAEMGIDMEQFPSAKHAASWGGVCPGNHESAGKRLGGRTRKGNPWLKRILGQSAWAAARTKNTYVAVQFRRLAAKRGRKRAIVAVGHNLLVSGYYLLRKQCFYQDLGADYFDRLNAEGLKRYLVKRLESLGQKVTLEPRERIA

SEQ ID NO: 509090 - protein, 393 aa, unidentified
MVCVGIDVAKDKHDCFILSSEGEVLADVFTVANNREGFETLLRRIQSYTRPSDKVKVGLEATGHYSYNILGFLLNNGLPTFIINPLLTNLFRKSTSLRRTKTDRIDARTIASMLMSDVDLKSYTDTAYHNEELKSLTRYRFDKVKERAKLKQSVSRLVNILFPELETLVPTLHMASVYAMLSEFPGAKQIADSHLTHFKTVLSEASKGRYDREKAVNIRETARFSIGSAMPAKSLELQHTIRLIRELDKEIDEIDAAIKTIIDEMAPPILTIPGISYRMGAMILAEIGDFSRFDSPDKLLAYAGLSPSTYQSGKLNATGAYSHMEKRGSRYLRYALFNATKYVCIWDPSFAAYLAKKRAEGKHYNVALSHAAKKLVRLIYALQTSAEAFQPVT

SEQ ID NO: 509091 - protein, 347 aa, unidentified
MRKIAYLAMDVHARNTVMGDMNGDGKFLGNRCFPTSDDNIANALKMVKAKKKLLVMEAGPLANWVAQTATPFVTEAFISDPRENALIYNSSVKKDKIDTQKLCRLLRLNEFKAVYRPENDQRAIFKAAVQHYNDLRDQLKAIKQKTKAMYRQWGVIDVFTDSVYSTSGRDKFLVQVQQRPILLQLKRLYALMDFTADMKQDAKKTMIALGRKYPEIKEFKKMPGISTIGAHTFDAYIQTPHRFARRNRLWKYCRTGVTDRSSDGKPLGFKRLDRAGIGELKAVSYRAFISAMKSDNEVKRFYLQSLQRTHNHKHARLNTQRKILAVMLGIWKKGQPYRAELFLDPCK

SEQ ID NO: 509092 - protein, 422 aa, unidentified
MLEETQETEEIIQRVAALDIGKAELTCCVRVPSPGKRGRRAQEVRTYQTMTRWLLVMADRLAELGVTRVVMEATSDYWKGVFYLLEAQGFETWLVNARDVKHLPGRPKTDTLDAVWLCKVAERQMLRPSFVPPQGIRQLRDVTRYRADLVGVRTAEKQRVEKLLEDAQIKLSVVASDIFGVSGRAMLAALIAGERDPERLAQLARARMRAKLSLLAEAFTGFFTDHHGFLLARMLDRIDQLSADIDALDARIEALIGPFAQAVDRLDEIPGVGQTAAHLLIAEIGVDMTRFPTAGHLVSWAKFAPGVKESAGKRKGTATTGHGNPYLARVLGEAAVAAGRTDTFLGERYRRIARRRGAKKAIVAVGRSILVIVWHLLADPNVRFCDLGAGFYDSRVNADRAKRNHVRQLEALGYKVTLEPAA

SEQ ID NO: 509093 - protein, 356 aa, unidentified
MEEIDDADLVVERVAALDLGKAGLDACVRVPHTHHPGRRMQELRSYGTTTAQLLELAAWLRHWHVQRVVMESTSTYWKGVYYLLEAEGFDCWLVNAREVKNVPGRAKTDRADAVWLAKVAERGMCRPSLVHPPEIRRLRDLTRYRRALVQDRTRERQRVEKLLEDAQIKISSVLSDLHGVTGRAMMDALINGQRDPHTLAQLAKGSARKKTARLEEALRGFFTDHHAMILQMMLANSDRLSAQIAELDGRIEEALSPFCAQSARLADVPGVDVMAAAELIAEVGVDMTRFPSAAHLVSWAKFCPQTHQSAGKSKSQGRGKGNPWLAGTLGRVVFANSRSETFLGARYRRLARRRGK

SEQ ID NO: 509094 - protein, 413 aa, unidentified
MDLLHPRCAGLDVSKRDAKVCVRLAREGRAGATSTVTTWSSMTGQILALREHLIAEQVTLVVMEATGDYWKPFYYLLEDAPFEVVLVNAAQVKNVPGRKTDVNDATWLAQLGAHGLVRGSFVPPQPVRELRDLTRTRTALTRERTREWQRMEKLLEDAGVKLTSVATDISGPSGRAMLAALIDGQRDPAVLADLAKARLRDKIPALTEALTGRFTAHHAFLARLHLTLIDQHTQAVEEITARIEVVIEPFRRARDLIVTVPGISTTVADIIIAETGADMTRFPTAGHLASWAGTTPGSHESAGRVKSTKTRPGNPYLKGALGIAALSIARSKQDTRLSARYRRIASRRGPMKALVAIEHTLLTAIWHMLTRDVDYSDLGGDYYTRRNPDKTKQRALSQLRELGYDVTLEARAA

SEQ ID NO: 509095 - protein, 379 aa, unidentified
MEAKRKDPLSIRHRCARVEMSSNHSQDRGSDMQVTTYGVDLAKQVFQVHWVETDSGEVKRKTLTRGQLQVFFARRTGGVVAMEACASAHHWGRALRALGHQVRLISGQFVRPFVKSNKTDAADAQGIWEAAQRPEMRFVALKSEQQQALMGLHRIRAQLVKQRTMQANQVRGLLYEFGVVVPKSWRALLAQAAPILADASRVEIPDLIRGELQQQLQGLRELTGRIEQLERSIGAYRAQDEQCRRIEAIPGVGPLSSTAIMASIGNARTFRSGREFAAFLGLVPRQSGTGGRVRLLGISKRGDPYLRTLLIHGARAVVNHSSRPGRTMPSWLRELLSRRPKNVAIVALANKIARTIWALLAHERTFDNRWGQAMPVPVL

SEQ ID NO: 509096 - protein, 387 aa, unidentified
MYFVGIDISKFKHDCAIIDELCDTVMPSWSFSNDREGFSHFKALLDSLEGEKKIGLESTGHYGQNLKQFLESNGFTFMEFNPLLVSRFVRSKSLRNTKTDSIDALSIAQYVMTVEYKPYPSSFYHLDKLKSLTRFRNSLVRQRSRQLVELTNVLDKLFPEFKPFFKDKFSVTALYILAHYQTPERIANMNARSYEALRKLSRGRFTLSNFTQLKALAKNTVGTQSDYLLDQMNILLELYSQLDSKVDELEAQIKECVRGIDPPCLSIPGVGELSAAMILSEFGDFSKFQTPSKMLAFAGLEPGYFQSGQSEYTGHMVKHGSSRLRYALMNCCLPLISNEPVFAAYYAKKRSEGKPHRVALTHVAKKLLRVIYTLQTKNIRYDPTMIH

SEQ ID NO: 509097 - protein, 345 aa, unidentified
MKVLIGVDPHKASLAVAAVNEAGELVEGAHFLQNRVGLRSLERWSKRFPKRRWAVENAGGLGRHLAQRLAAAGESVVDVPPKLSARVRVLSTGNSRKNDGLDALATALAAWRNERLAAVDPEDSSEALRLLSERREDLVAERTRALNRLHGLLRDLVPGGVAGTLSARRAARILRGIRPQSSSSRIRRRLASEVLSDVRTLDRKIADLNGRIKAEVEASGTTLTEIFGIGPILAAKIIGTVGSVARFPTKAHFASYSGTAPVEASSGEVVRHRLSLAANRHLNYALHMVAVCQARSDARGGAYYRKKIEEGKSRKEALRCLKRRISDAVFASLVADSQAPWRSAA

SEQ ID NO: 509098 - protein, 456 aa, unidentified
MTHKRKAKASTEPIRPTINTRAAGADIGAREIYIAVSPELDATPVRSFNTFTGDLKTLVAWLKTLGITTVAMEATSVYWIPLAELLEEAKIEVCLVNARHVKNVPGRKTDVLDCQWLQYLHSVGLLRASFRPAASVRAIRSLWRHREALVRQSAWHTQHAHKALDQMNIQIHHVIADMTGKSGEAIVKAILAGERDARTLAALGDKRLKANTQTLAKALEGDWREEHLFCLRQAHAGYEFTLKQIAEVDAQLETLHQALEAAQHISEAPNAKPKAKPRCGCPVSYDAAGLLQAHLGVDLTQIPGINVNTAQTIYAEVGPDLGAFRSGKHFASWMGLNPNNKISGGKIMSAHTKKCANRLKKALRMAAQGACHGDNEIGVYGRRMKTKLGGASAVTAVAHKLARIVYAVLTTRQAYDGEQHRRYERRREQRTLEQLRKKAKKMGFELTAIQQPASCN

SEQ ID NO: 509099 - protein, 345 aa, unidentified
MFYCGADVHSKSTYLVVLDGKGREVLSGAVPTERKALLEALKPYAKKGLKVIQETGSSMAFIQSVFEGTGVEVVTVHATAMKVITASKKKTDKRDAYHLAWASYKDALPEPVYVPTSSEQELRQLLSAQQRIRKGRTEVSNGVRGQLKGFGIVLPARALTKHQGWEELMARGLAPAMDLIVRESYGVWEVQTRALEAVERAIGDRTQGDELVRRLKSIPYVGDACAAAIRAYLGDLDRFHGRKSVVSYAGFNPSQRDSGARQVRGHLTRQGPSRLRSVFVQAAHCLIGRGFKGHAGWKAWYERLLHRRGHRHIAVVAVARRLYALAYQVGRSGQVYKASLSGSVK

SEQ ID NO: 509100 - protein, 371 aa, unidentified
MFQPIRYVGLDVSKETIAVAVAEPDGTVVEYGDIPNDSSSVRRLVEKLSRDAQLKTAYEAGPTGYPLHRQLTSLGIENKVVAPSLIPRRSGDRVKTDQRDAVQLARLLRSGDLTPVWVPDEAHEALRDLVRARDDARTEGLRTKHHLSKFLLRQGVIAPARVGRAWSAQHQAWLSTLTFRDRAGQVTFDDYLACVRAAIERVRRLDAALLECGASSPHVELLRALQAVRGIGFLTAVTIVAEAGDLHRFRSAPAFMAYVGLVPSEHSSGGSKRRGHITKTGNRLLRHVLGEAAHHARLQPRVSEALRQRQQGVPKVVVEISWRCQQRLHHKYRHLGGRIGRQRTISAVARELAGFVWAVGQAVQPIAAVAA

SEQ ID NO: 509101 - protein, 407 aa, unidentified
MVAVMIGVDPHKGSHTAVVIGGAEQPLGELRVAASAGQAEELVAWAAEWPERTWAVEGAAGLGRLLAQQLVAAGERVLDVPPKLASRVRLLEAGDTNKNDPNDARSVAVAALRSKAVRQVAAEDHHGAVLKIWARRHRDLARSRNQVACRLRAVIADLVPGGVRKEITAGHATSVLDRITPAGPVETARRDLAAQFLDDLRRLDTQLAETKKQLAAAVRASGTTVTEVFGVGPVIAGTVIGDTGDISRFASRGHFAAYNGTAPVEVSSGARKIYRLSLRGNRRMNHAIHMAAITQIRHAHSDGRAYYDRKIAQGKTHKEALRCLKRRISDAIYARLRADARKTVTAISAGPGGQTGNGSDSSAASSHPARQLFGQATPGPATTLRPRTPARAPAARNRRLKDLEMNP

SEQ ID NO: 509102 - protein, 340 aa, unidentified
MPLYGAFDLHAKTNHLGIIDGSGKRVVMKKLPNDASIILETLKSMKRRIVGLVVESTYNWYWLVDLLMEAGYKVHLANPSAIQKYSGLKHADDVHDAFWLAEQLRLGVLPVGYIYPKEERPIRDLLRKRGHLVRLRTSLIISLQNIISRNVGMQVNVNEVKRLKEDRVTPLLGMNEDLALAGRASKESIDFLTRQIKQIEKVVESRVQLKEPYRYLLTLPGVGKILGLTIMLETGTISRFPGVGDYASYSRKVTSKWTSDGKAKGKGNKKNGNKYLAWAFSEAAECARRYDEQARAYYNRKARKSNFMVAHSALAHKLARAAYYLMRDHVPFMPEKLFAL

SEQ ID NO: 509103 - protein, 460 aa, unidentified
MKRARSIHPKKGSASVSSSSFSMIHPHAAGIDIGSREHWVAVPEERDEHPVRRFGCFTADLYALADWLKRCGVETVAMESTGIYWIPLYQILEDRGFDVKLVNARHVKNVPGRKSDVQDCRWLQRLHSYGLLSGSFRPEAQVCVLRSYLRQRDNLVRYASAHIQHMQKALGEMNLQLHKVLSDITGVTGMRIIRAILAGERNPAALAALRNYRVKSTEDEIAKALEGDYRAEHLFALQQAVELYDTYQQKIAACDGRIEALLGSFEPRVKGEPCVPATPRKRRKNEPYFDLRGHLHRVTGVDFTQIKGLDTSTVQTLLSEVGLDPTRFPSEKHFCSWMGLCPDHRITGGKVKKRSTRKVSNRAADAFRLAAQTLANSASALGGYYRRMRARLGAPKAITATAHKLARLFYRLWKTGDAYQDPGADYYERMYKERILSNMKRKAKELGFTLELKPLERAVS

SEQ ID NO: 509104 - protein, 365 aa, unidentified
MTDGTTRFIGLDVHKETVTAAVAETSGPPALVGTVRNDSEEIRRLIHRLAQGAQLATAYEAGPTGYQLHRQLVGLGVRSHVVAPTLTPTRPGDRVKTDKRDALALTRLLRSGDLTPVWVPDLEHEALRDLVRACEDAKVDLLRARHRLSKFLLRHGISAPGTFRPNTTRYDRWLNALRFEPLAQQLAFEDYVGALRAAEDRRRRLHAALQQCAEESPLLPLMAAIQCLRGLAFHSAATIVAEVGDFTRFPTARQFMGYTGLTPSEHSSGPTRRRGQITRAGNAHLRHILVQAAHNARHRPNTDALRQRLLDAPPDVVQLAHAAQRRLYRRYWHLQRRIGATKAVTAVARELAGFVWAVGQRMASA

SEQ ID NO: 509105 - protein, 322 aa, unidentified
MSQPGSLCVDIDVSKAILDIAASSAIEQFSVGNDSDGFDAIIAELRMYAIALVLMKATGGLETAIVCALQAEGFELAVVNPRQARDFARAMGYLAKTDSIDARVLSQMAEVLNRHPERERFIRALPDTECQLLTAMVVRRRQLITMLVAERNRLHPAHPLNRKSINIIIKALEDELARLDADMNSHIHSHFKELAKRLSSIKGVGTMTAAALLAEVPEQGNLSRREISVLVGMVPVNRDSGTMRGRRTIFGGRAGVRTALYMAALVATRFNPVIKVFYMRLLAAGKPKKVALVTCIRKLLTILNAMLRKNEEWNESYHHVAP

SEQ ID NO: 509106 - protein, 403 aa, unidentified
MNNVAGIDVSKGKSMVSVLRPFGEVVAKPFSVGHTGSELKELADYLKSLDGETRVVMEHTGRYYEPVARFLHEEGVFVSAVNPKLIKDYGNNTLRKVKTDKADSRKIARYGIDNWAELRQHTPMDTIRMQLKTLNRQQSLYTKTKTMMKNNLIALLDQTYPGVNALFDSPVREDGSQKWVDFATAFWHVDCVRNMSLTAFAERYRKWCKRHGYNFSQSKAVEVHTGAQDLIAMLPKDALTKTMVRQAIDALNAVSASLERLKAEMQALAAQLPEYPVVMAMHGVGDSLGPQLMAELGDVARFTHRNAITAFAGVDPGADQSGTHEAKSTRVSKSGPPELRRALFLVMDCLLKTQPQDDPVYRFMDKKRAEGKPYLVYMTAGANKFLRIYYGRVKEYLASLEGN

SEQ ID NO: 509107 - protein, 403 aa, unidentified
MDVHKSSISACILLREAGRVQKHQRRFGAMTQELQELAEWLRQFGVSQVAMESSGVYWKPVWNILEGQFTVVLANAQHIKNVPGRKTDQKDAEWIAQLLQYGLLRASYIPCEIIRDLRDLTRMRTSLSQEASRISSRIQKVLEDANVKLASVATNVLGKRGRAMLEDIITGEDDPEHLASLALGHLRVKIPQLRLALEGKIRSHHRFLLRRLVDQIQFVEHEIALLDERLEDIGRQRPDLAQAVARWDTIPGIDRVAAWALLAEIGDNMAQFPTAEHLASWAALCPGNHESAGKRLRGATRQGSPWLCRMACQCAWAAARTKNTYLSSQFRRLAARRGKKRAIIAVAHTLIIIGYHLQKNQSNYEDLGGNYFDRIHSDGLKRYLVKRLQQLGHKVTLEPMEAA

SEQ ID NO: 509108 - protein, 404 aa, unidentified
MKTTSTFAGIDWSWQHHALCIVDDDGKRISETTVTHSKAGLTKITSLLRSHHVERVGIERGDGPVVEHLIRDQFEVVVISPRQVKSLRARYGSAGNKDDRFDAFVLADALRTDPHRWAVVRPDSDATVALRALVRARQDLVGHRIAVHNQLLATLQHHFPGAIGLFYQLDIPISLAFLRRFPSEAQAAWLSPIRLGHWLEANGYCGRATPADLIRHLHEAAAGHTGGAVSDAEELIVLSLVDLLTSLRQRQSALEARIKEALLAHPDGPIVQSLPRSGVVRAATLLAEIGDCRARFPDAQSLAAAAGVAPSTRQSGKHRNVTYRRGCNKQLRAALVDWAQDTPRANAWAHDTYYRARARGCRHPHAARILAQGWTRILWRCWHDNTPYNPELHGRLSTLAMEAA

SEQ ID NO: 509109 - protein, 408 aa, unidentified
MSIVFGIDVSSRDSSVCVLQSGVTREYKITNDTIGFKTLLIDLKEYAEHPQIILEATGIYSRRITRFLDEYDYDYVLLNPLKAKKEINQGLRRNKTDRNDAYHLALAQDRNQHQPNRKEPEAYHQLQSLSRAYEELTHDIVSSKNRLHKYLQLTFPELETIFNNSRGVNYWYLVELFPHCQDVRNLDVSTIAKQIKDFKGYGINRAQKLAIKLKHLADLAYPAVDQDDPERDEVVYYANRLLRLTADRERRSEAMIKLAKTLPNRDLEILMSIPGIAEITAVRILAELGDIRRFSNPNKINAFVGIDPGRYQSGEKDSSLRISKHGNAVARKILYRAIGQIDLAAKTSPCHIADYYERKKQFSQTKGFKKIAIASIHKLLRTVYILIITDQMYDYNVANNNQKDFCRN

SEQ ID NO: 509110 - protein, 392 aa, unidentified
MLFIGIDAASNSHEAAITTLHGEVLTEPFTIPNNISGFKKLRSEIYSHTEHHNNVRIGIEETGIYHKNITEFLALCGFTVHTINAVLTSHSRKSQSVRLTKTDKIDALSICRYLEFNFKRLNSYTPSLYINEELKSLSRARFDVQNKLSKAKTEYTRLIDLSFPEFKQHFNQHSKWSYKLLSQYPSADKISRAHLKTLIKIIAIKGDRTAAANQLKSIAKNSIGSQSVTNELLLTNVLEDIKHFTSQAKRFENAISKIVEEHYENILSIPGIGNITAGLIIGEIGDISRFKSSSALLAYAGLDPIVHQSGKFKATKVNISKRGSAYLRTAIFTSTRVACVSPNIPDNKFRTKYYKKLNQGKHDHSAICHACKNMVNVIFALLKSGDFYKFDY

SEQ ID NO: 509111 - protein, 363 aa, unidentified
MHYVNNTELSSHEETRCQFNGGTGAIKLGIDVHQDFYVVVMQEGGTNPKPPQRFQKQAFLHWAAKLKSQGTEVHAVYEACGFGFSLQRQLSALGVHCHVICPQKLDEQNRRVKTDGLDAKALCLKLDRFVQGNRDALALVRVPSEEEEQKRAIHRQREQLVKARKQLEAHGRSLLVNHGLEPVQNWWKPRTFAVLPAPQWMKELLQNSQPILFALQEKIAALTLQLQNAAAPKQPRGLGKMTSVIIDREIGDWRRFNNRRQIASYTGLCPGEYSSGNTRLQNCVTKHGNPRLRAALVELAWRLIRFQPNYKPIIKWKEVLRRGALATGAARKKAIVAVARQLAVDLWRIKTGRVSAATLGLIN

SEQ ID NO: 509112 - protein, 351 aa, unidentified
MKLEPTAQPKLYIGIDIHQRSWKVHCATDLFGGKSFAMPPKPEVLYEYVAKHFPDHQVTTAYEAGCCGYYAHRSFEAYGWHSLVVNPADIHRKGKERFTKTDKIDAQLISRELKDGRLESIHVPHVEREQLRSLFRRRNDLVKDYRRIKSLIKMQLLYFGIAIPEEFDNDHWSHKFRGWVDEVVFAYPSARETLDSRMRSFRFIDQELRDVSTKMRAYCRKHYKKDYYLLKSIPGIGGIVACGIICELGDLRRFNSIKHLAGYVGLAPGIHQSGDNQKSTGITMRAHRLMRSYFIEASWQAIRTDPIMQTYYRKHLGKNVKSIIIKVARKLLSRTLAVIKTETPYAMGVIE

SEQ ID NO: 509113 - protein, 428 aa, unidentified
MDDVARFTQFCKLRSEIRGSGKYLIVGIDIAKDKHHAFFGTPNGKALWRRLIFTNDIVGYNRLLEQVNTLTHQHQLQQVVFGLEPTSNYHKPLAHWLTQKNYLVVLVAGKAVKDNRELIDGRWDKNDTKDSANVADLIGQGKCLFYENPEEDIISLRNLLSVRKQLKKQEHRQRMRIRNGLLAKYFPEMDRHWGSCIEENLAIVRWYLDPRKISKTDFSLFLQRVTTTDRGARQVNRIRKIHDAAKKSVGLPVNAAAVFEAKMLVERFKSVRQESLQIMEQIEAICRRLPSYKLLLTIPGFGPYIAPLVLSALANPLRFKSRKQVIRLAGLDLNANRSGKKSQDSVPVISKKGDADLRYGLYQAALIASYHNDYFRTIYHRVLEGRQGERGIKTKARVKLAAKMLVVAWTMLKNNEPFNPNHLLTEPV

SEQ ID NO: 509114 - protein, 334 aa, unidentified
MKELKSSVGIDISKDSFEVCIKQLVGERGVIKATHSFQNSFTGFDDFLKWTLRKVSSPIFVMETTGVYHEDLTHFLYSNEQKVAVVLANKMKHFAKSLNMKTKTDKADAQMIAQYGLERQLEWWQPMMPQMKDLRDLCRERLSLKKDLVRCKCQVHALKHAHSTLYVVLQLKEQQIEFLDKNIQVVENEIIRITKEDKEFSQRVKNIETIKGVRLLTIITVLCETNGFTQFNNIRQVVSYAGLDIAERQSGLFKGKTRISKKGNARIRECLYMPALSATSYNEPIKALYERVVERNPTIKRKGVIASMRKLLILIFVLWKKNEAYNAEYQWNTR

SEQ ID NO: 509115 - protein, 376 aa, unidentified
MKNVRFVGLDVHAETIAVAVAELNGEVRSLGVIPNRAESVGRLMRKLGKPEQLRVCYEAGPTGYVLYWQLAQLGVHCEVVAPTLVPVKSGDRVKTDRRDAEKLARCHRAGDLTRVWVPDAAHEALRDLVRARLAAKRDQLRARHRLGKFLLRQGRRAPEGTTSWTGKYLGWVKQQHFEQAAQEATLLDYLHEVEHVAERIMRLERGIDAAVNSMPEGLRTVIAGLQCLRGVAKISAVTLVSELGQISRFAHARQLMGYAGMVSREHSSGERIRRGSISKAGNAHLRRIVTEAAWSYRHRPNIGTTLATRQCGSSETVKAIAWRAQHRLHARYRALLARSKTKQKVITALGRELLGFIWAIGVELERAQHQEVRRAA

SEQ ID NO: 509116 - protein, 393 aa, unidentified
MICIGIDVAKDKHDCFILNSEGEVLADVFTIQNNRDGFESLLQRIHSCAQKPEKIIVGLEATGHYSYNILGFLLDHGLPTCVINPLHTNLYRKSLSLRKTKTDRIDARTIAMMLMSDVDLKSYTDTAYHNEELKSLTRYRFNKVQERAKLKQSVARLVNILFPELERLFPSLHLASVYALLAEFPGAKQIASAHLSHLKSVLLEASKGRYHRDKAVDIREAARSSVGSNMPAKSLELRHTIRLIGELDKEIAEIESAIEEIMNAIQSPITTIPGMGLRMGAMILAEIGDFSNFDSPDKILAYAGLSPSTYESGKLSLAGSHSHMEKRGSRYLRYAIFNATKYVCLWDSTFAAYLARKRAEGKHYYVAISHAAKKLVRVIYALQKSGKAYKALT

SEQ ID NO: 509117 - protein, 361 aa, unidentified
MKKVSRELPKMEAGIAKPEMTVGLDLGDRYSHYCLLNSDGEVIEEGRVQSTEAALRRHFEGEDCLRIALECGTHSPWVSRLLNALGHQVIVANARQIPAITGSESKNDRNDAEKLARFAAFDPKLLSPLEHRSEERQMDLNLIHARSTLVRARTMIVNALRGLVKSAGGRLPACSTDIFPARALAAIPPALIAVATPLVEQIGLLNAQVNGMDKQIEKLSAKYPEIVLLRTAPGVGPIVAAAYVLTLGQPDAASNRSAGAFLGLRPAQSQSGAADPQRRISKSGDSFLRSLLVQSAQYVLGRFGPDSELRRWGLKLAATGGKRGKKRAIVAVARKLAVVLHALWRSGQRFQPFPQQAAVAA

SEQ ID NO: 509118 - protein, 432 aa, unidentified
MPSTTAKTNPTQPDFAALIGLDWGDKAHAIALACADGQREQQTLQHSAENLHRWLEQLQQRFGGRPVALAFEYHTGPLLHVLVQYPWLTIYPVAPVTSARYRQAWKPSGASDDGPDALHILDLLEHHRDKLSPLVQNELLTRKLEGLVQARRGAVDARSALTNQLGSVLKTYYPQALELVGKDLASQLALDFLAKWPDLISLKTARTTTIKGFFHRHNLRRPERLEEHLQAIDQAVALTTDEAIVTVAMAQVALLIEQLGVLQKHIATFDDAIKTAFAQHPDAALFRELPGAGPALGPRLTVAFGDDRGRYPAAANFSQYAGVAPVREKSGQREWIHWRWNAPVFLRQTLVEWAAQTVVWCPWAKEFYQTMQKRGKNRQTILRALAFKWARILWRCWQERTPYDEAKYMAALRRRNSPYAVSLPKAGEAQIG

SEQ ID NO: 509119 - protein, 348 aa, unidentified
MDKITAVGLDLAKQIIQVHAVDAAGRVVLRKAVRRERLLALLAQFPCCVVGMEACSGAHHWARELRKLGHEPRLMAAEFVRPFRKSLAAKNDANDAEAICTAVVQPNMRFISIKSVEQQALLSLHRVRQGLIEERTATINRLRGVLAEFGVVLPQSATVLQRALPAVLADEERLPALVQRSVQALLEHLRDLDAHVAEFDRAIAQHAKSSAPAQRLVALTGIGPLTASAVVASVGNAQDYRNGRQFAAWLGLVPRQYSSGGKIKLGRITRRGDAYLRALLIQGARSALQAALRRAPARRDRLSAWIVQLAQRVGYHKTLVAIANKHARIIWALLARNQTFEHARTVRY

SEQ ID NO: 509120 - protein, 419 aa, unidentified
MEMIRTRNTKNINGQTLVVAVDIGKSVHYGYFRAPLGEEVKPFPFSNTHEGFQGFWQRLSQFQKQQGLKECVIGFESTGPYAEPLFHYLRSQEVRLVQINPLHTKRLKELTGNSPNKTDRKDPRVIADVISLGHALTLVVPEGAAADLRRLIHARERAMKRRTALFNQLHSLMAVIFPEFLEVMKKISTKTALYLIKTHPTPQHIVAMGPECLRKVLKQMSCGKITEERARRLFEAAQESIGIQEGQQGILIEIQHLLSAVEKENGFIADLEKQMLSSLNQIPYSHSILSIKGIGKITAAGLIGEVGDFRKFRTIAEITKLAGLDLYEISSGKHKGQHRISKRGRSLMRKLLYFAVVNMIRAKGLLHKPWHQMVQRGMPTMKAMVALSRKLLRLIFALARDNTIYKENYTQTNICQVAA

SEQ ID NO: 509121 - protein, 386 aa, unidentified
MVFVGIDVAKDKHDLYAVDSDGVVLCDNFTFANSAAGFASLLERISVWGKIKVGIEATGHYSSNLLSFLKAHDFEVVVFNPLSVSRLRSAASLRKTKTDKNDSRYIARLLLTGVANPYQFQSYNITVLKSMTRARFRLFQEIQPLKNRFRRLLHVLFPELQGFFSNLYGNTSLNLLSVLPSAKDIAECNILKLTKILSEFSRGMLKRGRAEQLKSLAQNSIATYNYGDAFELKQTVRRIQFLSSQMSEIESEIDSVMAVLNSPITSIPGIGNLLGATILSEIGDIKNFDNPDKLLAFAGCEPSTYQSGKYTATNTPMVKHGSRYLRRALYCAADMAYVNSPSFRSYIDRKRAQGKHYYVAMSHGMKKLVRIIFTVLSRNIPFSEPA

SEQ ID NO: 509122 - protein, 357 aa, unidentified
MEYGAIDLHKKESQIRIVTRTGEIIDRRIATRRDGFTHVFWGRPRMRILVEASTESEWVAQHLEDMGHEVIVADPNYAPMYGHRSRRIKTDRRDVAALTEACQHGTYRVAHRRSAKQHAVQCQLNVRAELTQARTRAISLARAITRAAGLRIRSGRTETFLARLAALELSASMKATLLPLRSLIEVLEDELVCADERFDAMVAADPVLTRLTTLPGIGPITASAFVAALDTVSRFERAAQVTSYLGLVPREYSSGEKQRRGRVVRSAHPYLQSLLVQAAWRVWRASNPRTEAFQTWAHAIARRRGKKVAIVALARRLARTLFAMWRDGADYQPQRIQTRGAQFLADATAKTDVSAPV

SEQ ID NO: 509123 - protein, 348 aa, unidentified
MAHFVGLDVSVKETSVCVVDDTGKVILEQKVPTEPADIITLLSSLGVSYGRIGIEAGPLSQWLVNALTVAELPVICVETRHMKALLTAQQINKTDRNDARGIAQMMRVGLFKPVHVKTLVAQEQRMLLTSRKLLQRKLLDLESDLRGTLRNFGLKVGVVSGGRYEARVRELIAGFPRLAAIAEPLLKVRQVMRQQLAVLHKMLLDTVRDDPVCRRLMTAPGVGAVVALTYRATVDQPQRFVHSRAVGAHVGLTPKRYQSGEIDYDGGVSKCGDALLRTMLYEAAQVLLTHGSKWSWLKAWGVRVVQRRGMRRAIVAVARRLAVVLHRMWVDGSEFRWSKDSAAVPTAA

SEQ ID NO: 509124 - protein, 448 aa, unidentified
MSHGNGISRGDRNRNARLARLRELVPVTNAIVGIDLADDKQMVVVTDHDSRVLARKTFRCKAWAMGAALDWARPHAVEAGFTGVTVACEPTGHRWRVLGQLAADRGMPFVCVQPMITSWSRRTEDLTFDKTDEKDAVLIARATAQLRCYAPEPLDETWGRLRHLGARRDHLLVETVAQVQQIRDLLECVWPAALTAARQPFKSHTWAAALSLVLERDGGDLDRTRRRGLARFEAAVRRVLGRWGGQKPCGRIIRNLFAALTDPAGVTAHRRGALERVELLLDDWRHTRARLAEVETRMVTVLDELGVTGLVTSIPGLSAVGAAAILAQSGDLTRFTSARAVVKHAGLAPREKLSGTFTGRTKLTGQGRPGLRLAAWRAVWGALRANPVYAARYTHLTTRERNKLTATQAQTVIAAAILRQLHAVVTTGRAWDAEIAAHGTRHASRAAA

SEQ ID NO: 509125 - protein, 370 aa, unidentified
MEHRSMFVGLDVHKETIDVSIAEGQRDGEVRHYGVIASDLEPLDKVVRALRAPDRQLHFVYEAGPCGFGIYRHLTKRGEACVVVSPSMIPKRSGDRVKTDRRDSQMLARLHRAGELRAIYVPDDTDEAMRDFVRAREDAVVVGTQAKYRLKAFLLRQGRRYPGREGWTLPYRRWLTDLSFPSAPQHIALQEYRDAIAETELRIDRLTAQLRQLAPTWRWAPVVAALQALRGVSFVTAVALVAELGDLTRFGHPRELMAYLGLVPSEYSSGPSVRRGGITKAGNPHVRRLLAEAAWAYQGIPRIGRQHAYRQEALPKVVCDIAWKAQLRLTARFKRLVARGKAKPKVATAIARELSGFVWAIAREVSPTPR

SEQ ID NO: 509126 - protein, 414 aa, unidentified
MKLFVGIDVSSKELETCFMNADGDKLETLTVKNNLEGASHLRDRVVALADKHSITEIHIGLESTSVYSWHPAMYLHQDASLKERNAKVFTINPKLVSKFRDAYPDLDKTDRLDAWVIADRLRFGRLTTTIVMQEQYVALQRLTRMRFHLIHNLTREKQYFLQNLFYKCNAFTTEVESSVFGHAILEMLSEKYSLDDIATMEVGDLADYLRDKGRNRFPDPENVAACIQKAARASYRLSKVVEDSIDLVLGTSIQAIRSIQAQLKDLDKAIEKILETIPGALCLRSVPGIDRVYAAGILAEIGDIERFNDQAAVAKYAGLTWRKTQSGSFEAEDTKRIKSGNRFLRYYLVEAANSVKNRDEEFGEYYRKKFKEVPKHQHKRALVLTARKLVRLVDVLLRNGQLYTPRKKVTPVKD

SEQ ID NO: 509127 - protein, 342 aa, unidentified
MKFYCGIDLSARDCHVCVIDQQLKVVVEQKLRNELPKIIQLLEPYKANLKIVVESTFNWYWLIDGLQAEGFEVVLAHTLGLYLITGAKVKTDRRDAYALAKLLLVGAVPAAYIYPVETRPVRDLLRRRMHLVQVRAGEYGSLRRLLLRQGILSSKQQEIKTATEAELEQWFTHPLVRLHASQELKRIELYSEQIAELEKTILELAKTERSYELLLKLPGVGQTIALTILYEVGELTRFASVKDFSSYCRVVPGVAQSGNVTRRGRGSKQGNHYLKAAFSQAAVHAVRCYPKVRRCYERQLKRHQGRGRQMVCYNIIAQKLAQAAFHVLKEQTEYREELLFGR

SEQ ID NO: 509128 - protein, 312 aa, unidentified
MIEQCFVGIDVSQDRLDVLLLPQATGFSVANNEAGWNALIARLRDLPVAAIGLEPSGGYERGVIRALLTASLSVRRINPNRLRQFARARGALAKNDRLDARLIAAYVATMPTHVVRHDPAAARIAEIVTVRRQLCDEHVAVENQAAQLEDAMLRRLAKRRLARIETDIRLLDKRLAEMIAAEADLARRYACLTSMPGVGPVLAFTLIALLPELGRMSRKQIAALVGLAPYDFDSGKLRGHRSIYGGRMPVRNVLYMAALSACRYNPALKTFHNRLAAAGKKPKVILVAVMRKMITTLNAMLRDGAGWQPQAA

SEQ ID NO: 509129 - protein, 412 aa, unidentified
MEVLYPKCCGIDVHKQFLVACLLIADEAGHQHQEIRRFSTMTGELLSCVDWLQKAHCTAVAMESTGVYWKPVWNVMEGLFETVMIVNAEHMRRVPGRKTDKKDAEWLAELLQVGLLKPSFIPSRPQRELRDLTRTRTTLTQERTRLINRVHKVLEDANLKLSSVLTDIMGQTGHHILGAIVRGEEDPTVLADMALRRAANKREALVLALRGRISDHHRALLRALLEMIRHHDQAIWHLDREIEERLRPYEEQIQRLDAVPGLSRRSIEILFAEVGWDMSPFPDAAHLASLVGICPGNYESGGKRLSGRIRKGNHWAKATLVQAAQAAARTKNTYLSAKSHQIAARRGGKRAAVAVGHSILVIYYHMLKTGEPYQEKGGDYFSELDRQHAERRLTKQLERLGYQVTLTPAKIA

SEQ ID NO: 509130 - protein, 391 aa, unidentified
MICVGIDVAKDKHDCFILSSEGTVLVDVFTIPNNLEGFNALLDKLWACSSPQDSIKAGLEATGHYSYNILGFLLDNGLGTYVLNPLRTNLYRKSLSLRKTKTDRVDARTIAAMLLSDTGLKPYTDTAYRNEELKSLTRYRFDKVKERARLKQSVSRLVCILFPELEQLVPTLHMASVYALLSEFPGARQIADAHLTRLKALLADASKGRYGRDTAVDIRDAARSSIGSRMPAKSLELQHTIRLIRELDTEIEEIEAIIQAIMDELHSPITTIPGIGYRMGAMLLAEVGDFSRFDSPDKLLAYAGMSPSTYQSGQLKNCYPHMEKRGSRYLRYALYNAAKYVCHWDPAFATYLAKKRAEGKHYNVALSHAAKKLVRLIFALEKSRQSYCPAA

SEQ ID NO: 509131 - protein, 377 aa, unidentified
MDKDSRFVGLDVHAETIAVGVAEPGGEVRSLGTIPNTPEAVRRLVKKLGPPETLRVCYEAGPTGYVLYRQLSALGVPCAVIAPTLVPVKAGDRVKTDRRDAEKLARSYRSGDLTPVWVPDPGHEALRDLVRAREAAKKDQLRARHRLGKFLLRQGRRAPTGIKAWGVKHRAWLQTIRFAHAAQDATLLDYLTEIDHAAARIARLERAIATAADLAPAPVRAVIAGLQALRGIAKLSAVSVVTEVGALSRFAKPRQLMGYSGAVASEHSSGPHRRRGGITKTGNAHLRRIVIEAAWAYRHRPAIGGTLRTRQEGLSEEVKALAWKAQHRLHGRYARLLAKGKAPTQVVTAIARELLGFIWAIGVHIEQHTAGGAPAAA

SEQ ID NO: 509132 - protein, 335 aa, unidentified
MEFTYFIGTDVSKNKLDFAVMCGRTLLFHRQIANAPQAIALFISELAGLDGFKMGNAVFCMEHTGIYNNHLLACLHSKKANIWLESAIQIKRSMGSVRGKNDKVDAIRIADYAHTHREKVRLWSPARDVVRQLANLTAARTRLIEAKKMLKTPLGEQDGFSTKKLTGKSAAICSHTLKAIDADLERAEKAIDKLVENDPELKRLFHLVTSVSGIGKVTARQIMVTTNEFKDISSAKKYACYAGVAPFVQESGMFRGKGRVSHMANKKVKTLLHMSAITAIQHNQDLKDYYNRKINEEKKNRMSVINAVRNKLILRIFACVNNNSPYQNNYQKSLA

SEQ ID NO: 509133 - protein, 417 aa, unidentified
MQMELSDFTAVIGIDWADKKHDVCVQAMGSDKRQFSIIPHQVDKIDEWAQSMYMRHGGQMAVALELAKGPIVSALQKYNFFVIYPINPTTLAKYRQAFNPSGAKDDPTDAELALDLLLKHPGHFEALNPQSVEMRTLMTLVEQRRRLMNDRVRITNRLRNALKQYYPQALDWFDRIDTPLFGAFIRQWPSLSQAKRARRATLAKFFHKHKLYRKPVQERRIQAIKSALPLTSDMAVIVPYRLQTLALVNQLEVTLQSIALYDDEIAALAPRHPDYSLFSCLPGAGAHLAPRLLVAFGEQRERFTSAAEVQKYAGIAPVTERSGQKNWIHWRWQCSTFLRQTFVEWAAQTINKSYWAGLYYYQQRAKGCSYQAAVRSLAFKWIRILYRCWITRTPYDEAKYLKALKERGSPLLSAKSA

SEQ ID NO: 509134 - protein, 319 aa, unidentified
MNELFFSEYVGVDVSKAKLDIASGKTGEYWQENNDDIGIQHIVERLRDLPSSMTIVESTGGLETALITELFTAGLPFALVHPARVRNFARSIGLLAKTDKLDALLLARYGEAVKPPTTQLPGEEEQKMNANMVRRRQLLDMLVAEKNHLCSTCLSLRPKVEEHIAWLEIEVEKLDQEINDQIEQLPRFKEKEAILRSAKGVGPVLCAKLISALPELGQLDRKKIAALVGVAPFNRDSGPHRGKRRIRGGRIDIRGVLYMSIIAAVRFNPSIKSFYQHLLNMGKLKKVAMVACMRKLLTILNAMVRDMRPFNPFHLSATA

SEQ ID NO: 509135 - protein, 380 aa, unidentified
MIYVGIDIAKTNHYASIVNYSTGEVIESPFLVTNNKQGFNLLYSKIKDFDKDKVLIGLESTAHYGNNLIFYFHEKQFKLGIINPIQTATLKKTRIRKVKNDKIDSMLICEALSLGYYNLLSDYDIELLEIKSLCRFRKELKDKAAEAKIQLASYVDQVFPELNFFFKNNLDIKTAHELLKLYQSPKDISNLLINSSRGKYDKSRAVELKNLASNSVGINNNALCIQIKMTIELIELLESQIKDIEKQVSDFIKKSDNVITSIPGIADMTAAIIISEIGDINRFNNPGQVLAFAGLDPSVKQSGTFNASATRMSKRGSSILRYALILAANNVQLNTKTFNDYYNTKRAQGKLHYNALGHCAGKLVRTIFYMLKNNVTFNLD

SEQ ID NO: 509136 - protein, 347 aa, unidentified
MRYLNCTAGSYVGVDLHARTLFVCVLDHDGQLKLSRNLPARPEPFLAAVEPFRPDLLVGCECMHCWYWLADTCRHQNIPFALGHAFGIKAVHASKTKSDAHDAEVIARLLRGGNFPLAYAYPCERRGLRDLLRTRLRLVRQRAELYGHIHTARRQLNLEPVGSDVKYLSKRDAVAADIPDPHTRRGVEARLNLLAPLDTEIRRLERDIEVAAEQHYPAELAALQTIPGVGRIISLTILLEIDTVTRFDSRQQFCSYARLITPKQESGGKIVGVGNKKAGNAWLKWAFSEAAVLSAQKDERLKRCLAKVQSKHGVGKGLSIFAHRLGRVVYHLLRTKKVFDVDRFVRG

SEQ ID NO: 509137 - protein, 425 aa, unidentified
MDFKQNQKINQVTEKTLVVGIDIAKRTHYACFVDDRGRVLQKSFSVYQSNNGFEYLYQRILTEMKESEKTEVIVGIEPTGHYWLNLAYFLEERGISLVMTNPMHVKRSKELDDNLPTKHDRKDALVIARLVKDGRFSYPRILKGMEAELRAGSTFRSKLTEELGAVKNMIIRWLDRYFPEFVQVFPSFGKMAMAALECTPFPSDLHQKHPDEVLSLYRKVEGLKSPQRPKAVRLIEVAASSIGVTEGCEMARIEIATLVRRYHQLEKDIEGITERLVELVKMSVEYEWLSTVPGLGDTTIVDLLAEIGSFSHYEDPRQLIKLAGLTLRENSSGMHKGQKRISKRGRRKLRALLFRVMMPMIRHNEAFRKLHEYYTNRQVNPLRKKQSIVVLCGKLLKVLHGISTKHKAFDAQRMMRDIPSLLEAT

SEQ ID NO: 509138 - protein, 496 aa, unidentified
MVHETVFTRKMLPENVKQKSSTMKLYLGGDVSKGYTDWVILSEKKQRVLENFQLDDTYAGHCKLYSALEAYFDKHAGLEMYAALESTGGYENNWYNTLKSYQKVFNLKVARINPLGVNYNRRAGMKRNVTDAISAISIAEYMINHPENIAYDQDEKWKTLCRHWNFVEMQKAQKTQTINQLETILYCSNPALLRFKKDNLPNWLLELIIKCPTADKLAKARPENLAKIPYLTLKRSKELIAEAKQNIASATDRNAELLVSQIALQIKAFDQNIKSQMRLIEQEMSCQEIEVLKSFKGIDTTSAIGLMLEIKAVERFPAVKGISCYFGLHPKFKQSGDKVIGVRMSKQGSKNMRKILFNIAKGAITYNPLITEIYEKKLSEGMSKMAAIGVCMHKILRIIYGMLKNHQQYNPAIDKQNCERSKSKQQEKLMQENANIQKSRRYQEFDATAPISKKQTKKRKEHDLSQCEITSQSTGSTCSSNTKLQNVENNKLRITS

SEQ ID NO: 509139 - protein, 362 aa, unidentified
MASVSHLAPIHLGLDVHRDTISVGILTADMEVPEVDKIPHDEPSVRRLVGRFSNPGVLRACYEAGPTGFELARLLASVGVSCQVIAPSLIPKAPGDRVKTDKRDCRRLARLHRAGELVAIRIPTLAEEAVRDLCRTRGDMVEDRMRARHRLSKFLLRHGQVWRAGKAWTLAHERWLVTQRFTEPALQTTYDHYRAVLASRDAQLEAIEADLAGWYDRAPFAEQVARLAAYRGVTRLGALHLAAEVGDWRRFARASQFMGFCGLVPSEYSSGQVTSRGHITKAGNLHLRTQLVEAAWAYQHRPSVGAQIARRQQGLDPQVVAAPGLPSCGCAGASDAYAPASPPPTSSPPRSPGSWPGSCGPR

SEQ ID NO: 509140 - protein, 393 aa, unidentified
MICVGIDVAKDKHDCFILSSEGEVLADVFTIQNNAEGFDTLLQTIRCCARPEDKIKVGLEATGHYSYNILGFLLDKGLPTYVINPLHTNLYRKSLSLRKTKTDRVDARTIAAMLMSDVDLKPYTDTAYHNEELKSLTRYRFDKVRERAKLKQSVSRLVTILFPELEKLVPTLHLASVYGLLSEFPGAKQVAGAHLTHLKAVLSDASKGRYGRDMATTLRDAARCSVGSVMPAKSLELQHTIRLIHELDAEIEEIEAAIQSMMDEIQSPITTIPGIGVRMGAMILAEIGDFSRFDSPDKILAYAGMSPSTYQSGQLSLSGAYSHMEKRGSRYLRYALYNATKYVCLWDTTFAAYLAKKRAEGKHYNVALSHAAKKLLRLIYALEKSGLPYSSAI

SEQ ID NO: 509141 - protein, 320 aa, unidentified
MDHEGRAVLRKKFRRGQVLKFFATLPPCLVGMEACGSAHHWARELSAQGHQVRLIPPQYVRPFLKTNKHDAADAEAIAEALVRPTMRFAPIKSAAQQAVLMLHRSRELLVKQRTMLINAVRGHCRELGMTASQGASRVNALIVLIETPDDPRLPTFAREALGVLIVQLQAVKEAIRTLESKLQAWHRSQQASQRLATIPGVGVITATALVATIGDGSQFKSGRHLSAWLGLVPRQHSSGGKSRLGRISKRGDGYVRRLLVHGSRAVLRWQRAAPKRPAPWIGELLARRPTNVVLGAMANKTARTVWAMMRDQQDFNAVCR

SEQ ID NO: 509142 - protein, 340 aa, unidentified
MSIVCGFDVHRDQITFDLVDRLSGEVRTGRVVPATRAGLRSWLSTIDASRLSVALEATTGWRFVVDELQRAGAGAVLAEPADTRALRGPKRRAKTDRADARHLRELLERDAVPESWIPPVHLQELRTLIRLRQSLADERHVWLQRVHAQLFHQGAPAPHGAVLGANGAASRATLSAAGRELVETAERMCEAIDREIAGLDQQLAVWARRHPACRALQRLFGVGPITAVAFYAEIGDARRLSSSRKLVRLAGLDVTVSESADKRSPGRLSRQGAPILRWAAYEAALSACRRGSPDHADYQLLRQRLGHGRATLTIARKLLRRAYHVLVAVGDDLLEPLPQP

SEQ ID NO: 509143 - protein, 438 aa, unidentified
MSNKVIFNLDELFISVGIDVGADFSWMSIALPNQQFVGKPYKILHNSIDSLTTAVSKIKEAEELYSLESRIFLESTGIYHYPLFCYLRDKGFNCSVINPIITKNSTNINIRKVHNDRFDSKKAALVGLKPDLKVSLMPSDLALNCRNLCREYYDLMDNRSAYVNKLQGELRMAFPQYLGIFSKVTINTSLTLLETYTSPSAFLKADKQEIIDIIKSTARFGLTYAQNKYNAIIQAATDANQFGYIIDSNIKRIRLYISFIRKYDEEINSILESLHELVDANEDSDFVKQIHLIETFKGAGFLSAVSIMGEIGDFSAFSKPKQLFAYFGLDPAVKQSGKFEGTKVQMSKRGSSIDRRVIHTLSLQSISISRNGKAKNPVLREYYLQKCDSKPKLVAMGAVSHKVCNMIFAILRDNKPFEIITPQEHIKQYNAAKCDIAA

SEQ ID NO: 509144 - protein, 346 aa, unidentified
MQITTIGVDLAKNVFQVHCVDAVGKVIIARQLRRGRVIEFFRKLAPSLIGMEACATAHHWARELTRLGHTVRLMPASYVKAYVKRSKNDAADAAAICEAVTRPSMRFVPIKSVEQQAALMLHRVRDLLVRQRTQLINALRAHLAEIGLVSATGVDGVKALVAIVTDETNRNALVGPLRKALVPLVRQLSSLGQQISDLERSIHVQHRANDASKRLESVPGIGVIGATAITATVTDPNVFKTGREFAAWIGLVPRQHSTGGKQRLGGISKQGDRYLRRLLVVGATTVIRHARTRPDKHPWLLRLLAKKPPKVVAVALANKLARIAWAILAKGGTYQASASAASIRDR

SEQ ID NO: 509145 - protein, 421 aa, unidentified
MTGNRRCIGLDVHREFAQVAIWQGGTVTQAGTFATTPEGVREFAAGLGPADEVALEATGNTWAIATVLASRAGRVVVSNPARTRAIAEAKVKTDKVDAAILAQLLAADFLPPVWMPDAATSALRRQVLRRAHIVRQRTRLKNQVHAILHRNLVPRCPAADLFGIKGRTWLAQQDLPPDEQAAACALLRQLDFHAQELTLIDRDPGQAALGRPEVLRLMTIPGVDATVALSIVAAVGDFTRFRTPEKLVSYLGLNPRVRQSSGQPASHGRITKAGPAHARGMLVEAAWSASKAPGPLRAFYQRVRARRGMQVAAVATARKLAVLCWHLTIKGEDYAFALPSLIARKQRKLELRAGAPPARGRKGDAAPYSLAAVRAAERDLAAQGEAAYRTMVAAWQPSGPALKKAAGAAASKGTRLIQPAG

SEQ ID NO: 509146 - protein, 497 aa, unidentified
MTEPALVRAYASPLISMVRDSSVTLVSGAIRIPFLRSSRIRRFPWRCRSLAILEQTMAMRTQDEGIVFPNAAGIDVGASTHWVGVPPRSTDEPVREFGPMTDDLNAMADWLIACGVDTVALESTGVYWIPVYEVLEQRGLTVWLVDARQMKYVPGRKSDVQDCQWLQKLMTFGLLRAAWRPNGEVCAVRAVARQRDVLVAEQASWVQRMQKALVEMNIQLTEVLTDVMGMTGQAVIRAIVAGERDPKVLAQHRNGRVKAKIEDITRALTGNWRDEHLFVLGQALAMYDDIGQHLAECDAKLKALLTELGQSEVDLGKAPRVGSKVRQEFDARQVLANWAGVDLTRINGLGLAAVMKILSEIGPDLSHFETVKHFCSWLGLCPGTKISGGKVLSAKTKRSANRVRQALKMAAMSLSRSDSALGAFYRRLCSRMDKPRANTAVAHKLARMVYFMLTRGEAFVDKGQQHYEEQQRLRSVAALKRRAAALGFDISPTSVPA

SEQ ID NO: 509147 - protein, 365 aa, unidentified
MNFIGVDLHKKSITVCAMDEKLKVLARKTLYCDQTDQILEFFRQFRPFKVVVEATASYLWFVELVGPLAEETVLANPKKLRVIAESVKKTDRLDAFVMAEVPARDQIPRAYMPTTRQRQHRALVRHRQYLRGRMTSVRCKIHHILSDYNADRRDLFSNQCGPAYFKEVALSDADRFVIKQLWSEWEDHQARLLSLTKKIKSFVAKAPPREAEARAIIKTAPGVGAVTAEVVLSELGDVSRFRNSKAISAYAGLVPAVRQTGGKRSKDLPITKQGSGLLRWALVESAWRLVNTSPKWAAYFSRLRKRCGSKRAIVAVARKLLCVLYAMLKTSTPYKIIDTETKPPRTTTRRLVRKSSPEPKQAVTT

SEQ ID NO: 509148 - protein, 333 aa, unidentified
MSRFWVGIDVAKRKLDVALLDEAGKVKSKVLANDPIGFAALQTWLKERGADTASTHVCMESTGVYSDGCATALADAGWKVSVVNPALPKDFGKSELKRNKTDAIDAGLLARYCSKMDPPAWQPPPLEYRKLRSLVERRQALQDMHQQEANRLESSLEAAARVSISEHLAWLETRIAEMEKDIDDHIDGNKDTLGKDAELLASIPGLGRTTAAKVLGLLGDLRRFESGKALAAFIGVTPRRHESGDSVRGRSSISRAGHTSVRHALFMPTLVATRYNPTIKAFRDRLVAAGKPKKSAVLASMHKLVHIMYAVVRKGINFDPRFGQLALDVQDGI

SEQ ID NO: 509149 - protein, 353 aa, unidentified
MNSLFCGIDFHKNTCTVCIVDQNGTESEIFTCKTSNMIKRLVNYKNLTIAVEASGGVNDFVDRVKASGHKVKMVDPKAFRLVGMGGKKTDKRDARAIARGLVAGFIPEVHHKSKRSREIKSLLVSRELAVNTRVNIFNHVRGILREYGITITKGKEAFLEEAVERINKIENGFIRASLFDMYKMGKEMLEREKEIEQRLQDFCSSDENIKRLQTIPGVGFLSALAFVSIVDDVGRFKNGKLFGSYVGLVPSESSSADKRIMGRITRSGPELLRRYLIHGARSVIMHLKEDKEITDQNKCWALKLKNRVGMNKATVALAHRMARIGYCLLRDQTSYGQVKSSIAITSKNVNQAA

SEQ ID NO: 509150 - protein, 397 aa, unidentified
MTEYSDYESVQVFIGVDVGKDTHHAVAINRSGKRLFDKALPNDENKLRSLISDLKQHGQILLVVDQPATIGALPVAVARSEGVLVGYLPGLAMRRIADLHAGEAKTDARDAAIIAEAARTLPHALRTLKLADEQIAELSMLCGFDDDLAAQTTQASNRIRGLLTQIHPALERVLGPRLEQPGGTRSLQRFPHRKTRSLGEKKLAAQLCQLAPRLGKRLAADIAQALAEQTVVVPGTNAAAVVLPRLALQLITLRKQRDEVALEVEQRVIAHPLYPVLTSMPGVGVRTAARLLTEVACRAFASAAHLAAYAGLAPVTRRSGSSIRGEHPLRRGNKALKRALFLSAFAALRDPLSRAYYTRKMSQGKRHNQALIALARRRCDVLFAMMRDGTFYTPQGS

SEQ ID NO: 509151 - protein, 347 aa, unidentified
MNYIGVDCHISTLDFAVVDGKGIIKKRACVNTGVKEFMEFVRSIPAPRKIYIEEGELANWLLETSRRFGEQLIITDPRENKWISKAKQKNDPIDATKLAQLARGGYIKEIYHPVNDRRRFKELVFAYHDTVKSQTRIKNKIKACFRREGIICRGEMVYSETYRAEWKEMLPKNNIVNLIIDELWIQLDQLQSTKEKIKINIRTCARKYPEIKRFMMVPGVGLIHASTISAIIETPHRFANKKKVWMYAGIGLTERGSGDKVYSRHLTREFNRPLKNAIKKATEAAIHGNDNPFMRQYLRLTIEQGVPSHKAKLTVARSLLSALYIIWKKGEEYDPDIDKKRDKVSKK

SEQ ID NO: 509152 - protein, 350 aa, unidentified
MTTIARRITGGVDTHLDTHVAAALDERGALVGTQSFTTTAAGYRALLRWLEGFGTVELVGVEGTGSYGAGLTRHLLHQRVAVVEVDRPNRQRRRRKGKSDPQDAIAAARAAQGGEASGLAKTRDGNVESMRVLRVARFSARRSRTQAINQMRSLISTAPDELRAELRGLSIYRVLSVTSAYRHTGRTDVTTLTKLSLRTLARRALSLEEEVKEIDRILKTLVAETAPQLSAIDGVGTDVASAVLVAAGDNPERLKNEATFAKVCGVAPLEASSGKQERHRLNRGGDRQANSALWHIVFTRMVSDPRTRHYIERRMKDGRSKKEAIRCLKRYVVREVFAALPRSQFGLDTP

SEQ ID NO: 509153 - protein, 406 aa, unidentified
MNQNTCITIDVSQNKSHIQGFIGPNKPLSKARTMRHTKQGYQFILTLKNLIESKTNETPLIIFEFTGIYHKSLEKFLISQNLKYHIVAPLRAAKARNSEIREQKTDARDCLSLSKLFYSNNLGVFYSEDETYSNLRKLNRYYDTCMKHFVKIKVNFRETLAVIYPNYKKLFTRIYSDESLTFLKEFPHPSFYTSKSEDEIIEILKDKWNHVESWTSSKVKKLTPLINEVVPGCNVTEPDIIMLLSYITQIEYYLNQIKFTISKMNELAKKVPLYNLVHSLPGIQDILTCKFIAELGDISRFINYKQIVAYAGIDPMIRQSGDKDGLHLKMSKKGNKRLRTILHLMVSSLIKTNRESNAIKDKYQKKTHQLNPLKPKVASMACANQLVRIIFYMHKTSSTYTYQKCK

SEQ ID NO: 509154 - protein, 388 aa, unidentified
MIRVDDLSRSLIAFEQISTLVIVVELSQSSWLAAGVVPGIERRPLKKLDPDPTALLHVVEGWRDRATKAGRAITRTVLAFESGRDGFWLARWLRVRGVETFVMHSTSVAVSREPRRAKTDRLDTEMLIRVFLGWLRGEPRHCKMVAIPTLEEEDARRPSREREILVGERTRIINRMKAALVRLGIRGFKPGLLTAPQKLDALRTPEETPIPPNMLDEMRRDMARLAWVREQINAIEQARLERLERAPATGRHAMVRMLARVIGVGVETADMLVQEVLSRNLRDRRAVARYAGLTGSPDESGSKRREQGLSKAGNARVRRGLIQLAWRFLRFQKDSALAQWYRGRTEDVAGKRKRTMIVALARKLLIALWRLATIGEIPVGVALRTAVA

SEQ ID NO: 509155 - protein, 408 aa, unidentified
MNAVGIDVSKGKSMVAALRPMGEVALLPQEFLHTEVGLEQMAYAIIALGENTRVIMEATGRYHEPVAAALHEYGIYVCVLNPLFIKQSGGGSIRKVKTDKADAMKIAKYGLDNWVDLREYTPMDTVRQQLKLCSRQYNLYMKTVVSLQNNLISLTDKTFPGVSELFSSPERADGHQKWVDFVMTFWHCDCVYRVSEKAFTERYQKWCKRKGYHFSAEKALDVYAGSCGHFTTLPKNDNTKLLITTAAQQLLAGKMTLAALRAEMTRLAKQLPEYDTVRAMYGVGETTAAQLMAEIGDVRRFSRRSSIVGFAGVDPAVDQSGKHEAKSTPTTKRGSPHLRKTLYQIVCTYLKRSPVDEPVYQFLDKKRSEGKPYFVYMTAAQNKFLRIYYARVKECLEAFDAQQSLAQS

SEQ ID NO: 509156 - protein, 335 aa, unidentified
MKSYKRVIGIDISTERLDVADSNAKIVQEVDYTIDDIKSKILKFIKKPSETLVVCEATGGLEYELVDMLHDAKIDVVVANPARIRDFAKGHGFLEKSDKIDARVLQLYGKQVNVSLAKPRTLQERNFIALTRRRTQLLQLISQESNRRRQSNDPQVRAFLDDMLKSLKTQMKTVDSCIEKALGEQAKTNPTIDVIRSVPGVGVVLTATLVAELPELGTISRTKIAKLVGVAPMIKQSGKSDERRRARGGRGGVRRVLYMATLAATQKNEVIKKRYIRLVSSGKPKKLALVACMRTLLTILNDMARHQTKWGEEKKSVAGSVVSNRPAPAHVLDKI

SEQ ID NO: 509157 - protein, 442 aa, unidentified
MRFIGLDIHRDFCEVAIAAEGEVRSAGRIETAPAALELFAQSLGANDQVALEATGNALAIARILEPHVGRVVIANARALRALSSLKAKTDRLDARTLAELLAAGLLPAVWAGDEETRALRRRISRRAQLVKQRSRAKNEIHAVLTRNLKQRPPVSDLFGKGGRRWLATLELPLDERQTVDGCLRQVDFLDGELALIDRAIAGHALGSREIRRLMTIPGVDVTVAAAFMACVGDIARFPTPRHLVSYLGLDPKVRQSGIEPARHGRISKQGSSQARCMLVEAAWLAVRTPGPLRAFGERIRNRRGPQVATVAVARKLVVLAWHMLTSEQDYAFARPSLTRFKLRRLELRTGAERLTGRRPSVRIVPTPQQTAAEREVAAQAEATYRRLVKDWQQQAKSGAGAAPGRAFLAARQGQAPDPALSLAVARAASDSRKGARNRPATT

SEQ ID NO: 509158 - protein, 367 aa, unidentified
MKKVSTVAAKQSKNFSQQKLTIGLDLGDRNSWYCVLDESGQIQLEQRVRTTAKALQEVFGRMPRSRIAVEIGTHSPWISRMLSDLGHEVIVANARKVRLIGESRKKDDRLDAQTLARLARIDPELLYPVKHRSAQAQADLMMIRARAGLVRARTGLVNSARGLAKSYGERLRGCNVRNMNLEKAERLSPELQAALEPLLNAIESLSERIVEYNERIEQLAQQSYPQVALLKQIKGVGTLIALTYMLTLEDPHRFRKSRDVGCYLGLQPGRRNSGQSEPQLHISKEGDPYLRTLLVQGAQHILGPFGIDCDLRRWGLRLAQRGGKSGKKRAIVATARKLAVLLHRLWVSGEAYQPLHSSSRTTVAAAA

SEQ ID NO: 509159 - protein, 420 aa, unidentified
MKAKKKAKLDLIGDDTLVVGVDVGKKNHYCRFINVRGYEIGKGFSFSNNRDGMEKAISKIEEAKKQNNLAKAVIGLEPSGHYWKPAAHYLSRSGYSLALVNPYHIKRIKEIEDNCQTKTDIKDSLLIAKLVRDGDFFDPNLAGGIYAELRRMYRLRLKVNKSLVREKTKLKILLDEYFPEYEDLFCDVLGITSEYIIDNYFLPEVIAKKNIISLAGKIKMISRGKIGAPKVLKLVEYARDSIGITTGLDAAVLEKTYILEEISNLKLKLACLNKKLKYYLDRIEHSKYLLSIPGVGVVTAAGFLGEVGDISKYKSAKEIIKLAGLNLVEISSGIKRGKKKISKRGNNRLRCLLYQCAVVAISKNSQIKKYFSYQAETKNKMKMVVAVQCKLARIMFALLKYKKYYDPEEVLKSMVAQEVA

SEQ ID NO: 509160 - protein, 372 aa, unidentified
MTSIIYVGMDVHTTNYTLCCYSMEDDRFFAEVQVEPDAKNILKYLARIEKQQSRDCRIVCGYEAGCLGYSLYHQLHAHGIDCVILAPTTMMTKPGKRIKTDRRDARLISKCLAFHTYSPVYIPTEVDDAVKEYIRMRDDANSALARVKQQIIAFCIRHGKIHDGKSYWTNKHLEWISSLDLGNKILSEVLQEYLIRYYHLQEQVDMYDMRINELAQAEPYRQKVEKLGCFRGIAAHTALSFCVEVGDFRRFATAQQFASYLGLVPGECSSGDKQQYTGITKAGNSHLRKLLVETAQVFGRSATKSGKSVALKERQAKCDSLTVAYADKANARLKKKYFKIAMRSKVNIAKTAVAREMACFIWGMMTDNISCA

SEQ ID NO: 509161 - protein, 339 aa, unidentified
MLYVGIDVAKNKHDVTALNVPGKTVLKPLTFSNNKAGFELLDLSLRQLNQDCLIALEDTGHYAFNLLNFLHEQGYKVYTYTPLLIKEFAKSLSLRKTKTDKKDAHGIALKLLSDPNREQFQHDNRQVELKILARHIHRLKRKQSDWKVQYTRCLDIIFPELDKIVGKHAECTYQLLTRYPNPQKRLEAGFDKLIEIKRLTASKIQDILSVAPRSIGTTSPAREFEIIKHYKRLIDKAETCVNDLMAEFNSVITTVTGIENRLGAVILAEIRNIHAFDNPAQLQAFAGLDSSIYQSGQIDLAGRMIKRGSPHLRWALIQAAKACPRFSPAFKAYLKTKLE

SEQ ID NO: 509162 - protein, 375 aa, unidentified
MSSPIIYLGLDVHKDSITIAVLPEGAPAPSRVERLPNDLAKLRRFCERLAAEGELRACYEASGAGYVLHRALRAWGYPCDVIAPSLIPTKPGQQRKHDTYDAAQLARLYRAGELTCIRIPSEAEERVRDLVRCRETLQREVLKSRHYLLKFLARRGYVYREGTPWRTAHYRWLRHLAAAGSQLAVEDQIVYGEYLGLLEYKLSRREELDRRIGEVALTPAVAPAVNRLQCFRGVQQHGAMVLTTEIADWRRFASPRPLMAYLGLVPREHSSGDRERRGSLTKAGNSHCRHVLVQAAWAYRYPPKVGSALQTRQRGQSPVVIAHAWKAQHRLHTLYRRLAFRTTPQIAVVAVARELVGFLWAVMQDQQDVTNSVAA

SEQ ID NO: 509163 - protein, 320 aa, unidentified
MMAQNDHVVVGIDVAKDKVDACIRALVLRQTWPSTTQGHRKLVAWLRKHQVNKAVMEASGGYERAWARVLREAGIEVRIVDPKRVRSFALSAGRLAKNDAIDAEMIAWFAETFSEAPSQPHDAAREELQALVKARLDLIDFRMRLVSQSEHAAPGLVQKAHAHILKSLASEITKLEAAISAKIKSTPDFAERAEIIESVPGFAQTSSANLVAGMLELGQVSDEIAAALIGVAPYDDDSGKRRGGRHIKGGRRWVRNAIYMPCVGAATLNNPVLKAYYQRLLAKGKEPKVAIIACMRKLIVILNTMIARRQKWDPSRYVLS

SEQ ID NO: 509164 - protein, 485 aa, unidentified
MSKRSIFTRQNQTLIDLFKDAGHPDKVLCIPIDYAKQTHVALCCNGSGKVLKKAVPVKNTSEGIGFLLEVADKICRKHHIERKHVFFGGEDCGTFSLNFIYGLREKGFTVIGVNAKDAADQRENLQASTDEIDLLGIAKLLINRRGSTAGGEPGAERALRTLTRHRKAQVRLCTATGNRMHQIVDQLFPGFLDEKLSAIPSFSEASLYLMQDRFSPVLLLKRQDKALLRQLKATGLEHAEKSLGQLKAYARQVLAHPPELTGLLQTSLASEIKLYRCLGENIGQVEREVAQQLAKTPGAMLTTIKGIGITLAAGVAAEIGAPASQPSTRRLSSYAGIIPRVKQTGGPEKGAKTGKVSRRSNHILKDFIVQCGNHLGQHGPVELKEDHRRRGANKQHADFGMARRFLRMGMCLMRNNDSYLPPELRHGATVEELRTYYLRVWPTLLKKWTKLGAAHTAFHEDNPLGQWRKRIEEIYEIDLPLPKKK

SEQ ID NO: 509165 - protein, 332 aa, unidentified
MAVALSANGGRLGSLKLDAKRSGYEELIRWSAEFGRSPVFAVEGTGCYGAGLCRALQLAGLEVVEVNRPDRSTRHRRGKDDTIDAEVAARSFIAGQSTVIPKAGNDLVEMIRMLKVVKDSATDNRTAALNQLHAIVVTAPAALRERLQRLKGKELVECCSGLRSGEIRTPLAAAKMALRALARRIQQLDQELKETLAQLDQLTMQHCPELRNTYGIGVDISATLVVAVGDNQERLKSEASFAALCGVNPLPASSGKVVRHRLNRSGNRQANCALHRIVICRMQRHQQTRDYVERRTAEGRTIREIIRCLKRFVAREVFGILRGGPSVRTAAA

SEQ ID NO: 509166 - protein, 327 aa, unidentified
MEQRVLGIDVAKETLDIALSDGVHLNHGQFSNDQKGHEQLEQWVRKQTDSSVHVCLEATGQYGDAVAEYLFAQGFPVSVVNPARIKHYGNSKLRRNKTDKADAQLIAEYCLREKPAIWTPPPASFKDLQALVRHLEDLQNNRLQELNRLQSGVHTSFVVESLTLLLAFLDDQIAQTKKTIQDHINQHEELKCMQTLLVTIPGIGKLTAAKLLGEIRNILDFQSARQLAAYAGLTPRNFLSGTSVHKKSRLSKTGNANLRKALFMPAIVATKHNPIVHAFCARLSQSGLKPMEVIGAAMRKLLHLVFGILKTGRPFDPNYLNPIQTQS

SEQ ID NO: 509167 - protein, 366 aa, unidentified
MASISHRGFIHLGLDVSRDSISVAVLEPERDVPVVDKIVFDEPSVRKLVGRFPSRKKLWVCYEAGPTGYDLHRLLTSMGVRCDVVAPSLVPKGRGDKVKTDKRDARRLAGLHRAGQLVPIGIPTPEQEAVRDLCRTRGDMVEDLTRARNRLGKFLLRHSRVWRDGSTWTFKHRRWIEAQRFDDRALNITYGHYRATLAAREAALDAVEADLLWWSERPPFGAQVQRLAAYRGVTHLGGLSLAAEVFDWRRFARARPFMAFTGLVPSEDSSGASNHRGHITKSGNRHLRFQLVESAWSYQHKPSLGVEIRRRHQDLSPEVVARAWAAQLRLCGKFRRLAARKNAKSVVAAAVARELAGFLWAEMTLA

SEQ ID NO: 509168 - protein, 325 aa, unidentified
MNPQPVPSPATAAVLDVGVDVASLHLDVALHGQGGVKRLSNTDAAIGRWLRSLPPGSRVAMESTGRYHERLAQLAHAAGMVVFVLDPRAVRHYARGLGQRGKTDRLDALMLAHLIEREHAHLRPWQPPSPEHELLKDLLRQRAMLARYKSSLLQGLRPAAAAAVDFAPIFKSIQDTLRALDKQIAVAACALPQGKSALGWIMSVPGVGLLTGATLLRVFQRLAHRGCDAVVAFLGMDLRPQDSGKRTGVRRLSKRGDAYARKLLFTASMAAVRCDARWRTLYERELAKGLPKTAAYVAIGRRVIRVAFSVFKNHAAYDPVKMPTA

SEQ ID NO: 509169 - protein, 360 aa, unidentified
MLYLAIDQHRKQLTVNLRNEQGDVVLKRQVSTQWPRVRSFLEEVRVRSTPEGGFVAILEVCGFNDWLVKLLAEYGCRETIVIQPEKRSKKKTDRRDANALGELLWVNRQRLLAGKKVQGIRRVQLPSQTEAEDRQITSLRKRLGQLRTRTINKIKHILRKHNLEQECPTKGLDTIKGRKWLGQLVLGVIDRLEMDQLLAQWKLWDEPMAKSELEIEKRQRNRATAAVLATIPGCGAYGSLALASRIGSIARFPRPASLANYWGLTPGCRNSGDATDRLGSITKQGSAMARFVLAQAILHVLRRDARMRAWYSRIKRRRGSKIARVAAMRRLATIIWHMVKHKQPYVVGGPPARRLTPRAA

SEQ ID NO: 509170 - protein, 370 aa, unidentified
MRKSVLYVGLDVHKMSMEVAHAESGAYGEVRHYGRIGGDLEALDKVPRKLQAKGAELRFAYEAGPCGYQVYRHLTAQGYSCLVAAPALIPRRPGDRLKNDRRDALALVRLLRAGELTPVKVPDADDEAMRDLTRAREDAISVERRAKQRTAALLLRHGRRYPGKTTWGRGHWRWLAQQAMEHPAQQIVLQEYLDAVREASARVQRLTEQIRELIPQWRRAPFVAAYQALRGVSRIVAATLVAEVGDLSRFKNPKQLMAYLGLVPSEHSSGASVRRGHITKTGNGHARRVLVEAAWAYRLRARVTRPLLKRQEGLPESVRQLAWKAQLRLCARYRRFQARGKHKNTVITAIARELAAFIWAIGQSVEPVTA

SEQ ID NO: 509171 - protein, 386 aa, unidentified
MPQPKDDLSRSLVALDQHSALIAVVELSLSTWLVGGMVPGIERDPLKKLVPDEDGLLKLLHRWRDEAVKAGHQINRMVVAFEAGRDGFWLARRLRSRGIEAYVIHPTSVAVSREHRRAKTDRLDIALLKRSLLGWLRGEKKHCSMAAIPTLEEEDAKRPNREREQLVGKRTGIVNRMKAALVRLGIRGFNPKLRKAPQQLATLRTPEGGTIPPNTLAELQREMAHLSFINEHIKQIEDARLIQLKQAPQHGSKAKVVQLGRINGIGIETADMLANEVFSRDLRDQRAVARYAGLTGSPDESGRRRREKGLAKAGNARVRRGMIQLAWRFLFHQRNSALTQWYRQSVAAGKKRTTVIVALARKLLIALWRFVTIGDVPQGVILRTAS

SEQ ID NO: 509172 - protein, 375 aa, unidentified
MKEKLRFLGLDVHAETITVAVAEPDGEVRSLGTIANRMESIRKLVKKLGPVEQLQACYEAGPTGYVLYWQLAELGVKCEVIAPTLVPVKAGDRVKTDRRDAERLARSYRSGDLTAVWVPDEASEALRDLVRAREAAKQDQLRARHRLSKFLLRMGRRPAPGMKVWTVLYLAWVRQLRFEQSAQQATLVDYLHEVDHMAERVKRLEQAITEAVKLASPAVREVVKGLQALRGIAEISAVTIMAELGNITRFEGARQLMGYSGTVPSEDSSGQRTRRGSITKTGNAHLRRIVVEAAWSYRHRPAIGPRLRKRQETVPEPIKEIAWKAQVRLHRRYMKLAAAGKDPRKIVTAVARELLGFVWAIGVKAERSVTQQIAA

SEQ ID NO: 509173 - protein, 358 aa, unidentified
MPNLVFEKKLTKEETMTNITTVGLDIAKNTFHFIGCNQAGKIVKKKMLRRADLLAHFLKLPPCLVAMEACSGAHYWTRELIKLGHQVKQIAPQHVKAFLRGNKNDYNDALAICEAAMKPEMRFVSPKTQVQQDIQTLHVLRKKCERDRTANSNEIRGLLSEYGVIIPIGINNVYKMLPELFDSEKENGLSTLFKELLSQHYKKLTQLKEHLVFYTKKIQLLSKSDECQRLQSIPGFGPIVSSAFYQHVGNGSAYKNGRCVSASIGLVPKQHSTGGKERLQGISKRGNGYLRTLLVHGARSVVNTLKDKQTPLANWLRRLILTRGKNKAIVALANKLARIGWVILTRGGCYNGTLVTAQ

SEQ ID NO: 509174 - protein, 375 aa, unidentified
MTFKEWILDLKERHEKDKVVSGMESTGHYWFNLGKFLQDNEIKPVLVNPHHVKKSKELDDNNPTKNDRKDPKVIAGLVREGCYMIPYLPDGIDADLRTASNIRFQLQAELTRIQNRISRWFNVYFPEYKTVYGKPDAKSGMLILKAAPLPEDILTLGIDGVNQIWRDAKLRAVGKARAKILIEAAEHSVGSKEGAVSARMEIRMLLEDYESRNIRLQEVMTLIEGLVKQIPMAEKLLEIKGVGIKTVSGFLAEVGDISRFNTPKELQKLAGLALVENSSGKHKGETTISRRGRKRLRYLLFEVAMSLVAKNPEFRELHNYYTTRRLNPLKKMQSLMAIAAKLIRVFYAMLTKGVDYDPKKMVSDIKRPAVYLQAA

SEQ ID NO: 509175 - protein, 411 aa, unidentified
MRENSKTTSEMKLTGKTNSVEQSKVAEAQGHVSKEVRLLMAKLDSCRNRCAGNGKTRDGWAIGIDLGDKWSRYCFLDGGAVIVAEGSLATVVVEFEKYFSGIPKSRIAVEAGTHSAWVSAQLESYGHEVYVANPRKMESIHKNRRKNDKVDARTLGRLVRADPELLYPIRHRGLEARQDLVLLRARDNLVAVRTDLINCVRGLVKSVGARVPTCSAESFHKSAAAVLPEGVRDALLPMIKQIEALTDSIRGYDQAVSKLAAKKYPETNLLQQVKGVGDLTSLAFVLTLEKPERFAKSRDVGAYLGLVPRQDDSGESSPQLRITKTGDRMVRRLLVSSAHYILGPFGEDCDLRRFGEKMAARGGKNAKRRAVVAVARRLGVLLHRLWTTAEVYDPLRNSRMAEQALAAVANP

SEQ ID NO: 509176 - protein, 336 aa, unidentified
MNNYIGIDVAKATLQIYIPDGKIDIEISNTQTALKNLHSKLKRLYKKEIENVVFVYESTGSYSTILETFSQKQNIKCFKVGAVQSASFAKTIKNRSKTDKVDARMLSRMSMLATPRDIKVPYRDAKAHQIRSLMKYYQSLIKEENRHSNYREAAKYNNEDSYVLKRLDQKIKSLKKEQNTLIDKILQIIKDNKSYKKAYDNIISINSVGEKSAIILLYLFLRYPNASRQHITALCGLDPIHRESGTSLKKRAKISKQGMSLVRSILFMPVMTAVVRNEEMKYHYDKLLARGKCKSLAQIAIMRKMILLAHSLYKNDEKYDPLKYLNHLSIKDGIMS

SEQ ID NO: 509177 - protein, 343 aa, unidentified
MKHYIGLDVSMKRTFICVVNEQGKILHEGSEKTDPHLMADYISKLGLQEVVVGFESGSLSHYLVTGFRERAIDPICMDARMLSPILALKINKTDKNDARGIAEALRSNMYTRVHCKPQESVERAILLASRRALTNQQTQLKNTVRGLLKTYGIRLGSVGAKNFSSTVLKHLENHEEIVKFSVTALLNAFDHLVKEIEKVNQRMLKIVSTDEEVQRLMSIPGVGPVTALTYKTEIFDPTRFKDSKSVGAYLGMTPTQYASGEVQRQGRASKCGSSELRSLLVEAGIVLLTRSKKWSKLKAWGLKILRKKGLKKAALAVGRKLAVIMHRMMIEKKEFIYGEPKTA

SEQ ID NO: 509178 - protein, 317 aa, unidentified
MTEATPIYVGIDVSQERLDVATTAPDKVWSVGYDDDGLKKVRTHLRRLKPERIIVEAGGKLERPLVAALAADGLPVVVVNPRQVRDFAKAVGILAKNDRLDARVLARFGQATKPELRLLADAARQALAEKVTRRRQLVEMIGMERHRTARTTLEVRRQIERHIRWLEEQLQKVDDDLQQRLQQSPHWQESNDLLQSVPGIGPTTAAVLIAQLPELGRLTHKQIAALVGVAPFCRDSGTLRGKRTVWGGRAAVRTALYMATLVAVRYNPRLRTFYQRLVTAGKAKKVALVAAMRKLLVILNAMLKHQTPWNQNLPATT

SEQ ID NO: 509179 - protein, 305 aa, unidentified
MNTSIFIGLDVSKQHLDVAVRPQNRHFVNSNDDRGIRQLVKRLAALKPQLIVLEASGGYEFLVTAALAEAQLPVALVNPQAVRKFAGAAGKLAKTDKIDAQVLAHFAEALRPEPRPLPDQAHQVLKAALQRRQQVVKMIGQEENRLEKTFIPTVRRDIQVHLAWLRQRLTALNRDLDDQIRQSPLWQDRDRLYQSVPGIGPVVSLAVIAQLPEIGTLPGNKAAALVGVAPYNRDSGRFRGKRMIRGGRSYLRRMLYMAAVAATRWNPVIRTFYQRLVAAGKPKKLALTACMRKLVLILNAMVKHN

SEQ ID NO: 509180 - protein, 292 aa, unidentified
MEHYVGLDVSLKLTSICIVDRTGKVEREGVVASDPEAIATFIKLHAPHVVRIGLETGATSTWLWTELNKIGLPVICIDARHAKAVLKMQINKSDRNDAAGIARIMQCGWYKEVCVKDLDSHATKALLVSRALLVKIKRDIENQIRGLLKNLGLVIGRAKMNMFAVRAAQLAEDRSELFAAVDPLLKARGAVEQQILDLDRKVLRLARNNAQVRRFMTAPGIGPVTALCFLATIDDPTRFKRSRSVGAYAGLTTRRYASGEIDWTGRISKCGDKMLRSYLYEAANVLLTRVAK

SEQ ID NO: 509181 - protein, 311 aa, unidentified
MKIICGVDVSKARLDACIEPGAIRGSFGNDGAGIAALAAFCRRHRASLVVMEATGGYERKAFLLLWEQGLPCAITNARNVRQYAEAMGVLEKTDEIDASIIARFAGARGLQPMPVPSQAQQRIKALVARLRQVTDDLIVQKQRRSCPLDAEMLASLDEVIALLKRQSRTLEGEIASMIDDDPLWAQLAQTWRSVKGVAGRTVARLMAELPEIGTYSNRAIAKLVGLAPIADDSGKRRGKRPVRGGRSGVRSILFLVAAIAARYDQSLGAFRDRLRAKGKEKMVVRIALARKLLVRLNAKARDTRAAYANPT

SEQ ID NO: 509182 - protein, 417 aa, unidentified
MSEYAALVSIDWADQQHAVCLSAAGSKEREQAIVKHTPAALQEWALGLRQRFAGQPIAVCLEQSRGPLIYALLQYDFFVLYPINPATLAKYRQAFSTAHGKDDPSDADYLLDLLEHHRKRLRPWHPDDQKTRTLRLLVEQRRRLTGDRTRISNRLTALLKGYFPQVLDWFEDIRTRLVCDFLERWPELSALQRARSATLNQFFRSHHSTSNSTNQRRLAEIKTAIPLTTDAAVMTSSVINVKVLVAQMRTVITALSEYDRHIEALCLTHDDYHLFAALPAAGPVHAARLTAALGSDRSRWQTVDELLRFSGIAPVIERSGKQFRIRWRYFCPKFFRQTFHEFAAQSIQDSFWARAYYSSQRAKGKDHHAAVRALAFKWIRVIWKCWQTRTPYNEVIYLESLRKKGSSLLKFAADHQQ

SEQ ID NO: 509183 - protein, 329 aa, unidentified
MDSQVPLPVVGIDVSKASLAVCYQRDQQVHHLEVSNTKAGFQQLVHTCGAQCLFVLEATGAYYLALAYYLHEQKGQVVVLNPLVVKRFIQMHLGKGKSDRKDAQWLLRFGQQQAVKPWQPEETVLVECRQLEQVSEQLLKQKTMVSNSLEALQRQPVISKLALQQLQQTLKALTQQVQAVEAELLAVLEQRFQAEMALLCSIPGIGRKTAGLLLLFAGGFTRLDNYRQLIALAGLSPREHTSGSSIRGRVRITKMGGALIRGKLFMCSFAAKKRNAACQALYDRLVAKGKNGKVALIAVCNKLLKQAFAIVKSGVPYQAEFTKKLALNA

SEQ ID NO: 509184 - protein, 378 aa, unidentified
MNRIIKIGMDVHTTNYTLCIFEPSFEHDGTVHCITQVKPEVKNIIHVIETLKKKHENEELNIVCGYEVGCLGYSLYHELKEKGVECVILAPTTMKTEKGGRKLKNDYRDAKMIAECLAYGGYSAVHVPTELDNSVKEFIRMRDDIKENLKSIKQQIIAFLTRNGKQFDGKSYWTQKHIDWINTISFSEPLLQDTLKEYMIEYNHLCDRVETLDKQIEEVSLKEEYVEKVQQLQCLIGIKTHTALSLIVETSDFNRFKKGNMYSAYLGLIPGDDSSGGHENKLGITKAGNSHLRKLLVEAAQGYTRGRVGFKSKDLKSRQEKCSSEVVAYADRANERLRRKYYRMTLRGKRYNVAKTAVARELACFVWGIMTDHMDLCS

SEQ ID NO: 509185 - protein, 454 aa, unidentified
MRKPQVVPDEDHEVVYERVAAVDVAKASGVVCLRTPDTKRAGRFVNRIWDDVPATRARIAELGAELLRHRVQMVTLESTSDYWRIWFYVLESIGLAVQLVSASQAKNLKGRPKTDKLDAMWLARLTQWGMLRPSFVPPAAIRRVRDFTRARTDLVRERTRVLQRLEKLLEDAMVKITSVARDGLKAKSVVAMVAALAAGERDPRTLADLAKGPLRGKRDALAEALDGMFDSHHGVIAQMLLGQVAFLDQQIKQMEDQAVAALAQVEESWGVDAAGETGPGRGTGPDSLILAAAHRLAEIPGISVWLAIVIIAEIGLNMTRFPTPAHLVSWTGLCRSANQSGARHGKGTPKKGNSYARAAAGQAAIGAAGTDTFLGERYARIARRRGKAIAQVAVARSIMIIAWHLLNDPAARYRDLGPDWHARRTNRDKKIRTHLQALNALGVTVAITDDEHAA

SEQ ID NO: 509186 - protein, 346 aa, unidentified
MSEIIRIGVDTSKYIFQLHGVDAAEQPVLRKRLGRKQMLEFFARLPPTQIGMEACGAAHYWARELGKLGHEVKLMAPQHVKPYVKRNKNDGRDAEALCEAMSRPTMRFVPVKSAEQQAALMLVGVREQMVARRTQLGNMIRGYAAEFGITAAKGLDKIEPLVAEIAQDEDVPAMARDLFALQGREFVQLQAQLKVIEARLRAWHRGNADSRRLAQIPGIGPVGAPELIMKTPDPGAFTSARHFAAWIGLTPKDHSTAGKTRLGKITRAGDERLRSVLVAGATAVIKQARRGRGHPSPWLVALLKRKPPKLAAVALANKNARIAWKLMVTGESYEGARMHAASAAAT

SEQ ID NO: 509187 - protein, 416 aa, unidentified
MLFIGDDWAEDHHDVELVDDEGRRLARARLPEGLEGITRLHGLVAEHGAASWGDLPPEEVAAQVVIGIETDRGPWVTALRAAGYQVFAINPLSAARYRQRHSTSGAKSDAGDAHVLAGIVRLDRDHHRAVAGDSDLADAVKLLARAHQTAVWERTRHVLRLRSTLREYFPAAIEAFEDLAAQDALKFLERAPDPGRAAKLSRSQLMVLLRAARRHHVEAKADVLLAVLRAPALRQQPTLEGAYASVVAAQISIITALNEQIAQLQKVVAEHFGRHPAADIYLSQPGFGVVLAARALGEFGDDSSRFTDAKSRKNYSGQSPITRASGKKTVVLARYAGNRRLGTALHLQAFAALGASPGARAYYDALRGRNIGHHAALRQLANRLVGILHGCLKSGTAYSEETAWQHHQKEVPAAAA

SEQ ID NO: 509188 - protein, 376 aa, unidentified
MTTNTAARSNILFVGIELSKKTWRLAFSNGSKIRQRTLPAGDQAGLQQELAWSKQKLGLSADCAVHSCYETGRDGFWVHRLLSGWGIENVVVDAASIETARRGRRAKTDRLDAEKLVRKLMAWVGGEKRVWRLARVPSVAAEAERRPLRERQRLVGERTAHRARIASLVALHGVAAKLNGRQNFAVAVEQLRDWQGQPLSLELVAELQRELQRLAMVHQQILLLDRQQQAALAAPQTKAQEVARKLMNLCGVGPISAGILAVEFFAWRQFRNRRQVGALAGLCGTPYNSGDTDQEQGISKAGNTRVRWVSAELAWSWLRFQPHSELTKWFGRRFGFGSKRVRRIGIVALTRKLLVALWKYLEWDELPAGATLRVAR

SEQ ID NO: 509189 - protein, 383 aa, unidentified
MSSESTRPRSIICLGLDVHKDSITIAVLPHDAKTPTRLDRVPNELPKLKRLLDRCAQAGELRACYEASGAGYVLQRAMHAWGYACEVIAPSLIPKRPGVQRKHDKRDACDLARLYRAGELVTVRIPSEAEERVRDVVRCRETFQREVMKARHYILKFLARRGFVYREGCHWRSGHLRWLEHLTSEMSPLAPADRLVFREYHALLAYTLQRRDALDREIEHLALEPALAAAVGRLQCFRGISLHAAMVLATEIVDWRRFERPGQLAAYLGLVAREDSSGPRERKGSITKAGNSHCRHVLVQAAWTYHYRPHLSLEIKRRQQGQPPAVVAHAWKAQQRLHARYEYLAFRKQPQIAVVAVARELVGFLWAVMQDVSSSAVVRATAA

SEQ ID NO: 509190 - protein, 343 aa, unidentified
MENTIVGVDLAKNVIQVCVFKNKKVHSNTEMIPSEFTAFLANAKSVTIVFEACGTSNYWKQKAISLGHDARLISAKLVAAVRQNQKTDKNDALAIVQASLLPDVTFIAGKSIEQQQLQSIMRLRELCVKQKTAIGNQLTSLLLEFNIKVSSRNGGLRGAVELTLEDAENGLSFEFREALNTAWQQYLSIIKSISTYDDCLEKAIELHSECKKLLKLEGVGTLNAINLYIALGCAELGVFEKGKNASACIGLTPIQYSSGGKTKLGSIGKYVKNSVLRSQLITGAMSAVNHATNRTARTQKDQWIQAMVERRGKKCTAVALANKTVRTAHAMLTQNTEYKATLI

SEQ ID NO: 509191 - protein, 397 aa, unidentified
MYIVGIDIAKRKHEAAVIDGEGTVIIKPFSFTNNCSGYNRLLAMLTKAKLPLDEVSFAMEATGHYWLALFTRLQKEGFRVQVINPVQTNSIRSFYIRQVKTDPRDALLIAEVIRFGHFSESTLHPENIYELRELCRGRHAIVSMQADVKRKVVALLDQVFPEYETAFTNLFGDTSMAILQTCPTPKELSETPLEELCHLIEVSSHKRFRMAKAQELQALARNSFGFAMAGGVFSTMIRLYAKHLDFLKQQVREMDRKIAEIMETLDTPITTITGIGPTLGAYILSEIGDISRFSSAAKLAAYAGIDPTMRQSGEYNGVRNRMSKRGSPYLRHAIWLAASSAVLHDPALKLYFQKKRDEGKPYMASVGHACRKMVSIIYAVMRDNKAYTPYIPNEISA

SEQ ID NO: 509192 - protein, 499 aa, unidentified
MPSSPTCSVVLDPVLNTVMTSAVQDCGGSRLGDYFLCTVRADALGRTERKNAKKRFKAVSLPIVEPNAAGVDVGATQIFVAVPPERDSDPIRCFHTFTADLEKLADWLQECQIQTVAMESTGVYWIPLFQILEKRKIEVRLVNAQHVKNVPGKKTDVEDCQWIQHLHACGLLRGSFRPADEICAIRSLWRHRDNLIELATIHLQHMQKALDQMNVQLHHVISDLAGATGLAIVDAILAGERDPGKLAQLRDWRIRASEETIMKSLVGDYREEHLFTLRQSLESYRHYQDQIQRVDARVKRMMQTVRSKVAEGEKPPREKNPRKTPWRNEPPQLRDDLYRAFGVDLTQIPGINTLTAQMIFTEIGPDFSRFPTAAAFCSWLRLCPDPKISGGQVLSSRTRPTKNRAALALRMAAQGLHRSQTFLGDYFRRMKARLGTPKAMTAAAHKLARIVYHMITTRQEYDTTVFQELERRVQDRKRMKLRIQARELGFDLVAREAVP

SEQ ID NO: 509193 - protein, 416 aa, unidentified
MEILYPRCCGLDVHKETVVACLRLAIAGKVIKEVRTFSTTTTDLMNLSGWLAENKCAQIAMEATGVYWKPVWHILSDGDFELVLANAAQVKNLPGRKTDVKDADWVSDLLAHGLIRASFVPDSPTQEMRTLLRTRKQLSREKSSHILRIQKTLEDANIKLDSVVTDIMGLSGRKMVEAMIAGQTDPAKLARLADPRLKASQETLREALRGRVTRHHRFLLRLHLQQIDALDDAIVKIDREVEAGIAPFRSAIEQVSTIPGVKSLSARMIISEIGSDMTRFASAAHLISWACICPRNDESAGKRRSSRIRKGSPWLKTTLVQCAWAAARTKGSYLQAQFHRIRARRGAKKAIVAVAASILTAIYHMLKDGTMYQDLGPNHFQHRDKERQKRRLLQRLADLGFAMELLPLTATAHVSP

SEQ ID NO: 509194 - protein, 394 aa, unidentified
MKLIGIDIGKNKHFFCVMDQQTGEIISQPVSFSNDKEGFDFLVQKIKSYPKDSILIGMEDTGYYHFALLKYLLDLQYTVALINPKTTDFNRKMQGGITKNDKLDTINICDVLDTPERKKQYRITKVNSFDLYEQKQLTRHHHNLKEEENVYKNRLQKCIDIVFPEFNKLFNSKYGIVYMNILKMFGSAENIANTDIRTIRKCFEIEGRGNRISLTPERLKECARSSIGISSSAEVIQIKHLSAQIELIEEQLTEIDKKIAEFSIQNNSPILSIPGISHFSGTSILAELGDISNYSKPSQIIKFAGVAPLHYESSQFNAQHTAITKKGSKYLRKTLYQIILPVIRHNPVFNKYYQLKISQGKGHRCAQGHCVRKLLRIIYHLLKTNQQFDPQLLR

SEQ ID NO: 509195 - protein, 347 aa, unidentified
MVYNQPHRFYCGVDLHARSLFTHVLDHKGRTVFEQDLPADSAVFLKAVKPYRKDLVVGCECMFAWYWLADLCEDEGIPFALGHALAMRLIHQGKSKSDRIDAGKLAAMLRGGLFPLAYAYPRAKRQTRDLLRRRSFFVRQRSQLIAHIVNTSSQFNRPPLTKKLTYAANRSEAIAERFTDPSTRLMVESDLALIDDYDRQIARLELHLTRTAKVDDPVTFGFLRTVPGIGPILGLILLYEIDAIARFPEVGNFLSYSRLVRCEHSSAGKVTGSGRKKVGNAHLKWAFSEAACLMIRTCPAVKGWVQRQETKRGKRKALSVLEAKLGRAAYHLWRKQQAFDLKRFLKG

SEQ ID NO: 509196 - protein, 352 aa, unidentified
MNEHSKPAVAAMVGIDLAKRSFHVYGADGRGKPVFSKKLTRARLSPFVANLPPCTVAMEACGSAHHWARTFRTYGHEVRLIAPQFVKPFVKSNKNDAADAEAICEAAQRPTMRFVAVKTVEQQDIQAIHRMRSLVVERRTAQINQIRGLLLEYGIEIAQGRAAAMRRLPEILEDADNGLSARFRGELHELVEELRHLDTRVTRYDEQIEEIARNDAQVQRLMSIPGLGAKGATALVAAVGEDPGLFQNGRGLAAWIGLVPRQHATGGRERLLGISKRGDVYLRQLLIHGARAVLRWVERKEDSTSRWATALKARRHTNVACVAMANKIARVAYAVMTTGKPYDPTLGALAKG

SEQ ID NO: 509197 - protein, 408 aa, unidentified
MQRYYLGVDWADKSHQLYAADESGKKIKELEVQQTAEGLAEFGRWLDERRSAGTELWAAIEKPQGRIVDFLLDHGVVVYPVNPKALDRARDRFRMSQSKSDGFDAYVLAEFLRTDHTHLRALEPDSAQGQELKMLTRDHQRLLRQKTRLLNQMTITLKEYYPRALEVFDDLETQIARDFLHAYPTPQGLSRMTRPQWKRFAKGEHHLSEARWQELWEKINKPQITIPDHVVRAKAKLLLALVAQLEVGVKAVHDYSQEVERFFAALPAAKIARTLPGAKSATTMPTLWAELGDAKNRWNSFRHLQAEAGTVPVTKASGKSRMVQFRFACKKRLRTAMYWFAFNSLMRCEWANKYYRDQRAKGHSKHQALRALGAKWLKIIFVMWRDHKPYDENYHLANIARHAMRQAA

SEQ ID NO: 509198 - protein, 414 aa, unidentified
MAEEETISWFAGVDWGSEKHQVCLLDAQGTTAGEREFPHSGEGLTELGDWLLSMASVASTVAVAIEVPHGPVVDALIDRGFVVYAINPKQLDRLRDRFSVAGAKDDRRDAYVQADGLRTDRRLFRRLQVADPRLIELRAWSRLAEELRAERVRLSNRVRHQLWRYYPQMQKLTDDLAAPWFLELWTIASTPAKAVRLRKSTVERLLKQHRIRRIDAETALRILREPAIKVAEGVAEAASIHMRSLVARLRIVNRELREAERKLDELCTVISEIEQTSGEGLQRRDVAILRSMPGIGRINLGTLLSEASGPLSRRDYEGLRTLSGAAPVTKRSGKSVIVVRRYAAHVRLRDTVYHWARVATQRDPKCRARYTAMRKRGHSHGRAVRGVADRLLALACVLLQRQTLFDPYFGRLTK

SEQ ID NO: 509199 - protein, 348 aa, unidentified
MTHYQGVECVDDSDHLNFQHKIMQNQTIAGIDVSSETLDICVSNSQGQRSFVIKNDVKSIGKFFKTYEHYTLLIGMENTGRYNWALYEVLKDLPHRVFVVSPLHLKKSLGLVRGKNDKVDAVRIAGFIMKNHAELPQWKPSSTAVQKLKILLTERNSRIKAKSKILNQQKDHMKMKHLGLDKYLQGLNKQQLTVLNRQIQQIEHDIEALVKADEPMQHQAKLIQSIPGVGKILCWTMLAKTENFTLITEPRKMACYSGVVPFSNRSGTSIRSKDRVSAYADKDIKTILHMAAMRAVRLKNDMQEYYLCKVAQGKNKMSVLNAVRNKIIHRIFAVVKNQTPYKNNLLLS

SEQ ID NO: 509200 - protein, 407 aa, unidentified
MKKNSNTQMKSNRTGKPRCPVQREVKEVMAELLIKLGEKLEPRMSGMETNEDGGLNRDRLTVGVDLGDQWSNYCILGLEGEKLVEGRLRTEQHEIAEFFQAMAPARVVMEVGTHSAWVREVVLGCGHEVLVANPRQMDGPKRRRKNDRIDAHKLARVGRVDPQSLFPIEYRSIDVRQDLVTLRAREALVKVRTELINTTRGLVKTMGERLPKCTSLGFARRADEALPQGMREVLLPLVRLVETLTGYIQIYDKRIEKLAREKYEHTELLRQVKGVGALTSLAYVLTLENPERFAKSRDVGPYLGLVPKQEDSGESQPQLRITKTGDEMLRRLLVGSAHYILGPFGPDTDLRRYGLRLCERGGKNAKKRAAVAVARKLAVLLHRLWVTGEVYEPLRHARPPAIEQSAA

SEQ ID NO: 509201 - protein, 404 aa, unidentified
MERVYVGIDWADEHHDVHVTDDSGAALESFRIPHSYDGVEQMRKRLSKSSGNPERILVAIESHQGLLIYSLLEFGYQVYPINPKSMDRYRDRYRMSSSKSDPKDAMVLANILRTDLHLYKPLPKETTADARLRRLTRAHKSLGQQKVKLTNQLTTQLKSYYPAALQVFCKLDQKITLAFLEHYPTPSKAQAASLEEMQKFFRKQGYTCPSKVPLVYEFLQQPSLIAPKELEEIHQNIVLSLLPVLRSLLIAIEKLAKEIIKEFRQNQAYQIFSSLPAGEITAARLNGELGSDGLRYPTREYLQTSAGTAPVTKRSGKTQIVLFRWQCNKHLRSAFQDLARESVNRCDWAREYFMRQIKLGNKTSRAYRALANRWAAIIWKMLQEGQPFSQARLANAVGLAHVIT

SEQ ID NO: 509202 - protein, 418 aa, unidentified
MYYVGIDIAKQFHIACVLDESNKLIVKNLRIESEISDFSLLHSELINITDDRNQFLIGMEATGLLFENLYIFLQGLGYNVVLLNPYQTTRFREMQTMKYVKNDNIDSQMIAALLKSGQYSKGYVSEDIYQAIKSLYRHKATLMQEMKNAKRQVSTTLAVVFPEFEQIIRDPFSVSGMALLEKYPTAKHYKGASGERILKLFRNIKGNNFNLQKANALLDLAKLTIYQGNASDERAYVIHSNLRRIRFLKDEIEACESHMFALLNDVNTTIEISQDEEIHIADLVDNLRSIDGVADKTIFAILSECGDISRFHSGQAFIGFLGLYPTLYQSGNSTKYGKLAKRGAKLAKLALYQASIACVRHNAELKKIYLDKKSGGRAPKECVIIVARKLAMIIYSIYKNNTPYNPARVFNTKASLSH

SEQ ID NO: 509203 - protein, 361 aa, unidentified
MCTERTTVGLDVHARSVVAEAVDWASGRVFGQRLVPANDVVLGWVAQLPGPVAVAYEAGPTGFGLARAFGSAGVRCEVVAPSKLQRPPGDRVKTDRRDARRLARLLHIGEICGIGIPSVIQEDARDLVRAREDARADLMRARHRLSKLLLRHGIVYYGGRAWTGLHERWLRAQRFELPGTRAAFEEAFDAVLSVSARRDRLDEAITVTAAAPQWAPIVSRLCAVRGIATLTGLGLAVEIGDWDRFTGASIGAYLGLVPSESSSGNSRSQGPITKTGNTHARRLLVEAAWHHQKPLRAPGQALAARRAALPPAVRARGEAADRRLHHRWSTLAARHKRPTVIAVAVARELAGWCWSLATLND

SEQ ID NO: 509204 - protein, 377 aa, unidentified
MKKELYLGLDVHKDCIKRAVAEEGRKGEVRDMGAISNDLHAVEKWISQLRKVHGQDVILRACYEAGPCGFGLARRLGQLGVECEVVAPSMTPTRSGDRVKTDKRDARKLARLLRAGELTPVYIPEATDEALRDLCRARTDAVDDRRRSRHRLKGFLLRHGYRYQGKSAWSAAHERYLRELVLPHPAMKVILEEYLISIQAAGERIQRCEVAMRDLLEKWRLAPAVRALMAMKGFQTVAAMILVSELGEVHRFAHPRQVMAYLGLVPTENTSSDKRRQGSITKCGNAHARWLLVECAQHYATPPKVSKELSRRQEGQSPEVRATSWRAQNRLHRRYTRLLARRLQRNKAIVAIARELSGFIWELLRTQSCYQAQSPSI

SEQ ID NO: 509205 - protein, 383 aa, unidentified
MTSRKDCLNAKSERGARGVQKLNSTRTLIQRTTTEAPQRHMYYIGLDVHKKTISYCIKDASGQVHQEGKIGATRYELDSWMKTLPRPRSIAMEATIFTGWIYDRLLPQAEQVKVAHPPMLRVIATAKKKNDRVDAGKIADCLRCDFLPECHMASTEIRDRRRTLRYRHLLVRQMVQMKNRISGLLMETGVSHNKQRLHKVGYFRKLLATNEEVNESIRPLLRLSRETIVRLQKTEYTLVSSLERDPVLADRIKRLRTVPGVGPITALTWALEMGDVSRFRSIRQAISYCGLCGDQKSSADKVMRTPLSKQRNKHIQRVLVEAAKLAPRQDHELALVYETEKQKGNANRATLAVARKMVAYLLAVDRGKRDFVLSVNHRRAAAA

SEQ ID NO: 509206 - protein, 335 aa, unidentified
MICVGIDVAKDKHDCFILSSEGEVLADVFTISNNAEGFGTLLQTIRRCTRPSDKIKVGLEATGHYSYNILGFLLDCGLPTYVINPLHTNLYRKSLSLRKTKTDRVDARTIATMLMSDVDLKSYTDTSYHNEELKSLTRYRFDKVRERAKLKTSISRLVCILFPELEKLVPSLHMASVYALLSEFPGAKQIASTHLTRLTNLLHETSKGRYGREKATQIRDAARNSIGSAMPAKSLELKHTIRLIGELDEEIEEIEKEINSIMEVVHSPITTIPGIGTRMGAMILAEVGDFSNFDSPDKILAYAGLSPSTYQSGQLTNCYSHICLLYTSPSPRDCS

SEQ ID NO: 509207 - protein, 349 aa, unidentified
MDHIGIDVHKRESQICILGEGGTILEQRIRSEPERFAAVLGARPRARILIEASTDSEWVARCLEALGHEVIVADPNFAPMYATRTRKVKTDRRDARALAEACRLGAYRPAHRLSDPQRHVRGRLLVRDAVVRTRTRYISLIRALLRQHGFRVPSGSAENFVHRVQGLPLPGRLRSVVAPLLALMRPLNQQLSYSDATIAHLAVQDPRVPRLRSVPSIGPVTAAAFLATIDDVGRFHHAHQLEAYLGLVPREYSSGETQRRGPITKAGHSRTRWLLIQAAVSILHRRPPQAEVLRTWALRIAARRGKQVAVVALARRLAGILYALLRDGSVFESQHVRPPRPPAAALVNV

SEQ ID NO: 509208 - protein, 308 aa, unidentified
MHYLYYVGLDVSKETFDASLVAFEDANEMAHRKFANSRKGICSCLHWVEKRHGIRLVDVIFCAEDMGSYISEMAVCASDRTLNFNFSLISPLVIKYSMGIARGKTDRVDARRIAEYAITHYRKIALYLPAEKELCQLRTWLILRAHLAKQRVAKLVLLEKLDYKEKFADVSIQRSMLQEEIAYAETHMKTIEREMKELIAADSNICRNYKLLTSIKGVGPITAIVMLCSTLNFTKITDHRKFACYCGLAPFEHSSGTSVCGGCHTSSMANRDIKVQLNRSALIAIRCDPQLKAFTNAKWLKVNINSAS

SEQ ID NO: 509209 - protein, 412 aa, unidentified
MQDILTCAMGLDIHRDVIVACLAKGELGTDPEIEIRSFSALIPEMRKLRDWVLEAECRYVAMESTGIYWQPIYEMLEPCFDGQISILVVNARHMKNVPGRKTDMRDAQWIATLLRAGLLKGSFIPDKTFRELRHLTRYRKSIVRDITAQKNRIDKFLQSSGFRFTAFLSDAFGASGRNIIRHLMEYGNISREALDRCLKTQTRKRIDEILIALNGSLSEHQRGFLRMIFGHLEALEQHRHTVEDAITKEITKHEEALSLLCSIPGIDVTAAAAIIAEIGTDMSAFPDSQHICSWAGLSPGNNESAGKRKSAHINKGNPYLKSMLCEVGWVISGKRSLYLSGWYWRIKQRKGAKRATIALARKLLALIYTMLKTGSPYNEDCFEIRRKQSERKRASRMVNELQKLGYFVVAPG

SEQ ID NO: 509210 - protein, 314 aa, unidentified
MTTAYFVGIDVSKETLEMAIYGQETILSYTNTPAGQAELVAYLKPLNPTLIVLEASGGFEIEPALELMTGGLPVAVVNPTRVRNFARAYGRLAKTDPIDAHLLAHFAQVVRPRVRSLQSEQEIHLTNLVRRRRQVVAMLTAEKNRLHTTSIRLKEGVKKHILWLQDEEAELTKQIAGLIQTLPQWREKEQILQSVPGIGPVNAATLLAELPELGTTSRQKIAALAGVAPYNRDSGKKRGRRKTSGGRGGVRSAFYMACLSASRHNPVIKRFYERLIANGKETKVALTACMRKLLTILNAMLRNMEPWRLVNSHA

SEQ ID NO: 509211 - protein, 346 aa, unidentified
MTIVETRAITGGVDTHADVHVAAALDPVGGLLGVREFPASPAGYAGLLGWLGGFGTIALAGIEGTGSYGAGLARHIAAAGVRVVEVDRADRQDRRRQGKSDPLDAVSAARAAQSGRARGAPKGRDGAVEAIRALMVAKRSAAGERTRTINQARALILTGPDDLRARFAQQAPAALVAGIASLRPRPGDVAGHATRVALREPGRRAAFLDGQLERLDELIVPLVSARAPGLLALYGIGPNTAALLLIAAGDHPGRLRSEAAWAHLCAAAPIPASPGKVTRHRLNPGADRQANHALWRIVFTRMGSDAATRAYVERRAKEGKSKAEIIRCLKRYVARQVYPYLRPGAG

SEQ ID NO: 509212 - protein, 408 aa, unidentified
MQVTFGIDVSKSTSTVCELIGESKNELTITNNRPGFIQLLHELTAFSKHPQIIFEATGVYSRTLQSFLEDYGYDYVILNPLKAKKEMDMGLRHNKTDKTDAYHLALIQRLYHHPINQLQSQTYKQLNALSRFYDQLTADLVMAKNRLYQALQSTFPEIENLFSSAKGKNYWQIVVRYPHCDLVRREDKKQLINWLMSLKGIAFKHALRTADKLIELAYQAYPVVSCSSIEVEQVQYYAHRLLNLSDQRENLIARMVKLAKSLPNHDLENLESIPGFAQTTAVRVLAELGDLRRFSNPNKINAFIGIDPGRYQSGEMDSNLSITKHGNAVARKLLYRAIGQIDNAAKTNPCHIADYYESKKLSSQTKGFKKIAIASIHKLIRTIYSLIINDQPYDYNVATHNQKDFSRN

SEQ ID NO: 509213 - protein, 387 aa, unidentified
MSQVDDLSRSFAAFDQNTTLTVVVELSEASWLVAGLVPGVDRQPLKKQEPDPRALLRLLERWRAEATKTGRMIERIVLAFEAGRDGFWLARWLRARGIEVYVIHSTSVAVSREHRRAKTDRLDTGMLMRVFLGWLRGERGHCRMVAIPTLEEEDAKRPSRERESLVGERTRIINRMKSALARLGIRGFKPALRKAPQRLEALRTPEDTPIPPNMLDEVRRDMIRLAVVREQIDAIERARLVRLEQAPASGSHPMVRLLARVIGVGIETADMLVQEVLSRKLRDRRAVARYVGLTGSPDESGKRRREKGLAKAGNARVRRGLIQLAWRFLRFQKDSALAQWYRARTEGPKGVRKTTMIVALARKLLIALWRLVMTGEIPVGVVLRAAA

SEQ ID NO: 509214 - protein, 357 aa, unidentified
MGKSIKNLSSVTIIGLDIAKNVFQVHGVDAGGALVVAKAVRRGQLLGFFASLPPCVVGIEACSSAHHWARSLLELGHQVKLIPPAYVKPYVRRNKNDAVDAAAICEAVGRPNMRFVPVRSVENQAQLMRHRTRELLSGHRTRMLNALRGHLGEIGVVAAQGAQNAYALKRLLADGCDDDGEVIVPDCVCRALAPLVHQIEAIDAEIAAIDEEIKTLVKSDETARRLMTIPGVGPITAQAIVATVRETGAFASGREFAASLGLTLRQSSSGGKERLGRITKMGDRYLRKLLVVGACATLCHRKGHNDALRVWADRLLARKTVKHGFKLTAVALANKVARIVFALMTQGGEYNELPIAA

SEQ ID NO: 509215 - protein, 348 aa, unidentified
MVADSLDVVIGVDTHRDAHALALAAAPSGALLLEAVVEASADGYRDALAFARAHARGRRAWAIEGTGCYGAGLARFLLARGERVLEVARPRREQRPGRGKSDALDALRAARSLLGREPLASPRSAGRREALRALLATRESAVGARRCALNQLRALIVTCPEPLRAELRPLTRARLLRLLRAKRPRRHTDRQLRGTLLAMQLLAVRIDALTLEERTLKQEILPLARELAPQLLAEPGVGPITAASILLAWSHKGRLRNEAAFARLAGAPPIPASSGKVVRHRLDRGGDRKLNRALHTIITTRRRTDPDTIAYIQRRISEGKSDREAIRCLKRYLARSLFRQLEAMPQAA

SEQ ID NO: 509216 - protein, 400 aa, unidentified
MISVGIDISKDKSTVCMLRPYGEVVEAPHSIDHTEQALNALIERIQSFDEDVKVVLEATGGYHQVVVTKLLSAGIFTVVVNPYIMKKYCAAALRKAKTDKIDSIRIASYGIDHWFSMTAYCPPDEIYAELKLLGRQYDRYVRLKVNCKIQLANLLDGVMPGIKTILQGTVPAYSTKDKLCDFVEKYWHYDNIKKMSEKRFIEDYGKWAKKKGYRCSESQAIAIYQLSKNNIPTLKSGTPSTKMLVLQAVKAVRDAEITLSLIISQMQEIASTLPEYSVVRNMKGVGDVLSVRLIAEIGDVRRFHNGSALVAFAGIDAPPYESGKFIGTKRNISKRGSSTLRKIGYEIMHSLKVVKPTEDSAVYDFIIKKETEGKPKRVAKIAGLNKFLRIYYARVMETYC

SEQ ID NO: 509217 - protein, 340 aa, unidentified
MGEITTIGLDLAKQVFQVHGIDADGTTVLRKQLRRSQVLSFFSRLASCLVGMEACATAHYWGRELAALGHEVRLMPAQYVKAYIKRNKNDAADAEAICEAVVRPTMRFVPAKTAEQQAALLLHRGRERLVRQRTGLVNALRGHLAEFGVIAPQGLRNVGKLIAVVRDVGDARLPDLARQVLEVLAAQIEQLEGAVAAVEKQLMAWHKSNPVSQRLATIPGIGPIIASAIAASVAEPGGFRSGREFAAWLGLVPRQNSTGGKHRLGGISKRGNQYLRRLLINGASANLLRSKATKADPWVIGLRRRRPSLVVAVALANKTARIAWAVMQRNENYQRMAAAA

SEQ ID NO: 509218 - protein, 411 aa, unidentified
MRLFAGDDWAEDHHDVELMDASGRVLAKARLPEGVAGIARLHALIGQQLGEDAEDAEVVIGIETDRGPWVAALVAAGYTIYGVNPLQASRYRERHGVSGAKSDGADAHMLADMVRTDSHQLRAVAGDSAEAEGLKVLARAHKTLIWERTRQVQRLRHQLLGYYPAALEAFDDLDAPDTLELLGKAPDPARGARLTRAQVSAALKRARRRGIPDKATAILAALRSRQLGQPAAVTAAYAATVRSLIAVITVLNEQVKTLQGQVEEHFGQHPDAEIYRSQPGMGAILGARVLAEFGDDPHRYADGKARRNYAATSPITRASGKKKVVAARFIHNDRLVDSLNAQAFASLSASPGARAFYDQQRAKGIEHNDALRRLANRLVGILHGCLKTRTLYDEVTAWGHRENLPQSSVAA

SEQ ID NO: 509219 - protein, 409 aa, unidentified
MISVGIDVAKDKHDCFIMDSDGTVLEDVFTIANNREGFETLLRKIRSRPGDKVKVGLEATGHYSYNILGFLLDNGLATYVINPLQTSLYRKSLSLRKAKTDRIDARTISAMLLSDVDLKSYTDTAYHNEELKSLTRYRFDRVRERAELKQGVTRLVTVLFPELEKLVPSLHTAAVYSLLEELPGAGHVAACHLTRLTNLLGHASRGRWDRDMAVRIRGAAVDSVGSRMPAKSMELRHTIRLIREYDAEIAEIESRIQEMLDEADSPVTTIPGIGPQMAASIIAEIGDFSAFSSPDKILAYAGMSPSVYQSGRLDSCHSRMEKRGSRYLRYALFQSARFVCIWEPAFAAYLEKKRGEGKHYYVALSHAVKKLVRLIFALQKSGQPYRKPDSLPSRPEPCTSTALAGTAIV

SEQ ID NO: 509220 - protein, 498 aa, unidentified
MRHIIRAAIALKACTLGTMFLMLTQMLHLRRQPPAGYFRRMNAYYARLHGMVVRDQPWLFLHPKKKGGEAVKKRKKIDHLSTLCVGLDIGSRKNFITAMNFDSERLIDMQSVPNAASGVEQLESMILAVLAVHAEFRYVLIAMESTSFYGVHVANYLSTSDALKPYHAEVFCLNPKEVANYKKSFAGIGKNDGIDSFVVADFIRVGRISIEPWRGAQYLALQRLTRQRKHISECIAREKNYALNNIFLKFSQFALLDGADTLLSNKFGSTAEAILTEFKTTEEIVNTPLEDLVTFISDHGRGRFAEPEEIARLLQKAARDSYRLDKSLYEPITTSISCSFNCIRANEKQLKALDKAIAELIAGLNPTEYQILRSIPGIGPVYAAGILAEMGSVRCFPDNNSLARYSGIVWKDNDSGEFEAEDRPMNKAGNRYLRYYLIQAAGSVAQYCPEYAVFYQKKYAEVPKHQHKRALALTARKLIRLIFGLLDKNQLYSPAKSK

SEQ ID NO: 509221 - protein, 307 aa, unidentified
MFVGIDVSKDRLDVHIRPTGEVFAVARDGAGLEQLVGKLRTIAPSLIVLEATGGFETVVAAALAAAGLPLAVVNPRQIRAFAKACGQLAKTDKLDAAVIAHFADAVQPPARGVPDEAARALAELLTRRRQLIGMMTAERNRRRQLTQPRLVRTVDQVLATLQLQLSAIDTDIDTAIRATPAWREKEELLTTAPAIGAKIARTLIADLPELGALTRRRITALVGVAPFNHDSGKRHGKRAIAGGRSSVRAALYMAVLVAIRRKLPLGATYQRLRAAGKPAKVAIVATMRKLLVILNAIMRDKTAWHGI

SEQ ID NO: 509222 - protein, 319 aa, unidentified
MTTSSVVVGVDVAKDRLDVAVRPSGEAWSEANDEAGITALVARLRPLGPALIVCEATGGFERAAIAALAAAGLPVVVANPRQVRDFARATGQLAKTDQLDAAILALFAERVRPTPRPLPDAAAQLLDAVLTRRRQLLEMLVAEKNRLGFAPKPLHRGIQAHIRWLERQLDDVTKELAGLIEASPVWRAKDDLLQSVPGVGPIVSSTLLGELPELGTLSHKQIAALVGVAPLARDSGTLRGKRLVWGGRASVRTALFMAALCGRRWNPQLKVFYERLKAAGKPTKVALIACARKLLTILNAMVRDRARWAAPAPSVQYSC

SEQ ID NO: 509223 - protein, 389 aa, unidentified
MKIYVGIDIDKLNHFAAAISSDGEIILEPFKFTNDADGFQLLVSKLESFDKNSIIIGLESTAHYGDNLVRYLVAEFYQVCVLNPIKTCQMRKNNIRKTKTDKVDTFVIAKTLMMQDDLRFVSFYDLDMMDLKALGRFRQKTIKQRTRLKIQLTTYVDQVFPEIQYFFKSGLHQHAVYALLKEAPSPKEIASMHMTHLANLLKVNSHGHFTKELAKELRVLAQKSVGANDSSISIQITQTIQQIELLDSQLEKIEAEMTDIMRFNDSVIMTIPGIGYINGGMILGEIGDIHRFSNPNKLLAFAGLDPSVYQSGNFQAKTTRMSKRGSRVLRYALVNAAWNVVRNNATFKAYYDAKRAEGRSHYNALGHCAGKLVRVIWKMLTDEVEFNLE

SEQ ID NO: 509224 - protein, 333 aa, unidentified
MLPPNCGTATPYILRNTVGLDISKLTFDASAIVGNAEYSAKFDNDSKGLDQFSDRLKSLGCQNLHICMEATGNYYEEVADYFAQYYSVYVVNPLKISKYAESRFKRTKTDKQDAKLIAQYCRSAKESELVKRQKPTDEQYRLLRMTAAYAQIKSECAAMKNRHHAAKDEEAAKAYAQIIKAMNEQLEVLKEKIKEQTEKPNCKEGVKRLETIPAIGRMTAAVLFHHLTSSKFETSNKFAAFAGLSPQQKESGTSVRGKGKLTKFGNRKLRAVLFMPAMVAYRIRAFPDFIKRLEEKKKPKKVIIAALMRKLAVIAYHVHKKGGDYDPSRYKSA

SEQ ID NO: 509225 - protein, 423 aa, unidentified
MRFIGLDVHRDFCEVAIAEAGAVRPAGRVQTEPAALELFAQSLSGDDQVALEATGNALEIARIIEPHVGRVVLANPKAVKGITRAGAKTDKIDARTLAKLLAGGFLPAVWLPDEQTRILRRRISARAQLVRQRTRAKNRVHATLIRNLKGKPPLSDLFAVRGRRWLDAQELPADEQETIAACLRQIAFLDDEIELVEQALAEQVLASDEMRRLLTLPGVNFVTAAALMAAIGDIGRFPTSRQLVSYLGLDPRVNQSGSEPARHGRISKQGPGETRHVLVEAAWHATRTPGPLRAFHERIAARRGRNIATVAVARKLAVIAWHMLTRGEDYAFARPSLTREKLRRLELMTGAGRQKGKRIGVWVTKEQHRLDKDLAAQAELAYRRLVQDWQPASKGAGAAPGRASRRPSSGQAARQETAPPPAL

SEQ ID NO: 509226 - protein, 320 aa, unidentified
MNQELSFIGIDVAKARLDVAIRPTGRQWQTEYTEKGIEELVEQITELDPALVLLEASGGLEVTVVTALAIANLPVVVVNPRQVRDFARATGKLAKTDALDAHVLAHFAEAIRPAYRSIPDSETQTLNALVARRNQVMSMLVAEKNRLRTARPTVRQRIQLHIDWLGQELDEIDRDLKEMLHNSPVWREKENLLRTVPGVGPQLAVSILAYLPELGTLNKKRIAALVGVAPFNRDSGTLRGKRAVWGGRSRIRAALYMAALVASRHNPVISAFYQRLLAAGKAKKVALTACMRKLLVILNAMLKNHSSWQSLNPQLPDPCS

SEQ ID NO: 509227 - protein, 411 aa, unidentified
MYYVGIDIAKSFHVVSIIDETETMVLKKPFRVENSLDGYFKFIDKLINVSSNVKDFTIGLEATGIYGENLWEFLNSKGYNVKLLNPFQTSRYREQITMKKVKNDNIDSKIIALLLKDGKFSSGYVTDDEYQSLRTLYRNRASIQGDMKEVKKRILTQVTVTFPELENFMDIFTISGLALLDKYPTAKHYERSSVDRILKIFRHIQGNNFNQTKALEVLNLSQVSVYSGKAKDARAIAIRSTIRLLKMYQSELSILENEITSLLDKKSIHSSNDDISEPNSLIENLKTIPGVADKTIAAILSECGDITRFNNVTKFIGYLGLFPTENSSGNSTKTGRLSKRGSSLVKHALYMSSVSCLIHNSQLKQLYDTKRSQGKSKKEAIVTVSRKLATVIYAIFRYNTPYNPARVFAKS

SEQ ID NO: 509228 - protein, 408 aa, unidentified
MELKPMHRRVIALDVHQAKITACAVVEHDDGRVEVTKRDFGAFRRDRRALAEWALQIGPEVVVMESTGVYWKSPFAALEAVGIIAWVVNARHVKAVPGRKTDMADAQWLATLARAGLLRASFIPPARMRELRLVARQRQKLVGMCSAEKNRLHKVLVDAGIRINVLVNDIHGQSARAMVKALLQDRPLHEVLDLKGRLRASRAELFEALSTEQLSATHRFVANEILQHIEQIEQRIALMDQYLLQGLQPWQAQLKLLQTIPGIDEQGAAMLLVEIGADMDAFGSAERLASWVGICPGNNESAGKRKSGRIRRGNAWVRRLLCEFAQAAARTRCAFKDKFQALAIRKGHKKSIVALAHKILRTVYAMLANGAHYQDRAVDYEALNVQRNAPRWIKMLRKHGFIATPAAA

SEQ ID NO: 509229 - protein, 398 aa, unidentified
MYQQFCGIDVSKDSFDITLLESSGEIKLQDKLTMDRDGFNALLKHLSSYPKEKLLVTMEATGIYHLPLLSFLLENSFKSVVINPILIKSFIGSTTLRKTKNDKKDATSIALFSLKSYQSLHLATTDAIENIRPLMREREILSKEIARLKTEIKAILAQLFPELLKNTNIFTKSILNLLLKAPGRKAIRNLKKQRIQKILDNTSGNKVRISAGEILSLAKNSIAISDKYLEKVLTSKIRRLIAIQDELSFLDEELQNSLEDTDINDDIEILQSIPGIGSVTSKNFMIEVSSIKKFKSVKQLCAFIGIDPSVKQSGTSINYRGKISKRGNANLRRTIWQMAIGAIRSCDKFNAYFTKKREEGKKFKQAVIAVANKLLRTIFVLLKNKTKFDENLALGVSK

SEQ ID NO: 509230 - protein, 387 aa, unidentified
MPSTPPKTIAQPGTAILSDCAMLCVSLELSSKTWLVTSLAPGSDKMSKHKIEGGDHCALLDLLQRLQSKAAKRLGAPVRIVTIQEAGFDGFWLDRLLQAEGIESHVVDPASVAVPRRRRRAKTDKIDGELLLRTLLAWLRGEPRVCSMVVPPSPEEEDRRWLSRERDILVEERTAHTNRIAGLLATQGIRGYRPLRRDCRGRLEDLKTGDGRPLPPGLKAEIGRELDRLELVKQQIAEVEAARNALLASQDKAPGKLLLQLKSIGPEFASVLWLEGFYRSFDNRRQLAAFSGLAPSPWRSGRIDHEQGIAKSGNAKLRTTMIELSWLWLRYQPDSALSRWFRARVGGNVTRRYRKITIVAMARKLLIALWHYVTEGIVPEGAVLKAA

SEQ ID NO: 509231 - protein, 311 aa, unidentified
MPTKQPPTYVGLDISKDQLDYCLSETAEGRCAYTPAGRAELIQKIRALPGARVVCEASGGYEKLIVAELLQAAIEVCVAQPGRVRAFAYAEGLMAKTDRIDARLLRRFGEKIALRLAVPGDPAAMTLRELLEHRRQTTTQLTEVSGRLPLAGPTLGKLLAAQQKFLEGQIAEVEKMIEQLVDQDPDLKRKSSRLQQVKGVGPILSATVLAYVPELGQLDSPQLSALLGVAPFPDDSGKNPAPRHVRGGRAQVRHVLYMAAVSASRSNPILAGFYQRLRAKGKPSKVCLVAVMRKMACLMNKLIQDPEFVLA

SEQ ID NO: 509232 - protein, 419 aa, unidentified
MAFKIFRKNCCGLDVHKTWIYACIGITDTNGRTEYKQARFSSFSKGLQELADWLAKYSCTDVFMESTGKYWIPVFNILERTCFVTLAHPKYTKPQKGNKTDRKDAKWICDLFMCDMVKPSFIPPADIRQLRDLLRYRIKLTNILTGEKNRALNCLTVSNLKLDDVFTDVFGTSSRSIINYILEHPGQNFDVTPFVDKRCKKPIEEIQAAVDGAISREQAVKLKECLSHIDEISAHKKNIELEIHRLAEPYSYALELLRTVPGFNSDPITAISVISEIGVDMSAFPTSKHLVSWAGCCPRNDKSNLKIKSTRISRAGTYLKPLLVQVANAVIRSDKHPEFKERYRRLKARRGHKKAIIAICRMLLTAIWNILSKLEPYSPNGYLQEKLTEHSVVISKAEGLALLRKRGYIFKEEIDFSSP

SEQ ID NO: 509233 - protein, 357 aa, unidentified
MQTNRPSSLDFTGQTIFIGLDVHLKNWAVTLHSEEFELKTYSQPAAASVLVNYLQDNYPGAKYKAVYEAGFCGFTVQRSLSSKGIECNVIHPADVPTTDKEKRQKTDRIDSRKLAKMCKNQDMNGIYIPRIEQQEERNLMRTRQKLVRDQTRVKNRIKSYLRFQGVEFDEFAGRQWTRKYIETLKNTSFSTSAGTIAFRAYLDELEYLQQQVKMLDLQIKTLSQTDRYKENVALLTSVPSIGLISAMIYLTEIIDINRFTKFDDLCSFFGLIPDCHSSGETEKVGHITKRGNQHLKMILIECAWVAIRKDPALLQCYKELLTRMNGNKAIIRIARRLLRRIRHVLVTKELYQKGLLN

SEQ ID NO: 509234 - protein, 343 aa, unidentified
MQPATHILGIDIAKDKFDVNLRRLEASDSRWAATFPNNPKGFKALHPWLVQHGPRFSHQVHACLESTSRYGDALAQFLHQEDYQVSLVNPRRTRHYADSQLTRTVNDTIDARLIADFCAAERSTLSLWEPLSPEHRQLRDLTRARQALVEERERFANLLETASGLARKAFLKQVRQLDRQVKDLDRTIQQFVRLVPQLHQQVALADSVTGVGPITAATVIAELPPIDKIPQAAQAVALFGLDPIKKTSGSSVNTPARLSRMGSRHGRKALYMPALVALRWNPIIRQLGQRLQNKGRTGKYVVVAAMRKLLRLIYGVIKQGRPFDPNWSAPAQRDPQAQTPVLP

SEQ ID NO: 509235 - protein, 355 aa, unidentified
MSILAERLDYVIGVDTHLRSHTAAVLTATGGLVASARIDAEEAGYVQLVQLVGRNAPGRRVWAVEGTRSYGAGLTGHLLRLGEVVGEVDRPRRPARKHGKSDEIDAVRAAREALSMGELASPRSSGRREALRIAATTRQEVMGERTRAMNQLRDLVVSSPEHIAARFRDRSGRSHSLERLTKRCLALRVTATHDVEDRIRLDTMKRIARRIVELEREAAHYESEMTELIRQLAPGLLELPGVGPATAAMVITTYSHRGRFRSEAAFASMAGVAPIPASSGQQQRHRLNRGGDRRLNQALDLIVKNRIRYDPQTIAYMERNKGGQRTDRDLRRILKRYLARSLFRFLERTSPLDKG

SEQ ID NO: 509236 - protein, 339 aa, unidentified
MNEVTLIGIDLGKHSFHLHAQDATGRMVFRKKLSRQQLLRTLANVPSCRVVMEACAGSHWLARQLAGMGHEPRLISPQFVRPFVAGNKNDFGDAQAICEAACRPSMRFVSPRNETQQTVSAMHRLRERLVCERTATVNQIHGFLLEFGISLPRGAALMSRLPTVLDHETLPPRLVALVVRLRAQVHYLEEQIRQVEQDLKASLREDDKSRRLLEIPGIGPITASALAVELGDARQFANARQFSASIGLVPRQYSTGGKPTLLGISKRGDRNLRRLLMQCAQTVMQHTDSRTDALSLWVKTLSTRRHSNVVACALANKLARIAWAVLARGTHYKARALTT

SEQ ID NO: 509237 - protein, 339 aa, unidentified
MKITTIGLDIAKTIFHLYAVNKMGRYVKKKQLKRHQLLQYLAQLEPCLIVMEACGGANYWAREMRALGHEVKLIAPQYVKPYVKGNKNDYNDAQAIAEAAQRPTMRFVPIKSVEQQDIENLHRHRERIKKSRTALVNQIRGLLAEYGIVINKGVPAVRKSLPELVEDAENGLTMRSRELFAELFEELRLLDERFKQSEKQIEASNRGNEVCQRLDEILGVGPITASAAYAAAGDGKDFVNGRHFSAWIGLVPGQHSTGGKPTLLGISKRGNGYLRTLFIHGARAVLRHSASKTDRFSRWAQALLERRGHNKACVAVANKMARIAWVIMAKGETYRPTMS

SEQ ID NO: 509238 - protein, 284 aa, unidentified
MNYSHFVGLDVGKKTFDASLMSADEKELSHKSFDNTPTGIQSLLDWIAGYHLSLSKLLFCAENMGSYVTELSVSSVSMGFSLALVCPLTIKKSIGLQRGKNDRIDAKRIANYAVLHYRKLELYKLPDKDLVRLRGWIIIRDNLVKQKVSSIKLLETFSWMAKLADVTESISFLEEQLKSIKERILEVEEDMEQLIAASTSLYTNYLLLRSIKGIGIINAIVLLYATDNFQRFDNPRKFACYCGVAPFEHTSGISIWGKTQTSSLALYEGQKNGIIRVFCCLFLL

SEQ ID NO: 509239 - protein, 324 aa, unidentified
MKMSIGFDISKDTVDVAFYDGMKMEHFQVENSELGFTRISKRNRNCALTEQILTMEATGVYHQRCAEFFYKRGYHVSVVNPLIIKRYADMKMMRAKTDKVDSQLIARYGWSESPARYKVASENRLKIKAFLKVIESLQHMKTQNRNRLEALDYNALEMEDVKAVFVELNKKIDDQMRQVEKKIALLAKDEDEEEYRHLLSIPGIGKRTASAVIGYFGTLEDFSSAKQMVGFIGTNPSPRISGSSVRGRGSISRKGNGYLRKLLYIAALSASKHNKACSDLYERLLAKGKAKKVALIAVANKLIRQIFAVVKYNREYDPFFCSTN

SEQ ID NO: 509240 - protein, 417 aa, unidentified
MDVLYPRCAGLDVHKDTIVACVRCVSPPPHRETRSFATTTRELLELSEWLSSHGCTHVAMEATGIYWRPVWHILEDGFTLILANARHIKNVPGRKTDVNDAMWIADLLAHGLIRASFVPPAPIQELRDLTRTRKQLVREIAQHSLRIQKVLEDANIKLGSVLSDVLGASGRAILLALIGGESDPERLADLAQGTARRKRSALVEALRGRVSGHHCMILKLHLDLIADLERALSEVDAAVGKALAPINERARLLTTMPGISDLVAQVVVAEIGVDMARFPTAGHLISWAGLCPRNDESAGKRRSTRGRKSGTWLKTTLVTAAWAAVRVKASYLHAQFLRLKARRGAKKAILAVAASMLTAAYFMLRDGVPYRDLGPRHFDQRLRDNTIRRLIRRLHDLGCEVTHIVPPTAQKETSSAS

SEQ ID NO: 509241 - protein, 363 aa, unidentified
MQQVKTLDFTGKTIFCGIDVHKASWSVCLSMEGVILKRFSQGPNPKDLNSTLNRLYPGAEYKAVYEAGFCGFYPQRIMTSLGIDCIVVNPADVPTMDKEKKQKSDRVDCGKLAKSLSVEQLIPIYIPSIQQQDDRCIVRNYKKFVKDQTRCKNRISQMLFFQGMHPNLDENTRIVYWSKNYIEKLKKLKLNTEEARIALDLLIESFENTRDLVLKTTKQMRQMAKADRYKGQISLIRSVPGIGEIGALLFLTEIGDFTRFHGIDHFASYIGLIPNTKSSGENDKIGGITNRSNSKLREVLLEASWTAIRLDPAMTLYFSDYCKRMPKNKAIIKIAKKLLSRVRFVMIHQTNYVTSTMGKTGGE

SEQ ID NO: 509242 - protein, 375 aa, unidentified
MATIARLGIDTSKSLFQLHGVDEREEAVLRKQVRRGQFLGFVAKLAPTKIGVEACGASHYWARQLQALGHEVVLLPPQHVKPYVGRNKNDKIDAAAICEAMSRPRVRERFVAVKSAEQSAAQMLLGTRDGLLHRRTQLSNTMRGHAAEFGLVTPKGLAHIKPLLERIAADDTVPALAKELFATLDEEFAELAPRIARLDKKLKAFQRSDELCRRLVEVPTIGPVIASSMVVKIGNPAAFRSGRRCAAWLGLTPKDHSTAGKMRHGGITRAGDEGLRAALVSGATAYIQQVKRGRTRPSPWLAQLLKRKPEKLAAVALANKTARIAWKLMVSGERYDRARAEAREGLGATQHRGSTPSPSLHPHTADQGASTMTVA

SEQ ID NO: 509243 - protein, 378 aa, unidentified
MQVIGVDPHKGSHTAVAISADEKVIKSVRVESSRRQVDRLLAFAGEWPERVWAVEGAAGVGRLLAQQLVARGERVVDVPPSLSTRVRVLSGRSGRKTDAHDARAVAVVALHNPNLVEVTVEDFSRGLRLLSDRRGQLVAARTQAVTRLHGLIAELLEGGAAQSLTADKAAAVLRRIRPVTDVDAIRKELARDLLEDVRRLDARLDANAARIAEAVTASGTTLTEIAGIGPITAAKILGHSGVISRFPDRGHYASYAGTAPIEASSGDVARHRLSRRGNRQLNSALHGVAITQMRHPGPGRDLYDRKIAEGKTRGEARRALKRHITDKVYATLVADAQRSPGRQMGATHESSAAGQTPTANTSERSVPGLRTKATTDAA

SEQ ID NO: 509244 - protein, 343 aa, unidentified
MKLSRVGIDLAKHVYQLHGVDRSGKTVWKRRLKRHQWLKVLLDKIEPGCVIGMEACTGAHHWARELQSRGYAVKLIPPQFVKPYVKSNKNDARDAEAICEAMSRPGMRFVTVKTVAQQDIQATHRIRAELIRQRTAKANQVRGLMAEYGLVAPKHLSSLRAAIPCWLEDAENGLTGDFRTLLHGVWEDLRALDDRVGEMDQVIKRLAENHEDCVRLQQLRGIGPMTSTAMVATVGDARQYHKSRQMAAAIGITPKQHSSGGKDRLLGISKRGDVYLRTLMIHGARAVVARAKHKDDRLSRWVTGIATRRHPNVAAVALANKTARMAWAMLRHETDYDPDFAMR

SEQ ID NO: 509245 - protein, 388 aa, unidentified
MYYVGIDIAKYKHDCFIFTSEGEIVLESFTFENTREGFSKLKLILDALNHSQKIKIGLEAAGIYGKNLKLFLSSIGYDFDELSPLQVKRFTNDLSNRKTKTDKIDASQIARFVSTGASRTYVYSSYHTEALKQLTRARNSLIDERSKHQTVLTGILDVEFPEFKGFFNNKFTDTALYLLNKYKTVKRISKLSHNDCVLLHNKSRVISTSRFEELRESAKNTCGHHFDYNDSLISANLQIIKCLNNEIDKIEKEINSIMSTINSPVVSIPGISAISAASIIGEFGDFARFDNAKQLCAFCGVEPSIYQSGTSYHEGKMVKHGSSNLRRTLFNAVPYIIMHNETFKTFYNKKRSEGKAYRVAQSHVVKKLLRVIFTLEMTGSTFAPSKLY

SEQ ID NO: 509246 - protein, 372 aa, unidentified
MSHMSELNTKTIVAGIDVHKYSHTAVAIDCFGQKLADHEFSNDYLSEFVAWLDSLGARENLLVALEDVNGYGVHIVKRLANENILMRYVPGILTERRRKQSIHREKSDPADAMRVTKVILTNYEETLPAKESIADPGERSAAANLDFFLAERRSLVAGQTILKNQLHALLHQYWGDHYADNFAKAFNPKSMAYYQKNLKPKNMADPEQPALAMSIKRRLERLKLLVSQIREIDAAMRTAAKDCQPVQALRQNLKGCGQITACALLAEVTTIKRFRTKAQFARYAGIAPIHKSSGSHKRLYTSPYGNRKVNRALHTIALYQISRADGLGRLYYEKKLAEGKTKLWALRCLKRQLANRVFQTLKHEYESRIKPV

SEQ ID NO: 509247 - protein, 427 aa, unidentified
MNNSPVAGIDVSKEYSDYCILTPDNTVFSRGKIFHHPASMDKLCRQLDDVEKAFGFKPICIMESTAYYHRILYRYLTKHGHKVMLINALQSKAAADFNIRSAKTDKIDAYKLALLYGMKHLKPSVVPNSTIQELRDLCRNHCSLEEQLVVSQERLRAYVEQTLPGFEKAFSRLVSKSGLMLLSQYASKEELNAAGIEKISEIISTASGMGQSWSETKAQMILSSVNNGQEFISSQSHSAIIKSIAITILGIFDAIIENDNALELLFEQNLSLAEDRSLLMTIPGVGKQTAAVLISETGNFDSFKNYRQLTAYYGLDPKVNKSGKGSRKHLGVSKKGSPLVRKMLRMAVQNSVYATKKGKAANPVLAQFYKTKAKDKSPKTAETAVMRKLTAIIFAVMRDRKPFELRTPEEHIAIMGIERLQNKSISA

SEQ ID NO: 509248 - protein, 406 aa, unidentified
MTHPKMHHTYIGIDSHKDTHTAVFLDCFFEKLGEYTFGNSASDFEGFLNDAQKLLLDNTTFLFGMEDSSKYGRALAMFLTANGQTVKHVNAYLVAGERKNLKMEKTDSGDAECTARLLISLFGKLPDADHDEAYHILRTLVVHRDFLTRGNIALKMYLHSLLTIDFPNYHKFFASLDSKSSMAFFTKYPSPDKLADTTAEALAHFLWEHSSGVLQMKRAMEILETIDKTNIPSKTHEIRNMIVLATIRQLQYNMNELESIEADLAIVYKSFNVTLTSISGLDIVSASQLLSCIGDIRKFSTPAKLARYAGIAPVSHASGKKDMRFANQRGNRELNSIIYNLAVRLTIVYKGGKMQNPFMYGYYQRKISEGKTKRQALKCVQRRLVNIIWTMLSKGEDYVNPPLLKV

SEQ ID NO: 509249 - protein, 354 aa, unidentified
MSSEKYIGLDVHQATISVAVMDSQGKLIMESILETKASTILEFLAGLRGALSVTFEEGTWAAWLYDLLKPHVAKLVVCNPRKMAVLKQGNKSDKIDARKLADRLRLNDLKPVYHGETGVRMLRELARSYLTVVKDLSRVMNRLKALYRSWAIPCAGRDVYYTRHRSQWLGKIPEAGTRRRAEQLYQQLDMLQHLRQQARRELLAESRKHTITAKLRQIPSLGPIRSALAVALIQTPHRFRSKRQLWTYSGLGLETRDSGEYHFVKGQVRRKKQVWIRGLNKDYNHDLKGLFKAAAIRASVLPGPFQDFYQRSLAKGIQPTMVRLTLARKIAAITLTLWKKGENFDIEKLKSQAA

SEQ ID NO: 509250 - protein, 383 aa, unidentified
MKAVCGLDVHKDSIFLCILHSDGELIEQVFGVLTFQLEEMRKLLQKHHVFEVCMESTSIYWIPIWRVLSPHFTLRLVNPYFIKQLPGHKSDVKDAQWIAECTMKELVRGSFVPPEIIQQLRQYDRRIFDLNAEIVRKVSKVDGVLQRCNIRLSNYVSNIECKSYRDVVRRLSEGVTNPNELMKLVHGRIVNRHGVETILASLTGVVSQAEIDVLRQLHEEIDIAESHRNECQQRMLEICEKHFPEELERLQKIPGIKERAATSLIAEIGTDMSKFETANHLASWSGLRPRNDESNKKIKSRKITHGNVYLRNTIIQCAWAASRQKDCFFSRFSYHQTIVRRKNKMKVIVAVARKLLIAVWHVLHDKTDYVDFKPDREESANNG

SEQ ID NO: 509251 - protein, 402 aa, unidentified
MNAVGIDVSKGKSMVAVMRPFGEMVLSPFEVPHSSSELSKLARLLKSLDGESRVVLESTGNYHTPVAKMLHNAGLYVSVVNAMLVHDYGNNSLRRAKTDKKDAVKLANYGLDHWLSLPGYVPEEDTRLLLKNCYRQYQQYAKVRTMMKNNLLSLLDMIFPAVNRLFSSPVRTDGSEKWVDFIDAFWHVQCVSGLSANAFSAKYLKWCRKHGYNFSEEKALEIHRTARDHVAVMPKTDTTKLLVKQAVAQLRTVSSAKAALQNEMDALAASLPEYPVVMDMFGVGPKLGPHLMAEVGDVRRFHSKKALVAYAGIDAPPYQSGQLNVHSRSISKRGSPALRRTLFLVMSVYLKNSPTDEPVFQYMAMKRAEGKPYLVYMMASANKFLRRYYAAVKAYLNALEQG

SEQ ID NO: 509252 - protein, 412 aa, unidentified
MGYFIGIDISKGSFNYSVVDEGCKQIESKKLSMDRDGFDEFKKVVKKYEDSIVACESTGSFHINLISFLLTFKREVAIINPSLIKRFSSSVSLRKTKTDEIDANVIALFICKNRENIHYLMLEDIDSIVPIARLRESIAKDIAKAKTQLRQHVNITFPELEKNYNIFTYSILNLLKSFPSAKAITEASNMRIYRAIKHKSAGRDISITPKQIKELARNSIGHSSFEYEALVEYDVLHLMFLLEKMEKVEKQFIDKINKSKKDDIDILTSIKGIGDITASYFIAEIGNIERFKNKRKLIAYIGTDPSIAQSGSSINRRGRISKKGSKSLRRTLYIMAMGTIRSNEYFKSYYLKKRQEGMQHRKAIVALMNKLVRVIYALLKKREKFSLKKAKSHSSSCVDPSACFCSVAACSL

SEQ ID NO: 509253 - protein, 417 aa, unidentified
MQYSPVRLADQPANGLTCGIDWARDDHAVAVIDIDARPVYRGVIEHSAKGLQDLISVLRRTGVDEVAIERPDGPVVDALLEAGITVVVVNPNQVKNLRSRYGSAGNKDDRFDAFVLADTLRTDRGRLRPLTPDTAATVALRALCRARKDLVIHRVRVANQLRAHLNRVYPAPIGLFDALDSPISLRFLTRFDCQDRLDWLTPKRLSTWLSSVGYKGRTDATVLHARLSARPRGLTEADGALYVGITTALVATLTNLVSQITQLSAQIAAQLAVHADAHIFTSLPRSGTIRAARLLAEIGDCRGRFPSPDSLACLAGVAPSTRQSGKMRSVGFRWACDKQLRDAVCDFANDSRHANPWAAALYNRARARGHDHPHATRILARAWLHIIWHCWQTNSPYQPTRHRALQTLLTQQTTATT

SEQ ID NO: 509254 - protein, 345 aa, unidentified
MMVMLGTDAHKRSHTIVAVDPAGVEIGSVTVAATTDGHLRAMQWAAKYTQREWAIEDCRALSRRFEGDLLGVGERVVRVPPKMMARTRATARQAGKSDPIDALAVGRAALREPDLPVAQLDGPSREVRLLVDYRETLVHQRTGLQNQLRWRLHELEPGYDPPAGSLNRYCTLDAINELVDRHDSMVADLARRETARIRELTVEINQLERDIEHRVAVLVPSLVAIPGCGALTAGKLIGEAADITRFRSRDAYAMWAGVAPIPVWSANNTRFRLNRGGNRQTNAALHRIAITQIRMHPDAQAFIKRRTETGSTKREAIRLLKRKLANVVYRTLLQDAQTTPLQQAA

SEQ ID NO: 509255 - protein, 391 aa, unidentified
MIFVGIDVAKDKHDCFILNSEGTVLADVFTIANNRIGFETLLSRIQSCSQGESKIKVGLEATGHYSYNLLGFLLDSGLATYVINPLHTNLYRKSLSLRRTKTDRIDARTIAMMLMSDVDLKSYSNTAYHNEELKSLTRYRFDKVKERAKLKSSVARLVNILFPELEKLVSSLHIAVVYALLSNYPGASYIANANTEELAETLCTASKGRYTKSKTAEIQVAAGVSIGSKMPAKSMELKHTIALIRELDKEISEVESAIDKITSQMDSPIFTIPGIGRHMGAMILAEVGDFSNFASADKLLAYAGLSPSTYQSGQLQNCYAHMEKRGSRYLRYALFNAAKYVCLWCPTFSAYLEKKRSEGKHYNVAISHAVKKLVRLIFAMQRSGKAFLADY

SEQ ID NO: 509256 - protein, 314 aa, unidentified
MDKPSLFFGIDVSKEHLDIACSSGEKWQSKYDEKGLLKLVKRLSKPKPQLIVLEATGGYETTLVYSLAAAKLNIVVVNPRLVRDFAKSLGQLAKTDSIDAAVLARYAEAVRPEIRPLPDKQALQLKALLARRKQIIDMMVAEKYRTQTTDVKVCKRIDTHISWLEKELKSIDQDLKDNIQKSPLWKQKEELLRSVPGVGKVLSSTLIASLPELGSLNRKQIAALVGVAPLNRDSGKFKGKRIIWGGRAPVRAALYMATLASIRFNHKINVFYTRLVTNGKPKKVALTACMRKLLITLNAMVKNNSTWLSCDLTT

SEQ ID NO: 509257 - protein, 419 aa, unidentified
MSFKILKNNCCGLDVHKTWIFACIGITDSNKRTVYKQARFSSFTKGLQELCHWLAKYDCTDVCMESTGKYWIPVFNILEKNNIWVTLSHPKYTKPQKGNKTDRKDAKWICDLYMCGMVKPSFIPPVDIRELRDLVRYRFKLTCMITGEKNRAHNCLTVSNLKLDDVFSDIFGRSSRSITEQILQHPGETFDVAPFVHGRCKTPIEEIQAAVDGAVSKEQAVKLRQCLNHIDELEMHKSEIEREIFRLSDKYEDILTLIRTVPGFDKNPMTAIQVLSEIGGDMSVFPTAKNLVSWAGCCPHNDQSNHKIKSTRISRAGSYFKPVLVQVANALIKSKKHPEFSTRYRRIKARRGHKKAIIAICRMILTAIWHILTDLKPYTAKGFLEPRPVSKEKVLTASQALNLLKQRGYVIKDEPIFIS

SEQ ID NO: 509258 - protein, 356 aa, unidentified
MSHDVKYIGMDVHKEAMVIAVQNESGKLVMESVIETKASSILQFLHGLRGELHVTWEEGTWAAWLYDLLQPHVQHIVVCNPRRNALLKEGNKSDKVDAGKLADLLRTGMLRPVYHGENGLRTLRELGRSYQTISKDLTRVMNRLKALYRGWGIPCAGTQVYVARAREKWLSKIPHTGVRRRAELLYQQLDGLQALRRNVRPELLAESRKHKAAKLLRQIPCIGPIRAARLIGLMQTPHRFRSKRQLWTYSGLGIETHDSAQYCFVRGQVHRSKKPQQVRGLNRNHNHEMKEIFKSAATRGSCGRGPFHDFYTGLLAKGMKPEMARLTLARKIAAITLTLWKKEERFDVEQLKTQAA

SEQ ID NO: 509259 - protein, 347 aa, unidentified
MRFYNQQHPFYCGIDLHTRKMYCCVVDQAGQILVHRNLQTRGDHFLNLIAPYRNGLVVGVECMFSWYWLADLCKTEEIEFVLGHALYMRAIHGAKAKNDKIDSRKIAMLLRGGNMPIAFAYPQELRATRDLLRRRMFLMRRRAELLGHVQSTNWQYNLPPLTKKLSYKKNRDGVAARFGEQSVRKMVELDLSLIGQLDAHLCDVELYLERTVKIDDPQNFYLLRTIPGVGKILALVLLYEIYDIQRFESVGRFISYCRLVKCAHESAGKKSGSGGSKIGNAHLKWAFSEAVCLLLRESPEAQRFVARKETKHGKAKALSILAAKLGRAVYWMLRKHEAFDVKTFFKN

SEQ ID NO: 509260 - protein, 371 aa, unidentified
MQNYSTFVGMDVHKNSIEIAIAESGRTGEVRRYGAIDNTLTALDKVVRKLVSTGGRLHFVYEAGPCGYGLYRHLTAQGFDCDVVAPSMVPRKSGDRIKNDRRDACNLARLDRAGELTPVYVPRAEDEAIRDLTRAREDAKTDEKRAKQRLKSFLLRYDVRYAGAASWSAAHWRWLSDITMDHPGQQIVLQEYIDAIGECSRRVHRLTDQIQQMVAHWRMSEVVTALQALRGVSLIVAATTVAEIGDLNRFTSPVELMCYLGLVPSEHSSGEKTRRGSITKSGNTHVRRVLTEAAWSYRLPAKVGRGLLKRQEELPEKVCAISWKAQVRLCSRFRQLWAKGKPKQVVVTAIARELCAFMWAIAREIEIPSST

SEQ ID NO: 509261 - protein, 349 aa, unidentified
MTHFVGLDVSVKETSVCVVDGAGKVLSERKVPTEPDDIAVLLTSIGGDYVRVGIEAGPLSQWLMSGLAEAGLPMVCVETRHMKALLKAQQINKSDRNDARGIAQMMRVGLFKPVHVKTLAAQEQRMLLTSRKLIQHKLLDIECDMRGTLRNFGLKVGVISTAGYDARIRHLVESFPKLAAIVEPLLTVRRVMRQQLATLHKMLLDTVRHDPVCRRFMTAPGIGPVVALTYRASVDQPHRFVHSRAVGAHAGLTPKRHQSGETDYDGGISKCGDTMLRAMLYEAAQSMLTHSKKWSWLKAWGMRVAQRRGLRRATVAVARRLAVILHRMWVDGTDFRWSNGAAAAKQAAP

SEQ ID NO: 509262 - protein, 333 aa, unidentified
MVEGTEGSHHKEGSTKMSEGITVCAGIDTGKHKLDIAIDGSAERLQIDNNSEGHRSLSSWLRQRRVERIGLEASGGYEQAVVLSLRTDGFVVIVFQPVQVRAYAKFVLQHAKNDAIDAVLIARCTAAATDIREPPDARLALLAQHLTMIEQLTQDVGQLKTRREASREQRIREFWKREINRLKVLLNSELKQVVAVIREHRDLADRLDLIASVDGVGLRTAVAILVRMPEIGRVTREQAAAIAGLAPYDDDSGLRRGTRHIKGGRQRLRQSLYAAALPAVFYWNPQLQVFYKRLIAAGKSHRLALVACARKLLIFVNTVVARGTPWTPSVATA

SEQ ID NO: 509263 - protein, 349 aa, unidentified
MKVSKRISYIGKKVSIGIDVHRKQYTVTVVVEGIKVDISTMRADPEALITYINRRYKGSEVRSAYEAGFSGFTLHRKLVSAGVANIVVNAASIAVAVRDRVKTDRRDSLKIAQQLDCNQLKSIRVPSEAEEASRVLHRTREQHVRQMSRLRNQIRMKLYQFGYDLGECFSAKRVKDFVKEANMFEEVKEAVLSLLAMWENTKAEVEKFKELLQSQADKDPLEARYRSMPGIGRTTSRTLSTELGDMSQFSNEKHLFGFVGLTPWEKSSGETSQRGHITKQGSALLRKILIQSAWIAVRRDPWMAKEFVRLASTVGKRRAIVAMARKLIGKARALFRRNEWYCSPVKFTA

SEQ ID NO: 509264 - protein, 350 aa, unidentified
MLYTGIDYHRSFSYLTTMDEKGKIIGQKKLPSNGEIVDFLKELGKDMEIAIEASPSWYWLYDHLENQGFLVKLSHPLKTKAIAYAKVKTDKVDSATLAHLLRSDLLPLSYVPEKTVRLNREILRYRASLVKIQTGVKNKIHMILAKNNVSHSYTDLFGKAGMDFLHSLALAESYKIALEGYLAVLDSVRQEIRKASKKVRQLAVKDPDAILLMTIPGMGYYSALLTKSEIGDVRRFRSAKQLCNYAGLVPSTYASGNTCFHGHITKQGSRWLRWILVEAAIHAVKRPGVLRRFYFKIERKKGGQIAKVATARKLLEWIYHILRDGKTYPEVEEIADLLSRGELGNYSGRA

SEQ ID NO: 509265 - protein, 374 aa, unidentified
MDVHSTNYTLCAMEPVLDGEDRIFTNIQVTPDYENVIQFIDNLKERLGSSDSYSIECGYEAGCLGYSLYHQLTKAGVKCTILAPTTMLTQQGKRVKTDKRDAVMIAQCLSYGGYHAVHVPTDQDASVKEYLRMRDDHKLALKKIKQQINAFCLRHGYIYGGHKWSIKHLEWLKKLDLSELNRETLNEYMTSYEEQTAKIERFDKRIEELAADSDYHENVRKLSCLLGIQTYTALSLIVETGDFKRFRKGNTYAAFLGLAPGESSSGEKISRTGITKAGNSRLRTLLIEAATGICKGQVGHKSKALCARQAGNPAEVIAYADRGNIRMRSKYKRMIRHEKKRNVAVAAIARELACYVWGIMTNHIEPREEGKKAA

SEQ ID NO: 509266 - protein, 485 aa, unidentified
MMASGSDIDDGMAFPGVVTLGPTDVLLGCLWTVLSGPRGTCSDGPGRVGHDLIRAWLSLINVLSAPPDQGCRPTRIESEGSSIMTAPTRPEAIAIGGADTHADTIHAAVITTLGREVADQEFPTTAAGYRAVIAFWASHGPIDQVGIEGTSSYGAGLADAVTKAGFRVVEVNRPSRADRRRQGKSDPLDAYHAARAVLSGRATSDPKDQSVEAIRSLHNTRRSAVKARTAATNQITAMLVTAPEAIRSKYRALKGQPLITALLKCRPSVADPVNAAVLTALKTLAQRHQFLTSQADELTVVIDRLVTTANPGLRAAYGVGPDTAAQLLITAGANPDRLRSEASFAALCGVCPVPASSGKTTRHRLSRGGDRHANYALYRITLVRMSHEPRTKQYVARQIAAGRTKPEIIRMLKRALAREIHRLLTRNIEVPEYADLRPTRQAKNITVTAAAEALNIWPTAISRIERGLRRDDNIATLYRTWLNAA

SEQ ID NO: 509267 - protein, 404 aa, unidentified
MAYVLALDVSMGKSYKVLYKEELCLSQGEITHTRSGFDYLLQEIQQLPETPSIVFESTGVYSRVIETFCQNNHLPYCLLNPLEAKKQLDSGLRVLKTDKQDAHRLAQTHGQYERKIKQHQPVIYEESHDLARFYQEVETEIKRLRMYLHTALQLTFPELEILFSSRLSKLSLNLIELFPHPEYLAGLSQTQVKNILKKSTDKRLSDKKVLEKAQQLLSLASNSYPTTTKTSIQVQKVQYYAHQLKELIQSKETLSKQLIEQTKPLSEFELYQSVPGIGEVSAALLIGEIGDIRRFEAHKKVNAFVGIDTRRYQSGKYLAQDHINKRGNPKARKILYFTVKNMIRQQAAASNHIVDYYYKLKTQPLPKKDKVATVACMNKLLKCLYSMIKNETKYDYAYTASKDQ

SEQ ID NO: 509268 - protein, 382 aa, unidentified
MRKGRIRNTCNSSTLFIVMLKYSLGIDISKKDFHACLSVIDTCQEVKVKASRKFSNHTEGFKELSNWISKHRKDTSIPLCITMEATGVYFEACALYLFKSGHKVSVVLPNKAKQYLKALGLKTKNDKIDASGLAQMGAQQNLESWKPLDDFFYSLRSLTRHHQSLQELKTNIKNQLHADMHSIYSSKAVIKQLKKLTTTLDKQIEETVGAIFKHISSNKEVAVKTDKIQQIKGIGIITIATVLAETNGFALFGSIPQLVSYAGYDVEENQSGNRRGKTRISKKGNSRIRRCLHLPAFNVVRYNMGNFRTFYERILSRHNQKMKAYVAVQKKLLVLIYTLWKKNEYFNPPAQTTAEEIFRNEEMEPSFALAQQSQINSPDERG

SEQ ID NO: 509269 - protein, 373 aa, unidentified
MPRYSTAFGMDVHLRSTTVCALDAETGEAVTRRFRGNPWGEVAEWMSGFPGPSLAAYESGYLGFAPQRELSGLGVDCVVAAVSRVPRSAADLSSKNDRNDAARMAKAILSHDISPVWVPSPEIEGLRDLAGAHDAATARLAAAKQRLLAFLARRGYAYGGTTPAGNPRRYWTYDFLRWLDKVRPADDGGIRALAALRNEVEAAAETRDDLLAEYRAAVAAGPLSAEVEALQSIKGCGFALAAAFASEVGDFSRFRSGRQVTSYFGLAPKQRSSADSVRLGGISGAGDALVRRLAVEGSWSYVQASHQPKLMPKGSGVPLEVRMHGRKGSERLLRRRGEMLARGMPQAKANAATAAELVRWLWALGAMCREATE

SEQ ID NO: 509270 - protein, 393 aa, unidentified
MAMRVEIEAEPAAVEGRERCAGLDVHRSTIVVCVTSPVGGGRLKKVWNEFPTTSAGLVRLAEWLAELEVSHVAMEATGVYWMPVYAALEKAGVFDLTLVNAHHAKALRKRKTDIKDAQWLAYLVRHDLVNKSFVPAQPFRDLRELTRYRRKLVEAQASERRRLIKLLESADIKLAGVISDIFGVSGRAILCALIAGGQSPFDMAKLARGQLRRKRPQIIDAVSVEVSEHRRAILAMQLARVEAAEADIAKIDEMIAHHLEPYQEFVERLVSIAGIDWIIAAIVIAEIGTDLSSFPTVQHFAAWIGVCPGNNESAGKRKPIGARKGNPYLVTALQRRDLRRSNPRLLLQGNLSPHQKSQGRRPRRPRRRPQNRHRHLLHVHQEDLLSRSGRTSP

SEQ ID NO: 509271 - protein, 351 aa, unidentified
MSMLAELVELIIGVDTHADTHTAALVATGSGALLATITVPADADGYAQLLELAETRSGLRAWAIEGAGGYGAGLTRHLADTAELVVELDRPVRPARRAGAKSDVIDAERAARDALARTKLAAPKTGPERAALQALLTARRSAVDAATTAQRQLRALVITVPEPVRARFRGHSTREMIDIASRVRSGAATTDIETFTALSTLRTLARRIRALQTEADEHERAIRTIVRSWRPDLLELCGVGPIVAAIVLTAWSHTGRCRSDAAFAGAAPIPASSGKTVRYRLNRSGNRQLNRALHTIVLSRLQYDPDTRAYAEKRRSKGKTDREIKRCLKRYIARQLYRQLENPPTSAVCAA

SEQ ID NO: 509272 - protein, 403 aa, unidentified
MAGVGQQDQRVVIGMDPHKRSVTIEVMTGEEAVLGGGRYATDEAGFAEMRADVSQFGDRVWAIEGCRGIGRHVAQRLLAAGEQVVDVPPKLSAEVRVYATGQGRKTDATDAHSIALAGTRVAGLRPVVADADLDVLRLLADRRRQLGEEHTRKVSQLHALLLELIPGGAKKNLTAAQAKQLLAKVRPRDTAGKTRRRLAAELIGDLERIYARKRDADKELRGLVAATGTGLLDLHGIGPSGAARLLVEVGDITRFPDRNHFASWTGTAPVDASSGDHVRHRLSRGGNRQINRALHMMATVQLRNATDGRAYYDRKKNNGKSPMEAMRCLKRRLSDTVYRTMLADLAPHQTADQIADQVTGPGGQRGNDSDSSATGSQPQHRQFGQATPGPVTTQPKPALPRVS

SEQ ID NO: 509273 - protein, 312 aa, unidentified
MAELSFGGIDVSKDRLDVLLLPEGLCFSVCNDAPGWAELIKKLRPFAPAAIGLEPSGGYERGIIRALLAAGLSVRCINPNKLRQFARAHGVLAKNDRLDAQLIAEYVAIMPTRVVRRDDAVERLAEIVTMRRQLCDEHVAAMNQAAHLEDAILRRLSKRRLVRIEADILLLDKRLAELVAANSRLTHRYRLLISMPGVGPTLAYTLLATLPELGQLDRKQIAALVGLAPYDFDSGKLRGHRSIYGGRMPVRNVLYMAALSASRYNSALKAFSKRLAAAGKKSKVIIVAVMRKMIVTLNAMLRDDTPWRPTFV

SEQ ID NO: 509274 - protein, 304 aa, unidentified
MYGIGIDVSQATLDVAVHEQAFDQFSNDKRGFVRLIQWLKQWPITQVVLEASGGYERAALEALHDAGLPMVRINPARARRFAQATGRAAKTDRLDAAVLAQMAHLLPLTRYVPPAPWQRRLAEFAQCRRHLVQMRVSEMQRLRQLTDPVLITLKQRHLAQLSEDLKQLDKAIAEQLAAQPGWKNIGTLKGAGPILVSTLACELPELGTLGSKAIASLGGLAPMNRESGTWQGKRSITGGRAVVREALYMAALTAIRYEPKLRDFYAPLKAKGKASKVALVAVMRKMLVILNARMRDAQSESIPA

SEQ ID NO: 509275 - protein, 350 aa, unidentified
MTSSSKYIGMDVHKESISIAVRNAAGKIVMESVIETKASMLLEFVDGLRGDVHLTFEEGTWSAWLYDLLKPRVTKLVVCDPRRNALLQEGNQNDRVEARKLAELLQNKQLRSVYHGNHGLRTVKELVRSYLTITKDLTRVMTRVKAIYRSWAIVCSGKEVYSSRHRGGWLGKISEPGVRRRAEFYYQQLDALRSLRQEVRKDLLAESKKHMIWKRLSEIPSLGPIRAAVLLGILQTAHRFRTKRQLWTYSGLGIEVHSSADHHVVKGQLERKKKHIEIRGLNKNYNHDLKNLFKSAAVVASTKPGPFEDFYAALLAKGMRPEMARLTLARKIATIVLIVWKRGVSSTPII

SEQ ID NO: 509276 - protein, 511 aa, unidentified
MSQSPSKSFRKKTTRRKSRKSPQGSASSGAEIEITRYGIGLDVHKENIVVSVAAQTEQNLIIQIRTHKFRNHPPGLLELTQFLQKYQPVSHYLMECTGIYHRPVYHALEDAFPNSKTKIIAMNPLLVHRKLTDLGNKHDKADAQGMAELSFYDRLIRPSYVGTPEFFHLRDTLRNYKHAKKEANKHVNRIHRVLCSVNFMQKLNLHHEWELHLLDYMIATEGPIKRAFKAMVESSQLEKRSISSLMKHQDDYVPYFNIVLPKASRFNLRQLVIQYLQAETNAAQYLLQTEKQILKDAEFEHWYLQLLRIPCVGQISALRLITELGDFRRFVNWKAFSKYCGVVPEIKESGGTFTASHINRFTNTHIRTALSQIAMLYVNGYAKGTDLSIFAHRQYVLRRLPYKKAVMRVAQKLSRIIYQVLVNNVTYDATFEQTKAKIQRLQRRNVKHGTMLEYPQTRSLRRDISQLLVTNSQYMTSKSRFFLVKGFQQLIRKANVVELEGTKLNSKKNKI

SEQ ID NO: 509277 - protein, 325 aa, unidentified
MTPTKTLYKNFIGIDIAKLTFVVAISNNDNTMTFDNSITGFKAFYKHYKNALKDALIVLETTGGYESSLTRFLLSKSCSVHKAHAQKVKYFIRSLGQRSKTDAIDAKALVRYGQERYSCLALHKEQEEKNLRLKSLLLRRDDLIKLQTQEKNRAVAPDNEFIKASIKDLLLYLSEAISKVDAEIEELVQAQEVQEQLQVLQTVPGIGKLVSKAILVFLPELGMIDRRQISSLVGVAPHPKDSGQHRGYRCVSGGRGNVRRKLFTAAMAAAKSKSTLGEYYRTLIARGKKPIVAITALMRKIIVIANARLRDYYTSISCNTLILKI

SEQ ID NO: 509278 - protein, 316 aa, unidentified
MTTQECYVGIDVSKKNLDIAVRPGDEHWTVANDEDGIGELATRLKSIGPRLVVLEATGGIELAVTGSLADAGLLVAVVNPRQVRDFAKAMGQLAKTDRLDAQAIARFGEVVQPTPRPMRDAEAQALSALLSRRRQLVGMLTQEKNRLHAAQPAVRRDIRQHIVYMEKRLEKLDDDLGSTLRKSPLWRERDDLLRGVPGVGQVLSVTLLAELPELGTLNRKQIAALVGVAPLNRDSGLLRGHRTVWGGRARVRATLYMATLSATRHNPVIRAFYEHLCASGKAKKVALTACMRKMLTILNSMLRHHATWQPDYALNA

SEQ ID NO: 509279 - protein, 370 aa, unidentified
MKPNFEPGKWFMQCVGIDIAKGTFTACLCMYEFDQGCSTAPVVFNNDKTGFNQFVKWSRKEALKGYPLRYVMEPTGVYYEQLASHLNKLSLNVCVVLPNKAREFAKYEGILTKTDDMDAYTLGMLGCLDKRLKPWTPPSPIYRELRQMTRFVADINKVKTELRNHLEALTHSETAEKSIVKHYNKLIDEIDKQLVSNQKAIREKIKQEPGLSERIDRITTINGVGFMTVATVVAETNGFALITNRKQLTRYAGLDVPAHQSGPVDPKRHISKQGNVHIRTALYFPAIVSTQCNPQMKDFYGRLCARNTQSKMIGVTATMRKLLLLIYSLWKSGEKYDPTRDKPACNRQKKEAETTEGQPHGIDVGTLAEE

SEQ ID NO: 509280 - protein, 481 aa, unidentified
MHRADEGTMQTTIPGVIACGMDIHRDKIDACVRIGDGSADGNVMIKTFSTMRKSLFELRDWIISLGCYKVLMESTGVYWMPTYNILEEVGGMNVGIGNPRDLKNSPGRPKTDREDAKWLSRLCMFGLVLKSFVVERPFRALREYTRYHKKLVQERARQINRIEKLLQMNGFKLSSVLTDITGVSGMRILKKLADQGELSVFDIKENLDCRCKSTPEEIELAINGVMKPTSRVLLKFQLNKLKSCDNEIDEVYELMLQLSEEHAGAIYIIESIPGLSTLSAIYIIAEIGTDLSSFKTANHLTAWAGLAPKDNQSADKARPKKTKKASQYVKSLMIQCAWAAIKSRDTRLSLWYWRNMPRLGKKKAITAVARKLLCYIYAMLKDGTLYDESLDVAYANNVRAKKLDAAQKIVGSQKSGIQTFDKSNNSNDVRLAPSSDSVLVEPKSNDKQTESISQQENGIESPNKTAQQKKRGRPKKVAALD

SEQ ID NO: 509281 - protein, 375 aa, unidentified
MKEKVRFLGLDVPAETIAVAVAEPDGEVRSLGTIPNRAESIRKMIKKLGRAEKLRACYEAGPTGYVVYWQLAELGVQCEVVAPTLVPIKAGDRVKTDRRDAEKLARCYRSGDLTAVWVPDEGSEALRDLVRAREAAKQDQMRARHRLSKFLLRSGQRPPSGVRPWTRPYLIWVAQLRFTQMAQEATRQDYLHEVEHMRERVARLEQAITEAVKLASPALRQVINDLQALRGIGDISAVTIAAELGQVSRFESARQLMGYCGAVPSEDSSGKRTRRGGITKTGNAHLRRIVVEAAWSYRRPPCIWYGLRRRQESISEETKEIAWKAQHRLHKRYRKLGAAGKDQRKIATAVARELLGFIWAIGTRAEAIVRQQAAA

SEQ ID NO: 509282 - protein, 391 aa, unidentified
MIYIGIDVAKDKHDCFITNSDSEVLFKAFTIFNNLDGFNDLYQKIESVMDDVTKVKVGLEATGHYSYNLLGYLIDKGLPTYVINPLHTNLYRKSLSLRQTKTDKVDARTIASMLMSDVNLKSYSDTSYHNEELKSLTRYRFDKVKERAKLKTSVSRLVCILFPELEKLVPTLHMASVYALLSEFPSAKHVATAHLTRLTNLLSESSKGRYGKDTAITFRDSARASIGSNMPAKSLELKHTIKLIQELDSEIDEIENEIKIIMDEINSPILSIPRINYRMGSMIIAEIGDFNRFDSPDKILAYAGFSPSTYQSGQLDGAYAHMEKRGSRYLRYALYNATKYVCHWDPTFAAYLAKKRAEGKHYNVAISHAVKKLVRVIYHLEKTKQQYIKAA

SEQ ID NO: 509283 - protein, 344 aa, unidentified
MRIVEVCGGVDTHADNHMAAAVDHNGGLLGIESFPADQAGFEELLAWLVGFGPVSQIGVEGTGSWGVGLTRFLTDHDVSVVEVDRPNRQKRRKEGKSDPTDALAAARAALSGEATVTPKTRNGPVEQIRVLMVARRSAREQRIQSLNQLRHLVFCAPEEIRVRFKDRPKTGLITEAANMRPRKGSDPVTFTTYVVIRNLARRIKALNTEMAEIDEMITDLITETAPGLFDLYGVGVDTAASLLVTAGDNPDRLHAEGSWAHLCGTTPLPANSGKVTNRFRLNRGGDRQANAALYRIVLTRMAHDSQTRAYVARRRDQGLNTAEIMRCLKRYVARQTYKHLPQTT

SEQ ID NO: 509284 - protein, 375 aa, unidentified
MAPAPTPQLWEVPTLSESMALVGLDVHAMQTQVAILRPVTGELSRTRLRMAPIEVLDFLDGLGPMRAVYEAGPTGFGLARAARERGLDVRVVAPGLMPKAPADRVKTDKRDAERLARLLAAGELKFSFVPTEADEQFRDLVRAIEDSRGDLMRARHRLGKFLLRRGLRFPGPGGTWTRAHLRWLGSLRFADVCSRATFADYLAAVELLAARRGSLLAALEEAIPASSHAATIAALRCFRGIDTLSAAGLCAEVGDWTRFPKPKQVSGFLGIVPSEHTSDAKRRQGSITKAGPSHARRLLVEAAHHYRHRPAVGEALARRQHRQDPRVIAVAWKAQRRLHQRWRLLAGQRRKPAGVVAIACARELAGFCWEAATLD

SEQ ID NO: 509285 - protein, 390 aa, unidentified
MERPMQKLNDLSRSLTALEPNGTLIAVIEMSLSSWLVAGIVPGVERQPLKKLAVDESALLKLLHRWREEAEKAGRRIERIAVAFEAGRDGFWLARWLKARGIEAYVIHASSVAVSREHRRAKTDRLDTELLKRSFLGWLRGERDHCKMVEIPTMQDEDAKRPNREHDSLIGERSRIVNRMKAALVRLGIRGFNPKLKRATTRLDGLHTPEGEPIPPNALAELRRDMERRRLVNNQIRQIEEERLERIEQAPCDGAHVMVRLLARVMGVGIETADMLVHEVLSRNMRDRRAVARYAGLTGSPDESGRKRREKGLARSGNARVRRGMIQLAWRFLLHQKNSALTKWFRSRTENARGTRKPMIVALARKLLIALWRLMREGIVPDGVVLRPAQ

SEQ ID NO: 509286 - protein, 408 aa, unidentified
MESMIERCAGIDVHQGTMVVTVRRPGPSGGREVGTHTFATMTSDLLAIRDWLQASGVTHVAMESTGVYWRPLYYLLEDQFTVLLVNMQHLKQVPGRKSDVRDSEWLAQLLECGLLRGSLIPPAPIRDLRDLTRYRKRQIEDRAQEVNRLYRLLEDAGIKLASVLTDVMGVSGRAMVEALLQGQSDPGTLADLARGRLRRKLPALREALQGRFRAHHAFLATQILAKVDFLEDTIERLSAEIDEHLRPFEAEIARLMTIPGLARRNATTLFVETGGDMRHFPTAAHLCSWAAICPGQNESAGKRRTGKLRDGNRYLRGALIEAGLAATRARETALQARYYRVKRHRGHKKAVVAVGHQILEIAYYVLRDQVTYHELGADYFDRRDRDRTMRRNVKQLEALGFKVTLEAA

SEQ ID NO: 509287 - protein, 415 aa, unidentified
MKNYSELTHFAGLDWAKDHHDVNIMDRQGQVVARFRFAHSGPGWQEWREKIQGYPALGVAIETSHGAAVEQLLASGVTVYPVHPQAAKAYRQRQAPSGTKDDELDAWLLGDALRMDGGHWRALSPQDAIVEELRLLCGDEAALIEQRTALVNQLQAALHEYYPAALEAFEDWTAPFTWAFVAAFPTPQRLVQSTVHRRRVFLHTHKLWRPGTAERRLEIFARADQFCGGDAVTRAKSRLALALCRSLDALQAQLDDYRAAIEKLFAEHPDHDVFGSLPGVGVTLGPRLLSGLGANREQYPEVQGLQCVAGTAPVSFQSGQIKRAKIRWYCDRFLRHTVHLWAGCSLKSCTWAAAYYAAKRKDGMSHACALRCLAQRWLKILWKMWQTHTPYDPEYHARNQQRHGSWVLQLNPKTT

SEQ ID NO: 509288 - protein, 391 aa, unidentified
MRALVPHENAVAGLDLGEKKQALAVTGADGLVLARRCPQVSVHDLGPYLDRALEQARAAGYAGLSVACEPTGSRWMALQDLCEARGLPFVCVQPLVSHIAREQEDLTGDKTDEGDSGLIARLARELHCYVPERLEGAWAELRDEGRRRAQLITSATAARQLIRDKLGLVAPALLESACEPLDSATWLASLEVVLERGGDAVTAMGYEAFASAVAGMLPGWGGKRVGGTCRQLFSALDDGRGVARMRRAALRRARGGLADLKYARSRREQAEADMIALLSELGVDVGRICAIPGLSPVTLAAILAETGDLHNYESSSSVVKHAGMSPARNESGSFRGQAKISRRGRPVLRLAAWRATWAVLRFSSVARICLISGSAWKRATLSLRIKYDRML

SEQ ID NO: 509289 - protein, 332 aa, unidentified
MAQIYGIDLASEKFDVSYLDEKGKKKHKVVKNERPAIEKFLSTLPEDAWIVAEHTGAYGDLLLFLADMHGIRISYVNGYEIKHSSGLTKGKSDKADSAMIRDYGERHIDKLDLTHFPSETMYRLRQAYTARRLLVKQRKELETTLHVDARSPLENDKLASVKNQVLAELNAAIKEVEDEMERLIQSDQELARSAAIARSVPGIGMVTSTEIIIKTGNFKRVSTAKKCASLAGIAPFPNATGKTDKGNHVAAMGDKQLKSLLFMCAMSSVTYSDRMRVYKMKKMDVERKHFFLVMNNIANKLLKTLYALIKKGEMFNSDYLPRDPRLKTAGIN

SEQ ID NO: 509290 - protein, 346 aa, unidentified
MEIKRVGVDLAKNVFQLHGADRKGKTVWTRKLSRGKWLRVLYETVKPETEIGMEACAGAHHWARQLIQRGYRVKIIPPQFVTPFVKSNKNDANDAQAICEAMGRPNMYPVRVKTVEQQDIQAMHRVREEIKSHRIAKANQIRGLVTEYGLVAPQQLSSLRRAIPDWLEDADNGLTLLFRQLLQGLWGDLYVLDQRMAELDQQIAVIAEENPIAKRLQQLRGVGPLIATAMVATMGDAKQYRKGRDMAAAIGLTPRQHSSGGKDRLLGISKRGDAYLRCLLVHGARSAVRTAKDKEDRLSRWIISLQARRHPNVVAVALANKMARMAWAMMTRGVDYDPDLAAVSVN

SEQ ID NO: 509291 - protein, 424 aa, unidentified
MKNCNKQNEKIELVDEKTLVIGVDIGSYDEYARAFTCRKQELSKKPLRFHNTAEGFKTFKDWAVNIMKANGLEKIIVGMEPTSIYWEALATYCKDNGMILVHVNPAAVHKSKELDDNDPSKNDRKEPKVIAGLVADGRYQFPYMPEEEYAELRELSNLRIRTQESLTQCKNRLSRWYSRYFPEFKGAYKNVVSKTAMMILDLYPLPEDIVTLGVEGILQIWKSKKVRGAGERKARKLYEAARNSIGRKEAASIARIEFKSIKEDLDRYQERLDEIEKKADEILPKIKNVDKLFEIKGVGKATVLTFLSEIGEISRFDNPKEIQKLAGYAIVTNESCKHQGEKRISYRGRKRLRWVLYQTALSVIAKNAEFRQIHAYYTTRANNPLKGIQSVVAVACKMIRIFYKILTDGVSYDGTKMTQDIVHA

SEQ ID NO: 509292 - protein, 478 aa, unidentified
MIKSVGIDFHQGKHVARCLDERAQLCDGFSFQTTPEGLSTLEERIFRNGSNPVIVFEPAGLTWFILAICLRARYPDCRLVRAKGQKVAALRRYLRGSSKSDRLDALTLAKMSFIDPEQLDEVYLPPAKIHALQRLARQRKRLESEIAARKTRIGSIVESYVPGVRKVFSDPWSSQARAFLRCRLNPVAVAHNGEKALHSFLARARRRNKADKEESRRVYLTCQSAAVLYQLSSCAGAVDDGFFNVLQEEIARELRLMELEEVESEAVAKHMEELYRELHPSDNLRSIPGVGQITAPVFLATVGDPARFHNQSAFVNWTGVVPRTRQSSDVEAKGLRMTKAGPAIMKWALFQAGDIGRRFDPQLASLYYREMVYHGKNHKQAMGAVMSHLAARVLAVLQENRAYELRDIQGNPLSRGEARRLILSNYQVPEEIRRERRRRNPVKRGYSKLRGITVPRTNEAAIAPQPVNTTAIPQNQSN

SEQ ID NO: 509293 - protein, 352 aa, unidentified
MKKIFIGIDFAKEKFDAAIIEACGLKEFGDRQYGTFSNDRKGYRQFIKWIKANSGGAVEDEWLFCGEDTGSCSIGLSKWLYGKGFDIWIENAYSIRHSSGIHRVKTDRADASMIAEYAWRHQDKAMLFEPLSESLTQLREVFLYRHKLVQQRVAIEVRKKDKESSGEASRAMSFIKRKSKHLMAEIDKSIKECDGMIDRIISEDPELAENYAIVTSIKGVARQNGACLLIYTNNFKRFDMDARKIACYYGVAPFGKESGSSVHSPAHTSHFANKLIKALLGQAAQIARIYNPEIREYYERLRTKGKKHSVAINNVKNKLLRIIVALVKKRTFYDPESYKFYRDRLNAQFMHS

SEQ ID NO: 509294 - protein, 406 aa, unidentified
MIFVGVDWAEAHHDVHVEDEDGKRLGGGRLPEGVDGIARFHELVGDHVEEPGEVVIGIETDRGLFVTALVAAGYEVFAVNPMSTSRYRDRHSTSGAKSDPGDAKVLADMVRTDRHNHRPVAADTETVQVVKVLARAHQTMVWSRTRQTNLLRSTLREFYPAALVAFDDLASGDAREVLRLAPTPELGRTLSLSKIAAALRRGGRQRRIDDRAAEIQSALRAEQLAAPAAVSSAMGASVTASVAVIATIVAQIATLADELEAGFEQHPDAEVVRSLPGLGTILGARVLGEFGDEPNRYCTSKCRKNYAGTSPITRASGTKRVVLARYARNHRLADAIYLWAFAALTASPGARALYDTRRAAGDSHHAALRALGNRLVGILHGCLEHHTCYDEFIAWGHRTAPLADAA

SEQ ID NO: 509295 - protein, 450 aa, unidentified
MKIVGIDTGVTSKHCAVVVDSETSKSSKPILFGTHTEEFDRMVKEASITGKPEIFAIETAGEAWYALALHLHKLGFKVAIVSPEKSHDFRKSLRKHTKTNRIDAGAIARSIMVDLSSAVFFQPRSSKIEALRHLTRRFTTLQGEQAAHRTAIRAELRTILPSWHQPEGIFTIPYKEWYKRGIDPWYWTEFKQSELLEILQDPTEVKIIMEACKQSRELFSSVGKIGIEPAVFALQQEIAILELFEQQLKVLKKQIVELYWELDPEGILVSLCGVAEFTASVILAEVGDIVKFNNSSGFSAYCGVIPKRNDTGDTHREGQKMTQQGNHHLRRVLFLAALSAIRNDPELANIYYKQKEILKKHHNKAMGFVMNALSRRIYAVLKRNDYLFNPDQKKASGQPYIIRLAGSPIDDSRVAREWIKINRKTTPKKKIGSRVEQYPPEAVSDASRVS

SEQ ID NO: 509296 - protein, 406 aa, unidentified
MLYVGWDWAAETHDVTIIDHDARTVDRWALDHDEEGIDGTLARLAGHGRPGELPVAIETTNSLVVDRLLAAGHPVVPIHPNAFNAARPRWGASRAKSDPGDSWKLADFLRTDGHRLRRLEPVDPATAQIQALSRMRDDHVEAKVAATNQLAALLGRHWPGATRIFARLDSEIALAFLDDYPTPNSAIRLGEARMKMFCRRHSYCGRRPPAELVGRLRTAPEPTQALPTETLTELVRAQVRLLRSLLTTIADLDRAMGAALLEHTKAQLLAPMPRIGEVNLAQIVGELGPILDRAIDLEHACAQVGATPVTKESGKGRAVTFRWAANTRARKALSTFADNSRHQSPWAAQLYADARTRGKRHPHAIRVLTRSWMRVIWACWHTDTPYSPDRHGAERRIRQQPEKIAS

SEQ ID NO: 509297 - protein, 356 aa, unidentified
MKYVGIDVHKKYCQAAVLDDDGKQLDQIRFLNRKEDIKEFALKLTTFRDDVKAVVESTGNLWIQIYDILEKFGFEVFLSNPGKTRLIAEAKNKTDKIDAKILARLLRADMLFTCYVPGEEIRTRREFLRARQDFVKNKTQIKNRIHSILDKHGLRFPCHPYSKKSIVWLKEQDLGLMDNAVVKGQLALLETLDEQIQILEDQIAVMGIEDPQVKLLMTMPGIGYFTASMLVAEIGDINRFGNEKKLCSWAGLAPRIHQSGGTTRIGRVGRGNKRVSGLMTQCAHNARQHDPRFKRFYDRYSNRSSKGKALVAVAHEMIRIVYFMLKNNEPYRGQNIEMTTRKLKSMKYRASIGLQN

SEQ ID NO: 509298 - protein, 389 aa, unidentified
MKIFVGIDIAKLNHFAAAISSDGEILIEPFKFTNDADGFQLLVSKLESFDKNSIIIGLESTAHYGDNLVRYLVAEFYQVCVLNPIKTCQMRKNNIRKTKTDKVDTYVIAKTLMMQDDLRFISFYDLDMMDLKALGRFRQKTIKQRTRLKIQLTTYVDQVFPEIQYFFKSGLHQNAVYALLKEAPSPKEIASMHMTHLANLLKVNSHGHFTKEQAKELRVLAQKSVGANDSAISIQITQTIQQIELLDSQLDKIEAEMTDIMKFNDSVIMTIPGIGYINGGMILGEIGDIHRFSNPNKLLAFAGLDPSVYQSGNFQAKTTRMSKRGSRVLRYALVNAAWNVVRNNATFKAYYDAKRAEGRSHYNALGHCAGKLVRVIWKMLTDEVEFNLE

SEQ ID NO: 509299 - protein, 351 aa, unidentified
MVIIGVDYHPSFQQIAFVDTETGECGERRLHHNDGEAEKFYRDLKLRGVSVRVGLEATGYARWFERLLAKLGIEVWIGDAAEIKTKRVRKQKTDCQDAQLLLKLLLENRFPRIWVPNPENRDLRQLLWHRHRLVQMRTRIMNQLQALAMNEGKRWKHRLWSEQGRAQLEKFPLAPWASRRRQDLLELLDRLNPTIAELTAAVEQEAKRRPEVLRLMTHPGVGPLTALAFVLIIGTPERFPCGKQIGSYVGLIPCEDSSAGRQRLGHISKQGNALLRYLLVEAAQAAARCNPDWRRRYLHLAIRREKSIAKVAMGRRLAVRLYWMWRRGWEYAQFLEFGPYTGELVTGHGVN

SEQ ID NO: 509300 - protein, 520 aa, unidentified
MASTRSRRSSSRRRPPTSLGKPRGVLHPRVQQVGPEHFGIVCFDCAKVRSKFLLADFYGRLLLPPTVVAHTRPALDAAVTQIRQAFEQHQLRDGLVAIERTGRYHRLAQRTFAAAGFETRILHPFVTKQYRQPVDPGNKTDDADLAAIHRATVTGCALLEASRDEAWTTLQLLIRHRRDLVCKGAALNCQIRDHLEAALPGYAACFDKLWESPIPWHLLRHYPTAGQLRDAGLASLCQSLRQAGIRFQQRTVQAVVDWAEQAAPGDVAASQHLRIALALYDDRQRKTQEIQALEGDIAGRLVHTPYVLLLSFPGINVVSAADFAGEMGPIEHYANARSITGRAGLRPSRYQSDQVDKANGPLVRNCNRSLRAAILGIADNLIVCNHHFQALATQWAAQGKDPRHTRVKIGLRFSRIAFQMVAGRQVFRHPSIQGRHYILDKLTAFHRVHDTVMVEVLGDLQAALGHLPPREYAAEAKPLGEELQRIQDGHRRGPQVLGDILPIVLARLGVGVVQSNESGE

SEQ ID NO: 509301 - protein, 348 aa, unidentified
MLHAGLDLSRKRLDYCLIDEGGVIVETGAAAPDGDALAGLVRLVELRHGPRAVMAVIESMNGARFVHDVLERCGWEVQIADAQKVKGLAPLACKTDRIDAWVLGELSRRDLVPAIWLPSFGQRQERERARFRLYLVRHRSSLKQRVHSELMAFGHGCPVSDLFGRQGRELLERLQFPEPWRTSVLGAVAMIDDLDRRIDALERELRALGADHRYVPLLMTVPGVGWVLAYTIAAEIGDITRFASPTKLCGYTGLCPRVYQSGGSDRRGPLAKHGPKYLRWALMVAATNAAKHPLYRDRYRATKQRLGRQRGAKVAQIQLARTLTEAIWHMLTRNQTFAPAGAPSPLAA

SEQ ID NO: 509302 - protein, 336 aa, unidentified
MEKYKIFVGIDISKAWIDVAIKNETVSICQRFDNCKKGYRSMLGWLKTFARPMQMILCMEHTGVYGMLLWEYLVNQKLHFVVESGLQIHRSMGIRRGKSDKADAELIARYIKLHHTETRLYHVPNQVIKRLKILFAYRERLLKVQHLLTVSSKEISTFMSKEICKEMTVDSNKLTAIISDRITRVQKLIEKIVDSDPETRRIYQLIKSVPGIGPITGVYLIIVTQNFTVINDSRKLSRYGGMSPEKNESGIVKRKSKTSSIGNKKLKALLTSCAGTIIQHNVEAREYQRRKIDQGKHEGVVINNLRNKILHRVCAVVNRGTPYVDIKKYKRLEKVA

SEQ ID NO: 509303 - protein, 337 aa, unidentified
MKRYLGVDLHRTQFTVCTRLENGRTYLRQWPIGELKLFAAQLRKEDEVAVESTGNTRLFHDAVVEHVAHVAVVNPSQFKVISQSVKKTDKNDAELLALYLAKGLLPEVRMKERKQREMSHLAQTRDLLVKQRSALKAKINNLLSAEGINLKREALSSNKALERVLAQPLSPLMLAEARVLVGQIRGLNQSIDELEELIEEEGPKLAGHENLMSIKGIGPVSAAVLLSVIGDIRDFSDPGKLAAYLGLVPRVQNSNEMEHSGRITKQGNKLARTALVQCALVAKRYSSFLQNFYQRIQRRRGGGKANIALARKFLGVIYHTLKNNWVFEDFPNFVLAS

SEQ ID NO: 509304 - protein, 310 aa, unidentified
MEQTFIGIDVAKDQLDVHVFPSDDAFAVARDSEGLAALIERLRPLDPHLVVLEATGGFELTVAAALVSAAIPLAVVNPRQIRDFARATGQLAKTDALDAKVIARFAAKVQPEARPVPDEQARALGELVARRRQVIEMMTAERNRRRQLISRRLLKSVDRLLAVLQKELTELDHDIGEGIRGTPAWRERDELLRSVPGVGDVVARTLIADLPELGRLDRKQIAALVGIAPINRDSGKMRGKRTTWGGRAKVRSVLYMAALVASRRNPVLAAFYRRLVAAGKPKKLALTAVMRKLLTILNAMVRNKTRWQTA

SEQ ID NO: 509305 - protein, 413 aa, unidentified
MVKREKIELVKRQRIFVGIDIAGSKHRARFIDNMGEEQIKPLSFFNDREGLEKLERRVNEIPGIGDDIIFGLEPTGDYWKPVAQYLREKGYPVVLINPYHLKRTKEIIDNSQDKTDDKDSYLIADLTKQSKYFFPVIPEGVYAELREVSINWKRTSQQLARLKCHLSNFLAKYFPEYKGIFSDILGKTSLYILKHFPLPEDIERLGINKLYRVMKKVSKGSIKEGKIQLLYEKARTSIGLKGGSQTAKVLLKEVLSDIEILKKRKEELTKMMDELLYQSGYLKNLLSIPGVGIVTGSLFLGEIGDPDNYERASQIEKMAGLNLVENSSGSMKGEKKISKRGRSTLRYVGHLVATVAIGKSPEIKALYRYKVEECKKEKMKALTGLSAKMLRIMFAVCKNKTFYKHEEITRYFR

SEQ ID NO: 509306 - protein, 423 aa, unidentified
MAGVIIGIDPHKGSHTAFAIDGRERQLGQVRVRASARQAEVLLQWAARWPTRSWAIEGARGLGLLLAQQLIAADQRVVDVPPKLAARVRLLNSGQINKNDENDARSVAIAALRAHELPVLCAEDQTMVMRVWSRRYHDLGRLRTQVICRLHTVLCELVPGGVRKELRTSRASEVVAGLVADSPVAQAKLELARDLVADLVRIDAQRRDARRRTARAVAVSGTSTTSIDGVGPIVAGIALGYVRDIRRFTSRDHFASYNGTAPIEVSSGNRVIFRLSRRGNRQLNHAIHMAAISQISRRGGQGRAYYEKKITEGMSRKAALRALKRKISDALYQRMLDDARRREDPGGQSGNDAASSVAGSHPETPALRTSHSRASTNPRTSTRKQAMLAPRPAPARRRTSRSAAGVQVEPRTRPRSGHGQERP

SEQ ID NO: 509307 - protein, 337 aa, unidentified
MIVIGVDVHKQSLTAVAVDEAGRALAESTASAACDLLSWASSLPGERSWAVEDCRQLTRALEAALLAAGESLVRVPPKLMAPQRRAGRARGKSDPIDALAVARAALREPRLDHPRPGEQRLRELKLLVDHRDDLIDERRRAQQRLRWHLHDLEPALAVPLGALDRGVWFDRLGRRLARLEQTAQVRIARELVGRCRSLTRSILALDRELQAAAAQTAPALLALPGCGAVSAAKLLGEIGPIERFETDAQLARHAGVAPLEASSGKHRRHRLDRGGNRQLNCALHRIAITQGRVHAPARAYLERKQSEGKSRREALRCLKRQLARIVFNTLKASPALT

SEQ ID NO: 509308 - protein, 529 aa, unidentified
MLANCPALSPETEGMEELPEIEHRGRPKSDGKSLERRSPSMKKKHTYQSADVDAIDVAALVARVVAACAVPGPAVPGICIVAVDVAKETFFAALSNERGEVVRILRFHHPKQTTAFLKLLLKLRSEKLDVQVVLEPTGTYGDSVKHQCHQRGLAVYEVSPKRTHDMAEVLDGVPSMHDAKSTVVLAQLHAMGKSRKWQPYSDTRRDLRALVDRRVLYSDPLERHYGRLEALLTRFWPEFGQVMDVRMCRSWMSLLSKYPGPEAVLHGSLDASVVLREAASGALSIDRIDEIIGAATGSLGVPMTNEERVLLSELVLEIQRLQTKLDEIDRQLASHIKSDTVMKPIACAVGPAATAALFAFVGAPGQYDSASAYEKACGLNLKVRSSGTHEGRLTITKRGPPRVRQLLYLAALRLCRSDAVVRAWYHQRGGHKANAKTKAVVAVMRKLVRALWCMGRDVQDLREFDSLKLFDSRRLGIGQHSTESASSLSQSADASPQAASSSKSCSAQTKTRIDRSPLQRKPSGAEDRP

SEQ ID NO: 509309 - protein, 355 aa, unidentified
MDSVKYIGMDVHKEAISIAVLNSTGKLVMECIIETKAATILQFFEGLRGSLHVTFEEGTWATWLYDLLKPHIAKLVVCNPRRNALLKEGSKSDRIDARKLAELLRSNLLRPVYHGEHGVRALKELARSYLTISKDLGRVMSRVKAIYRSWGIPCVGKQVYGTRYRSEWLGKIEVAGVRRRAEFYYQQLDALRPLRQQVRQELLAEAKKHEAWKLLRGIPSIGPIRAALIIAILQTPHRFRAKRPLWTYIGFGIETHSSAESRYVGGKLQRSKKQVSIRGLNRNHNHDLKNLFKSAATVAAAKPGPFQEFYDALVAKGIKPEMARLTLARKIAAITLVVWKKGVRFDANYLKPQTA

SEQ ID NO: 509310 - protein, 409 aa, unidentified
MEVIYPRCCGLDVHKREVVACVVRTDPDGTVRKEVRAFGTMTPDILALADWLGAQEVSHVAMESTGVYWKPIWNLLEDSFALLLVNARHVKAVPGRKSDVRDCEWLADLLRHGLLRGSFVPDRPQRELRELTRYRTSLVRERTAEANRLQKTLEGANIKLAAVATDILGKSGREILAALVAGETEGTTLAQLAHGRLREKMPQLERALVGCVGEHQRFLVAEQVAHIDFLDEAIARVSAEIAERVRPEEEAIARLDTIPGIGPAVAETLLAEIGVDLARFPSAKHLASWAGLCPGNHESAGKRHRGTTRKGSPWLRACLVQAAHAAARTKGTYLAAQYRRLAARRGRAKAAVAVAHSILVIAYHLLTEGTIYRDLGGNYFDDRNRQAVERRLVHRLQGLGYRVSLEPVA

SEQ ID NO: 509311 - protein, 328 aa, unidentified
MSVFTGIDVSKDKVDVGWLRDAATGKKKTKVIRNTAKGHQQVVDWLLKNTKEPAEEIVVALEPTGVYHEALMYFLHDCGFKVLLVNPGKAKKYAESVNMIHKTDKLDAIMLAYYAHDQHNKLMFWQPEALEVRELKVMIRRLDALEKDLQREQNRQEATLVSLSSDRVVQSLKGMIETLEAEIKRLQKDIDNHIDGFPELKRNRKLLESIKGIGPVMSRELVYLFAAKQFKNAKQAAAYLGLIPKLRESGKLKGRTTLSKVGSARIRAKLYMAAVCASTYNVDIKAQKQRLLKAGKVKMQALGAAMRKLIQICFGVIKHQREYQPQLA

SEQ ID NO: 509312 - protein, 356 aa, unidentified
MAIVAHTRPFVIGVDTHARNHAVSILACPTGEIIDEAQFPATVAGLSRAVSWAGRRTGNDAAVLWVIEGIGTYGARLASAAADAGYAVVEAPRMNARANRGIGKSDPLDARRIAAAALPLHETQLREPRLDEGIRAAVKVLLASRDHMSTERTATINALTALLRVVDLGIDAPRPLTQAQITTITVWRTRDEDLATATARGEANRLAKRVAALDEELKKITKRITELVRQSPAAELLDQPGIGPVTAAVALTSWSHLGRIRSAAAFASLAGTSPIPASSGNTVRHHINRGGDRRLNRALHMAIVTRMRMDPRTRAYVERRTAEGRTLREIRRCLKRYLAHEIYRRLNATARAELPT

SEQ ID NO: 509313 - protein, 324 aa, unidentified
MAKRTMICAGIDTGKSKLDVAIDGSSEQLQVDNTAEGYQVLSDWLRRHRVKRIGIEASGGYEQAVVAELRRKRFVVVVFQPAQVRAYARFKGQRAKNDKIDAALIAACTAAVRTVHAAPDPRLLPFAEQLTMIDQVGEDIARLKNRLESCRNGRIQQVWKEDLARLEKRKRSELKALVAAIREHRDLAERLDLIHSVSGAGLPTAVAILVRMPEIGKITREQAAALAGLAPYDDDSGQRVGGRHIEGGRKRLRRALYAAALPASMRWNPQLIALYKRLIAAGKLHKHALVACARKLLIFVNTVVARGIAWQKQPPQRNEVPATA

SEQ ID NO: 509314 - protein, 340 aa, unidentified
MRQLYAGCDLHGNNNLVGIIDGEGERVFKKNLSNNLPLIRDALKPFQRELVGIVVESTYNWYWLVDGLMEEGYRVHLANPSAIQRYVGLKHADDKHDAFWLAEMLRLGILPEGYIYPKGERPLRDLLRKRGHLVRLRTSLVISLQNILSRNQGVSMIVNDVKRLKEDRISPLLEGNEDLAMAGRVSKEAIDFLTRQIRKIEGVVEKKVALKKEYRYLLTLPGVGKILALTIMLETGPIFRFEQVGDYVSYCRKVPSQWMSNGKRKGAGNKKNGNKYLAWAYSEAADYSRRFYAEPRAYYNRKMQKTNSVVAHSALAHKLARAGYYVMRDQVPFRPEKLFG

SEQ ID NO: 509315 - protein, 321 aa, unidentified
MNENTDYFGIDISKDVFDVVNTEGDHFQFPNSADGFKDFIDLLDENSHCVMESTAYYHIQLANALLQAAIKVSVENPLAVKRYIQMHLSRIKTDKSDAKMLCQYAHHTTLRLWKGHTENQVNCLQIMSLVSQYTKQLVMIKTKLEGESALGNPVKIVVKSLRKSLERLKTEIRVLEEELLRIIKIDHQDLLTRIESIVGIGRKTAVTLIVLTDGFNKFDNSKQLCSYAGITPIIRQSGSSVYVKARISKMGNRKLRSMLFLCSFSAKKHNKACVALFDRMVAKGKPRKVALMAVCNKLLKQAFAIAKSGVPYDRAYRSQLH

SEQ ID NO: 509316 - protein, 354 aa, unidentified
MTRATKYAALDVHQATTLASVRTETGQVIARTVLPTESRALTEFFRGMRGAVHVAFEEGTQAQWLHTLLIPLVHRVVVCDRHGEKRRGNKGDRVDADQLSARLWRGELRAVYHGSPHRATLQELSRTYRNLVEDTTRVMLRLKALFRARAIPTPGTRVYQPAHRASWLGQLTDRGVRFRAETLYTELDVLQALRPRAKAALLGEARRDPAWAVLRTIPYLGPVRVALLLATLQTPWRFRTKRHLWAYAGLAVITETSAEHELRHGRPVRRRRAPLTRGLNPNHNRVVKDVFKGAATAATARQGPLQDFYRAMVARGMREELARVTLTRKLAALTLRLWKKGDAYDPTRLTQQAQ

SEQ ID NO: 509317 - protein, 428 aa, unidentified
MERENCNRLAEFRQLRKDIRGSDKHLIVGIDVAKERHNAFFGTATGETLYRRLIFDNDKDGFERLLLQAEAMKVQHGLKKVVFGLEPTANYHKPLGEYLIKNGYAVVLVATDAVKKNRSLLDGRWDKNDKKDPANVADLISQGKCLFYEHPRHEVRDLRNLLSFQRKLKKLEHSTRMRIRNHLVAQYFPEMDTCCNWGVNEGLAIVKSCLDPAAISALQYDEFLRKIQTRGVTLAQQRRLSTVWQRAFKSMGCECGLSVEYEARMMVKILEQLRMSIADTQQQIKTICEKFSEYEYLLSIPGFGPDISAKALGAIGYPFRFDNASQVLKLVGLDLSASRSGKNSNNITPSISKKGKSELRYALYQAALIASSKDKHFIAYFTNKLRGREKEKGIKTKMRVKLSAKMMIIAWTLMKKKEFFDPKYLNME

SEQ ID NO: 509318 - protein, 359 aa, unidentified
MDAQEGAVRRIIGGVDTHKDLHVAAVVDEQDRVLGTQSFASTRQGYRQMLAWMRSFGEVQRVGVESTGSYGAGLLRFLQQAGVTVLEVTTPDRQDRRRRGKNDDFDAQNAAHAAFAGIRTVTPKSRDGMIEALRVLSACRKTAVTARRIALQMIQNTIVCAPESLREMLRRMTRMQLVRTLAAWRPDLTAYRDVEAAYRISLKSLARRYLELHDEIADLDAMIAAIVDELAPNLVARNSIGHRGAAQLLLTAGDNPQRLRSEAGFAALCGVSPVPASSGKTARHRLNRGGDRAANSALHIIAIGRLRTDARTQAYVAKRIGEGHSKLEAIRCLKRYIAREVFLLIKQRQREINQTRIAA

SEQ ID NO: 509319 - protein, 348 aa, unidentified
MIFYTKQHKYYCGIDLHARTMYVCIIDQNGKTLVHRNLRACVDELLKVIEPFREDICIGVECTFTWYWIADLCDREGIPFVLDHALYLKAIHGGKSKNDKVDSQKIAVILRGGMFPTAYVYPGDMRATRDLLRRRMYLMHKRAELLAHIENTNSQYNLPPFGKKLAYKSNRSGVADRFPDPAVKESVAVDLHLLDFYDKLLNGLELFILKNARVHDPQSLYLLQTTHGIAKILSLVMLYEIHDINRFPTVADFISYCRLVKPERESAGKKSGSRNAKIGNVHLKWAFSEAAVLFLKGNEPAQKIHERRVSRYGKSKALAILAQKLARAVYFMLKRKEPFDMQLFLNRI

SEQ ID NO: 509320 - protein, 349 aa, unidentified
MRYFQPPADTRFYAGVDLHARSLFLSILDRDGQPRFARNLTAAPEPFLRAVAPFRDGLVVGCECMHCWYWLADTCREQHIPFALGHAWAMKAVHGQKTKCDRHDALAIARLLRGGNFPLAYAYPKERRGLRDLLRARLRLVRQRAELYGHVHTARRQANLPAVSNDVKYKSKRAAITADIADVFVRRRVETDLALLEPLDTTIRRLEAEIEAAARQHFPTELAVLQSTPGVGPVLSLTILLEIDTIDRFESRQQFCSYARLCGAAQESAGKRVGTGNRKAGNAWLKWAFSEAAVLSAQKDERIGGLLQRLASKLGKPKALSALAHKLGRAFYHMLHTKEVFDVQRFVRH

SEQ ID NO: 509321 - protein, 339 aa, unidentified
MKLYAAIDLHANNSVLVILNEKDRMVLEERRPNELPAILAELAPYKKKIQAIAVESTYNWYWLVDGLMDEGYKVELVNTAAVKVYEGLKYTGDEHDARHLAHLLRLGVLPTGYIQPREDRAVRDLLRKRAQLVRCRTAQILSIQGLVTRNSGKRINTDGVRKLDDEKIGQYCGGSNVLELAIKSNLSVMRCLDEQVVALEKVVLKQARLKPEFRKILTIDGIAEILGMTIMYEAGDMKRFDGVGHFASYARCVSSSRWSNGKKKGEGNRKNGNKYLAWAFVEAAHFAIRYNERIRNFYQRKTAKTNKIAAAKAAAHKLARACYHVLKEQEVFEEALAFA

SEQ ID NO: 509322 - protein, 409 aa, unidentified
MRLFVGLDVSSFDMKVCFLNEEGDKIDAFSVSNDLPGATTLKEKLLKCVAGKEVEMLKIGLESTSVYSFHPSMFLHHDTDLQRFGAKVFLLNPKQIANFKKSYSDMDKTDELDAFVIADYLRFGRNQMSIVKESQYVALQQLTRTRYQLVKMLTKEKQHFLQHLSFKCNTFSQEVDSSVFGNAMMELFLEKFSLEELANMPLEELAEFLQEKGKNRFGDPRCIASSIQRAVKASYRLDKVVEDSIDVILGTSITVIRTFQQQIKELEKSIKKIMAGLTQTLESIPGVGPVFAAGIIAEIGQIERFEDETKIAKYAGIYWRKHQSGRFTAEDTSLSRTGNHYLRYYLVEAANSVRRHVSDYQEYYIKKYNEVPKHQHKRALVLTARKFVRLVDALLRSHQLFTPERCVKI

SEQ ID NO: 509323 - protein, 318 aa, unidentified
MNTKINQSINVGVDTGKTQLDIHIRPLDLFFSVENNDKGIKKALNTIKSHSPERIVIEATGRLEMPFVLACAEAQLPIVRANPVHIKRFAGAIGRRAKNDRLDAELIAHYGEAIKPALTVIKPKNIRLMSDLVIRRNQLLSMQTMEKNRIQILPASLHPTIKPMLTTIKNQITKLEEKLVKLIEDSPEYQAKNTILQSVPGIGNIAAASIISNVPELGYITNKQAASLIGVAPITRESGRYKGKRVIQGGRAQVRTVLYMAMMSAMQCNPVFKATYARLVAAGKPKKVAIIACVRKMVVTLNSMLRDGAMWDENTAKN

SEQ ID NO: 509324 - protein, 461 aa, unidentified
MARNNKKRKKPVRSLKTIQPDSAGIDLGSREHWVAGPPLEDNTPNVQRFGTTTPELLRLADWLKEQKVKTVAMESTGVYWIPLFETLDSRGFEVILANARQVSHVPGRKTDMLDCQWLQLLHACGLLRGSFRPSDDICRLRALLRERNTMVDQRSDWVRRMQKSLDQMNICVHHAVSDITGATGMAIIRAIVDGQRDPRILAQMRDRRCKKSEDQIAEELTGNWRAEHLFNLRQALKMYDQFCKVVSEYDAQILAYIKSLQPGVDDDQSAPPPASKSKASDIAKKGQEPMRQALYQLTGFDLTTIGGIGVDTAAVIISELGFDFSAFPDEGHFVSYLRLAPNLSISAGKKVPSKIKGTTTSRVAAALRIAALAVRNSKTALGAFYRRISRRKGASVAVFATARKLAQIIYRLVCYGQAYIDIGAKAYEAQFNNRRLKYYTKALKDMGYKVKPLATEEAQAA

SEQ ID NO: 509325 - protein, 343 aa, unidentified
MEYYVGLDVSLKRTSICVVDQTGSVVREGVVDSDPEAISVYVRSKAPGAVRIGLETGPTSTWLWTELKRFGLPVICIDARHAKAVLKMQINKNDRNDAIGIARIMQTGWFKEVHVKDIDSHSVRALLASRALLVKIKRDLENHVRGLLKNLGLVIGRATFNVFAARAEELIEGRPDLVAAVRPLLEARNAVEQQVSELDRKVMKLARRDAQVQRFMTVPGVGPITALAFKATIDDPARFARSRSVGAYVGLTSRRHASGEIDWSGRISKCGDAMLRSYLFEAAGVLLTRVPKWSTVKAWGMRLAKRNGLRKAKVAVARKLAVILHRMWIDGTEFNWSKKEIAA

SEQ ID NO: 509326 - protein, 334 aa, unidentified
MKQVNQVGVDVDSEKLVCTMQRAGQRMPLATFANTAAGHQKFVRWATKGARPARVCLEATGVYSLAFALALHEAKNVEVMVVNPRAIKDFARACMQRAKTDAVDAGGILDYLERMPFTAWQPPAPEILQLQAINRRIVQLTTELAREKNRRHAAEFAGASAEAIAHDIEVNIHHLERRIERMHDSGVKLVRGVPALAAKSAHLVSTKGIAESSAMRLLAELLVLPDDLAAPQWVAHAGLDPRPYESGTSVHRPRRITKVGNRYLRAALYMPALVAIQHEPNVKAFYNKLVAAGKKPMQAVVAVMRKLLHAIWGMLKHDQDFDGNKFFKLAEKTA

SEQ ID NO: 509327 - protein, 367 aa, unidentified
MKKVSTAEAKQIRNISRQRLTIGLDLGDRNSWYCVLDEAGGIQLEQRVRTTAKALQEVFGAMPRSRIALEIGTHSPWISRLLSELGHEVIVANARKVRLIGESRKKDDRLDAQTLARLARIDPKLLYPVKHRSAQAQADLMMIRARASLVRARTGLVNAARGLAKSYGERLRGCNVRNLDPEKAEGLSPELQRALEPLLATIEELSERIVEYNDRIEALAQTRYPQVELLKQIKGVGTLIALTFLLTLEDPHRFRKSRDVGGYLGLQPGRRKSGESEPQLHISKEGDPYLRTLLVQGAQHILGPFGIDCDLRRWGLKLAERGGRNGKKRAIVATARKLAVLLHHLWVSGEVYEPLHNRSRLTVTAAA

SEQ ID NO: 509328 - protein, 355 aa, unidentified
MMIIGCDFHPRFQQIAFVDQETGECGERRLSHPEEAERFYRSLAGRQVRLGAEATGNFRWFRLLMQELGHEFLLGDATAIRAACPRKQKTDKRDARHILKLLVEDRSPDVWQPPEENENLRELLMHRCRMVRMRTRIKNQLDSMAKNEGLLSKRVWCPMRRNQIEALPLAGWDVERRKDLIALLEEMNRRIEPLDKAVIKAAEQSPEACVLMTHPGVGPVVSLAYVLTIGNWERFPRGKQVGSYLPPQRRRPVAGDPGLGLIPAEESSSDKRRLGHISKQGNTTLRWLLVEAAATAQRYDPSWHRQYVRLSMTKHHGVAKVAIAHKLAVRLYWMWRSGEEYSKVMERGSHVGQPE

SEQ ID NO: 509329 - protein, 407 aa, unidentified
MVDTTAIDLFLGLDLGKEFHHAHGRTQDGRTVHDKRLPNTEPKLLELFTRLVAKFGTVLVIVDQVANIGALPLTVARAAGCRVAYLPGLSMRRAADLHPGEAKTDARDAFVIAETARTMPHTLRAVDRDDEVLAELTMLTGYDNDLAVEVNRTTNRLRGLLSQIHPSLERVLGPRLAYPYIQALLQRHGSPARLKKLGQARCEALLKVHGSRKARHLTAEIFDALAEQTLVVPGTEASALIVPGLAAQLAAAHTQRRQAEQEIAALLEALPLFHLLTSLPGLGVRTTAAVIVAIGDGTSFPTAGHLASYAGLAPATKSSGTSIRGEHAPHRGNRLLKRALFQAAFAAIGCKTDPSSRIYYDRQRARGKTHTQAILRLARQRVNVIHAMIRTGALYEARTPGDVDLVA

SEQ ID NO: 509330 - protein, 411 aa, unidentified
MDVVHERAAGMDISKRDVKVCVRVPGKRPGTFEQKVTTWGATTSQVLELREHLLANRVTTVVMEATGDYWKPFYYLLESVLPVTLVNARDVRNFPGRKTDVSDAGWLAQLAAHGLVRASFVPPEPIRELRDLTRTRATIVQERSRHIQRIEKILEDAGIKLSSVVSQLNGVSARSILDALVAGERDPVKLAALAKGRLRAKIPELVEALTGRFRDHHAFMVNLHLTQLDHSATLIDEITARIEVVMEPFRVFRETLTTIPGVSVRVADVIIAETGGNMHIFPSPGHLASWAGVCPGSNESAGRVKSTKTRPGNAHLKAALGISALVITRQKNTHLAVKYRRIAARRGSIKAIVALEHSILVAVWKMGTTGEAFTELGPNYYSNRHPDRTKSNAINQLRTLGYQVTLTPTAA

SEQ ID NO: 509331 - protein, 260 aa, unidentified
MQAISVGCDAHKHYSQLELQDASGHVLNRIRTDHSPGAVSSFFSRLPGGTRVALESVGNWYWIADEIKAAGCLPLLTNPAKAKLMMGHVNKADNLDANGLATLLRIGTLPTVWLPPAALRDQRELPRTRMALCAMRTSLKNRIHSTLAKEALSPEDGAELFSKRGRAGLESSLSRLPQETARFPYAPQFSSYCGTIPRISSSGGKTRYGKMRSESNHSLMWAFIEAVIGAVARHLAESTVWILSKNEPYREPSWFSPRQG

SEQ ID NO: 509332 - protein, 428 aa, unidentified
MEESTEEPVGLVERVCAIDIGKAGLVVCVRIPHESKPGRRVQEVREYATTTPALLGLADWLHDQRIELVAMEATSDYWKPVFYLLEAEGFECWLLNAKHVKNVPGRPKTDKLDAVWLAKVVERGMCRPSLVHPKPIRQLRDLTRYRRSLVREQSREKQRLEKTLEDAQIKLDTVISNLHGVSGRQMLQAMIDGQRDPKVLAEMAHGRMRPKIPQLRQALTGHFDDHHAFLCAAMLRRIDTLAADITGLDARIDELIAPFVQAVEKLDEITGIGIRSAQEIIAEIGVNMDAFPTAAHLVSWAKFAPIDRQSAGKNKGASTGKGNPWLAATIGESVAALARTDTFLGERYRRLVRRRGKKRAIVAVGNSMLTIIWHLLADPNARYHDLGPGHYELKINKQRRQRDLVRQLEHLTGRKVILQPPPELPTAA

SEQ ID NO: 509333 - protein, 351 aa, unidentified
MDRYIGIDAHSESSTIVVMGPTGKRLRQQVVDTKATVLIAFLKGVSGDKYVCIEEGQLAEWLVEALSPHVKEVAVVQPPEHGGRKSDLDDAWALAERIRVRADGTYVFKPTTQYRALREAVRAHSTAVKEKTRAKNRFRALLRSRGVPKLDETIYEVESRERWIAKLPAAYRQRAEWLGQQVDATSEAHVLAQKWLKEEGEKVPDVERLKTAPGLGDVRAAQIVAIVVTPHRFRTKRQFWSYCGLGIVTRASGEWKRSNNGQWQHVQGKVQMRGLNLNRQPLLKAVFKGAAISALSKSNHLRSHYDQLVANGTAPHLARLTIARQIAAATLAIWKKKEEYEPSKHYPTEAA

SEQ ID NO: 509334 - protein, 408 aa, unidentified
MSVPSATPTRFIGLDLHKHYLIALAVDAAGEQTGGPWRVTLDHLDDWARAHLTRLDAVAVEITTNTYAVYDALSPLVHSVTVVHPPHLALITRVPVKTDNRAALVLAQFLAKGMLSPLWIPPQAVREQRATVAQRAKFTRLSTQAKNRLHAVLHRHHLPLPDEGSPFSPANRAWWQQLPVSASEQARLQADLATLDFAEQQIARLTTALASDGAQDERLPLLIQLPGFSLITGVTVLAAIGDIGRFEDAKHLVGYSGLGAGVHASGQLYRTGRITKAGRRDLRTALVEAAQTAANTDPHWQAELARLEPRLGRNKTIVAIARKLLIAVWHVLTEQRADRFADPARVARKLLNYTYKAGRVNRRPGQSTAAYVREQLDRLQLGVDLESIAHGKRSVPLPPSQQTPAAEA

SEQ ID NO: 509335 - protein, 376 aa, unidentified
MNEKLRFLGLDVHAETIAVAVAEPDGEVRSLGTIANREDSIRKFIRKLGSPEHLRACYEAGPTGFVLYWQLTQLGVKCDVVAPSLVPKKPGDRVKTDRRDALKLARSHRSDDLTAVWVPDEGSEALRDLVRAREAAKQDQLRAKHRLTKFLLRTGQRPPLGVKAWTEKYVEWVQQVRYTHPAQEATLLDCLNEVQHMEERVKRLEQSIVEVIQLAPAPMQEVVRGLQALRGIAHISAVTIVVELGNITSRFESARDLMGYSGAFPSEDSTGKRIRRGGITKSGNAHLRRIVVESAWSYRHRPAIGARLRRRQEGLPAEITEIAWKAQNRLHKRYMTLMARGKEQRKTMTAIARELLGFIWAIGIKAEAACKQQMAA

SEQ ID NO: 509336 - protein, 410 aa, unidentified
MLFVGNDWADDHHDVWVMSETGERLAAHRFDEGPEGLGEFHEMVAVLTGDSDNPPEVVVGVETDRGLWVQALVAAGYQVYAVNPRSVARYRERHTVSGAKSDRADAKVLADLVRTDRHNHRQVAGDSTGAQAVTVLARAHANLIRGRTRHGNALRTGLKEYYPQAVATFEHLADRDALAVLERAPTPAEGAALTVAQIRAVLKKAGRQRYLDSRAADIQAGLRTEGLTAPGPVAAAHAASTRATVAILTEISRQIQELETELEASFEQHPDADIYLSVPGLGVILGARVLGEFGDDPDRYATVKSRRNYAGTSPLTIASGKHHTVIGRYVRNKRLADAIDRWAFASLTASPGSRTFYDQHRAQGDSHAQALRALGNRLVGILHGCLRTQTPYNENTAWGHRQPASPTIAA

SEQ ID NO: 509337 - protein, 456 aa, unidentified
MKIPQSTIRLLTGRLVKILLNREVSTMKSNTQNAKIEAITEKTLVLGIDVGSKTHYARAFDYRGIEYSKKPFKFSNTEAGFATFKEWILDLKERHEKDKVVPGMEPTGHYWFNLGKFLQDNEMKPVLVNPHHVKKSKELDDNNPTKNDRKDPKVIAGLVREGRYMIPYLPEGVYADLRTASNIRFQLQAELTRIQNRISRWFNIYFPEYKTVYGKPDAKSGMLILKAAPLPEDILTLGIDGVNQIWRDAKLRAVGKARAKTLIEAAEHSVGSKEGAVSARMEIRMLLEDYESRNIRLQEVMTLIEGLVKQIPMAEKLLEIKGVGIRTVSGFLAEVGDISRFNTPKELQKLAGLALVESSSGKHKGETTISRRGRKRLRYLLFEVAMSLVAKNPEFRELHNYYTTRRLNPLKKMQSLMAIAAKLIRVFYAMLTKGVDYDPKKMVSDIKRPAVYLQAA

SEQ ID NO: 509338 - protein, 356 aa, unidentified
MAEGSWVGLDVHARSVIAGVLDAVSGELRSWRAPTLCEETVVWLQQLPGPVRVAYEAGPTGYGLARACSAAGIACTVAAPSKIPRAPGDRVKTDRRDAERLARLLRLGELVPVRVPEPYEEAARDLVRAREDVRGDLMRARHRLSKLLLRHGLVYDSSAWTGAHDAWLRRQSFASRPLALAFEECYGAVVQTKSRRDALDRAIVDLAAEPPFAEVVGRLCCLRGVSTLTALALTVEIGDWTRFRPQSLGPFLGLTPSEDSTGERRRQGAITKTGNTHARRLLVEAAWHQRRPLRASATLERRRQGQPAAVRARADQTARRLHARWQALERRGKRRTIVAVAVARELAGHCWALATM

SEQ ID NO: 509339 - protein, 426 aa, unidentified
MRVLYDRVAAIDVHKDMVKVAIRVPGAKRGTRKTDVLEFRTFYGVLQAMARELRGRGVTHVVMEASGVYTDPVYYALRELDFTEVMVINPAHAKALKGHKTDAKDAIRLLDLYECGLLSGSYIPDPDLREVRDLARYRMKTVQARTSEIQRLQKTLETAGIKLSSVVSDVTGGSATAMIEALISGERRGSVMAGLAQTRLRTAGKMADLSMALTGRFTDHHALMCRLHRDRITIFDDAVQDLDAKIAPLVARYAREAELLKTLPGFGDVIVAGWLGAIGPAPHQHFATASRLASWATICPGNYMSARKSKGGRTGDGGAYIKPLLIQAAWAAVRVPGRLQARFRRLVRKFGGPRNMGAQKRAITAIAHTLLKIAYGVLKTGKPYADLGADFYTRRESPDARQDYLMRQLRKLNPGCVITITPAEAA

SEQ ID NO: 509340 - protein, 376 aa, unidentified
MQKRSTKNKVPNGLPLVHANAAGIDIGDTFHAVAVPEGRDEQRVRTFGSMTCDLLAIAGWLKQCNIDTVAMESTGVYWKPLFGVLIKEGFEVYLVNSRHVRNVSGRKNDEDDAMWIQRLHSCALLKSSFLPSDEQESLRAMVRFRRTLTQDQSRFVLRMQKAMELMNVKLHTVINDITGQSGLAVISAVLAGERNPEKLQTFVGKTVKADRETIIKSLQGTWRSEQLFLLKECYQCYCYYKERITICDQEIERQLQTYQKAEPLQVGPKENLAPALSNAKKRAHKNTPQFDTRAFLQAIHGVDVTAIYGMGEGTALEILFETGANLSKWPTAKHFISWLNLCPNNKITGGKLISSMLLKKTPNVASQAFRHAANAV

SEQ ID NO: 509341 - protein, 350 aa, unidentified
MKVEIVKQNVGIDVSKEKVDVAFSHLTADFNVVVVSTRKFSNTAKGFKELQELVNDKKRPDMPVHFTMEATGVYYEALAYFLHEQEGYVVHVVLPNKAYKYGQSLGLKSVTDKIDARMLSLMGLERKLRQWLPISPSLLELRQLTRERSALVKNKTKVSNQLHAYSHHGKPNKESIARSQQLVSFLDDQIGQIEKEIFNFVDNDKKLDSDVDFLLSIPGVGMITAATIFAETNGFAAIESIKQLSSYSGLDVRISESGKWRGKSTISKRGNSYIRSVLYMPTLSKITHDNATNQYYLRLKEKKGMGMIAVVACMRKMLALMYTLWKKQEMFKDASGKIISKEALKKKKKR

SEQ ID NO: 509342 - protein, 338 aa, unidentified
MSDQPKTVDIIGADVSSREIVLAWARSKHPQQTIANNRRAILAWLKRLPPNCVIGMEATGHYHHQLADLAATGGHAVYVINPKHMAAYARGVGQRGKTDPLDAQVIARYVDRERDQLHPYVVPSPLQRTLRSLLSQRSGMVRHGVAIKQSLAATTVKGNTSLKRARQKVLQSLAGLVAQIDAELQRVVAIDTALETKRKQLQTITGIGFLNSMALTHRFDRTPFANSDAVVAAYGMDPRPKDSGKHVGKRRLTKEGNTEDRRLIYMAGQSASKSILFKPMYQALLARGFATTEAILILARKLLRIAFAVWTSGKPFDPAKIGIQGASPRSKAKCCKKP

SEQ ID NO: 509343 - protein, 424 aa, unidentified
MKSLTDCEFAAFIGIDWADSKHDICLQVANTEKREFAVLPHRPDAIDQWACSLRQRFQSRPVAVCLELRKGPIVYALQKYDFLVLFPVNPAMLAKYREAFTPSHAKDDPTDAEYQLELLVQHRDKLKALRPQSAPMRTLESLVEQRRRLVDDSKRITNRLTSALKQYYPQAVRWFEEKDTALFCDFLSRWPTFKQVKQARRATLEGFFREHRVRSAKLVEERLAAIKSATSLTEDIAVITPHRLLAQVLVDQLRVTLQAIERFDAEISAISQTLPDYPLFRDLPGAGAALAPRLLTAFGEQRERYESAAGVQKYTGIAPVTERSGKQRWVHWRLQCPTFLRQTFVEWAAETITRSFWAGAYYRQQRAKGCSHPAAVRALAFKWIRILYRCWQTRTPYDESKYLNELRRRGSPLFNSIAEAAKTT

SEQ ID NO: 509344 - protein, 402 aa, unidentified
MKQLNANTTTLHTSASPDAIFAPVQTAIASDYGAYIGLDVHKDTIAIAIAEPGREAPIYEGEIAHTPKKVTRLLTRLSQRYDGEVLQFVYEAGPCGYGLQRQLLASGHEAQVIAPSRIPKAPGERIKTDRRDAVKLARLARSGDLTPVWVPDTEQEAMRDLTRARGDMKAQERKARQQLNAFVLRHGHHWPKGKTRWSQTHYNWLESLRFEHDWQQVVLQEYVDATKAATQRVADMTAQMERALPQWALAPVVEALVALRGIDKVAAMVLLAELGDISRFDSPRQLMAFLGLVPSEHSSGNRRRQGGITLTGNSHARRILVESAWSYRFPARQTMHLKRKAAGAPAEAKAIAWKAQKRLCGRYRDLTRAGKNTKLVCVAVARELVGFIWDIVCRIMPRLAVA

SEQ ID NO: 509345 - protein, 349 aa, unidentified
MGEVSTIGLDIAKSVFQVHGVDADGAVVIRRRVGRAKVVEFFAELPPCLVGMEACATAHRWAREFKKLGHDTRLMPPTYVKAYVKRGKNDAADAAAICEAVTRPSMRFVPIKSVEQQSALMLHRTRDLLIRQRTQLINALRAHLAELGLVAAKGREGLQQLVTAVMESGDERLPSDAGFACQAIVAQLHAVQTQINGLDKRITQAHRANADSKRLDAIPGFGVILSTAVVATMTDPKAFKTGREFAAWIGLVPRQNSTGGKERLGSISKQGDRYLRRLLVVGAISIVRTARMRPDKYPWVVELLARRPAKVVAVALANKMARIAWAVLAKGETYGAPARSRNATIAAAA

SEQ ID NO: 509346 - protein, 396 aa, unidentified
MFIVGIDIAKHTHQASVMNTDGSLVGKSIKIPNTSVGFDAFISKLKEIDRDISHFEFGMESTGHYWLNIYTHLADLGCIVHVINPVQSDALRGLYIRQTKNDIKDSAIIADVIRIGRYCETSVSDDKMLALRDLTRQRFYLVDMVSDLKRKSLTLIDRIFPEYPTLFSDTFGTTSLELLANCNTPEDILAIETDKLVEMLSTASKGRFKQDKAEKIKETARNSFGALLCTDSASFMLKQFVEQIRFLENQIDELDEIISESLAEINSPITTITGIGDTLGAAILSEIGDIERFESADKLAAFAGIDPSVSQSGNFLGTRNKMSKRGSPYLRRAIWLAATAAILHDPAIKAFYDRKKAQGKHHYVCVGYICRKLVNIIFSVLKSGQPYQPVFPKNLD

SEQ ID NO: 509347 - protein, 371 aa, unidentified
MHFITKFVGLDVSKEKISVAIADSGNEAPRYYGSIPHTPEALRKLIKHLGPAETLSFCYEAGPTGYATYRWITSMGAHCTVVAPSLIPKRPGDHVKTDRRDAEQLARLFRAGELTPVYVPDQADEALRELVRIREAAKADLHRARQRILKFLLRHHIEPPVTIKRRWTKKYLDWLRQLSFPYASMQLAFDEMLHALFEIEQRMERLGKKLARQTESSPKAPLIQALQSLRGIGRLTAITLVAEIGTFSRFRSPAQLMAYLGLVSREYSTGLSTRRGSMTKTGNGRARRAVVESAWSYRYRPAVKGDLAERLEGMPAEVQRISWKAQERLHGKYRRLVYAKNKHKNVAIGAVARELVGFIWAVAQFVEQKAS

SEQ ID NO: 509348 - protein, 399 aa, unidentified
MPQYYVGIDVSKGRHIAAVVDGDGELRTKDFEFTDDAAGYESLLTTLAKLPDGRDLHVCLEATGNYGHRLAAFLRTRPGFTVSVVNARSSHHFAKVLMARTKTDRVDAIILARYCRALRPRATVAAKQAALARLTRSRHTLLTSLVAQVNLLHSLLERVNPSVERGFYRLDCYGALAVLDRYPLGGMLAQARPDRVAQLKANTRRVGKLRADRLVASARSIPGEQGTATDAVVVRQLVAAIRQLQRSLAALETTIAEQVQGNVLFTIDGLGAATVPVILAEFPVEQLDTDTQAIAFAGLNPRFRQSGRFAGKVKLSKCGPAALRHALYLAALSVRNHNPVLRQYYLRKLAEGKRPKAAIIACMSKLLRIIFAVLKTGRPFDPDYETNRLMTRSLAPQAA

SEQ ID NO: 509349 - protein, 432 aa, unidentified
MKHNQSNKQNQRISRISETTLVIGTDIAKHNHVARAFNYRGIELGKRCLFQNDENGLLNLLAWAESIKQEHGLTDVLLGVEPTGHYWFPLFHFLKQYGVEVVLVNPHHVKKSKELDDNLPTKNDIKDAKVVAKLVIDGRYTQPQLPEGVYADLRVLMNQRDRLCGDLNRVKGRIHNWLDRFFPEYTQVFKDWEGKASLITLQHFPLPQDVIAAGETTVVAIWKKNDVKRAVGPKRAELLYRKAQKSIGLTEGAMAAKHELAMYLEQYAMLCRQIEQLMELVAGLVEQIPGATHMMSIPSIGLTTVAGFLAEVGDLSGYDHSQQIVRHAGLSLRENSSGLHKGETTISKRGRCRLRALLFRAALTMVAKNQEFRALHLYFTTRRDNPLKKKQSMIAICNKLIRVLFELGRKQKEYDASKVLGPHREAQLQAAA

SEQ ID NO: 509350 - protein, 331 aa, unidentified
MENTNELILTGVYPVMNYYVGIDVSKPLLDVYWNNEYHQISNDAEGLKSLLTLLAHSESTGNKIALVTCEASGGYERLLVKTLRNAAYPVHVAHANKVRAFAKAKGWLAKTDKIDAKVISLYAQVMEVLPAKYPLTECQELIKEVVKRREELCDTRAQEKNRLDKVSNPKIKKSIKAHIKWLDKSIDELSSELERLSEDTEVKNKIELLTSVPSIGVITASYIVAYLPELGSLSNKEIAALVGVAPYAHDSGLAKGKRFIQGGRQRVRNCIFMSALSSLRWNPQLRAVYDRLVARGKPAKLALTAIMRKLIIMLNSIMKRNTPWLKQEATG

SEQ ID NO: 509351 - protein, 465 aa, unidentified
MNRLLIPFVPAEAGTQFFGRVRGPVGVDGPSTASLCQNEVVADLIQEEPSVNDLIRIGMDTSKRVFVLHGVNAAERPVLRKTLSRRQVIEFFAKLPSTQIGMEACGAAHHWGRTLGALGHEVKLLPAQRVKPYVARNKNDAADAEGVCEAMSRPRMTFVPVKTAEQQAALMLVGMRDQLVARRTQVSNAIRGYAAEFGLVAAKGLEKIEPLLARIAADESLPALARELFAALGAEYAELKLKFRKIEAQLMAWHRQNELSRRLAEIPSVGPIGAALMAMKVVNPQAFRSGRDFAAWLGLTPKDHSTAGKQRLGVITRAGDEALRRVLVLGATAVIQQVRRGRGHPSSWLVALLRRKPPKLAAVALANKTARIAWKLMASGERYHGARATAVAHGNPCSEDASSQPRKPRAVLAAVKARPISAAARGRQNTTAGLDGGCAQRVTAIAVGTKKRSAVEQRNESHAHD

SEQ ID NO: 509352 - protein, 462 aa, unidentified
MGKPKRSDQQTMSLPQHLNRLNLNAAGIDIGSKSHFVAVPEGADSEPVREFECFTADLYRLADWLISCGVTTVAMESTGAYWIPLFEVLESRNLEVKLVNARHVKNVPGRKTDVLDCQWLQQLHTYGLLEGAFRPPEQICVLRAYLRHRLNLVRYSSAHIQHMQKALTQMNLLLHNVVSDITGVTGMRIIKAILAGERDPKVLASMRDKRCKNSVETIAKSLFGNYRPEHLFSLKQAVEAFEFYQAQIAACDREIETLLAKFDAVSEEEPPPQVQDGSTAKGRGTAPAFNLYNELLRVIGVDLTKIDGIDATTALKIISETGLDMDRWPSAKHFASWLGLSPGSKITGGKRLSGKTKRVVNRAAMAFRMAASSLYRADCALGAYYRRMKSRLGAPKAVTATAHKLARLYYSMLKYGTDYVDVGQEYYEQRYKSRVIQNLKKRAQQLGFDLVEMMPIGQSVTT

SEQ ID NO: 509353 - protein, 390 aa, unidentified
MKQNNTRRESLKPTPATARKPSPKLASKQSPKQRPRQNEKVSPGPITIGIDLGDKTSRYCLLNNRGEVVKEASVGMSKKGLAQAFGTMKRCRIVLEVGTHSPWVSRLLTSLGHEVFVANPRQLKLISQSSRKDDRVDAIMLARLLRADPELLRPIQHRSEAMQMDLMAIRVRAVLVEARTKLVNAARGLAKSVGERLPTCDADNMGISQMGSLPKELQALLKPLLKQVESLTGEIKARDEQIEQIARMKYPETKLLRQVSGVGPLIALTFVLTVADKQRFQKSRDVGCYLGLRPKRSQSGQSEPELHITKEGDLYLRKLLVQGAHYILGRKGPDTDLKRWGTRLALGGKRSKKRAVVAVARKLAVLLHKLWSCGEVYEPLRNSVARQAAA

SEQ ID NO: 509354 - protein, 321 aa, unidentified
MANVNKIIGIDISKEKFDVCFSFQPCGYSSRSYNYNAEGIKSFMKNVPSDSVCIMEATGVYHLRLAYALNKLGVFVSVVNPLSVKNFSRAVMCRTKTDKADARLLVDYARRMELTEWKPTSDNYIRIQQIYRSIELFLGNITQFENQLEAINNSPVGNPKLCRMLRKHIKTLHKQIVLLEKQIEELIAKDDETVVEHISSVPGVGKKTTIALLTATKGMHGFDNYRQVSSYFGLCPRIYDSGKSVHGRAHICKMGMGWIRKLLYMCAISAARHNRACASLYERLRQKGKAVKVALIAVANKLLKQIFAIVKNNCAYSEFYA

SEQ ID NO: 509355 - protein, 436 aa, unidentified
MAAVVSPTKMSLISAGGRYLLDTFKEVFFIMISVGIDVSKGKSTVCAIKPYGEVLMTSKDFKHTRDELESLTKQLSRFKEEIHIIMEATGNYHLPIYQYLKSKGYQISIINPLEMKRYRCQGIRNPKTDKIDSYIIAQYGIDFWYRFKPNDDMDEKRQELRLLGKQYTSYMRIRTIRCQDLCHILDRTMPGVYGLLDDFNRNNGQDKLCDFAEKYYHSDNITKYSEKVFTERYSSWLKKKGYRQNEKEARQLYSIAKNAIPTLDSKLPSTKLLVQEAVNVLREVDSSLYDILNQLKDLSKEMPEYETVLSMKGIGATLAPRFIAEIGDPRRFHSAKALIAYAGIDAPPYQSGQFTGTKRHISKRGSSNLRKLGFELMDSVNKHKSSYTGDPVCEYFMKKRNEGKPYRVAMIAAFNKFLRIYHSRVSEVLNDYDKTK

SEQ ID NO: 509356 - protein, 315 aa, unidentified
MVDVPCFVGIDVAKAQLDMALRPSGERWAVPNDAGGVGTLVEQLQALQPTLMVLEATGGLERAATAALATAGLPVVVVNPRQARDFARATGQLAKTEALDARALAHFADVIRPTPRPLPDAQPQELRALLGRRQQLVVMRTAEQHRLAGTCGRIQTDIEAHITWLNERLATLDDALETLLRASPLWRDNDDLLQSTPGIGPVCARTLLLALPELGTLTRQQIAALVGVAPLHCASGTLRGRRMIWGGRAHVRTVLYMGTLVATRYNPRIKAFYERLLAAGKVKKVALTACMRKLLTMLNAMLKHRTPWHAQEVQS

SEQ ID NO: 509357 - protein, 348 aa, unidentified
MHYVGVDYHKKSSYVTVMDERGKVVKEGQIANTQEALAALLDGTAEGASAVLEAGRNWPVMYDWLEELVEEVTLAHPAKVRVIAEAKVKTDRIDSRMLAHLLRADLIPAAYVPGAVTREQRRRLRQRMFLVRLSTMVKNRVHTLVDRHPELSRQAGGWSDLFGKAGRAWLESACGGELPAGEAHLLRTDLDLLAAIQEHIKSSDRWVAQLARKDARAKLLATLPGIGDFFAVLLAVEIDDVSRFSRPQKLAAYAGLVPSTYASGGYVHHGRITKRGNKWIRWACIEAAYPAIRQDPELAVLYQRLKVAKGANVAKVAVAKRLLTIAYRVLSEDRPYRPAQEQARLSRR

SEQ ID NO: 509358 - protein, 336 aa, unidentified
MSNVTTVGIDLAKNVFSVHGVDANGREVLRRTVRRDQLAALVAQWPRCLIGMEACSGAHEWARRFSALGHTVRLMAPKFVAPYRKSGKNDGNDAEAICEAVSRPSMRFVPVKSVEQQSVLALHRVRQGFVEERTATLNRIRGLLAEFGHIIPQRAIEVRRRVPRLLEQLPAPAARAITDLLQHVSRLEQHIIDYERELVRIGRSDARAERVQALYGVGPLSASAIIASVGNAHEFANGRQFAAWLGLVPRQYSTGGKTRLGHITRRGDPYLRTLLILGARAVLQAAERRQDRLSRWALAVRERRGYHRACVAVAAKNARIVWALLANNAELRLADA

SEQ ID NO: 509359 - protein, 369 aa, unidentified
MDQQCQSLGSLRVEVNRAGYRRLRRFAQGWPQAVWAIEGARGLGAPLAQKLADDGIECLDVPAKLAHRVRMLSTGHGRKNDEADALSVGIAALNSTGLRSVHIDETAQVLRTLTEYRDDLIRTRTQTANRLHGMLARLVPAGLPKRLTAEAASQLLRSVRPREHCRRTLRQIAVDLIGELRRLDRRIDSATNSLDVAATESRTQLPTIHGVGTVVAAKILAHTSDIRRFRSAATFASYCGVAPIEVSSADTRRHRLSRAGDRQLNYALHVIAITQIRRDTAGRAYYQRKRAAGVVGHRSAAHRRTNPDRQRRIHLRVDGVAGIARSMPAEHRQRPRHSVHRIINCLQLWVPNQKASVSGDPRRSGSRSR

SEQ ID NO: 509360 - protein, 358 aa, unidentified
MRFIIGCDYHPRFQMIAMLDTTTGEVKVLRLEHENGEAKRFYASLPKETRVGIEATGSTQWFERLLGECGHELWVGDPAEIMARVVRKQKTDERDALHLLDLLLTNRFPRVWVPCPADRDARQLLQHRQKLVRMRTAVKNQLHGLAMAQGLCRKHKLFSQAGRRLLESLELGPWASRRRNELLTLLDQLDPQIAELDKAVEAEAARRPEVQLLRQQKGVGVITALAFVLTIGPVERFARSRQVVSYLGLNPSEGSSGDHQYLGHISKQGNSMMRWLLVEAGHTAARLDPKLGRVYQRIKFRRGANVAKVAIARRLAVRMYWILRQAHEAAPPVRMSGSSTHSMVDPRSGSAGTTPSML

SEQ ID NO: 509361 - protein, 355 aa, unidentified
MTSTKYIGMDVHKESISIAVRNDAGKIVMECVIETKASMILQFIDGLRGDLQVTFEEGTSAAWLYDLLKPHVTKLVVCDPRKNASMREGHQSDKIDARRLAELLRLNHLHPVYHGEHGLRSLKELVRSYLTITRDLGRVMSRVKAIYRSWAIPCTGKQVYAPRHRVEWLGKITEPGVRRRAEFYYQQLDALRTVRQQVRRELLAEGKKHPAWKRLCGIPSIGPIRAAVLLGILQTPHRFRTKRQLWSYGGVGIETISSADHQVVKGHLERKKKQVEIRGLNRNYNHDLKNLFKGAAIVAATKPGPFAEFYAELLAKGMRQEMARLTLARKIATIVLIVWKRGVSFDAQHLKPQTA

SEQ ID NO: 509362 - protein, 307 aa, unidentified
MNEELIARLSRRYLALDIHKHYSVVAGVNFEGQVVLEPVRIEHADLENWLAKHIQPTDYVVIESTTNAWHIYDLLEPLAEKVLVANPIKMKQIAQARVKTDIRDTLILARMLAANMIPEVWVPPVHVRNLRYLLSQRRQLVGMHTQTVNRMHSMAHRHHLSHPRGKRFNEKNTRWQQDDELSDSEKFQLELDMSTKEHLAEQRDKVTKKLARMSQQKPWAESMMYLMQLPGFGVITGMTVLGAIGDITRFKDFKKLSSYSGLIPGVEQSGVKNRGKKRCPEPVEGITKEGRKDLRCLHLAAGTGGPW

SEQ ID NO: 509363 - protein, 351 aa, unidentified
MTVYVGMDVHRKRSQVAVVDDTGAAQRNRNVANDPAKLVPILGVLPPGTPVAFEAAYGWGWLVELLEELELEPHLVHPSRCKAIASARLKNDKVDAATLAQLLRADLLPEAWIAPQATRDLRALLRHRAGLVRLATSLKNRVHAVLADRGIGERSSLWTAPGRAWLAGLELPPTPRGIIQDCCGLLDALATPIARLEGEIAVLARPDPRVQALQALPGIGKLTAMTLVAEIGDISRFPTARKLCAWAGLTPQVRNSDRKVRHGHITKQGSPWVRWILQEAAQTAKRHPMFADSYGQLARRRGRNIATVAVARRLLARSFHILTKLEQASKSEKALPGALASLHEPATRPLS

SEQ ID NO: 509364 - protein, 348 aa, unidentified
MSITMIGLDTAKSVFQLHGIDASGKVQLKRKLRRSELIAFFEKQQPCTVVMEACGAAHHWARVLSGLGHEVKLIAPEAVRPFVKRGKKNDAADAAAICAAASRPDAKFVAAKSLEQQSVLALHSARTLLVKQQTMLANALRGLAAEFGLIAPKGMNKLEDLNALVEADEAFPEQVRQVFTGLLGHCRATADRVAALEAEIVAHARRDDAARRLATIPGIGPITASLVAATVGDGIVAFKSARHFAAWLGLVPRQHSTGGRIRLGRITKTGSREIRRLLVLGATSMVYRAAQWNSVAGAWTRGILERRPVRLATVALANKMARIAWALMTRKEVYQAKGRVAAAAEAAA

SEQ ID NO: 509365 - protein, 347 aa, unidentified
MDITTIGIDLAKLVFQVHAVNAHGKVVLKKQLKRNQMAEYFVNLKPCLIGMEACGSAHHWARKLQSYGHTVKLMPPQYVKPYVKTNKNDAADAEAICEAVARPNMHFVPIKTLEQQGILTIHRIRQGYVKARTAQANQIRGLLAEFGIEIPLGIGYITKRVPELIEDASNDLPGIVRIEIQELLEHFKHLEERVNDCEKKIVCWHRKDGTSKKLEAIPGIGPITASALVASIGDAKHFKNGRQVAAWIGLVPKQHSSGGKQTLLGISKRGDSYLRTLLIHGARAVIHHSVGKIKPTGTQSWVNQLAARKNKNIAAVALANKNARIVWALLNHDRDYQDNHKTLRVAA

SEQ ID NO: 509366 - protein, 344 aa, unidentified
MTYYAALDVGIRSLALCIIDDDGEVRLERNLPSEVDDVVACLRGFGEGIEAVGFEAGTLTQWLTYGLRAARFRPVVMEARHVKAALGAMRNKTDRNDAHGIAQILRSGWYREVHVKSLESHYVRTLLASRKALLRKCIDLENEVRGLLKVFGIKLRKGLRHGAFDKAAREPIEANAALAHALIPLLDVRLELHRAFLELDRRVKALAHRDEVCLLLMTTPGVGHITALTFRAAVDDPRRFKRSKNVAAHFGLTPRRHQSGERDTPGHISKAGDTEVRSALYAAANIILTRSAKWSSLKAWGVRLARSKGRKRALVAIARKLAVILHRMWIDGTPFSFTEAEAAS

SEQ ID NO: 509367 - protein, 341 aa, unidentified
MKVMAGIDLHSNNAMCGLMDMQGKRLAHRKVGCKLEEVLEVFEPYRKRIDTVAVESTYNWYWLVDGLMDQGYKVALANPAQIDQYDGLKHTDDKSDVFFLTELLRLGILPTGYIYDRQTRPVRDLLRRRLNLVRQRTALILSFKNLHVRNTGTDLGLSRVKSLGVLEGKNLFEHPCDRLIAEEQLTVMRQLDRSIDRIEKAVLKVVKELPCYRRLQTIPGIGTILGLTITLETGEIKRFASAGDYASYCRCVKSQRWSNQKSKGKNNRKCGNKYLAWAFVEAANGALRSDGQCRKFYERKKAQRNGIVGIKALACKLSKAAWHIMSRGVDFEPERVFGGRT

SEQ ID NO: 509368 - protein, 351 aa, unidentified
MVVVGADVHKRTHTFVAVDEVGKQLGTLTVSADGKGHEKALRWAHREFGAALTWGIEDCRHLSARLEIDLLTAGESVVRVPPKLMAQVRASARTRGKSDPIDALAVARAVLREPDLPVASHDEDSRALKLLVDRREDLVAERIRMINRLRWHVHRLNPAKDPAPKALRSARNREQLATWLGPLSGIDAEIAREVLADIEQITPKIDTLERRIEAIVTQLAPSLVSMPGCGPLTAAKIVGETAGVTRFRSEACFAQHAGVAPIPVWSGNTAGRVRMTRAGNRQLNAALHRIAVTQIRVSDSLGKAYYDKRLAAGDSKTEALRCLKRRLARAVFRHLHTDQASHARTCIPAAA

SEQ ID NO: 509369 - protein, 370 aa, unidentified
MKTTNKYVGLDVHKDTTVIAVAEGDRAGEVRLYGTISSDLHALEKALRKIGGEGVTLHVVYEAGPTGYVLYRRLVQLEISCIVVAPTKTPQAKGVRQKTDRRDAEQLARLHRAGELSAIHVPDAVDESIRDLTRARADAVHDLTRAKQRLKSFLLRQGYRYQGKANWSDAHQRYLRELVLPLPALKAVLEEYLLAIDQAMQRVTRLDDLIAAQVPQWRMYPAVQAVMCLRGFQLTAAAVLVAELGDVRRFTHPRHVMAFLGLVPHEHTTGTSRKLGGITKAGNAHARWILTEAVQHAFLVPKVSSHLALRQQGQPTAYRELSWKIQTRLYKRSRHLIGRGVMKAKVTVALARELAGFVWALLTQVPVPAA

SEQ ID NO: 509370 - protein, 349 aa, unidentified
MGEVSTIGVDIAKSVFQIHGVDADGAVVIRRRVGRAKVHEFFADLPPCLVGMEACATAHQWARELKKLGHDAQLMPPTYVKAYVKRGKNDAADAAAICEAVTRPSMRFVPIKSVEQQSALMLHRTRDLLIRQRTQLINALRAHLAELGLVAAKGHEGLQQLVTAVAESGDGRLPGNARFACLSIIAQLHAAQTQINGLDKRIVQAHRANADSKRLEAIPGFGVILSTAVVATMTDSKAFRTGREFAAWIGLVPRQNSTGGKERLGSISKQGDRYLRRLFVLGAISIVRTARTRPDKYPWVTELLGRRPTKVVAVALANKMARIAWAVLAKGETYRAPARSSSAAIAAAA

SEQ ID NO: 509371 - protein, 416 aa, unidentified
MNAAGIDVSSRKSTVAVLRPFGEVVKLPFDIVHSPEGFASLVQQLKSIEGETRIVMEHTGRYYEPVAQILHEAGFYVSAVNPLLIREYGGNSLRRVKTDKADAMKIARYALDNWSELRDYTPMDTIRYDLKTLNRQFQLASKQKTASSNNLIALLEQSFPGVRKCFDSPVRKDGTQKWVDFVHTFWHADCVRKQSLNAFTERYRKWCKRHGYFFKQSNAAQVYELAKSVITLVPKGPVAKVLVQEAASQLTSISRSVETYRAEMNRLASMLPEYPVVMSLYGVGESFGPQLIAEIGDVRRFERKQALVAFAGIDPMPNQSGEKNVRSNKSSKRGSPFLRKTLFNIMMCLLQTAPADEPVFQFLDRKRSEGKPYYVYMTAGANKFLRRYYAKVRDYLATLDDLPPVDMDSTGLPNHQ

SEQ ID NO: 509372 - protein, 409 aa, unidentified
MERQLERCCGLDAHKESIAACVRLGGRTGKAEQYVQTFGTTVAELLVLHDWLAAHGVTHVAMESTGVFWKPVFYALESDFTCLLVNAAHIKQVPGRKTDVQDCVWIAQLLEHGLLRGSFVPPAPIRDLRDLTRYRKALIHDRTRVANRLHKALEEAGIKLASVASDILGVSGRAMLAALVQGTTDPAVLADLARASLRRKLPALRQALANRFRPHHAFVLGQLLAHLDYLEEAITTISTEIERVMAPFAEPLRRLDTIPGINQRTAEVILAEMGPDMSAFPSARHLASWAALCPGQHESAGKHKSGKTRKGNRWLRTALIEAAAGASRAKNSALQARFRRVLRHRGPKKAVVAVAHALLRMVYHVLADGTVYREAGADYYDRHHSQRITRRALQTLERQGYRVTLEPAA

SEQ ID NO: 509373 - protein, 314 aa, unidentified
MNTQGMVAGIDVSKDWLDVALGEESLRVANEAAAMSSLVERLQTVKVELVVMEATGGYETQAASAIAVAGLKLAVVNPRQVRDFAKATGRLAKNDRIDAHVIAAFGQAIEPQITHLPDEQARELQGLLVRRSQLLGMRVQESNRLALMQGAMRKQIKSHIAWLDQAIDEVNTDLTARLRQSPVWREKDELLRSLKGIGPITSGTLMSSLPELGELDRRSIAALVGVAPFNRDSGAFRGRRAIWGGRAHVRHVLYMAAIAAVRSNPVIKPFYERLIARGKPHKVAMVACMRKMLTILNAMMRSNTPWTPSWQGAN

SEQ ID NO: 509374 - protein, 395 aa, unidentified
MRYAGIDIGSRTHVVAIVGPAGEVLVKPTPFGEDAAGYGKLLDLLGSPVELIVALEATGHYGKNLCAFLRHRAYGLAVINPIRTNRFAQENLARAKTDNIDALGIARFARQKAVSPQPPIDTKTTELKELVLFHQRLVQDFTDRVRQLHRLVHLGFPEFPTVVRTLDSLLATTILREYPTAAAFQPSCLRRLARLKYQTHRVGPQRARRLVECARRSVGQHHSPAFQARVRYVTQDLDQLRDKIHGLANDIQRFVRDLPLAGLLTSVPGVGPLTAARIIAEVENPARFRSGAAFAAYVGVVPATRTSGLHRPRRARITPLGNSRLRKALWMPVLAAVRYNPWLRDYYRRLRDTGKPPKVALTAAMRKLAMVIYSVAKNRRPFTQPRPPDPAAGST

SEQ ID NO: 509375 - protein, 370 aa, unidentified
MVRGSGSPTSARYKIPSKSKVAGSRIIHARTVAWTLSPNLASVGSSIVAQGELKMNKDTEIIVGIDISKNKLDIQIQEDGQYFTCGNNIIDIGKLVEKLCGMHPSLIVLEATGGYEKGVVSALVEAKMPVAMVTPSWVRYFAKSSGTLAKTDKIDARMLVRYGRANHPPVVIVRSELQERLSVLMTRRSQVSLALISEKNHLSTTTFPDVKALIEASIENLEQQIMQLEEMIAEIIDQNPKLKNNEKIICSVPGAGKITAAILLADLPELGSLDHKKIAALVGVAPFNRDSGYHRGKRRIKGGRQSIRKVLYMAALTAMKWNPVIKEFYVRLLARGKAKNVAIVACMHKLLTIVNAMVHAQTLWRPVITS

SEQ ID NO: 509376 - protein, 409 aa, unidentified
MNTGTITAVGIDVSKHKSTVSARRPGGEVVLLPFDVEHTAEGLKKLVAKLRQLDGEIRIVMEHTGMYWRPIAMTLKEAGFYVSVVNAILIHNFSDNSIRKVKTDRADAMKIANYGLTFWIDLQEYAGEDENRQLLKIQSRLYERTATTAGMLRNGLISLLDQTFPGANKLFRDDSRNSRGHVKWIDFVLRFWHKECVAALSLATFTDTFQKWCKRTGYKFSASDAERIHAIARNAVATLPKNDSTKLLITQATNSLNAIYDSLQAIRTEMDRLASMLPEYELVMGMEGIGKVTGPQLMAEVGDVRRFSHKGALVAYAGVDASPYQSGSFDSKSCHVSKRGSPHLRRVLFVIMSMTLIRANTANPVFCFMDKKRAEGKHFYVYTVAGSAKFLRIYYAKVKEYLNALEETA

SEQ ID NO: 509377 - protein, 393 aa, unidentified
MICVGIDVAKNKHDCFILNSEGEVLADVFTISNNAEGFGTLLETIRRCTRPEDKIKVGLEATGHYSYNILGFLLDKGLPTYVINPLHTNLYRKSLSLRKTKTDRVDARTIAAMLMSDVDLKSYTDTVYHNEELKSLTRYRFDKVRERAKLKQSISRLVTILFPELEKLVPTLHMASVYALLSEFPSAKQVAEAHLTHLKAVLHDASKGRYGRDMAATLRNAARCSVGSVMPAKSLELQHTIRLIHELDAEIEDIEAAIQSMMDEIQSPITTIPGIGVRMGAMILAEIGDFSRFDSPDKILAYAGMSPSTYQSGQLSLSGAYSHMEKRGSRYLRYALYNATKYVCLWDPTFAAYLAKKRAEGKHYNVALSHATKKLVRLIYALEKSQQPYNTAA

SEQ ID NO: 509378 - protein, 360 aa, unidentified
MGLYVGLDISQKQTTICVVDEQGKVVVQGGSLTRASDIDGWLGNRVDRAQIVRVGLESGNMSSWIYSGLIKLGLTVVVLEAFQAHRFLATQRNKTDKNDARGLAQLTRMGEEFLKLVTVRSQDNQETRALLAMREHLAGQKRDLENHIAGVLKPFGLVVARGNVVPETFRERVIDALCTATDHGVEIRHFVVPPLDLYRNACSQLEVLNKQVGQMAAANPVCRRFMTVPGIGPVTALSFFSAVDFPQRFKHGADVGAYFGLTPRQFQSGETDHMMGISKRGDAMVRRHLVTAATVLLTATRKWCPLKAWGMKIAKRQGLAKARVAVARKLAVLLHSLWIKGEDFQWKAVPATDREGLVPA

SEQ ID NO: 509379 - protein, 343 aa, unidentified
MKHIGMDVHSTTTQISVISDRGREIKRSSVLTQEADLVAFLDGVPGPKQVALEESQMADFVTRIVEPHVTKVIRCLPQHNRLISESEKKCDREDAKVLAELLYLGKLKSVHHAPLGYRQLREGVRAYCIASRDLTRAKNRLKAFYLFNGVHCVGEKVYSQRHRGKWMEKIAQGSGNLKLLQRQYAQMDFYRDNKTEHVRILKELAKRFRQDVRCLKSYPGVGFVGACTFVAYLEDGWRLKNKRRLWQYCGVGMRFHESNARGHRSASRKGNRLVKNAVMTAAASIASRRNADNALSQMWRSGLEAGVEPDRLKRNLARKVAVLVQRSLRFKEEYDDDRVVTTQ

SEQ ID NO: 509380 - protein, 409 aa, unidentified
MDVVYSHVCGLDVHKKTVVACILTPNEKEIRTFSTMTDDLLQMVDWIKRKGCTHAAMESTGSYWKPVYNLLETEQIQTLVVNAQHIKHVPGRKTDVKDAEWIASLLRHGLLQGSFIPPRDQRELRELVRYRRSLIEERAREVNRIQKVLEGANIKLSSVASDILGKSARAMIEALIAGNEDPEALSELALRRLKNKKEDLRRALKGLIGPHQRLMLQTQLRHVDELDALIRQLDEEIKRRMLPFEEDLERLDTIPGVARRTAEQIVAETGTDMSRYPSAAHLCSWAGLAPGNNESAGKRKSGRTTKGNPKLRRALVEAARAAARTKNTYLSSLYHRIAARRGANRAAVAVAHRILVIVYHLLKNKQNYHELGPQYYEERRREQIAKQALRKLQSLGYNVVTIEPVNQTA

SEQ ID NO: 509381 - protein, 325 aa, unidentified
MTPSSLLSSSSFVGIDVAKATLDLARSDAREILTVNNDPDGIRRLVDSLTTTRPARIVLESTGGLEQPILDALLEADLPVALVNPRNVRHFAMGLGILAKSDPIDARVLARFAEKANPRLAEKRSANQVELDALVTCRRQLAQLRSIQMNRRASTTSKTALKTNNDVIRDLGKQIQRLNKKIRTLIESNDDFDSTDKLLRSVPGVGAVVSTTLLAELKELGSTDHRQVSALVGVAPYNHDSGMMKEKRCISGGRASVRSVLYMATLTAIRCNPVIKAFAARLEKSGKAKKVQIVACMRKLLGFLNVMIRDRLAWNQLSVVKALAN

SEQ ID NO: 509382 - protein, 349 aa, unidentified
MSNIITIGMDLGDKFHMAVVFDSDGNELKIVKVTNTKIGISKFFKPYRSAQVAIEACTHSPWISRLLNEMGLIVYVGNPRKLRCIWDSIDKSDAKDARMLGMVCRLEPRLLHPIHHRSKQAQADLTTIKSRDMLVRSRTQLINHVRGIVKANGDRLPKCSTASFANRCSDHISNELWSALSPLFEIITQLNQQIKELEREIEQLSIKKYPETKYLRQVPGVGPITALSYVLYIEDPARFTKSRQVGPFLGLTPRRDQSGEVDKQLSITKAGNKYLRHLLVGCAQYIMGPFGPEGSLRLHGLAIAARGGKNAKKRAAVAVARKLAVLLHRLWITGKEYEPFYNIQNKEAA

SEQ ID NO: 509383 - protein, 387 aa, unidentified
MLLDHPSDGQTAIRTQFGAIFVSLELSRSTWLVTSLSPGNSEKMSKYSVKAGALPELLKLFSELKQKALARSGESYRIVTIQEAGLDGFWLHRALQQEGVESHVVDPASIATPRRRRRAKTDRLDGETLLRSLLAYKRGEPRVCAMVVAPSPEEEDRRRLCRERRTLIAERIVHVNRIKGLLFAQGIFDYVPMRRNRRAALDLLRTGDGRVLPAHLKLQIRRELDRLELLLEQIATVEREQDALLAASRPAGGTERSNPVAMLLDLKSLGPNFAAALWTEAFWRQFANRRQIASYAGLAATPWRSGGIEREQGVSKAGNPRLRTMMIQLAWLWIRHQPQSALTQWFNANSPRGRKRTIVALARKLLVALWKYVTAGVVIEGAVMKSA

SEQ ID NO: 509384 - protein, 408 aa, unidentified
MFLVSHLATSIDKRKNTNAKGWETMQLLYQRCCGIDVHKKMIVACLLSITDQGVQKEIQTFSTMIPDLFRLRDWLHAQECQAVAMESTGVYWKCIWNVLEEGMDLLLCNAQHMRAVPGRKTDVKDAEWIADLLQHGLLRASFVPPRPQRELRDLTRYRSSLAADRTRLVNRIQKTLEDTNIKLASVASEITGKSARAILEAMLAGEQNPEKLADLAQKRMKGKREQLVEALQGTLGAHHRFLLNSQLHQLDFLTGQMREIDQEIAHRLGVQSDPDELEPADVPGSSSVKEQEATLTETSDSSSSACVASNSPPPFSSAQAIRILDEVPGINVRVGAIVVAELGLEMARFPDEDHLASRVGLCPAAKISANKRLSTKIGKGNRWLRQTLIEVANAAARSKGTFLRAYYK

SEQ ID NO: 509385 - protein, 323 aa, unidentified
MSNFVGVDVAKNTFDIATHLPNGKHKTKAKLANNSKGFKEFEAWLNKHAEPAARIVMEATSVYHLELAEFVYNKGYRVCVVNPATTHAYADSELRRIKTDKSDAKLIADFAREKAEKLQQWAPEPKKYRQLKAMVRRLDDLQEMEQMELNRLDVSDEKVKDSINSVLRHIEKEIAETHKVIKKHIDDDPDMRQMRDLIVTIDGIGQKTLERLLAELGDLRKYDDPRKLVAAAGLNPKLQDSGKLKGRTVISRIGSARVRAGLYMPGLVALKHNEPIIAMKNRLKANGKAPKQIICAAMRKLLHFVYAVLKSGQPFDPKFALAR

SEQ ID NO: 509386 - protein, 349 aa, unidentified
MLADELDYVVGVDTHRDEHVLAVVAAARGAVLARRAVGANAGGYSAALRFAEEAAGGARAWAVEGTGSYGAGLARYLASRGETVLEVSRTPRTERRLRGKDDALDAVRTARAALAGEELALPRNGERREALRLLLVARRSAVDVRREALGQLRGVIVTAPDRLREELRVLPTGRLLERCSRLRRSSSAGADELATRLVLRSLARRIDAATREAAELESEILAQVRALAPALLEEPGVGPIVAAQVIVAWSHPGRLRSEAAFARLAGVAPVPASSGRTRRHRLSRGGDRQLNRALHTVVLHRRQHDPATKDYIAKRIAEGKSRRDATRLLKRYLARHLYRLLQNQEPLRA

SEQ ID NO: 509387 - protein, 340 aa, unidentified
MNATTYGLDIAKHVFQMYWVDVQTGEIANRRFRRDELISFLARRPAGRVALEACGSAHWWARKIKALGHEVVLLHPKFIRPFVQTNKTDAADARAIWTAVQQPGMRTVAAKTEEQQAMLGLHRMRSLLIKFRTMQVNQLRGLLYEFGASFRPGRAAGLAEIRTRMAELEDSLPGTMLNSLQDQLKRIDGIEQDIDQLEKQISIWHKREAECQAIAAVPGIGRLTATALVATIGNAKTFKSGREFASFLGLVPRQNGTGGKVWLGGISKRGDPYLRTLLIHGARSVMYHSKSPSAWQRAIQERRPANIVAIALANKMARTAWAILAYGRPYEKDHVSATSL

SEQ ID NO: 509388 - protein, 352 aa, unidentified
MIVIGIDPHKRTHTAVAVEAATGELVDELTVPARQGGHERLLEWSRALSGERRFALEDCRHVSGSLERLLLARGETVVRVPPKLMAGTRRSARERGKSDAIDAAAVARAALREPGLPLARLEGASREIRLLLDHREDLVGERTRIQQRLRWHLHDLDPELEIPAGALDRRVWLQRLSRRLARLERSVQVRICRELVTRCRELARRADELERELASLVSQQAPALLELPGCGVLTAAKLVAETAGVERFGSDAKLALHAGAAPLDASSGHQRRHRLNRSGNRQLNCALHRMAVTQGRWHPPARAYLERKQAEGKSRREALRCLKRHLARTVYNTLRTTTATTHSTALAELCLT

SEQ ID NO: 509389 - protein, 402 aa, unidentified
MRFFVGIDWASQAHAVCVIDDTARIHWQGSVPHTAEGLTDLLARLRRWSPHGPLRIALERPSGLLVDALLDAGLEVVPIHPYALKASRPRYSAAGGKSDPGDAFILADLLRTDGHRLRPLHPPSDETRALRALVRGRDDLVAQRVALANQLRALLERFWPGAAAIFADVDSPIALAFLSRYPTPHSAARLGEKRLAQFLGQHAYCGRRPVAELLARLRRAPASQVGEADAEASGEVVRALVAILTPLVAHLQQLSAAIAAALPQHPDGPLVQSLPRSGAVNAAQILAELGDDRARFSTDDQLAAEAGLAPVTLASGKHHAVVFRWACNKRLRRALTTFADNSRHTSRWAASVYQRARARGCRHQHAIRILARAWARILWRCWHDRTPYDITRHRAAQAIAAA

SEQ ID NO: 509390 - protein, 347 aa, unidentified
MQSITTIGLDIAKSVFQVHGVDAEGSVIVRRQLKRRYVLAFFQKLPPCLVGIEACASSHHWSRELQALGHTVRLMPPAYVKPYVKPYVKRHKNDAADAEAICEAATRPNMRFVATKTPEQQSCLTLHRTRHLFIRQQTSVINAIRAHLAEFGIVAPIGRLGVEQLLGVVSDAGDKRLPDVARACVAALGAQLQRLKVQILEFDRMIRAWHRSSEASRRLDDIPGVGPALATALVASVADPKMFRSGRDFSAWIGLVPKQNSSGGKDRLGNISKRGDRYLRSLFTTGALAVIRYAKIHGTKHRPWLTALLTRRPTKVAAIALANKIARMAWAMMARGERYKEPAALAA

SEQ ID NO: 509391 - protein, 377 aa, unidentified
MHDEELVVIGGVDAHADTHEAAALDQRGALLGTKRFPTTFTGYGDLLDWLRAFGAIELVAIESTGSYAAGLTRYLREHGVAVVEVNQPHAHTRRRRGKSDPIDAEMAARLALAGKATTVPKQTDGIVESIRLLRVARSSAVKARSATMVQLSELIVTAPQELREQLSQRRTIRGKAALCRRLRPNPIELDRPTQAAKLALRSLARRIDALDAEIADFDVQLEQLVRAAAPRTTQLLGISTGHAGQLLVTAGQNIERLRGDAAFAALYGASPIPASSGRTTRHRLNYGGDRDANRALHMIAVCRLRHCDRTRAYAQRRTAEGKTKREIIRCLKRYIAREAYHALRADLADLQAATPPPRHAVAITCGAGFIGRNRRKL

SEQ ID NO: 509392 - protein, 394 aa, unidentified
MEYYIGIDNSSLDHKVQILDDQGNQKVSFTVANTFEGFQKLTTMLADFDDIKIGFELPHGPLVDYLHSLNDTLYSLNPLKIKRYKESTKVSGNKNDAIDARAIADYIRTNTHYTKELLYHSSEIERLKMLSIMHTRLTHDRTRHVNKLHYAVSQYFPLQESLFVDFACTVHLKMIIQYPTCSDLKAASADEIRTFLRNNKYGKAVYSERIIEKIKTYQQHSSPDVEWAYQMEARCLCTIIQTLNDTLHHIEKQMNAIVDSHQLGKYFQSLPGAGIILSCKLLALFGDNKHRFDNYNSVQCLFGTAPKNYQSGIYHKVIMRKACNKSARAVLYQFAFSSLQFSQWAREYYDMQRKKGKTHSVAIRSLSNKWVKIMYKIWKDEILYCDDKKIIPAA

SEQ ID NO: 509393 - protein, 311 aa, unidentified
MTLEETWVGIDVSQDRLDGYVLPQNLSFHHPNTEVGIQALIDPLRPLSPTLVVVEATGGLERQLVSALQSATIPVAIANPRKIKGFAIALGKAKTDKLDAQVIARFAQTVRPKPQPMLSAQVQQLSELVRRRQQLVAMQVAEKNRLSRACEYVQSDIKAHIEQMQQRIDQLNEQIQSLAEQQPDLQRKSVILQSVKGIGKVTAALCLSELPELGNLCEKKIARLVGVAPINHDSGKHKGKRLIMGGRTSVRCGFYMATLVATVHNPVIREFYQRLLANGKQKKVALVACMRKLLVILNAMIRDNKTWQAQP

SEQ ID NO: 509394 - protein, 392 aa, unidentified
MVVSVGIDVSKDKHDCFILNSEGEILSDVFTIPNSLDGFTILLQRIRDCSSSQDNIKVGLEATGHYSYNLLGFLLDNGLPTYVLNPLRTNLYRKSLSLRKTKTDRVDARTIAAMLLSDAGLKPYTDTVYHNEELKSLTRYRFDKVKERAKLKSSVSRLVCILFPELEKLTPTLHMPSVYALLDEFPGAKQIAEANLTHLKAILHNASKGRYNRDKAIDIRESARASIGAVMPAKSLELRHTIRLIRELDAEIEDIEAAIQSIMNEMHSPITTIPGIGTRMGAMILAEVGDFSRFDSPDKLLAYAGMSPSTYQSGQLKNCYPHMEKRGSRYLRYALYNATKYVCLWAPTFAAYLAKKRAEGKHYNIALSHAAKKLVRLIFAMEKSSQPYCSAA

SEQ ID NO: 509395 - protein, 472 aa, unidentified
MIRSVGIDLHQGQHRARCLDERAQPCDSFSFQTTPEGLATLEEHVFRDGANPIIVLEPAGLPWLMVAVYLRSCHPDCRLVKAKTQKVAALRRYLRGPVKSDRLDALTLAKMPFIDPEQMDEIYLPPAEIHALQRLTRQRKRIEQDITGRKVRISAIVDGYLPGVRRTFNDAWSSPIRAFLRSRLNPFIVVRDGEDALHAFLSKNSYHSKWSKAQTRLVFLACQSVAAVCKLSESAGTVNEDFFMDLQDEIARELRMLEADEIESEALARRIAELYQKLHSSDNLRTIPGVGEHTAPIFLATVGDPARFPNQSAFANYEGVVPGARQSSNVEAKGLRMTKAGPSIMRMALYQAGDIGRRWDPQLAAVYYREMVYHGKNHKQAMGAVMSHLGARILAVLKEDRPYELRDPEGKLISKDETRKLILSKYHVSEDIRRERRRRNSKISKARETATYRTNEAAKAPQPVPVQAVSRK

SEQ ID NO: 509396 - protein, 359 aa, unidentified
MNKISMFFVGLDLGDKFSYLTIIDQEGELIEESRLPTTKASFQRRFSTLQPSRVAMEVGTHSRWASHLLTELGHDVLVANARKLRAIYHNPRKDDRADAETLARLARLDPELLSPIHHRSPQAQADLAVLRSRDALIRSRTLLINHARGIVKSSGARLPSCTANCFASKAAPAVPETLQPALFPIFDTISTLSQQIREYDRHIEQLCQDQYPETKLLRKVSGVGPITALAYVLTLEDPKRFIKSRDVGPAIGLVPRRDQSGDHDPQLQITKTGDAYLRRLLVSSAQYILGPFGPDCDLRIWGLKLAERGGKNAKKRAVVGVARKLAVLLHHLWKTGEIYDPCYLARKHDQAPEAIPAAA

SEQ ID NO: 509397 - protein, 343 aa, unidentified
MQSITTIGLDIAKSVFQVHGVDAAGQVVVRRQLRRRHVLAFFEKLPPCLVGIEACASSHHWSRELHALGHAVRLMPPAYVKPYVKRQKNDVTDAEAICEAVTRPSMRFVPTKTSEQQACLMLHRARHLFIRQQTAVINSIRAYLAEFGIIAPVGRRGVERLLEVVADTADHRLPEIARACVAALGDQLRALKAQILKFDRCIIAWHRSNATSRQLDELPGVGPALATALVASVADPKAFRSGRDFSAWIGLVPRQNSSGGKDKLGSISKQGDRYLRSLFTAGALAVIRYAKIYGTRHRPWLTALLARRPTKVAAIALANKLARMAWAMMARNERYKEPAALTA

SEQ ID NO: 509398 - protein, 398 aa, unidentified
MDLPVYYELETNNGNRDYRIQIGGHYMNYNTVYVGMDVHKESFTLCSCKYEDEKASHYQRTPASYKNVLRYLAFLRTIYGEDTRFVCGYEAGCLGYSLYHQLENFNVECVILAPTTMLEQRSKRRIKTDKRDAEIIARSLAQHNYSPVHIPTETDNQTKEFIRMRDDHKAELKKIKQQILSFCLRQGYQYDGSGNWTAKHVKWLRSLKPAGLYKEILDEYLLTYTILTDKLNRLDQRIEELASKEEYKESVSKLTCFLGIKIHTALSVIVEVGDFQRFVSARKFAGYLGLVPGQHSSGDDRNGLGITKAGNTHVRRLLVESAQSYTRGKIGYKSRVLRSRQAGNSPQVINYADRANERLRRRYYKMVLKDGKKYNIAKTAVARELACFIWGMMTDNIY

SEQ ID NO: 509399 - protein, 345 aa, unidentified
MPIVGGLDIHRKQITFDYLDTETGQVRRGQIAPADREHLRAWLARFAGCGDVEFAMEGCAGWRYVAEELAAAGITAHLAEPADTAARRGRKRHAKTDKTDARHLRMLLAEGRLPECWIPPGHILECRALLELYNDLRRERTAWAQRIHAVLFHQGAPALGEGALRTEPGVAGLRAAAAAHLSPAGQLQVATALEVIDALEARLHAVRHQLLDAARHLTGAKVLAARLYGVGPVTALAITCWLAGAGRFSSSRQAVRFAGLDITVSSSDRKGPPGKLSRQGPPVLRWAVYEAGKTHARTSAPDHRYYAAVKDRKNSKRAALSEARKILRQAHHILAELGDDALAAA

SEQ ID NO: 509400 - protein, 376 aa, unidentified
MERIAYIGIDVHKDTNTACLFARKEHEVLLQDIGTMPAGCEYMAKAIRKALKSYGLMDWDVLCGYEAGPTGYGLCKGLQRAGFKCEVMAPSTIRKASGERTKTDRRDARMLALALSTDSYHAVHILDDKDIATREFTRTRNARKGDLKRAKQHLQSFLLRMGRTYPEGGSHWTDRHWRWLGSLSFDDAYLDYSFRSYMQDIKDLEHKISMMDDMIEDIASKDGRYRDRVAKLKCFTGVETHTALSIVCEIGDFDRFPDAKSFSSYIGLVPGQDSSGKRQRYTEMTKTGNARVRTLLVEAAKGIKRASPFNKSKRLVQRQSGQDPDVIAYADRCRRRLKLRMKRLEESSGKNANVATAAAARELACFVWGMMTGNIA

SEQ ID NO: 509401 - protein, 422 aa, unidentified
MSYCPVAGIDVSKRFSDMCILSPDNKIFAQEKIYHDETSINRANALLQKAERLFFSKPVIVMESTSHYHLILFQFFSEHGYDVIVVNPLQSNSMKDFSIRKRKTDRVDAFKLAMMYRTKTLRPSQIPQTATRALRQLCRHRAELLNDVSSYKNRLTALLDQTFPGYDKVFSDVGGVTSCAVLVRFPTPTILLVEEESELVEVIAAASKSGYSFAKKKAGLLISAAQKAQTLGIHSCADETLIVCTIQMLRTLSESVLQIEAAIDNLLAQIKEIRNNVSLLQSIPGIGSHSAALLLGEIGDISLFKKSKQLAAYFGLGPTEQQSGSFRGTKNKLSKRGSPYARAVLHMGVVNSICKRGKDSAANPVLLSYYEKKCKNKPAKVAQAASMHKLVFIIFAVLRDQKPFELKTPEQHAVEQGFVKAA

SEQ ID NO: 509402 - protein, 385 aa, unidentified
MGSQAFIPRDYDVFAGLDVDKKSISATFSDHQGIQKSVRMPYSVEHLVNHARKHYGDKKIAFAYEAGPTGYGLYDGLVTQQYTCLIASPSMIPKAPGQRVKTNRLDSRTLSENLRGGQLKSIHVPTTLYRELRHLTQLRDALVSEAVAMKQRIKSLLLMEGLEFPPAPAGSQWSLIVKNKLRELPCSAAVRFKLDRLLDSLEFSEKQIVKTTAEIRRFCHNDPELSRCIGYLQSLPGIGWIVASQLMARIGDWRQIQNIRQLPAFLGLVPTENSTGERTERGSITRSGDPRLRSKLIQASWSAIRQDAELTEFFRSVCQKHPRPVASRVAIVAVAHKLSVRASVVLMKQRPYEVRQTVQSAPLTQEETVSQGTTRRQAVPGDKNS

SEQ ID NO: 509403 - protein, 429 aa, unidentified
MNSTQNKKIEQVKETTMIVGIDVGSEKHYFRAFNWRGIELTRKPIAFSNSMEGFNSFYNTIVELMQKSELEEALVGIEPTGHYWFDLGQFMGEKSIKFVMVNPHHVHKTKELDDNSPSKNDRKDPRVIAGLVRDGRYFYSYMPTGVYAELRNASNRRFVLVEEQTRAKNRLQKWIAVYFPEYKGIYTHIDAKGGMLVLKKAPTPEEIVRLGVEGIIKIWKDAKLRGNGHKKAMLILAAAMRSIGLKAGLTEARMEIQDLIEDYELQTKRLERVNDLIKGLCQQVRYADKLLEIKGIGITTVAGFIAEVGDITRFDSTKELQKLAGLELVADSSGKHNGKTKISKRGRKRLRYLLFEAAISVVGKNEEFKEIHRYYTTREKNPLKKMQSLIAVACKLIRVFHAILTKGIRYDASKMLKDIRHPGEQLKAA

SEQ ID NO: 509404 - protein, 348 aa, unidentified
MRFYTKTHQHYCGIDLHARKMFLCVLGASGEVLLHRNITASPESFLKAVAPFREGLVVGVECMFAWYWLSDLCSREGIDFVLGHALFMKAVHGGKAKNDKIDSHKIAVLLRGGSFPVAYVYPPAMRATRDLLRRRNHLVRKRAELLAHIQNTAIQYNLPDIDVNLSCEGNRQEADQLFPDLQVRKIVQVDLAMIDAYDDVLKVLERDIEKTARCHNGHALMLLRSIRGIGQILALVMIYEIHDIKRFETIQDFASYCRLVKCSHESAGKKMGTGGAKIGNAHLKWAFSEGAVLFVRHNPSAKKLFDDLVKLHGKGKALAILAHKLARAIYYMLKNNVPFSLERFLATA

SEQ ID NO: 509405 - protein, 338 aa, unidentified
MTVVMGLDQHRAQITADWLDTETGEVSRLRVMPADRDGVRRFLSRFKGQPLEAALEATTGWRFVVEELVAVGAGAHLAEPAEASALKGNKQRAKTDRADARHLRELLMAGRLPESYVAPAHLLDLRARVRLRHSLVDQRGEWQQRIHAVLFHHGHPQKDGLLRTANRAWLERIALPAAAREQVTVALAMIDALDSQSAGITAELRRYARRQGGCRALMGLYGIGELTAVAILAELGDTRRFSSSRQAVRYAGLDITVHQSDQRRSPGHLSRQGPPALRWALYEAAQAARRPGSPDRAYYDQAAERLGGNRACLALARKLLKRSFHVLRELGDQALQPA

SEQ ID NO: 509406 - protein, 316 aa, unidentified
MTAQCVAGIDVSKARLDVFVLPQRLAFECTNDEAGITMLRQKLQGLGVERVVLEATGGLEYCAARALADAELSVERVQPGRIRAFRTVLGKRAKSDPLDAKLAARFAQAMPEEQARSIPNHQAEAIRSLSARQRQLVDLLVQEKTRLKMSRDPFVLESLKITITHLKQERARIEALLESAIEKDAAIARKNALLRTIPGIGPVVATTLVTDLPELGRLNRHEVASLAGLAPHPERSGISRPGDHIGGGRACVRTALYMAAVCAIRCNPGLKTFYKRLVEGGKPRKVAVVAVARKLIVLANTLIRTDAPWNPAFGIG

SEQ ID NO: 509407 - protein, 386 aa, unidentified
MIIIGVDPHKRMHVASAIDPATNRQVTALQVEASLAGYRRLLRWAGGFGERSWAVENAHGLGRHLAQWLLARGEAVEDVASTATARVRELSRGGRRKNDVIDAAAAASVAALRGDANPVLAEDITTVLGLLDERRSNVTTQRTRLVNQLHAVFRDLVPGGAPKGLTAAAASRLLAGIRPAGPVEAARKQLARDLVAEIRDADRRLKLLKAQIAETVAETGSHLIEVDGVGPIVSGRLLARTHKMSRFPTAAAFASYAGVAPVEVSSADRVRHRLSRGGDRQLNLALHVVAVNQIRMPGSTGRAYYDTKIAAGKTEKEARRCLKRRLADHIWRLMIRDEAGEAAGPGGHQGTTLQSSAAGSTPTTSSSDKSLPEPADSDSTTRQPAA

SEQ ID NO: 509408 - protein, 342 aa, unidentified
MSFYCGIDLGARESQICVIDKRVKKVLEEKVPNKLEHIKQLLTPYRAELEIVVESTFNWYWLVDGLQAAGFKVVLAHTLGLHMITAAKVKTDRRDAFALAKLLLAGMIPRAYIYPAETRPVRDLLRRRGWLVQVRAGEYGSLRRLLLRQGILSRQQQEIKQAEEADLEKWFTHELVRLHASQELERISLYSQQIETLEKTILEQAKKEWAFEQLQQLPGIGPIIALTIYYEMGELERFATAKDFSSYCRVVPGVAQSGQMTRRGRGSKQGNPYLKWALSQAAVHAVRCYPGVRRYYERQLQRHRGRARQMVVYNIIAHKLAQAIYHVLKERSEYREELLFGR

SEQ ID NO: 509409 - protein, 408 aa, unidentified
MDSVFQFFAGIDWGSDKHRVCLIGRDGQIMAERWIEHSGDSLAELAAWLRQHTSDSPSLLAAAIEIPRGAIVETLLEHGFTVFSINPKQLDRFRDRYSPAGAKDDRRDAFVLADALRTDMHCFRSVKLDEPTMIRLRELSRLDDELAQEQNRAVNRLREQFHRFFPQLLQLSEGADEPWLWALFELAPSPLGAARLTEAKVARLLQQHRIRRLTAAQVRAVLKTKPLTLAPGAAEAAAEHALLLLPRLWLLHQQRADLGRRINAVLDQLATPAEDKHEHRDAAILLSLPGLGRKIAATMLSEASQAIADRDYHALRCYSGAAPITRQSGKKKIVLMRRGINQRLRNALYHWARVSVVFDPQSKKRYAAMRACGHSHGRALRGMADRWLKTLTSMLTTRTLYDAQRRAA

SEQ ID NO: 509410 - protein, 468 aa, unidentified
MKREAYRAVDVKQVFVESLVADKAGVGAVVGLDVAKNDFLATVRWSDNSFERPWRVKNPEEVPDVIHRLQRLAEGRPLVIAMESTGTYGDALRQALTDAKLTVHRVSGKAVHDYAEIFDGVPSQHDGKDAAMVAELAAMGKSSLWPYKSPTEFDQELRYWVERMDIQQRIEMLWLGRLEALLARHWPEATRYLELNSETLLQILAEYGGPTALVADADAAKRLKGWGGFVLKSDKIERFLHASASSVGVRQTAVDRRRIEECAQAALSAKHEVQEAAQTLEKLAANHAIIARQAAVVGWSTACVLWVYLGDPANYHCAEAYRKAMGLNLKERSSGRYQGQLKITKRGPGAVRRWLYFAAMRLVMKPGVVEWYGVKKGQRPKGGKRALIAVMRKLALGLHAIGVGEEAFDARRLFSSTVGKRSRRGMTQAKKEQRKQRPKVELGLRPRPRDFARHGAVSKGTKRTGLGG

SEQ ID NO: 509411 - protein, 391 aa, unidentified
MVCVGIDVAKDKHDCFIISSEGEILADVFTIPNNAEGFDTLLQAIRRSTRPEDKIKVGLEATGHYSYNLLGFLLDSGLATYVINPLHTNLYRKSLSLRRTKTDRIDARTIAMMLMSDVDLKSYSNTAYHNEELKSLTRYRFDKVKERAKLKSSVARLVNILFPELEKLVSSLHIAVVYALLSNYPGASYIANANTEELAETLCTASKGRYTKSKTAEIQVAAGVSIGSKMPAKSMELKHTIALIRELDKEISEVESAIDKITSQMDSPIFTIPGIGRHMGAMILAEVGDFSNFASADKLLAYAGLSPSTYQSGQLQNCYAHMEKRGSRYLRYALFNAAKYVCLWCPTFSAYLEKKRSEGKHYNVAISHAAKKLVRLIFAMQRSGKAFLADY

SEQ ID NO: 509412 - protein, 421 aa, unidentified
MTEDIEWFVGFDWASQIHVACLLDRNGRVVGERELKHAGAELAEFCDWLIAKTAAPPARIGVAIETPHGPVVEMLLERGFAVFAINPKQLDRFRDRFTVAGAKDDRRDAHVLGDSLRTDRRAFRRLAVDDPTVIELREWSRIADELTQERTRLANRIRQQLWRYYPQMLEVGGELTAENFLALWECAPSPAKAAQIDEARVAEVLKAHNVRRIGPAETLRILRQKPLHVAAGATEAAMAHIKIAAERARLINRQSKEADHKLDALCARLEQPNDGERESEPGQKSEQRDVTILRSLPGVGRTGLATLLVEAPEPLRRRDYQVLRVLSGVAPVTRRSGKTSLVFRRRACNERLREAVYHWARVAMQVDPSSKERYAALRRRGKSHGHALRILGDRLLAMACAMLKSQTPFDPNHRTAPPAAA

SEQ ID NO: 509413 - protein, 356 aa, unidentified
MSSDVKYIGLDVHKEAISIAVLNASGKLVMESIIETKASSILQFLQGLRGELHVTFEEGTWAAWLYDLVKPRVSELVVCNPRRNALLKEGSKSDKVDARKLAELLRAGILRSVYHGENGLRTLKELGRSYQTISKDLQRVMNRIKALFRGWGILCAGTEVYAPCHREEWLNKISQAGVRRRAELFYQHLDGLQILRRNARREFLAESRKHQAVKLLRQIPCIGPIRSAQLIALIQNPHRFRSKRQLWTYSGLAVETHDSGQYRYVNGQLQRSKKPQQLRGLNRNHNHEMKEVFKSTALSASRSAGPFSEFYARLLAKGMKPELARLTLARKIAAVTLTLWKKGARFDPEQLKTQAA

SEQ ID NO: 509414 - protein, 423 aa, unidentified
MKYALVTFLPEVPPGSVCAGIDWASADHAVCVVDMAGRVRDRFTAVHDRAGIARLIARLRKNAAGEVAIERGDGVLVDALLAAGLTVVVIGSRQVKNLRSRYISSGGKDDRFDSFVLADTLRTDRARLRPLVPDSPATIALRAAVRARKDLVAHRVSACNQLRAHLQVAFPGAIGLFSELDSRLSLTFLAAFPGQQAAARLDEQALAAWLATVPRRGNTAPAGVLAARLAAAPRGAAGADTARAAVTAQLAAATAGLAGRIKALEAEIAAQLAAHPDQHIFTSLPRAGILRAARLLAETGDCRARYPDPWSLAGLAGVAPVTRRSGTYISHEFRWNVNRQLRDAICDFADGSRHASPWAATVYAAARDRGKDHPHAVRITARAWVLIIWRCWQDGTGYDPAKHRALQDILTRQAAAGTPPPHR

SEQ ID NO: 509415 - protein, 326 aa, unidentified
MVATLRDERGSIVMRATVPTEAKAILTLVSSAGPRVHVAFEEGTQAQWLHDLIVPHAERVIVCNVRGRSETTNKSDRIDADGLSELLRLGALKAVFHGVPEVLTLKELVRNYTNLVEDSTRVMLRIKAIFRARATRTPGVSVYRPSQRKQFLAKLEGGARVRAASLFAQLDVLLELRPKAKAAMIAAARRQPGWKILRTIPFFGPVRVAEILAIMRTPFRFRTKRNLWPYAGLAVVTRSSADEEFKGGQLRRRNRAPLTRGLNRNHNPILKAVFKGAANAATARPGPLRDYYEASLARGVKDDLAKVTLARKIAAVTLRLWKKGEL

SEQ ID NO: 509416 - protein, 299 aa, unidentified
MEKIVIGIDISSKTLDICIKKSGHYAYEIIENEVKAIRKFLGKFEDQFDEVIISMENTGRYNWYLYEVLETLSLKTYVLNPLHLKKSLGLTRGKDDRIDAKRICDFTEKNERDLVEWKPCSQTMKKIKVLFSERNSKVKLKASLLKQRALYSQLKELKLDNKLMRINKKEVKLLEEHIDFLENEIERLIEADKDLAARKTNIQSIPGVGKVLSWIIIAKTEDFTKVTDPRKMACYAGVVPFGYQSGTSVRHRPKVSHYADKSLKSILHMAAMRAVRMDNDLKEYYERKIKEGKNRRFHR

SEQ ID NO: 509417 - protein, 355 aa, unidentified
MISTKYIGMDVHKESISIAVRNSAGKVVMECVIETKASMILQFIDGLRGDVQVTFEEGTWAAWLYDLLKPHVSKLVVCDPRKNKSMREGNQSDKIDARRLAELLRLDHLTPVYHGEHGLRTLKETVRSYLTITRDLARVKSRVKAIYRSWAIPCTGKQVYARCHRAEWLGKINELGVRRRAEFYYQQLDALRALRQEVRRDLLAESKKQKAWKRLCEIPSIGPIRAAVLLGILQTPHRFRTKRQLWTYGGLAIEMHSSADHRSIDGQLQRSRKNVLVRGLNRNCNHDLKNLFKGAAAVASSKPGPLEQFYAALVAKGMRPEMARLTLARKIATIVLIVWKKGVCFDAQHLKPQTA

SEQ ID NO: 509418 - protein, 344 aa, unidentified
MSTIKVVGIDIAKSVFQVCVWMADGSVAWNRKISRQKLLHTMRQFPPQTLIAMEACSTSHFWGRTLISMGYDVKLIPTQHVKAFTRHQKNDANDALAICETACRPGIHFVPVKTTEQQDIKALRSARQLIVEQRTALANQLRALLAEYGVIIPAGLQRLQQQLPEVLEDGDNTITFALRRLLRLLREDMQMLTERIDALDKELAELSSQQVAYHHLLTIPGVGPLIAAAVVSEVDAAQFSSGRELSAWCGLVPRQHSSGGKQRLSSMTKNGNRNLRTLIIHGARAVMRCVQKRDDSLGRWVKAIELRRGFLKATVALANKLTRIIWRVLTDSVDFSMSRAFAGS

SEQ ID NO: 509419 - protein, 400 aa, unidentified
MRAVFGIDVSKTSSEVAILVNGEKVHGYTILNDAIGFNRLLGDLKTVHNPEIIFEATGVYSRCLQAFLEECGYAYTRLNPLEAKKQLDSLRVRKTDKIDAEKLAKSQLVHNRKPTYVQEEVYQHLRDLSRFYQNMTEDLVRAKNRLHKVLQVTFPELENLLSTPTGEQYWNLVMAFPCKEFVLSLSQSDLYEIIRQSTSKRISEKRIAYLTDKLIKLAKQSFCAVKKTSPMLEEVRYYAQELLRLSERRQVVLNDMVALAQPLPEYDILRSIPGIAETTATSIIGELGDIRRFQSSNQINAFIGIDLRHYESGNFLAKEHITKRGNPYARKILFKCIHNIASASHTNPCHIADFYEKRKRQSTIASTKPHTIASIHRLIRTMYYLITHNKLYDYSLTQNR

SEQ ID NO: 509420 - protein, 413 aa, unidentified
MFYTGIDWEDKGYVVRILSDDGEVFKKHLYYEKKQDDFIKFSKTLDNLSEDKSEILIGIETNHNPIVNFLLKKGYKTYVINPNMMESLRMRHSQSGKKSDSFDAFVIADSLRTDLKNHELVKEQDSKLKQLDIILRQYSSVKDEMHRISEQLSALLKDFYPAFLDLFSTKFCKTALDLLINYPDFESLEALSKVEIKTFLWSKRCYQNKKVEEIYEIAHSTNRINSDEDVFEIRKSIAKKLAIKMKALNDEIVKYENMLEKLSEDDKDVQLFRTLPGAGPIISVGLLSLFGRDRSNYQNAEEVCAISGVVPVTVQSGSYKHNKFRFACNKMYRNILRQFAFSSLSQSKWALTYYKRKRKEGKKNSHALRCLGRLWIKVAFSMWKNNKPYNENDHLASIVKHNFNNELAEKSGK

SEQ ID NO: 509421 - protein, 476 aa, unidentified
MKQRQRSPSKPKLSQGVPKPASLAPREKPVTLSVQHPHAAGIDVHSDMHMVCVPADSDPEPVRRFDANTCDLEAIADWLKQCGVTTVALESTGVYWIPLLELLEARGFEVWLVEPGQLSHCGARPKTDVLDCQWIQRLHSYGLLRPSFRPPESILALRGYWRQRQMQIRYAASHVQHMQKALEQMNVKLTEVVSDIAGLTGRRIITAILAGERDLYKLAALRDPKCKNDLSTIAKALQGTWRPEHLFALQQAYDLYQFHHQQIDQCDAKIQAELPKLPNRAGDKPFTAKPPRRGRKANDLGFDACGPLFKALGVDLTEIEGIDVGTALVILAEIGVDVSRFPTEKHFAAWLGLCPRVYESNKTQKKKGPRKGKNRVAIALRMASQSLGRTMSPLALFYRRIKSRIGGKGAITATAHKLACLVYRMLKYGRDYVKQSMDDYEAKIRQQQERSLRRKALALGYELVLKPAAPQSVSDS

SEQ ID NO: 509422 - protein, 403 aa, unidentified
MNNVAGIDVSKGKSMVSVLRPFGEVVAKPFSIGHTGSELKELADYLKSLDGETRVVMEHTGRYYEPVARFLHDEGVFVSAVNPKLIKDYGNNTLRKVKTDKADSRKIARYGIDNWAELRQHTPMDTIRMQLKTLNRQQSLYTKTKTMMKNNLIALLDQTYPGVNALFDSPVREDGSQKWVDFATTFWHVDCVRNMSLTAFAERYRKWCKRHGYNFSQSKAVEVHAGAQDLIAMLPRDALTKTMVRQAIDALNAVSASLERLKAEMQALAAQLPEYPVVMAMHGVGDSLGPQLMAELGDVTRFTHRNAITAFAGVDPGADQSGTHEAKSTRVSKSGPPELRRALFLVMDCLLKTMPQDDPVYRFMDKKRAEGKPYLVYMTAGANKFLRIYYGRVKEYLASLEGN

SEQ ID NO: 509423 - protein, 355 aa, unidentified
MDHYAGLDISLEETSVCIVNGDGKVIRESKVATDPDALMRELNSLRVTYKRVGLEASSLGGWLQLELTNRGFAAIVVEARHMRSSLNAQRNKTDRNDARGIAQMMRMGWFRAVHVKSAEAQRLRLLLANRRLLKRKMIDIENHIRGALRAFGLRMGTVARGGFEARVHELTEESDGAMKTFVFTMLEVWKAMRVGYNALHKSLIAVVAADPLCRRFMEIPGVGPIAALSFRAGVDDPLRFTSSRVVGAHFGLTPRKWQSGTIDVDGSISKQGDVDVRTALCEAAASMLLRSKKWTALRAWGLRIGKRSSMKNAMIAVARKLAVIMHRMWIDGTDFVFGKGATVLEKRILIGTIAD

SEQ ID NO: 509424 - protein, 454 aa, unidentified
MSKKTKKTKTGVKKITQFEIIRPHVAGIDVSDNDTMMVAYPINEEEVQIEAFECYTRDLYRISSTLKAHNIESVAMESTGVYWIPLFLLLQEDGFEVYLVNAKHVKNVTGRKEDEQDAEWIQKLHRCGLLSASFQPDNQTRSLRSVVRHRSSIVRTRATYLNRMQKALEQMNLKIHTVISDIDGKSGLAIINAILSGEREPNKLADLCDRRIKASREEIIKSLEGFWLEEHLFELSQCYKLYLFHNEMINECDKEIEAILQKIIKSKNNGVMPKLGKLKRKLNYKNDISTDVTNYLYALNQVDIVSTEGITGISEITALTIYSEIGDNLHRFKDEKHFTSWLGLAPNTKISGGKIISSRVPKKKHYAGQNFRMAALSLSNNKGPLGDYYRRIRSAAGKQKAIVALARKLAVIYYRMMVTKEQYNPQSLINYQEKWRDRKIRNLEKYLAKLKEIA

SEQ ID NO: 509425 - protein, 356 aa, unidentified
MKEDKKNYFSGTDIYIGLDVHKKSWDASIYVENILFKSMSISPPSTKVLADILQKNFPFGNYHVVYEAGFSGFWIYDELTGNGIDCVVVSPADIPMSNKDKNFKTDRNDSKQLAQKLRSGLLKGIHIPEKVQREHRALLRLRNKLVKDRTRIKNYIKSNLMFFGKVIGKDYEDTTSWSKKFIQGLSRVKYLSDQGKDVITELLKMVSVYDESIKGIDAKIKQLSLTSQYKQDVEILCSVPGISTLSAMIMLIEIGDFSRFEDTNKLKSYIGLIPQEHSSGEKEIKTGITRRGNKFLKKIIVESSWVAVRKDKTLLSLYTKLTKRMKGSKAIIVIAGILLNRIRSIMRKREYYKLAA

SEQ ID NO: 509426 - protein, 365 aa, unidentified
MPYYLQERSAYGQRKYIGMDVHKEAIAVAVLNAAGKLVMESIIETKANTILEFLKGLRGELHLTFEEGTWASWLYDLLKPHVKRIVVCNPRRNALLKEGNKSDRVDARKLAELLYTKMLRPVYHRDNGMRALKELARSYVTISKDQARVMTRVKALYRSWGIACSGKQIYTVRHRSSWLEKIEEPGVRRRAEFYYQQLDGLRSVRREVRRELLGESGKHKASKLLRQIPSIGPIRAALLLALVQTPHRFRTKRQLWTYSGFGIETHDSAEYRYVAGQLQRSKKPQQVRGLNRNYNHDLKNLFKSAATNAVAKSGPLQEFYLALVKRGIRPEMARLTLARKIAAITLAVWKKGVCFDAEHLKQQTA

SEQ ID NO: 509427 - protein, 330 aa, unidentified
MKNEFIGIDVSKGTLDVHLYCANRHQSFKNNGVGRQSLIDWVIEKTNLKLVELRFCLEHTGIYSQPLCELLEQMDLTYYLISGLELKRSMGIKRGKNDKVDAKRIAQYAFLRRDDLIAYKMPGQTVITLKKLLGQRSKLVRQRAGHKVSIKEEKQMYPSTQKSFVIESSGAIIGFLTLQIKLIEKEIVSLIKSDQEILKTYENIQTIKGVGPILAATMIAHTNNFKSFQNWRKFACYAGIAPFEHSSGTSYRGRTRISVLGNRDLKTILSSAAATAILHDSQLKIYYNKRLKEGKNKMATLNIIRNKIVSRIFAVTKRQTPYVETFKFAA

SEQ ID NO: 509428 - protein, 410 aa, unidentified
MEVILGCCAGLDVHKDSVEACVRRMSAGGKVEHEVRHWGTTTRELMAMAEWLGSMGVTQVAMESTGVYWKPIFNILEARFEILLANAHHLKNVPGRKTDIRDCQWIAQLLQHGLLKGSFIPPRPQRELRDLTRQRTQLIDEGSRISNRIQKVLEDANVKLGSVASNVVGASGRLMLEAMVAGEDDPARLADLAQRRMRSKIPQLEQALYGKLTEHHRWMLKLLLDQLEATEQFIARLDERIAELARPQQPVLEKLDAIPGVDRRVAEVLMAEIGPDMTPFPSDAHLASWAGISPGNNESAGKKRSGRTTKGSRWLRQALVQAAWAASHKKDSYFQAHARNIMHRRGRKRGLVAVAHSLLTVIYHMLKEGTAYRDLGPQFLDRLRATHLIRFHVRRLRNLGMQVLLTPEAV

SEQ ID NO: 509429 - protein, 309 aa, unidentified
MSPSQFAGIDVSKVRLDVALGDQFFSVEHTEEKLSELVEKLEAGSPQLIVLEASGGLESALVAYLAEAGLPVVVVNPRQVRDFAKATGKLAKTDKIDAKTLSRFAEAIKPQRRPVKDAERRQLSDQVTRRRQIVGMISQEKNRLSRASVQVRSDIEHHIAYLKERLDRSDKDIEKIIKSSPLYQDTAELLCTVPGVGPVTIASFIAFCPELGSLDRRQIAALVGTAPLNRDSGSRSATRCVWGGRKAVRNQLYMATVSAIRCNCKIREFYLRLSAAGKPKVAITAWMRKLLTILNAMVRQRKYWQFNAV

SEQ ID NO: 509430 - protein, 332 aa, unidentified
MAYDFVIGVDVGKYFHHACVLDPQGRQVLSKRINQHEGSLRKLFGQFLADNASVLVIVDQPNNIGRLTVAVAQHMGADVRYLPGLAMRQLSRIHVGNSKTDVRDAYVIAHAGLNLPDSLRSVDRVEEVFTQLKVLNGIDEDLARAYTRLINQMRSALVGTYPAFEHVLRGQMIHRKWILHLLAKYGGPTKIRRIGKTRLAAFARSHKARNPEPVIDAMLAAIHGQTVSIAGAEYAELGVAMSAKDALAKLEHRKEIEAQVLKLIQDIPQTEILLSMPGIGPRSAAQILMTVGDMSDLPDAAHLASYAGLSPRTNQSGTSIMPNSPNRAGNKN

SEQ ID NO: 509431 - protein, 448 aa, unidentified
MSNEIAVTAAVPEPEWAAFVALDWADQKHHWRLAVVGSQKQKQDEGELENTPEAITAWAADLNVRFGGRPIAVCLEQTRGALVYMLLQFPQLILFPVNPIMAARFREAFYPSGSKGDPCDTEVLLDILLHHRDRLRRLKPDTVETRLLQRLVEQRRRMVNERTRQSNRLTACLKLYFPQILKWFEDVTSPLVGALLERWPNLEQLQRAHDGTLRDFFHKQNCRSKERNQERIEAIRQAVPATTDVAVLEGEAMVAHCLVKLIATLRDNIAELDERIAKAFAAHPEKGLFDGLPGAAAVLSPRLLVAFGTDRERFASAHEMECYSGIAPVTEASGQSEWVHFRWACPKFLRQTFHEFAGHSIAKSELARAFYDLQIGKGKEHHAAVRALAFKWIRVLFACWKKRTPYDEQIYLQSLRKRNSPLKALLPPGAGLGWKDVAGFQKLSEDPS

SEQ ID NO: 509432 - protein, 373 aa, unidentified
MPKYSTAFGMDVHLRSTTVCALDADTGEAVTRRFPGNPWGEIAGWMGGFPGPSLAAYESGYPGFAPQRELAGLGVECVVAAVSKIPRSAADSASKNDRNDAARMAKAILAHDISPVWVPSPEVEGIRDLAGAYDGATARLATAKQRLLAFLAKRGFAYGGTTPAGNPRKYWTYDFLRWLDKVRPEDDGGVRTLAALRSEVEAAAEARADLLSEYRAAVDASPIAAEVAALQSIKGCAFALAAAFSAEVGDFTRFRSGRQVTAYFGLAPSQRSSGDSVRLGGISGAGNALVRKLAVEGSWCYAAARHQPKLMPRDTGVPLEIRMHGRKGSERLLRRREEMLARGMPAAKANAATAAELVRWLWALGMMCREGAE

SEQ ID NO: 509433 - protein, 369 aa, unidentified
MPHVTSIGLDVHARSVAAAAFNPFTGEVVHRDFGTDAAEIAEWALGFEEPRACYESGPTGFHMARELRALGLDCAVAAVSKMQRPAADARRKNDRRDAEFIARMLATHNIVEVPLPDAAVEAARDLDRALDDATVEYRRARQRLNMFLIRLGYVWDERNADGTRKKAWTRAHWRWISEIRLEGPQRDALEYYVTAARCAESDRRQLERRVVALAGADRWRPAVEALSCIKGIDTLTAFRLAAEAGSFSRFRSAPAFASWCGLTPSEHSSGESERRGGITKAGNALARTALIESAWHYSMCSPRPKAPAPGTDVPTAVRSRADDCTARLHRRREALARAGKPACKANAAVARELACWVWEIGCRSEGTIL

SEQ ID NO: 509434 - protein, 341 aa, unidentified
MLYSGIDLHKRSLVIHTLDADGTTTREAQLKSDRGAVLAYFGTLAGPHRAVVECVQSWYWLRDLLGPTGVDLRLAHAKYVKAISYAKVKTDRVDARMLAQLLRTGLVPEAHMIGAEHRETRDLLRSRLQLVTRAVRCRHAVGSLLEKYNVPTPEELPELARMQAALQEEQRTLIRTHVRRVEAVLKTRLLPTPEVQRLVWIPGIGKLSAYALVLEIDTISRFPTVRHFHSYCRLVPGADNSAGKVRHKRSRDGNRYLKQVFHTAAIRAAQYHPEIRQEYRRLSRRKGKIVARALIAKELASIVYWVLRKQEAFNGKFRGHVLTAKPAVWPRLASPESLTDA

SEQ ID NO: 509435 - protein, 387 aa, unidentified
MTKITSWPSPAAVDYDTTLILSVETSNKNWVLAAHVPGLGQVKAEQTIEPSADALSKAIEGYRRRATANGAAVDRVNVVYEAGYGGVWLARWLDGQGVEVHVVQPSSVPVERRKRRAKSDKIDADLLLRTLLAWLRGDPRVCAMVRVPDEAEEDARRPAREREEFVRERISLTNRIGATLATLGVDDYNPLRRDRRAKLETLRTPLGKSLPEQAKAKIVRILERLELVLGQIAAIERQRDAVLEDETPGREEGMIQRLAGLRGIGAQSATVLVYEAFIRPFASGKALGSYAGLTGAPFNSGGCEREQGVSKSGNRRLRGAMGELAWLWLRYQPESVLAKWFRERLAGANGRMKKILLVALARKLLIALWRYVTHGVVPEGAVFLSAA

SEQ ID NO: 509436 - protein, 416 aa, unidentified
MKIVRPICCGMDVHKNIIVATIGITNKKTRITEYIQETFSTLNPDLLNLKQWLINHKCFDACMESTGKYWIPIFNILEDEINIYLTHPKYVKAIKGKKTDKKDSKWICDLFKHDLIKFSFIPPKEIRALREISRYRYKLVGMRSSERNRYQNCMTVSNIGIGSVFSDPFGKSAQAIMKEVLESDIIEDEKILKCIHGSCKNKDKILDSIKHCNIETDQRFKMNESMTHIEELQVHIDNCEIEIMKRAAPMFNQFMHITQLPGISTLSAILIISEIGVDMKQFESDKQLTCWAGLAPANNESANKKKSVRISKAGQYLKPLLVQCALGAIKDKEGYFGIKYSRIKKRRGHKKAIIAIARMMLVSIYHMILTGETFNPSDYESFRNPKPPIKQQDLTEESAIEFLKKSGFDVSKLTKQ

SEQ ID NO: 509437 - protein, 437 aa, unidentified
MAKLMRFAKTVAVTLAATIRNCFLKREELPPGAVIIAFDPHQHQHRAVAGQVGGDLLEKPFTVYNSRQGFDFLLKKIARYLSQTGATEVYLVFEPTADFFRAFGYLLEDLGYHVHLVNSNQVASMRQALFHNGDKTDDIDAFVILELAVQGYSFQARLHREEFRNLHKAGRERHDLRAKQSALQMQITALVQEVFPELRQAFKNLFGLTCLALLATTPLPAQIVALGEDELTERIRAASNRRLGRNKALQLLELARLSIGVTAANAAVGARLQRLIVQWRCLQQQLQQVEAEMETYLPDAAQPLLRIQGLSTVLVATLLGEIGDWTFFANATQLVKLAGMSPQRWASGDHQKAPHLSRKGQPLLQYTVYLCALSLVKHNPAFRAYYQSLGQRGKPKMVALCAVGRKFLHVVFEMLKHGTEFDPHLVGAGQNQPTPAD

SEQ ID NO: 509438 - protein, 400 aa, unidentified
MNAVGIDVSKGKSTVAVIQPFGVVIAEPFDVLHTDSGLKELVNFIKSLSGETKVVMEYTGTYYEPTANALHNAGIFVSVVNPLMIDDYDTNRVRKVKTDRIDALKIASFALDKWMKLREYTPVETVRKTLQIMNRHCIKLNKILVMQKNSLIALLDCCFPNANTLFTSPRRESDGHEKWVDFVLKFPHVDSVAKLSLSAFKTKYQSWCKKDHYNYSESKAEQIHAYARTLVSTLPMTDAVKKMVSDSAKLLNSTLEALGTLHSEMDSLASQLPEYETVMNLFAVGKVTCSQLIAEIGDVTKLKSGKSLVALAGIDPPPNQSGKEDKKSRSISKRGSPALRKTLFLIMTVYLQRQPADEPVYQFLDKKRTEGKPYKVYMIAAARKFLRIYYARVKEVMPVQ

SEQ ID NO: 509439 - protein, 340 aa, unidentified
MINNFLGIDISKDRFDVSLSFISNKGKRETRKRSFKNNDHGFQGLLSFLQKHNVEQVKACMEATGCYSEALAEFLHNTGHFVSVVNPACIRFYAKSKLIRQKNDQTDAEIIADYCQRQEPIRWAPPSPELKKLKHLYRCTAALKDELTLVNNHLEKKERLPKEVANAWEDLAMNIKQKIERIKNSLRELLNKHKELLENFQLLLTIPGIGEESAVAILTEVPNIKAFKDARQLAAYAGAIPRNITSGTSVHAKPRLSKSGSRTLCKAMCFPAIVAKNHNPTIMTFCKRLKEKGKHNMAIVGAAMRKLLHIVFGVLRSKKAFDPDHIKNYRARSLAESLVL

SEQ ID NO: 509440 - protein, 415 aa, unidentified
MALKIVYKICCGIDVHKTFVVACIASTNDKGVTSYESHRFSTYTSGLKTLLQWLLDRNCKDVCMESTGKYWIPVYNILEKDCSIVLAHPKYVKAIRGKKTDKKDAKWIADLFKHDLVAGSFMPPADIRQLRDLMRYRFKLTCFKSSEKNRLQNCLTVSNIQLGNVVSDTFGKSAQAILDKLLENPADTSFDLEPLVYKSLKKKLPELRDAIDGYITPEQAGKLKVIKAHYENLESRKAELEELILALAAPYQQELAILQTAPGISSPFTAIGIISEIGTNMEAFPSAKYLCSWAGLTPTNNESAGKKKSVRVSKAGCYIKPLLVQCANAVVKSTKHPEMRNRYLRLKKRRGHKKAIIAIARMLLTALYHMLKNGENYNAELYQKSDLLPVDREITVEQALMIARNQGYKIKSATA

SEQ ID NO: 509441 - protein, 354 aa, unidentified
MNIKYIGMDVHKETISIAVMNGDGKLVMESIIETKASTILQCIQGLHGDLHVTFEEGTWAAWLYDLLKPHVTELIVCDPRKNALLKEGNKSDKIDAGKLADLLRGGYLRSVYHGENGLRTLKELARSYLTISKDLTRVMNRVKALYRSWGILCGGQQVYAPRHRAEWLNKIGEAGVRRRAEFFYQQLDALRALRQAVRRDLLAESRKQSATKLLRQIPSIGPIRAALLIALIQTPHRFRTKRQLWTYSGLAIETRDSAQYRYVAGQLQRSKKPQQLRGLNENHNHDMKAIFKSAATMASSREGAFQAFYQGLLRKGMEPAMARLTLARKIAAITLILWKKGAHFDAEQLKPQAA

SEQ ID NO: 509442 - protein, 359 aa, unidentified
MLCVGIDWATGSHTVTFMTRPGEVLKSLIIANTLKGFLALLDAIHRQMGKDKPAPTPGDVLFIIEDRNQRLVDFLLAQDFAGYLMEPNRMTGYRLRYRSSGNKTDPDDAFIMADVLFRNRDQLPTINPMNAAVQTLKTLLVDREGFVRDQTRLTNRLTACLRQYYPEALELFKDIAGKTALAFLAAYPESVVARQLSRAQIRQFLAEHHCNRSKQLERMVAVLAREPIAVPAAVIATKRRLALHIIQQLQAVQATVAEYDTEIQRIGAESEEVRRFRGLPGAGPQIAGGLYTLMGDDRTRFRCATAVQSFVGTAPRTIQSGKMRAVCFRFGCNRFYRTLAQQMALHKKVLLVLILQTLQ

SEQ ID NO: 509443 - protein, 362 aa, unidentified
MVHIIVVSLKKGNRMREVKEKNRKKTSSIVNVYSGYDHYIAVDWSQENMALARISKSRPNKVRVSQHLSNYKELQQMLGSIKGKRIVVLEESSPAQWLYLQLYDYAEKIVVCDPYRNRLLSEGPKTDPIDARKLCLLLYSGMIKEIYHSHAKVYELRKYVSSYIDLVKMGVRVKNQRTGFLSQEGKSKTMSDKIESECTSFVLDIQTEQISLYEEQKEKYEVLFDKLCKENKTLKCLCTIPGIAAISAVKILAMMVEAKRFPNAKHYLAYCGLVSHIIESGGKVYGHRRPRYSRVLKEVYKTAANSVINGNGPLRKTNDLYLDNGMSEHNARHALARYIARISFGIVKTETIFKAYKETESK

SEQ ID NO: 509444 - protein, 425 aa, unidentified
MENSRRIDRLRQTKISIRGSDRHLIVGIDIAKNKHYAFLGNANGKSYLRKFVFENTIEGLNALLEKAEAIQKKNKLTEIVFGVESTANYHRPVAESLIKRGYTVVLVSSVAIKRNRELLDGRWDKNDKKDAANIADLIAQGKCLYYDNPGTEIKTIRTLLSLKRKLVKQKHAQKMRIRGQIIAPYFPEMDSFFDHIEEPCLAAINVCLDPKKLSEVDYPLFFKWVTAKPKNITQQKRIRDLWEVAKHSIGCEVTEAVQFEASVLVDSLKRTKTLLEKIEQELKKECSRFSSYGYLLSIPGFGPAIATMVLGAIGDPHRFENGRQVLKLAGLDLSANRSGQSSPFAKAKISKKGKTELRYALYQAAFTASTRHKLMKSWFQSKIENRQNEKGIAMKTRIKLSAKLLIIAWTMMKRQEPFDLANFDL

SEQ ID NO: 509445 - protein, 414 aa, unidentified
MSTQKIIPKRYIGLDVHKYYLIALGVDADLHVVLPAQRVEFSRLEAWMKKTLNQQDAIALEMTTNTWGLYDEFSAHVMSVTVVHPPHLALITRSQVMTDKIAASILARLLAKDLLVGIWVPPVEVRELRALVAQRSKLTRLSTQAKNRLHAILQRHHLAPPEGNPFHPAQREWWNALPLGKLEKVNLQSDLETLRFAEDQLVRITSTMKELAAKDERVIRLIQLPGFGITTALTLIAAIGEITRFEDAKHLVGYAGLGARIHDSGLTTRTGKITKAGRKDMRAVLVEAAQVAANTHPHWRSELKRLEPRLGRNKSIVAIARKLLVAVWHVLSEQATDHFAEPDIVGRKLLKFAYEIGKGNRPVGQSAAQFVRQGLDALHLGSDLTSIPWGSKKLIRLPSSALAENQRSDVPNTK

SEQ ID NO: 509446 - protein, 317 aa, unidentified
MSFVGIDVSKLQLDIAVRPDNKRWSVANAEADIAKVIEAFNGLSPQVIVVEATGGMEMPLVAALSQACLPVVVVNPRQVRDFAKAVGRMAKTDRIDAEILAHFGEAVKPDVRWLKDEDAQMLTALVTRRRQVIEMLTAEKNRLGISPKVIHKDIQKHIEWLQRRLEDMNRHLDSAIRKSPVWREKDDLLRSVPGVGQVLSVSLITGLPELGSLSRRQIAALVGVAPLNRDSGLFRGKRVVWGGRSYIRAVLYMATLSASRFNPTISLFYRRLIEAGKKPKVALTACMRKLLVILNAIVKNRIPWQADYSTCPILKNA

SEQ ID NO: 509447 - protein, 349 aa, unidentified
MIIIGVDFHPEFQQIAGVDTDTGELQEQRLTHREEAERFYRSLSSAGQQIRVGMEASGHGRWFERFLAELQIELWMGDAAAIQRKRVRKQKTDRQDAQLILKLMLKDDFPRIWVPSWENRDLRQLLWHRHRMVQARSRVMNQLQAVALNEGLRCKKRLWRTKRPQLESFPLAPWASRRRHDLLELLDRWNPVIAELSQAVEQQVEKCPEAQRLATHPGVGPLTAMAFVLIIGQAERFQCGKQVASYLGLVPLEDSSGNQRRLGHITKQGSSMLRFLLVEAAQVTVRSIPEWRSQYFHLVMRRGRKIAKVAMARRLAVRLYWMMRQGTEYQKSNKFGSYVGQPGHRHGVR

SEQ ID NO: 509448 - protein, 346 aa, unidentified
MKNITTVGVDLAKEVIQVCVVTDNKVISNTEMTPQEFRCFLTKTKSCIIVFEACGTSNYWKQVSLSEGHDARLISAKLVSQIRQNQKTDRNDALAIVQASQLTGVRFIQGKQFSQQELQSISRMRELAIKQKTATSNQLGALLLEFNIRISNRNGGINGVVQATLEDAENNFSSEFREALYETWQGYLALVTRIAKYDKFLNMSVEKIPACKKLMALEGVAIINAMNLYITLACSEDNVFSSAKNASASLGVTPIQYSSGGQIKLGGIGKRVKNALVRSNLISGAMSVVKEVSKREPRTTKEKWLKALIERRGNKCAAVALANKTVRTAFAMLRDGTEYHAQALTD

SEQ ID NO: 509449 - protein, 388 aa, unidentified
MNANTLQSVQSNDTGLDNTVYFIGQDLHCNNVYVTVMVNQVREDGTNYGKVVASRRITLRKGQKEYIDFMSRFCEGKQHVAVVESTYNVYWMNDLFEERGWNLLIADPSTVSRDKTKACNDKTDATFLADTLRNGSCHVTRLLPSEVRYPRDLVRTRQTLIQQRARAKTIIKNLWMNIKGYPLTTKEMNQFLDEYVETHEVNEAFGGKYRSGPKARFYFEEIIFLNKEIEILEEEIKELVPLKGDVLRLMREMKGVGEVCSRILITEIGDIRRFGSAGSFVSYCRLAPTAKLSNGKSKGMGNARNGNAYLSWCMTEVANLMVRYNEQARKCYERLLKHDSQHLRVKAIRSVAAKIARALWHVLSKGVCFDVARCFGTGVKKFSRKIAI

SEQ ID NO: 509450 - protein, 413 aa, unidentified
MAEEVRYVHPVCCGIDVHKDILVVCLRRTGTEGGVDAEVREFETVTRGLRALRDWLAAEGCPIVAMESTGVYWRPTYNVLSPAMEVLVANPRDVKQLRGKKTDKTDARLLAELLALGVVRGSFVPPPHIHAMRDLTRLRTSLVQVRTGHKNRVYKVLEDGNIKLASVMSDVFGKSGRSMLAALVAGERRPEVLAELARGSLRYKTRELAGALDGSFTDHHAAMVGMSLEEVDLLDAHVGRTELLVDGLLAELRPSIDLLATIPGVSETAARIILSEIGTDMSRFGSAGRLASWVGICPGNNESAGKRRSGRTRKGNKYLRRVLVECAWATRTTPTALGHKCRQLQARIGYKKAVVAIGHKILVIAYHILSEGKPYNEERYGDLHRKQEERLLKSSVRTLESLGYSVNISKKAA

SEQ ID NO: 509451 - protein, 403 aa, unidentified
MVFLGIDWAEAHHDVCLLDEQGKVLGKRRVVDGLEGVRRLHELVAEHAEEPEQVVVGIEIDRGLLVHALVAAGYQLYAINPLAVSRYRERHGTSGAKSDPADAKLLADLVRTDRHNHRPLAGDSELAEAIKVLARTHQNLVWSRQRQVNQLRSLLREFYPAALEAFGTDLAAADAIAILERAPTPYQGRSISQAKITSALRKAGRERNLESKAAEIQTGLRAPQLEAPALLAQAYGRSVASTIRLLRQMNQELAALEQELAARFELHPDTEIYLSLPGLGKVLGARVMAEFGDDRTRFKNPKARKSFAGTAPITKSSGRRKTVLRRLACNHRLLDACYLWAFASLRRSPGAKHYYQRLRNRGQSHPQALRALANRFVGILHGCLDHRELYREELAWPLLQAAA

SEQ ID NO: 509452 - protein, 339 aa, unidentified
MQQDVVTVGVDLAKNVFQVHAIGADGKVLVRRQLRRGEVLKFFSSLPPCLVGMEACASAHHWGRELLALGHDVRLMPPAYVKPYVKRGKTDAADAEAICEAVTRPTMRFVAVKSVDQQAVLMLHKTRDLLVRQRTALINALRAHLSEYGIVSSKGPGGVTALMKLLHEGQEMLPAHARSALHTIGTQLRSLASEVDRLETQILAWHKADDTSRRLATIPGIGPITASAIAAAVPDASLFRSGRQFAAWLGLTPRPHSSGGKERLGGISKQGDGYLRKLLVVGATAVMRMARKDAGRQPWLAQLLERKPVKIATVGLANKTARIAWAVMARKEVYAAAAA

SEQ ID NO: 509453 - protein, 400 aa, unidentified
MDDIDDVGVFLGLDVGKSAHHGHGLTPAGKKVFDKQLPNSEPKLRAVFDKLTAKFGTVLVIVDQPASIGALPLTVARDAGCKVAYLPGLAMRRIADLYPGEAKTDAKDAAVIADAARTMPHTLRSLELTDEITAELTVLVGFDQDLAAEATRTSNRIRGLLTQFHPSLERVLGPRLDHQAVTWLLERYGSPAALRKAGRRRLIEVIRPKAPRMAQRLIDEVFDALDEQTVTVPGTGTLDIVIPSLARSLAAVHEQRRALETQIEALLEAHPLSKVLTSMPGVAVRTAATLLVTVGDGTSFPTAAHLASYAGLAPTTKSSGTSIHGEHAPRGGNRQLKRAMFLSAFAALHDPTSRSYYDRCRTRGKTHTQALLRLARHRISVLFAMLRDGTFYEPRTPRLA

SEQ ID NO: 509454 - protein, 431 aa, unidentified
MANLAVPVPRPHGRRPQGREPVRYYLGVDWADQTHAVWVVEADGSKIAAHTVPHTAEGLSEWGRELAQWRAQGVERWAAIERREGRVVDFLLDHGVAVYPVNPQALDRARDRFRQSGAKDDPFDARGLADFLRTDHAHLPALLPSSEAAQELKLLTEDYQRQIRQPTRLVNQLTNTLQAYDPRALEIAELTTTLAQEFLPAYPTPESLSSLPERTWQRWARTHRLSEARTRALWADLQPPPLPVPAHVVRAKARMMRSLVEQLTPVVAAVAEYRKAIEGFFAHIPTAQWARTLPIGEHGITAPTLWARLGDAPGRWASFRHLQAQAGAVPVTKRSGKQQRVVQFRHACDKALRYVVEHVAFLSLRSSEWARAYYDQQRARRHSHRQALRALGAKWLKIIFVMWERQLPYDERYHLATMTRQQFRERQEKIA

SEQ ID NO: 509455 - protein, 350 aa, unidentified
MAIIGCDLHSRYQVIAMLETETGEVITRRLEHETGEAEAFYAGLEKPTLIGIEATGYTQWFEQMVGELGHELWVGHPAEIRARAVRRQKTDTRDAEHLLDLLLAQRFPRVWVPTPQERDLRQLLKHRHKLVGIQTSVKNQLHFLAMSQGICWKRKLWSAGGRQALEGLRLGPWASRRRQELLETLDHLQPRIAELDAAVKVEAERRPEVVLLMKQKGVGALTALAFVLTLGPVERFANSRKVVSYLGLNPGEDSSGGHQRLGHISKQGNEMMRWLLVEAGNIASQCDAELRRRYLRLRFRRGAKIAKVALARLLAVRMYWTLRQVRAAAPPAHMPGSPESRKVETNPSRL

SEQ ID NO: 509456 - protein, 410 aa, unidentified
MEPIIERCCGLDVHQSKIVACLLTGPANKKAKKQIRAFSAFTRDLAALREWLLAENVTHVGMESTSVYWMGVYAVLEENFQLVVGNAHHIKNVPGRKTDVSDAEWIAELLRHGLIRSSFVPPRPIRDLRDLTRYRRALVDSRSAECNRLIKVLEMANVKLAMVCSEVLGVSGTLMIRQLIQGNTDRRAISQLAKGALRNKKDQLELALDGCLSEHHRRLLEMQLARIDRLDADVEVLDKQIEERLQPYQRQLHLLCQIPGVDCTVAAVIIAELGADMSVFPTERHVAAWAGVSPGNNESAGKRKGGRRRTGNVHLTTALVLAAHCAARQNGSYLKDKYWRLKARRGAKRAAVAVGRKILIAGYHMLKTGRDYRDLGDAFLDSIDETMVCNNLVRRLERLGYHVSIEKKAA

SEQ ID NO: 509457 - protein, 338 aa, unidentified
MQGYKLTIGLDISKSVFQVHGVESTTGEVITKRLRRSKLLEFFEKLQPSLIGMEACASSHHWARALKTLGHEVKLLPPAYVKPYVKRGKNDAIDAEAIYEALTRPTMRFVPVKTAEQQGALAVHKVRSQLVGERTKLINVLRAQMAEFGIVAPKGIWRIGELKAIVNNDADARLPMMGRVALKVVAAQLDVLETQIGKLDRVILDHCRNSEVSRRLAAIPGIGPVTASAFAASIADAKVFKSARHFAAFLGLTPKQNASGLKNRNGRISRMGNSYLRTLLVIGATCMVRQASRNKAPSLVARLLAKNKPVRLVTVALANKMARIIWVLMARSEVYRPA

SEQ ID NO: 509458 - protein, 328 aa, unidentified
MYAGLDVHKNFCQAIVMTERGEVVKEAKIRNGKEEIARFFKRFKKQGISIAMEACYAYEPVYETLESLGIEAKLCHPLKTKAIAYAKVKTDKLDAKVLADLLRSNLLAEAYVPNIEIRKLRSLCRERRKIVAERTRWKNRIRHELVRRGVKPHFRNLWSKQGMLWLSGLGIESVNRALFMISCLNKALGEVDRAIDNLAKNFEEEIEILTSIPGIGKYAACVILAEIASIERFGDAEKLVSYAGLAPGIKQSGDYKKQGSITKQGSSHLRWILVECAHVHVTRFDTGITRFYKRIAARKGKQKAIVAAARKLCVAIYFMLKRKEKFRG

SEQ ID NO: 509459 - protein, 321 aa, unidentified
MKIKNLVGVDTHKNSLACFCNGKFKEFKTNKVGFKQAINWAKSSHWAIEGAYCFGQAFSNFLIKNGCEVYEINPLLTKSWRTALKVASPKNDFGDAKVISIFANMDNMNKVSFETIKLKEKLTTRKALIKQKTQITNHLKMLFYTRGEELPFKALDTQKAINWMLEQDDVIVKTNGKILESIMAGIKSLEVEIEKEMPEPAKALTKMEGISTITACTIYAETKGKLTRKEQFASYCGVAPIDCSSGQTTRRRNNKGGNRVLNSIFYSLSIAQKRYNEKAKAYYEKKLSEGKSPRHARKCLARQLTNIVFKTLKDATEKRKP

SEQ ID NO: 509460 - protein, 344 aa, unidentified
MDHFAGLDVSVKETSVCIVDDTGRIVREVKVGSEPEALLKVLGSPAYRFKQIGLEAGPLSQWLFSALAEAGLPVVCVETRHMRAVLKAQINKTDRNDARGIAQMMRVGLYRPVHVKTLRSQKLRMLLTHRKLLQSKAIAIDNDLRGTLRNFGLKVGMVGAVRFEARIRELVENQSDLAALIEPLLIVRRTLREQVVILHRRLLAIVRDDEVCRRLMTIPGVGPVVSLTYRATVDVPARFRKSKSVGAVFGLTSSKYQSGEVDWSGKISRCGDEMMRVMLYEAAQSMMHSKKWSWLKAWAMQIARRRGMKKAIVALARRLAVIMHRIWVDGTEFRWTREQVAPAE

SEQ ID NO: 509461 - protein, 382 aa, unidentified
MPAYADPTPTPISADTIFLAFELSGTSWLVALHAPDADKVERHRLPAGVAAEVLGLIARTKARVTRRLGTTPRVACCYEAGRDGFWLHRVLEAEGIASHVMDPTSLQVDRRARRAKTDRLDAQALLRALMAWSRGERQVCSMVRPPSPEHEDERRLSRERGTLLKERLRLSNRIKGLCAAQGIYDYEPLGADRRERLARLVTGDGRALPGRLAAEIGRQLDCFELVLRHLAEVEAVRDARAAQAREEGGSKLATLLRLKGIGPELATVLELEVFHRHFANRRDVAAYAGLAPSPYASGGTSREQGISKAGNRRARKALIELAWLWLRHQPESALARWYRDRVGTATGRVKRIAIVALARKLLVAIWRYVETGLVPAEAAVRT

SEQ ID NO: 509462 - protein, 354 aa, unidentified
MKFVAGVDAHKDTHTIVFLNRTGREVKVLTISADRRGYMKALNVARELGGEVVWGLESTGCYANAFARQLLKSGACVYEVPGSFTKRHRQQSSRTGKSDALDAQAIAEAVLRESHRLPRYEIAVEREALRIRYDQRDRLASQRTECINRVRAAAVRLELNLPSCLRSEKGLYEVQRLIKAVKGDLVAQSLVDEVRYAIEDIQQLNDRIAEIEDLLRPLISRLAPELLAMRGVSTVTAAGLIGHAGNLKNCRNADAFAMRAGTAPVSCSSGKHSAVRVNLGGNRKLNSLLHSIAIHQIRADEHPSRVYYERKRGEGKTQRAALRALKRRLSVVVYYRLLCVTARYIPKGGHRAAA

SEQ ID NO: 509463 - protein, 402 aa, unidentified
MNCVGIDVSKGKSMIAVMRPFGEVVVSPFEVRHTANELSELAGLLKSLDGETRVVMESTGNYHAPVAWLLHDAGLYVSVVNAMLVHDYGNNSLRRAKTDKKDAIKLANYGLDHWLTLPRYVPEEDTRLMLKACYRQYQQYSKVQTMLKNNLISLLDTTFPDANRLFTSPPRDDGREKWIDFVATFWHRECVCDLSEKAFAAKYQKWCKKCGYNFSEGKALDIYAAARGHFGVMPKTDTAKLLVEQAISQLRATSSALAALKQEMQSLAASLPEYPVVMEMFGVGPTLGPQLMAEIGDVRRFHSKKALVAFAGIDAPPYQSGQMDVRSRSISKRGSASLRRTLFLVMSVILQHAPMNEPVYQFMNKKRSEGKPYRVYMMASANKFLRIYYASVKSYLDSLEHD

SEQ ID NO: 509464 - protein, 410 aa, unidentified
MQVLFIGDDWAEDHHDVEIQDESGRRLVAARLPEGVEGIAKLHALVARHGAEDLDPVRVVVGIETDRGPWVQALIAAGYQVYGINPKQVARFKERYGTSGAKSDRGDAHALADMVRIDGAQLRPVAGDSEQAQAVRVVARAHQTLIWERTRTFQRLRSTLREYFPGALAAYAGLELTSTDALELLIKAPTADQAAKLTKQQITAVLARHRRHRREQRAAAIQAGLRERQLGVPTPVAAAYAAAVVAHAKVLIALNEQIAALEEQVSEHFLAHPDAEIYLSMPGIGEITGARVLAEFGDDPTRYTSAKARKNYAGTSPITRASGKTHTVQARFARNDRLADALHKQAFSALSSPGTRRYYDKQRARDAGYNPALRQLGNRLVGILHGCLKTRTLYDEATAWSHHATLPSTA

SEQ ID NO: 509465 - protein, 421 aa, unidentified
MKVTYQTCCGVDVHKSFLVATIIKTTAGIEPSYQKKRFSTFNNSILDFKSWLLENECHDVCMESTGKYWVPVFNLLEDQINVTIANPKWVKAVKGNKDDTKDSKWIGDLFRLGLVKSSYIPCRLIRILREYTRYRYKLVSCRSSEKNRYQNALTVCNIALDSVVSDIFGKSSSSIIDYLLEQSGTTINHEEIASKLLKSLKSKEDAVIESIEGYQMTDAQKYRMRLIRAHMDYITAEINDIDKQIESLISSDPDYDKAIRLLTTIPGVKRDSAITIISEIGIDMSQFCNSKRLCCWAGLTPSNNESAGKKKSVRITRAGVYLKPALVQCAHAAVKSDKSPYYKTKYESLVKRRGKKRAVIAIARMILTAIYRMLSTGEVWNPSDLYKIDMPAPLAEKQKAKAIKQAKKLLQKEGLLPPDEP

SEQ ID NO: 509466 - protein, 409 aa, unidentified
MEVFVGVDWSEESHDVCVMDVEGRVVASGKVTNDLAGVARLHDLVGRAFADADDEVEPVVSIGIETDRGLLVQALTTGGYRVHAVNPLSVDRYRDRHRVSGAKSDPGDARVLADMVRTDAHQHRLVAGDSEQVEAIKLIARSHQSAIWSRRRLANQVRSALREFHPAALLVFDDLTHGDAIAVLEIAPTPDLGRTLSKAKIASALRRGGRKLHIDKRAQEIYNALRSEQLAQPATVADAYGSIVRSLVEVIAAHNRQIDELEELLTDHFGQHPDADILCSLPGLGVVTGARVLGEFGDDPDRYATTKDRKNYAGTSPLTVASGTRRVVRARHIRNRRLADALHWWAFNAISRSPGARALYDKRRAAGDTHSGALRVVGNRLVGILHGCLRTRTLYDEDLAWAHRQDLAA

SEQ ID NO: 509467 - protein, 427 aa, unidentified
MQSENIRLEKFRKLKKEVRGSAQYLLIGIDVAKEKHIAFFGTATGKTLVKGLVFENTRQGFAKLLTEAETVKAKNKLSAVVFALEPTANYHKPLGQYLIQHDHEVVLVSGTAVRKNRELLDGRWDKHDLKDAANVADLVSQGKFQYYEHPRIEIRELRGLLSLKRKLKRQEHGLRVRIRNNLLSQYFPEMEPYYNSCERDNLAIIKNCLSPAVIGGMAYADFFKAVVSRKTGLRQDKHLQRIWMLAGQSIGCESDEGTEGEARVVVEQLKSTREAIEQIDEAILKLCGSFSEYEFLISIPGFGPDISARVLAYIGDQYRFEKASQVLKMAGFDLSASRSGKSSQDARPVISKKGKADLRYGLYQAALVASTWNKAFKKYFEEKVRDREKEKGIKTKMRVKLAAKMLVIAWTLMKNKQLFNSDYLTTN

SEQ ID NO: 509468 - protein, 412 aa, unidentified
MNIVYERCAGIDVHKRNVVVCAITPDVQGQRQKEQRTFSTMMPDLLRMRQWFQSLNVTHVAMESTGSFWKPIFNVLEGHMEVLVVNAQHLKAVPGRKTDLKDAAWIADLLQHGLLRPSFVPPAFQRELRELTRYRTSVIEERSRTINRLQKILEDTNIKLSAVASDLMGQSAREMLAALVAGEADPAVLAQLARGKMRAKHDLLVQALQGQFKSHHRFLISEQLAHIDTLDEEIERLSAEIAQRLRPYEAQLKRLETIPGIKRRLAEVILAEIGPDMQRFPSARHLASWAGMCPGNRESAGKRLSGKTRKGSPWLRTALVEAAHAATHCKESYLSAQYHRLVLRRGGKKATIAVGHSLLVIVYHVLADEKDYQELGGNYFDEQDRQAVQKRLVHRLEKLGYEVILAPNSPAA

SEQ ID NO: 509469 - protein, 381 aa, unidentified
MTTTTTRTEHGNTPAGTLFMAFELSDKTWKLGFTTVPGQKPRERNVTARDQKRVLDEIASAKRRLGLPETAPVVSCYEAGREGFWLHRFLEAHGITNRVVDSSAIAVNRRQRRAKSDGLDGRKLLSMLRRYEQGERQVWQVVHVPSVEAEDQRHLHRDLETLKRERGSTTTRIKGLLSSQGIQVTSLTHLPEQLDALRLWDGSPIPPGLRQRVLRVYAHHQFLSEQIAEVEAERRALLQTSTDASIDKIRQLMMLKGIGINGSGLLVMEFFGWREFKNRREVGGLAGFTPTPYQSGESAREQGITKSGNRHVRWMTTELAWSWLRFQPESALSVWFRERFGSGGKRLRRIGMVAVARKLLIALWRFLKTGVLPEGAVLKEA

SEQ ID NO: 509470 - protein, 418 aa, unidentified
MGNNRTQKSRRINSETMIAAVDIGKRFHVGYFRGLNGEERKPFLFGNSARSFNDFWRKACEFSSQHGLKEIIVGFESSGPYAEPFFHYLRKKPVTLVQVNPVHTKRLKELTGNSPNKTDKKDPRVIADVISLNHFLTLVVPEGPAAELRRLTHARERAMKRRTAALNQLQDLVFVIFPEFLEIMKNISTKTAVYLLRNHPTPEDILALGLEPLAVLVKKMSRGKMGRQRAEALFQTAGASVGIQEGRTGILLEIEYLMCQIEADISFIASLEKKMGEHLEEIPYSQSILSFKGIGKVTAAGLIGEVGDFKKFRTASEITKLAGLDLFEISSGKHKGERHISKRGRPLMRKLLFFAAINMVKSNGAMHEPYTRMVQRGMPKVKALTAISRKVLRVVFALARDNSFYSEDHTHCPLKLAA

SEQ ID NO: 509471 - protein, 382 aa, unidentified
MRTVALDLGARRVDFCEITDGGVMERGVVAGLSQLLRRLGPGTPPARVAFEACREGWHVAERLSAWGHEPVMVDTTRVKQLGIGHHGRKNDRIDAEVLATALLAGRIPQAHILSPARQRLRLELAVRRSLVETRAQYVTSIRGMVRARGGLVPSCSTRDFLAKLREITLDQQAQQLVEPLRAALEVLARQIAEMDLRVEQLCEEEPVIRRLMTVPCVGSVVAAAFVSVIDDAGRFRNAHQVESYLGLVPSEDTTGGRRRLGAISKAGNSYLRSLLVEVSWTLLRKKDDDPLTRWARHIVRRRGARIAVVALARRLAGVLWAVWRDGTVYDPQRVGIKSAEGVSRHAHERDFEARALRTAADKAAKRVRSACRTLEEGRTNPR

SEQ ID NO: 509472 - protein, 331 aa, unidentified
MFIGVDYHKKYVVATMMDEAGTIREQKKISNDPGVLTEYARSLPKGSKVALEATEGWYHFYEMIEDICPDITLAHPLKTRAIAEARIKTDKVDSAMLAHLLRANLLPRSYIPPREIRDMREVLRYRASLVSLRTSVKNKVHAVLSKNGIRMEYSDIFGKKALARLGSLSLRPCYTLELAGYVRLGETLNSLIDEGSAIIERQANEDPKARLLLTIPGIGHYSALLIISEIGNIARFPSAKKLCSYAGLVPRIHSSGGKTRYGSITKQGSKWLRWILIELSHHFVKSSERLEKMFDRITRTHGKNTARVAVAREMLKIIYCMLRDDMPFVRK

SEQ ID NO: 509473 - protein, 449 aa, unidentified
MMEPQEIEDEGHERIVERVAAIDVAKASGMVCVRVPHESRPGRRVSRVWEVAATTGAVTGLGDHLACQGIEKVTVESTSDYWRIWFYLLEAAGLEVQLVNAREARNMPGRPKTDKLDSVWLAKCTERGVLRPSFVSPAGIRMLRDYTRLRTDLTQERTRHWSRLEKLLEDALIKVSAVASTMNTKSVRDMIEALIAGERSPRALADLARGRMRAKRAALIEALTGRFDDHHAELARMLLNQIDALSAQIGTLTGRIEGLIGAMPAARGVNADGTTGPGAGTGPGAAVLPALARLDEIPGISLAGAQGILAEIGLDMTRFLTAGHLVSWAKLSPRTIQSGAKNRSGKTGKGNPYLKGILSEAAAAAARTDTFLGERYRRLVKRIGKLKALVAVARSILVIIWHLLSDPAAQFCELGSAYHASRTSTQRKARGHIRQLEALGYTVTLTQAA

SEQ ID NO: 509474 - protein, 370 aa, unidentified
MENRSMSVGLDVHKETIDVSIAEGHRNGEVRHYGVIASDLEPLDKVVRALRAPNRRLHFVYEAGPCGFGIYRHLIKRGEACVVVSPSMVPKRSGDRVKTDRRDSVTLARLHRAGELRAIYVPDDADEAMRDLVRAREDAVGRGTQAKYRLKAFLLRQRRHYPGREGWTRPYRRWLTDLSFPTAPQHITLQEYRDTIDETERRIARLTEQLRHLAPTWRWAPVVAALQALRGVSFITGVALVAELGDLTRFGHPRELMAYPGLVPSEYSSGPSVRRGAITKAGNPHVRRLLAEAAWAYQGIPRIGRQHAYRQEALPKVVCDIAWKAQLRLTTRFRRLLARGKAKPKVATAIARELTGFIWAIAQEVSPASQ

SEQ ID NO: 509475 - protein, 342 aa, unidentified
MESAVTMGLDLGKSVFQVHGVDAGGAVVVQRRLTRGKLLHFFGKQAPCLVGMEACAAAHHWGRELRKLGHTVRLIPPRYVKPYVKRQKNDAADAEAICEAVTRPNMRFVEIKSCEQQGTLVLHRVRLMLMRQRVQLSNAIRGHMAEYGLVAPVGRNGLQRLIAILGNPDDERVPAVARASLAQLVCQFGLLNDQVLENDRRVRASARSTELGCRLMEVPGVGPVLASAMVATVPDPTVFKSGRNLAAWIGLVPRQNSSGGKEKLSGITKQGDRYLRQLLVAGALAVIRYAQRHGTKRPWLVHLLARRTPKIAAVALANKMARMIWAMMMTGERYREPMVAAA

SEQ ID NO: 509476 - protein, 347 aa, unidentified
MNILKQTVGIDVSMDSFEARFGTIDTNQEQSISKSQKFINDLMGFKKFLKWALNNKLSDKLPLTFVMEVTGVYHENLACFLHEKGYQVVIVLPNKIKNYGKSLETKSKTDPIDAMTITRFALERKLTAWNPPEPFIRAIKTLSREYLSLKVMMTDIKNKIHAKESAHYPDKDTIKRKRRLLKELQRQIDEILGQIKILFQSKPELNKKINKVATIKGIGEITVIIILAETNCFEHVTNSNQLTSYAGLDVVLNESGKKKGKTTISKRGNKFIRRALFMPAMSACKYNNKMKETFARLVSKGKNKKAALIAIARKLLVLIYTLWKNDAVFIQDYKQTKPFRLKPALGS

SEQ ID NO: 509477 - protein, 464 aa, unidentified
MTIDTKLWQNRKQRKELARRLRSEDPGLGVVHPHAAGIDVGNSAHYVAVRPDRDPEPVRRFECFTADLHRLADWLQSCGVKTVALQSTGVYWIPLYDILEERGFEVYLVNARHTKNLPGRKSDVQESQWLLKLHTYGLLNHSFRPTSEIRVLRTYWRQRAEHVEGAATCIRRMQKALTQMNLQLANVISDLSGLTGQKIVRAIVAGQRDPYKLAELRDPRIQASPEDIAKSLEGNWRPELVFVLMQEVDMYDTYQQRIAECDQQLQKHLTRFADTVPPQAKEESKKKKGKPSKNTPSFPLRGELQRITGVDLTRIDGIDVMVAQTLVSEVGLDMSRWKTEAHFASWLGLCPDNRISGDKVLSRGTRHVVNRAATALRIAATTLLRSQTYLGAQYRRLRTKLGAPKAITAMAHRLARLVYRMLKYGQQYVDKGAAYYEQRNRHQQIQFLRKKAAQFGLQVTAAHP

SEQ ID NO: 509478 - protein, 316 aa, unidentified
MQTILDLGADVDSRYLVIACAVHSFATQSIDNERHAILAWLGSVPRGSRLGMESTGGYHELLADLAHAAGLQVFVLNAREVRRYAQGIGRRGKTDRVDAAVIARYVAREHAELHAYVPPSKAQRALARLIKRRAKLVVIKGTLTQSLRGLPGVCQELKQVMTRLERLIAQVEVLMQRALQQLPAARQAAQHIATIPGFGTLSSTCLGHSFTRLPYSNSDAVVAHTGFDPRPEDSGKKHGRRRLSKRGPAEQRRLLFNCARSAANTKLWRPYYEAQRAKGLSATAATVILARKMVRVAFAVYKHNQPFDPARIGIHA

SEQ ID NO: 509479 - protein, 418 aa, unidentified
MKRIVQRCAGLDVHKASITACLRIATAKNKDEEPHQEIRKFKTTTQGLLQLRDWLDAFEVELVGMEATGVYWKPLYYMLEDDFECWLLNARHMKNVPGRKTDVKDAAWICQLVEHGLVRPSFVPPKEIRQLRDLTRYRKRQIEERTREVQRLEKVLQDAGIKLSSVATRVLGASGRAMLDALVSGTTDPEVLADLAKGRLRKKIPALREALEGHFSSHHAFMVGRILAHVDYLEESIADLSSQIERVIAPFSKQVELLETIPGVDCRTAETLIAEIGVDMSQFPTAGHLASWAGMCPGNNESGGKRRSGKTTKGSEWLRSALTEAAHAAARTKESYLSARYVGIKGRRGSKKAAVAVGHSILVIAYHIMERKEPYEEFGEEHYRKQRRCSKEAYTKRLVRKLERLGHKVALEPLVGST

SEQ ID NO: 509480 - protein, 336 aa, unidentified
MFFVGIDLHKKTISLCVVNQERRVLDRKMFHCCQPEKIRQYFAELGPFQAVVEATASYEWLWQLLEPHAERLVLAHPKKLRIIAESTRKSDKLDAQVLAEFLALDMIPQAYRPTPRQRQHRVLVRQRCYLRQQITGVKNKLRRILSNYNADRKDLFSAEGLAYLAEVKVAAADRFVLDQLRGLWECLENQLTALDKELRRFARQAPAREQEARAVLESIPMVGDVTVDVVVSEVGDVRRFRSAKRVTAYAGLAPAQRESAGRKKVLGISKEGSRLLRWALVETAWRLVRHSRRWQNAYEQLLKRCGKKRAIVAIARRLLGVMVALLRSGQAYRLTG

SEQ ID NO: 509481 - protein, 420 aa, unidentified
MKSASNIVISTLPDEPPDGVTGGLDWSRDDHAVSVVDARGRELVRRTVEHSAAGLRELVGVLTGAGCKEVAIERPDGPVVDALLAAGLTVVVISPNQVKNLRGRYGSAGNKDDRFDAFVLADTLRTDRPRLRRLVPDSQPTVALRRACRARKDLVAHRVAAANQLRAHLRNVLPGAVGLFADIDSPISLAFLSRFDTQDKLDWLTPARLGAWLARQGYSGKVEPAVLHARLAAAPPGASGTHGTAQAPITAALVAVLQTLRTQIAALAASIDTQLTAHPDAHIFTSLPRAGRIRAARLLAEIGDCRARFPTPQSLTCLAGVAPSTRQSGKNRSVGFRWACDKQLRDAVCDFAGDSRRASPWAEHLYQQARARGHDHPHAVRILARAWLDVIWRCWHDSVPYDPQRHGALQRAIQDQRAAA

SEQ ID NO: 509482 - protein, 337 aa, unidentified
MEKNFKYFIGVDVSKNTLDCCVVKENKELLSFQSENSDKGIKRLIKELKSNGIKDLNEVLFCAEHTGIYNNPLVYFLNEKGGTIWLESAIHIKRSIGLQRGKNDKVDAQRIAMFAYRNREDAKVFNVPREVMIRLNYASKLRSHLIKTIHGFEVQIKEIERFESKEVAKLFKANCKETLKALKSDLKDVNEEIQTIIKSDEHLNQLFTIIKSVDGVGNVTATEVIITTNEFKNINDPDKFACYSGVAPFDHSSGTSVRGKPRVSSMANKVLKTLFHMAALSVIRMEGEFKIYFERKIKEGKNKMSVINAIRNKIIHRIFACVRENRPYQKIYSYKFV

SEQ ID NO: 509483 - protein, 369 aa, unidentified
MEKDTTYVAMDDSKRKIVVGILRPTANEPELREIANDPRQIRRLFERLKPEGPLAACYEAGVSGYDLHRQITALGVPCSVIAPALTPRRPGQRIKTDRRDAAKLVRLFRAGELTAIHVLDEREEALRDLVRCRDDLRRDVLRWRHRVLKLLARHGRTYLAGRNWSRAHWRWIREQRFELPPLQRAFEATLFPLEQALARQAELDTELQIVATTAPYREPVATLRCFRGIDTLSAIILLAEIVDFQRFPRPRQLMAYLGLVPSEHSSGETQRRGALTKAGNSHARRVLVEAAWHYRHRPAIGPALATRSHGQPDEIIGHAWRAQQRLHRRYRHLVGRGKRSPVAVAAVARELVGFIWAAMTRPDRQPAVA

SEQ ID NO: 509484 - protein, 342 aa, unidentified
MLIIGCDYHPSVQQIAWVDEETGDCGERRLAHESGEAEQFYREVKKKGVSVRVGIEATGYSRWFERLLAELNFELWVGDAAEIRAKRVRKQRNDRFDAQHILKLMLEGNFPRIWMPSAENRDLRQLVLHRHRLVGMRTRVMNQLQAIAMNEGVRRKRGLWSEKGRKQLESLSLPAWTNRRRQELLELLDRFDPSIDQLSQAIEQQGAQCPEVQRLQTHPGVGAITALAFVLVLGTPDRFGCGKQVASYLGLIPCEESSSDKWRLGHISKQGNALLRYLLGQAAQSAARWDEKWGAQYAHITMRRNRSIAKVAMARKLAVRLYWMWRRQWDYQQLKKFGSYVG

SEQ ID NO: 509485 - protein, 326 aa, unidentified
MTLSHLLDNTFVGIDVGGAGLDVAWHRGDGAHYANRPDAIATLVERLRSGPKLTRIVLEPTGGYEKSLVKALRQAQLPVEIIHTTRFKAYCQLVGVKAKSDTSDARLLASYAAAPDEIRGRKAGHVELPEDAIREELSELASRRDQLKHMIHAETCRLGTVRMIDLRQAITAHLETLKAEDKKVHQMMLALVRQRLDLRRDQRLLKTIKGIGPKSALAFLASVPELGRIDNKAAAALIGVAPFVRKSGTMSAPARIHGGRAAVRSILYMAAVTASRHNPVLRPFYERLVAKGKPPKVALIAVLRRLVVFANAVLKSGQAWKGATAS

SEQ ID NO: 509486 - protein, 367 aa, unidentified
MKELFFGVDLHKRQFTVYMMNSNEEGTYGIFTTDEAGYNKFMNILKESLKSGFKISVAVESTGNTRYFKNKIESVGIVVKVINTMKFKVVNESINKTDKRDAKTIAEFLKKEVLPEAKLCSEDSELLRRLVKIRSVMVTTKVKMKNQIHGILLGMGVKTKSGQLNSKKGRLQILNELKASNNHNIIEILVNNIEDIEKNIKNIEKEMEELTKEDRAVEILKSVSGTGKICAITVRSQIDDIKRFDHYKKVSSFAGLVPWVKCSDEKKYYGNITKRGPSELRVALVQMVLGMIRCKDERDNILMIQYRDIKKRKGSGKALIATARKFTKLIWTLLTNDELYDKEKLSKEIYLEKIISMQENQKLKDAA

SEQ ID NO: 509487 - protein, 355 aa, unidentified
MDSTKYIGMDVHKEAISIAVLNSSGKLVMECTIETKAITILDFLKGLRGSLHVTLEEGTWAAWLYDLIKPHVTELVVCNPRRNALLKEGSKSDRIDARKLAELLRSNMVRSVYHGEHGVRKLKELARSYLVISKDLGRVMSRVKAIYRSWGIPCGGKQVYAQRYRSEWLGKIQEAGVRRRAEFYYQQLDALRPLRQQVRQELLAEAKKHSAWKLLRAIPFIGPIRAALLMALIQTPHRFRTKRQLWTYSGFGIETHSSAEQRCVQGELRRAKKPVSIRGLNRNHNHDLKNLFKSVATVAAVKAGPFQEFYDALVAKGIRPEMARLTLARKIAAITLIIWKKGARFDAQHLKPQTA

SEQ ID NO: 509488 - protein, 355 aa, unidentified
MDSVKYIGMDVHKEAISIAVLHSSGKLVMECTIETKAITILEFFKGLRGSLHVTFEEGTWAAWLYDLIKPHVTELVVCNPRRNALLKEGSKSDRIDARKLAELLRSNMVRSVYHGEHGVRTLKELARSYLAISKDVGRVMSRLKAIYRSWGIPCAGKQIYALRYRAEWLGKIAEAGVRRRAEFYFEEFDALRSLRQGARRELLVEAQKHDAWKLLRQIPFIGPIRAALLIALIQTPHRFRTKRQLWTYSGFGIETHSSAEHHCVQGELRRSKKPASIRGLNRNHNHDLKSLYKSAATVASAKPGPFREFYNSLVAKGIRPEMARLTLARKIAAITLIIWKKGVHFDAKHLKPQTA

SEQ ID NO: 509489 - protein, 344 aa, unidentified
MEPMYYIGLDVHKRKISYCVKDSGGKVHAEGSLAARRLDLDRWMKTLPQPWSAAMEATMFTGWIYDHLKPHAAALKVAHPLMLRAIAAAKKKNDRIDASKICDCLRCDFLPECYMASTAIRERRRTLRYRNLLVRQMVQMKNKIGMLLMEAGVSYNKQRLHKAGYFRELLASNPDIDAGLGSLLRLCRETVVRLQKTESALVRSLERDSSLTDRVERLMTIPAVGPITALTWALEVGDVQRFSSIKKAISYCGLCGAEKSSGNTVQRTPLSKQRNKHLQTTLIEAAKMAPRNSAELAMLYDKEKQKGNANRATLAVARKLVAYLMAVDRGHRNFQVVETSTIAA

SEQ ID NO: 509490 - protein, 369 aa, unidentified
MTDLTLFVGLDVHKKTISIAVVEATAGAAVHFYGTIANTPDTVRTLCRKLTRDGQQLHFAYEAGPCGYGVQRLLTRLGHRCEVVAPALIPRKAGDRVKTDRRDAMMLAQTLRAGQLTAVWVPDEAHEAMRDLVRLRMQAMRDLRKSRQQLLSFLLRHGRNSPYRHWTKMHRRWLGELVFAHPAQHLALEEMLQRIERAEALCDRLKAAILELVPQWSLAPVVQAIQALRGVSLLVAAVIVAEVGCFGRFASPHPLMAYLGLNPSEHSSGATVRRGAITKTGNTLARTCLVEAAWTYRFPARVTQIIRDRLAGLPEPIRVIAWKAQVRLSARYRRLVAAGKPAPKVAVAIARELVGFIWAIARLVEPQFV

SEQ ID NO: 509491 - protein, 403 aa, unidentified
MNAVGIDVSKGKSMVTILRPFGEIVSSPFEIKHTSSDIHSLIKLIHSIEGESRVVMEHTGRYYEALAHQLSAADLFVSAVNPKLVKDFNNDSLRKIKSDKADSVKIARYALDKWQSLEPYSITDELRAQLKVMNRQFHFYVKQKTAMKNNLIGLIDQTYPNANTYFNSPTRSDGSQKWVDFVSTYWHVDCIRKMSLNAFVEHYQNWCKRKKYAFNKSKAEEIYTKTKELVPVFPKNEITKHIIRQAIDQLNSTSVTVETIRTLMNETASKLPEYSIVMQFKGIGPSLGPQLMAEIGDITRFTHKGALTAFAGVDPGVNESGSYAQKSVPTSKRGSSHLRKTLFQVMDVLIKTMPQDDPVYQFMDRKRTQGKPYYVYMTAGANKFLRIYYGRVKEYLSVLPDPS

SEQ ID NO: 509492 - protein, 370 aa, unidentified
MTEDNRILVGLDVHKDSIAVAVLPPGSDRVTEAPSISNDPGSLRRLADRLSKGGALAFVYEAGPCGYEVHRQITGMGHACEVIAPALTPVRPGDRVKTDRRDAEKLARFYRAGELTPIRVPTREEEAARDLVRIREDALSDRLRARHRLGKFLLRQGRIYRETKAWGVAHRAWLKKERFEFDPLQRTFEGYIRALEETEARLAVLSQQVLDLAEREPYRETVKALRCLKGIDTLGAITLSVEAQEFRRFGKARAFMSYTGAVSSEYSSGEKTRRGSITKAGNAHLRRILVEAAWSYRRPNLEGRSLSERRKGCPPEVVRIAKKAQDRLTRKFARMVGRSKPSQVAAVAVARELSGFVWSIARHVPEGKTA

SEQ ID NO: 509493 - protein, 349 aa, unidentified
MDFYAGLDVSLEATNICVVGGDGKLVREATLDTDPDAIKELPAEWGIHLKRISLEALSFGAWLFTAPAEKGLPMIYIEKRHAKAAMNAMLNKSASTDEKDIAQMMRTGWFRTVHVKSESAQMLRALLVGRKALLGKVLDMENMIRGLLRPFDLKIGEISVGRFEARVRDLLAGKKELEAIVGPLLDARNAMRLQLAKLHRLALAAARSDSAVRRMMTVPGVGALVALTFRATVDDPARFRKSTNVGAHFGLTPRRYQSGQTDRIGRISKCGDELTRAMLYEAAIAILTRIPKNFKLRLWGLRLARKKGLKRAATAVARALAVLLHKIWIDGTTFRFGAGGKRGRVAAAL

SEQ ID NO: 509494 - protein, 398 aa, unidentified
MTESSDYESVQVFIGVDVGKDTHHAVAINRSGKRLFDKALPNDENKLRSLISDLKQHGQILLVVDQPATIGALPVAVARSEGVLVGYLPGVAMRRIADLHAGEAKTDARDAAIIAEAARTLPHALRTLKLADEQIAELSMLCGFDDDLAAQTTQASNRIRGLLTQIHPALERVLGPRLDHPAVLDLLQRYPSPEKLASLGEKKLAAQLCKLAPRLGKRLAADIAQALAEQTVVVPGTNAAAVVLPRLALQLITLRKQRDEVALEVEQRVLAHPLYPVLTSMPGVGVRTAARLLTEVACRAFASAAHLAAYAGLAPVTRRSGSSIRGEHPSRRGNKALKRALFLSAFAALRDPLSRAYYTRKMSQGKRHNQALIALARRRCDVLFAMMRDGTFYTPQAS

SEQ ID NO: 509495 - protein, 427 aa, unidentified
MSYRIAAIDVHKRMLAVVVTDVEGTGEYQFERRKFGATPGELHVLAQWLVQLEVEEVVMESTAQYWRPVWGTLELFWRPARQQREGANQKSGTLHLCQAKSNHGPRGRKNDFLDAERMVKRLVAEELVLSFVPDEEQRLLRTVTRRKYQLTRAKIGFKNQLESLLEQGHIKLSSLVSDLLGVSARRMLKALAEGETDAGVLAAMADHKLRATPEQLRDALGASSHLSGTFRRLLKLSLEELQLIEAHIEQLGREAMELLKGHEDVIQRVAEVPGFGPDCAVQMIAEVGLEAAKFLAAKNLSSWVGVCPGNEESAGESQSTRSPKGNRHMRRLLNQAAQSAVKVKGSIFEVTFHRLESGLGYKQAIWAIAHRLCRLLWLILHKGVRYEERGPAVSAKSKRTRTARMIRELKKLGYRVEGGPLPTVARA

SEQ ID NO: 509496 - protein, 468 aa, unidentified
MKLRNVIGIDPDSNGCQCAFVKLDGSQVQQRVYLATEDGMQSFIRWVKKQDDTIVAIEGSNGLSAPIEKALRDAEIVFYSFKPSDVDKFRKAVLGQNKNNKKDAESTARYAMALECQGKLENCKRVWKADEELLGLTRSYAQKRKEATREINRLWKLLRAASVDLYLALGGRHPNIEISENVVQNEGILALLAAKPDINEWKTLSEADFMAAMGNRNYKGRKQLLKEMQKVSKSFRPVSPAASLMIKNTAEQIMLLRQQLTEIKKMIESITKDNKVVRTLEQHRGIGILTAATLGAEIVDIRRFAKDDNLASYSGVVNREYKTGKNDKEIPNRYFNRRLKNTFMSAARNYVHFNPDTHLAGYYNNLVKGGMKKTEARKRVARALVRVFFRELSSAVELDESDAVEEIERGNESDMANGSSRIDKLHSNISFQSLTENNTGGKEKIKTEKQEKDADAETRPAAEKIPIF

SEQ ID NO: 509497 - protein, 438 aa, unidentified
MSNKVIFNLDELFISVGIDVGADFSWMSIALPNQQFVGKPYKILHNSIDSLTTAVSKIKEAEELYSLESRIFLESTGIYHYPLFCYLRDKGFNCSVINPIITKNSTNINIRKVHNDRFDSKKAALVGLKPDLKVSLMPSDLALNCRNLCREYYDLIDNRSAYVNKLQGELRMAFPQYLGIFSKVTINTSLTLLETYTSPSAFLKVDKQEIIDIIKSTARFGLTYAQNKYNAIIQAATDANQFGYIIDSNIKRIRLYISFIRKYDEEINSILESLHELVDANEDSDFVKQIHLIETFKGAGFLSAVSIMGEIGDFSAFSKPKQLFAYFGLDPSVKQSGKFEGTKVQMSKRGSAIARRVIHTLTLQSISISRNREAKNPVLREYYLKKCDSKPKLVAMGAVSHKVCNMIFAILRDNKPFKIIAPQEHIKQYNSAKCDIAA

SEQ ID NO: 509498 - protein, 428 aa, unidentified
MSYRIAGIDVHKKMLAVVVSDVEIESEYQFERRMFSSNPEQLRSLAAWLVEQKAEEIVMESTAQYWKPVWETLERYWKPLCEKREGARRRSGTLHLAQALSNRGRRGRKRDFVDAERLVKRLVDRELTLSFVPDTEQRLWRTVTRKKYQLRRDVVRLNNRLESLLEEAHIKLSSLVSDLLGVSARRMLKALADGETNPAALAALAHERLRATPQQLCDALGACTELKPVYRRLLKMTLEHLQILEQQIGQLDQELATLLHPHQDAVERLAEVPGFAVDSAQQIIAEVGPAAATFPSEKCLSSWVGACPGEEESAGVNYSHRSPKGNRHMRRLLNQTANAAVKAKGSIFEIIYRRCVPRLGHNQAIGVIAHRQCRLIWLILHQGTRYEERGPAVTKRSRYQRTWRMIRQLRNLGYRIELPNPQASQAPA

SEQ ID NO: 509499 - protein, 446 aa, unidentified
MDAAGELVEVDSTDEEIVARVAAIDVGKDSGMVCVRVPHQSRPGRRSTRVWTVPARTTTIMALAEQLAEQHIERIVLEATSDYWRPFYYLLEAAGLTVWLVNAREVKNVPGRPKTDKLDAVWLAKLNERGMLRASFVPPVEIRQLRDYTRLRVDLTGERTRHVQRLEKLLEDALIKLSSVASEIMGVSGRAMIAALIDGERDPQVLAELAKGRLRVKRAALIEALTGRFDEHHAELADMLLGQIDGLSAQIERLDTRIEQLLDDIPAAQAPPAPPTGDSGTAPAYLAAADRLDEVTGIGRHAAQAIIAEVGLSMAVFPTCGHLVSWAKLSPRTIQSGAKTRAGKTGKGNRYLKAVLGEAAAVAARSNTFLGARYRRLAKRVGKLKALVAVARSILVIVWHLLADPTSRYHDLGPEFFDNLRPERRKNNHIRQLEALGYKVTLEPAT

SEQ ID NO: 509500 - protein, 362 aa, unidentified
MVQVRSWAGLDVHARSVVAAVADSESGELVVRRLAGATREVVEFCAALPGPVRVAYEAGPTGFGLARALEAANVECVIAAPGKIERPTSDRIKTDRRDAERLVRLLMIGALHPVRVPSPSEEGLRDLIRAREDARGDLMRARHRLSKLLLRHDVRFDETAGAWTQRHRQWLATLELEHRGAQVTLADYVGAIDALVVRRDALEAAITGLLPDSPWAETAARLRCLRGIDTLTAVGLCTEVGNFTRFERAGHMMSFLGLVPSEHSSGQTRRQGQITKSGSGHGRRLLVEAAWHYRRRPNRGTSLARRQAGQGAHVPAISWHAQQRLHRTWQRLDSERGKRRTLVAVAVARELAGFCWAIANAD

SEQ ID NO: 509501 - protein, 412 aa, unidentified
MDQVVERAAALDVHKEQVTACVRVSDGKGARAEFVETFSTTVAGLLVLADWLEAHRVERVAMEATGVYWKPVWAVLEDRCDCMLVNAHHVKQVPGRKTDVSDAQWLCRLVEAGLLRANLVPPKPIRTLRNLTRYRKTQIQDRQREANRLHKILEDTGIKLDCVATDILGKSGRAMLDALVQGTTDPEVLAELAKGRLRTKIPALREALEGRFDTQHALIVGQILAHLDFLDEAIERLSDAIEEQIRPFEQALELLCTIPGIQRRTAEVIIAETGGDMTAFPTAKHLASWAGACPGNDQSAGKRRLGRTRKGSKWLRSALAEAVLAATRSRNTYLAAQYGRLRARRGHSKAVTAVGHSILVAAWHMLQTGEIYTDPGADYFARRDPERLTRRLIAQLERLGHTVILQPQPQDA

SEQ ID NO: 509502 - protein, 343 aa, unidentified
MDHFAGLDVSVKDTSICIVDEAGRIVREVKVASEPNTLLAVLTNPSYRFKRIGLEAGPLSQWLFSALAEAGLPVICVETRHMRAVLKAQINKTDRNDARGIAQMMRVGLYRPVHVKTLRSQKLRMLLTHRKLLQSKAIAIENDLRGTLRNFGLKVGMVGTAKFEARIKELVENVADLAALVEPLLVVRRALREQIGVLHRRVLTIVRDDETCRRLMTVPGVGPVVALTYRATVDVPARFRKSKSVGAVFGLTCSRDQSGERDRPGAISRCGDEMMRAMLYEAAQAMLLRSAKWSWLKAWAMQIARRRGMKRAIVALARRLAVILHRIWVDGTEFRWTRETAVA

SEQ ID NO: 509503 - protein, 327 aa, unidentified
MTKARQAGAAPGVLYVGIDVAKDKLDVFADGLFEGVVENTKKGVGRLVRTIRKAAGSQAEVRFAIESTGNYGLFVQLELERLHQKVCVLNPFRVRHYAMGRGVLAKTDRIDARIIRLYAVESGCEPTPAPTQARLALRDLIRTRGLLVKVRTMIQTFLKLPLLGRTSRTVLGEVVRFVQTRIARLDREITAVMKDDPRIDQVAGALENIPGVGAVTATTIATLVPELGTLGRSQAAALAGLAPIPRESGKFKGARTIGGGRADVRRALYMAAFVAKRWDPELKAVYDRLVSKGKKSKVALVACMRKMFIHMDRVVARLDADTQEHAS

SEQ ID NO: 509504 - protein, 377 aa, unidentified
MNRILKIGMDVHSTNYTLCAMEPVFGADDRIYANIQVAPDYKNILMFIEKVKQKLDPYDTYDIECGYEAGCLGYSLYNQLTAAGVKCVILAPTTMLTQQGKRIKTDARDALMIAQCLSYGGYHPVYIPTEADDSVKEYLRMRDDHKLALKKVKQQINAFCLRHGYHYPQIKWTRMHLDWLRRIKLPPLYQETLDEYMATYFEMTDKLEKYDTRIREISAQEKYSDKVKKLGCFVGIQTHIALSLIVETGDFCRFAKGNAYAAYLGLAPGEHSSSDKINRLGITKAGNSHLRMLLIEAAGGICKGNIGYKSKALKKRQQGNSVQVISYADMANTRLRSKYYRLIRHGKKRNIAVAAIARELACFVWGMMTDNIEERVA

SEQ ID NO: 509505 - protein, 366 aa, unidentified
MKKTSTVRVNGNMIFKGHQLTTGLDLGDRWSNYCVLDEAGEIILEQKVAMTPEAMKQTFSKIPQGLIALETGTHSPWISRLLTELGYKVIVAHAQKVQLITKSNRKDDRHDARTLARLARIDPELLGPVRHRSAQAQIHLTVIRARAELVRARTSLVNAARGLVKSYGQRLPKCGTRQVGRELAAGLNAELREVLEPLLKEIESLNERIKEYDERMERIAKESYPHVELLKQVKGVGTQIALTYVLTLDDPHRFAKSREVGCFLGLKPGRRDSGESQPQLHISKEGDRYLRTMLVQGAHYILGPFGEDSDLRRWGLKLAARGGKNGKKRAVVAVARKLAILLHRLWVGGEVYEPLRNSHKAMRAVA

SEQ ID NO: 509506 - protein, 362 aa, unidentified
MEYFAGLDVSIDETAICVVGDDGKVVLETAVPTDPDLIAEALKRYVGRLRRVGHEAGSLSPWLHAGMIALGLPAICLETRHVRAALSAQRNKTDAADALGIAHIMRTGWFRQAHMKTEECYRIRLLLVQRRNLKRKFLDLENAIRHSLKVFGIRLGKVGRGAMEKAVREAVAGDAMTAGLMECMLRARAALWAEYLILHKLVTQLAMRDELCRRFMAIPGVGPVTALTFKSAIDDPVRFRRSRNVAAYFGLTSRRWQSGSTIDVKGRISKAGDPDARRALYEAASAMLTRFKGRDTIKTWGLKLANTKCHAKARVAVARKLAIVMHAMWRDGTFYVGDPDATEHEVDAANAAKLQRLSYARS

SEQ ID NO: 509507 - protein, 348 aa, unidentified
MAMTIVEAARTVTGGVDTHLDVHVAAALDPIGGLLGVESFATTPAGYRKLLSWMEGFGAVTKVGVEGTGAYGAGLTRFLRRHDVAVVEVDRQNRQARRQRGKSDPLDAIEAARAAQSGRARGAAKTRDGAVEAIRALLVARRSARDVRIKSLNQIRHLSFTGPDCVRARLKGLSALMLPIEAAALRPRSGTDTVLYATKLSIQTLGRRVLALEEEAARIDEVLGELVAEVAPSLLALYGVGVISAATLLVAAGDNPERLRSEAAWAHLCGVAPIEASSGKVVRHRLNRGGDRNANSALWHIVMVRMVSDPRTRAYVERRSKEGRSKLEIMRMLKRYVAREVFPHLPRP

SEQ ID NO: 509508 - protein, 343 aa, unidentified
MRNNSYFVGLDVHKQVIAYCVKTASGEIVREGKMPATRAALDEWVKTLPGPWRGGMEATMFSHWIYRYLKPHAEELQMGHPARMKAITAGKNKSDKLDARTIADLLRVNLFPACFVTPAELEGLRRQMRFRQMMVQETVRFKNKTAGLWMEVGAEYEGRRLHGKRYFGELLKKNQAMIQELRPLLEFNRSQIESLATMDKQLMRLLESDGRLSGRVKALQKIEGVGPVTALTWALEVGDPKRFSSIKQAVSYCGLASALRESAGQQKRGPLSKQRNHHLQSVLIEAAKMAPRLNAKLAQVHQRASERGHKNRATVAVARKLVAYLLAADRAFFATQVELKPAA

SEQ ID NO: 509509 - protein, 379 aa, unidentified
MDHAITGTPAETILHGALELSKNSWLLALQLPDRAQPSLYSIRGGDTEGLMAKLMAARDRWAKVSGKAPSIVLCYEAGYDAFWLARFLKARGIECVVVDAASMQVNRRARRAKTDRIDVGMLLRALIAWGQGDRHVWSVVRVPSVDDEDLRRSHRERDRLVRERTAHINRIKGLLFGQGIRGINVKSKYKTLQIDKLVTGDGRPLPLRLASEITREIARLALIQEQLAALERERDQAPTPCKATEKKRVQLMSLSGIGPAIAAVMTREVYYRQFDNRRQVAGFLGLATSPHDSGDVERSQGISRAGRGQVRGTIIQAAWLWLKHQPKSAITRWFLRRTAGQSGRIRRIMIVAVARKLAIALWRFLEQGLVPQGAMLANR

SEQ ID NO: 509510 - protein, 352 aa, unidentified
MAKRTVEFEQVIERGCGLDVHRDTVVATVMGKGIQTETRTFGTTTRSLKALGEWLESLQVTDGAMESTGIYWKPVLHVLREYPLNLLVVNARHIKNVPGRKTDKADSQWICKLLISGLLKGSFIPPENIQALRDLHRYKKKLVGTVASEKNRIIRVLEDANIKLSSVVSDTSGVTATYLINGLIAGRKDLERLVSECYHKKLQATPEQIVEAINGRLTSHLTFLLKSMQKHIQSVQEQLAEIDAEIETHIKGFENEIELLQTIPGVGKEGAIGIVAEIGVDMDVFPSEHHLASHSGMCPGNNESAGKKKKKFKNTAREQTSESDTYRIGMGRRSHKEKFLQGQIREFGCTPW

SEQ ID NO: 509511 - protein, 387 aa, unidentified
MSESFDVRKSDQPFDQNRSLVAVIELSQASWLVGGMVPGLQRRPLKKLEPEKEKLMALLVRWRNEALKAGHEIKRIAVACESGRDGFWLVRWLRAQGIEAYVIHAASVAVSREHRRAKTDRLDTELLKRAFLGWLRGEHGHCSMVTIPSREEEDAKRPSRERETLVGERTRLINAMKADLIRLGIRNFNPKRRNAAKQLESLGTAEGAAIPANTLAKLLRDMERLQLVVAQIKAIEAARLKRLERSPQEAPHAMVILLARVVGIGIETADMLVREVLSRKLRDRRAVARYAGLTGSPDESGSKRREKGLAKAGNARVRRGMIQLAWRLLRFQKDSALVQWYRERTADGRGGTRKTMIVALARKLLIALWRLVTLGEVPEGFILRPAL

SEQ ID NO: 509512 - protein, 338 aa, unidentified
MKTYAGIDLHSSNNYIGVINAKDKRLYSKRHDNRIEDVLKVLGKFKASLQGVVIESTYNWYWLVDGLMDQGYTVHLANPNAIQTYNGLKHTDDKWDAFWLAHMLRLGILPEGYIYPKHQRPIRDLLRRRLMFVRQRTSQILSLQSMITRNRGLNFSGAQIKRFRDEFIDQLFSDRHLVFTAKKNIATIRFLDQIVSEIEVEVGSQIKLKKGFISLLTTPGIGNILGLTIMLEVGNIGRFPKAGNYSSYCRCVESKKTSNGKKKGENNKKNGNRYLAWAYVEAANHAIRCCPKAQKFFQRKMAKSERVLATKALANKLTKATYYIMRDQVAFDEDKLFG

SEQ ID NO: 509513 - protein, 378 aa, unidentified
MNRIIKIGMDVHTTNYTLCIFEPSFEHDGTVHCITQVKPEVKNIIHVIKTFKKKHENEELNIVCGYEAGCLGYSLYHELKEKGIECVILAPTTMKTEKGGRKLKNDYRDAKMIAECLAYGGYSAVHVPTELDNSVKEFIRMRDDIKENLKSIKQQIIAFLTRNGKQFEGKSFWTRKHIDWINTVSFSEPLLQDTLKEYMIEYNHLCDRVETLDKQIEEISLKEEYVEKVQQLQCLIGIKIHTALSLIVETSDFNRFKKGNMYSAYLGLIPGDDSSGGQENKLGITKAGNSHLRKLLVEAAQGYTRGKVGFKSKDLKSRQEKCSNEVVAYADRANERLRRKYYRMTLRGKRYNVAKTAIARELACFVWGIMTDHIDLCS

SEQ ID NO: 509514 - protein, 343 aa, unidentified
MQSISTIGLDIAKSVFQVHGVDAAGQAILRRQLRRRHVLAFFQKLSPCLVGIEACASSHHWSRELQALGHTVRLMPPAYVKPYVKRQKNDTTDAEAICEAVTRPNMRFVPTKTVEQQSCLMLHRVRHLFIRQQTAVINSIRAHLAEFGIVAPVGRRGVEQLLEVVADTADRRLPEVARACLAALGSQLRALKAQILEFDRRIMVWHRSNATSMRLDAIPGVGPALATALVASIAEPGAFRSGRDFSAWVGLVPKQNSSGGKDKLGSISKQGDRYLRSLFTAGALAVIRYAKIHGTRHRPWLTGLLARRPTKVAAIALANKLARMAWAMMVRNERYRQPAALAA

SEQ ID NO: 509515 - protein, 357 aa, unidentified
MRSSNIKYIGLDVHKEAISIAVLNGAGKLVMESIVETKASTLLDFLHGLRGELHVTLEEGTWAAWLYDVLKPHVREVVVCNPRRNALLKEGSKSDKVDARKLAELLRTGMLRAVYHGENGLRTLRELARSYEVVSKDLRRVMNRLKALYRGWGIPCKGMQVYGRRHREQWLNKILEPGVRRRAELFYQQLDGLQTLRRTVRGELLAESRKHQAVKVLRQIPFIGPLRAAQLVALVQTPHRFRSKRQLWSYSGLAVETHDSAQYRYVDGQLQRSKKPQQVRGLNQNHNHAMKEIFKSAALSAALRAGPFQDFYEGLLTKGIKPELARLTLARKIAAITLTLWKKGEHFDAQYVKSQAA

SEQ ID NO: 509516 - protein, 337 aa, unidentified
MKYSGIDLHSNNSLIVVTDESDRTLVSRRVPNSLPAVLAVLEPYRGELVGVVVEATYNWYWIVDGLQAAGYRMHLANPAAIKRYEGLKRSGDEEDAAYLAQLLRLGLLPEGYICPKEQRAVRDLARKRMQLVRSRTQHILAVENIQARESGARLKAEQIKRLEAKGVEAMALAPEVKLAMQANLAVIGTLTQQIDRLERRLHERVRLREEFGLLKTAPGIGETLATTIMLETGAVSRFARVGNFSSYCRCVDSERISNGKKKGEGNVKNGNAYLAWAFVEAAQFARRFCPEAKRFYERKRARTNTVVATKALAHKLARACYHVLREHKPFDVRRCFG

SEQ ID NO: 509517 - protein, 337 aa, unidentified
MVYGAIDLHMRDSQIRIIDAEGRELRGGRVRTSAARLVEAFDGYGPMRILVETGTESEWVAQALEAVGHELVVADPNFAPMYGEIRRKVKTDRRDVVALSEANRHGWYRATHRVSRPQRERRQWLCSRRHLVQMRTGTISLMRSLLRQAGYRLPTGSSARVPARLATLTLPAGLQDTLAPLRRMVETLTTEIADVDARLAGVAAADPIVQRLQSVPGVGSVVALTFRAFVDDIDRFAHAGQVSAAIGLVPREDSSAERRHRGHITKAGPRELRSLLVQAAWACWRSPASGTLRVWVERLAGRRGKRIAVVALARRLSRILFAVWRDQSVFDAATLAA

SEQ ID NO: 509518 - protein, 320 aa, unidentified
MMAQNDLVVVGIDVAKDKMDACIRSLSQREMFPSTAEGRRKLITWLRKHKVTAAVMEASGGYERNWARALREAGMEVRIVDPKRVRNFARSAGRLAKNDTIDAEMIAWFAETFAAVSGQAHDARREKLAQIVNARCALLDLETTLQNREEHPAPEPVRKMQARLLKQIARELAGLEAAIAAMIKATAHFAELAEIIESVPGLADNTSAVLIAGASELGKVSDGIAAALIGIAPYDDDSGKRRGERHIKGGRRWVRNALFTPCLGAATQHNPVLKAYYERLIAKGKAKRVALVACMRKLIVILNTMIARGEKWDPSRYALQ

SEQ ID NO: 509519 - protein, 343 aa, unidentified
MELNAIGIDLGKTLFHLVGLDASGNVVVRKKCSRAQLLKYTANLRVQRIGMEACSGSHFLGRALREQGHDARLMPAQYVKPYVKTNKSDYIDAEAIAEAVQRPTMRFVPIKTEEQLDLQAVHRLRERWVMRRTAVVNQIRGLLLERGVTLPKGRSHVDEALPEILQDADLKLSGSFRLLLAELQLELEQLAEHIQQMDSAIQHTVKENEACQRLTTIPGVGPVTATALIAAIGNGSGFRKGRDLAAWVGMVPREYSTGGKQKLLGISKRGNNYLRTLFVQGARAVMRYRAKQAPGLNHWLTQLLARTHQNVVIVALANKLIRMAWAVLCKNEVYRAPALVASD

SEQ ID NO: 509520 - protein, 343 aa, unidentified
MVHYIGLDVSLKKTSICVVNQAGSVVREGVVDSEPEAIAAFVRSKAPGAVRVGLETGPTATWLWSELKQLGLPVICIDARHARAVLKMQINKSDRNDAAGIARIMQTGWFKEVRVKGLDSHSVRALLASRALLVKIKRDLENQIRGLLKNVGLVIGRAKFNVFAVRAEELIEDRPELIAVVGPLLKARQAIEQQTDDLDRKVLKLARHDAQVRRFMTVPGIGPITALCFKATIDDPTRFKRSRSVGAYVGLTTRRHASGEVDWTGRISKCGDAMLRSYLFEAAGVLLTRVPKWSALKAWGIRLAKRSGLRKAKVAVARKLAVILHRMWIDGTEFNWSTKKAAA

SEQ ID NO: 509521 - protein, 348 aa, unidentified
MTLVGCDLHARDQQVAVLDTATGEIQERRLTHEGSSVEQFYAARPGPVTVGIESTGYAIWFHALLHRLGHEVVVGDAAKIRAMVVRKTKTDRRDAAHRLDLLRHDRFPTVWLPDPAVRDQRTLLAHRMRLVRMRTMVKNGVHAIALNYRLALGPSLFTRAGVAQLQALSLPPHTACRRSESLELLSWLNTRIKGLDDQIGEAAHAHPEAQRLMTHPGVGPLSALATVLVLGAVTRFPTSKHVVSYVGLAPAIESSAGKHRLGRITKQGNALLRYVLGQAGQAAIKRDPDLNRLYYAVLHRRGRSRAKIAVARKLLVRLYVMLRDQIDYPTFLHRAPAAARRKEMTPTS

SEQ ID NO: 509522 - protein, 430 aa, unidentified
MKSNTQNAKIEAITEKTLVLGIDVGSEMHYARAFDYRGIEYSKKPFKFSNTEAGFATFKEWVLDLKERHEKDKVVPGMEPTGHYWFNLGKFLQDNEMKPVLVNPHHVKKSKELDDNNPTKNDRKDPKVIAGLVREGRYMIPYLPEGVYADLRTASNIRFQLQAELTRIQNRISRWFNIYFPEYKTVYGKPDAKSGMLILKAAPLPEDILTLGIDGVNQIWRDAKLRAVGKARAKTLIEAAEHSVGSKEGAVSARMEIRMLLEDYESRNTRLQEVMVLIEELVRKIPMAEKLLEIKGVGIRTVSGFLAEVGDISRFNNPKELQKLAGLALVENSSGKHKGETTISRRGRKRLRYLLFEVAMSLVSKNQEFRELHNYYTTRRLNPLKKMQSLMAIAAKLIRVFYAMLTKGVDYDPKKMVSDIKRPAVYLQAA

SEQ ID NO: 509523 - protein, 429 aa, unidentified
MNCTQNKKIEQVKETTMIVGIDVGSEKHYFRAFNWRGIELTRKPVAFSNSMEGFNSFYNTIVELMQKSELEEALVGIEPTGHYWFDLGQFMGEKDIKFVMVNPHHVHKTKELDDNSPSKNDRKDPRVIAGLVRDGRYFYSYMPTGAYAELRNASNRRFVLVEEQTRAKNRLQKWIAVYFPEYKGIYTHIDAKGGMLVLKKAPTPEEIVRLGVEGIIKIWKDAKLRGNGHKKAMLILNAAMKSIGLKAGLTEARMEIQDLIEDYELQTKRLERVNDLIKGLCQQVRYADKLLEIKGIGITTVAGFIAEVGDITRFDSTKELQKLAGLELVADSSGKHNGKTKISKRGRKRLRYLLFEAAISVVGKNEEFKEIHRYYTTREKNPLKKMQSLIVVACKLIRVFHAILTKGIRYDASKMLKDIRHPGEQLKAA

SEQ ID NO: 509524 - protein, 410 aa, unidentified
MKHQNGVDVSIVPQLDKACGLDMHKDKIVGFISAKDGSGQELKEFTFICELRQVKEWVQNHQVEHCLMESTGIYWMSLYAILIEAGIHVTVANPTHIKQVPKRKTDRKDAKWLCTLLLNGLVRPSFMPTAEQRILRDHCRSRLFYMRQQNKTQNRLLKILESNNIKLRSVISSIKTKSAMDMIRLLAIGVTDKEQLAGCARGQVKRKKDALIKALDGTLAPHHLVQLQMLLQDFDHVQTQLNTLEVIITEITQEHYSLAFECLDSITGITGRSAQIILSEAGSDMSRFSTADHLTAWCGLAPGNNESAGKRRDTSVKKGNPYLKTAIVTAAWAAVRVKDSYWRALFERLRKRMKVQKAIVAIARRMLKVVHKTLDTLTMYQEKGIAHFVDLQAKAALYHRMKQQWPSTES

SEQ ID NO: 509525 - protein, 367 aa, unidentified
MKKVSTRAAAQSRNISPQKLTIGLDLGDRNSWYCMLDEAGQIQLEQRVRTSAKALQEVFGAMPRSRIALEIGTHSPWISRLLSELGHEVIVANARKVRLIGESRQKDDRLDAQTLARLARIDPELLYPVKHRSAQAQADLMMIRARAGLVRARTGLVNTARGLAKSYGERLRGCNVRNMNPEKAEGVSPELQRALEPLLNAIEALSERIVEYNERIEQLAQQSYPQTALLKQVKGVGTLIALTYMLTLEDPHRFQKSRDVGCYLGLQPGRRNSGQREPQMHISKEGDPYLRTLLVQGAQHILGPFGIDCDLRRWGLRLAERGGKSGKKRAIVATARKLAVLLHHLWVSGEAYEPLHNSSRTTVAAAA

SEQ ID NO: 509526 - protein, 379 aa, unidentified
MSQYSTLFVGMDVHKDSIAVAYAPEVSGSEVTFLGPIGVRHCDIDKLIRQLHSKAPQLRFVYEAGPCGYWLYRYLQKLGEKCLVVAPSLIPRRPGDRVKTDRRDAQQLARLLRSGDLNPVYVPGLADESIRDLCRLREDRMNDLRAARQRVKSFLLRHDVRYGGRASWSPAHMRWLAQVASLPTPAQQIVFQEKLNEVTHLAERLAAADEQLSQHISGWRLAPYVRAYQALRGVQFHVASTVAAELGDITRFDRPRQLAAYVGLHPREHSSGESRHLGGIAKTGNGHVRRVLVEAAWSYRYAARISRQIQVRQEELPEQIRDIAWKAQLRLCKRFRRLSAKGKHHSIVVTAIARELVAFLWAIAKQVPAAESDQAALAS

SEQ ID NO: 509527 - protein, 345 aa, unidentified
MDASYDGRQVVGMDLHRRRSVLVRMTEDGRKLETVRIGNSPAALRAVLARAGRNPRVVLEATYGWYWAADVLEAAGAEVHLAHPLGVKAFSYRRVKNDERDCADLADLLRLGRLPEAWIAPPPVRAVREVTRYRHKLVQQRTSCKDQVHAVLAKAGVAVTWTDVFGRGGGRWLDALVLPQPYAGKVASLRALIGVLDGEIARLEEEAAAMLAGDSRYAAVRQLPGIGPVLGAVICAEIGDITRFGKPGQLCSWAGLTPRHRESDLKVTRGHVSKQGSRMLRWALTEAIQHQPAGTRPRDVKEAITARRGTQARNIAKTAATRVLLTQVFYSMRDGRVRSAARPAA

SEQ ID NO: 509528 - protein, 452 aa, unidentified
MPARKDRLMHFNKILQMLDSSPYLSVGLDVGADFTWMSIALPNGSFWGKPFKIIHDDPYSREMAVAKIKEAQELYSLKSRCFLESTGIYHVPLLCFLRDKGLDCSVINPIITKNSTNINIRKLHNDKFDSKKAALVGLNASLKTSIIPDEDIADLRNLVRDYYYFKDLQSAVVLKLNAELKVSFPAYLKVFSKITTQSSLKLLAAYPLAKDMLAAPKEELVGIIRSTARFGKAYALSRYEAILEAAKDAAVFGRALPSNAVRIRLYIESYQTYQKHLDSLLLALHEAVDKLQGTPVYDRICLLQSLRGVGFLSAVVLMAEMGDFDLFSSPKKLYAYFGLDPAVKQSGKLNGDKVHMSKRGSSLARRVLHMVALNNLKVDKGTKAPVNPVIYNYYTGKCASKKKNVAVGAVMHKICNIIFAMLRDNKPFEIIPPQMHCKQYALNHPASVTNAA

SEQ ID NO: 509529 - protein, 322 aa, unidentified
MSETSEEIIMVGVDVAKDKLDIAFANEKVLTIKNETAAFKKLIKNRAVHSLCFVMEATGGYEKPLVSFLLTENIKVAVVNAKRVRDFANAMGAYAKNDRIDANMIRYYAETAYPKGRMQLREPRSEVEQRIEALVKRRHQVVEQRAIEQQHQATAYDKDAVRSIKRVIKQLNEEIHTIEAKIQTDIDNDDGLKQKVARLLTVNGIGIVNAMTLVSMLPELGKVSNKEIAALVGVAPYSKDSGKKTGKRSIFGGRALIRSALYMAILSAKRFNKPIKIFYQRLIASGKLEKVAITACMRKLLITLNSIVKNQSVWQPDFANLA

SEQ ID NO: 509530 - protein, 339 aa, unidentified
MQLYAGLDLHSRNTYIGIMDKEFKRLFGKRVLNKLPVILDTLSPFRDQLKGIVVESTFNWYWLIDGLMDAGYQCVHLANPSAMKQYEGIKHTDDQHDAFFLAQMLILGILPQGYIYPKEKRPVRDLARKRLFLVRHKTAHILSLQSLIARCCAQRVNASEIRKFTVEDLQQLLKEEYIVLSAQANLDTIVFLKQQIKRLEKTIQKKVKLNKAFQQLMTVPGIGLILAMTIMLEVGDIGRFAQVGNFASYCRCVSSQRLSDGKSKGHGNRKNGNRYLSWAFTEAAHLSRRYNEHFRSYYNRKVAQANTSLATKALSNKLARICYYIMRDQVPFRQELLSH

SEQ ID NO: 509531 - protein, 426 aa, unidentified
MRSIGMYVHRDFSEIAIAEDGVVRAAGRIATTPQALELFAQSLAPDDQVAIEATANALAIARIIEPHVRRVVLANPKAVRETSRRAKTDKIDAKVLAQLLAVGFLDRVWAPDEAARTRRRLISRRGAMVRQRTREKNQIHAVLQRQLVKRPPMSDVFGVKGRVWLAEQVDGLPLDERLTVGAGLRQIDFTEAEPAELDKILAADALSDPDAMRLMTLPGVSAVTAIALLAAIGDIGRFKTPRHLVGYLGLDPRVRQSGNEPARHGRISKQGPGDVRGLLVEAAWHAARTVGPLRAFHSRLAARRGANIATVAVARKLVIITWHVLSRGENYAFMRPALHAEKIRKLELAIGAPRQRGKKLAIRAFAPRTVKDAEREQATEHEAAYARLTAGWKPSRPKKKAGAGATPGRASQRPSQGTAARQATSP

SEQ ID NO: 509532 - protein, 427 aa, unidentified
MSEEKSIELRVSVDVGYRRHSVAIGLPNGEVLEEFEIAHGPEGFREFFLRIEKHRKAQDCGVGVAMEGYNGYARPLDSLVRSRGYRLYNINNLKLARFKEIFPGAAKKDRIDARKGLELFQLSDHLPLAKEVLQEVKGTPHENEVLKRLTRRRRRLVNERVRVVNNLQADLQAVCPGLLEITTEAGNQWFLNFLLSADTLPQLARLRKATLLKIPAVGRKYASLIQEWQKRAHFSEEAAWVSEMIQEDAKRCLELDEKVKTLETKIEQVAEDSKIAKILLSIPGFGPVCTTELAGEIGTVERFSKEGSLALYLGMSTLDNSSGKYQGTKAPKHVNTRAKAAMMIALDRHRKYIPESQRYYEKKRAQGKKHNQAIRALGRHLCRIIYKMLKEQREYQIRSKQGDTQARVRSRSCVKTKMRRPKISGKG

SEQ ID NO: 509533 - protein, 350 aa, unidentified
MNILALDIGKFNTVYCDYICENGEHEFGKVKTTPQAIHDLIVDKEPERVVMEVSEIAGWVVDIASALGKETETANTSHDAWRWKNVKKKNDKEDARKLAKLSAMNQLPTVHIPAKPVREMRSLIKYRQRLVKHRRSIQLAIRAIFSAQGITGVPRGKSAWTKEGLGWLRKHARPLEDISDLEQLWCGRLHVELETFEAVSQALETVEDKLNKLGSADARVRRLRTIPGVGPRLAETVVAFLDDPKRFQSCKQVGNYVGLTPKQYQSGQMERQGRISGQGNKLLRNLLVEVCWVSLRYNPWARETYNRLLRGSPSRKKIAITALARKLVVKCWAMLRDEEDWKYDIHEDAA

SEQ ID NO: 509534 - protein, 338 aa, unidentified
MQTYAAIDLHSNNGVLAIIDETDRVLKQRRIPNRLDEFLKELEPFRASLQGIAVESTFNWYWLVDGLRAQKFPVTLVNTAAVKQYDGLKRVNDEYDAWHLAHLMRLGILPKGYIYPPEERAVRDLLRKRATLIQQRTANIVSVQNLEARNRGTKISSNEVKHLTNTRISELYDNEDLALALTTTLNVIDTLTKQTSVLEKAVLKKARLRKEWKPLLTVWGIGEILGLTIMYEAGDMSRFAGPGNFASYCRCVDATRLSNGKKKGNNNAKNGNKYLAWAFVEAANFAVRFYPEAKRFHDRKAAQVNAVVAIKATAHKLARAAFHVLRDQQPFDPKKVFG

SEQ ID NO: 509535 - protein, 348 aa, unidentified
MALTIVESRAVIGGVDTHFDVHVAAALNEIGGLLGVEEFPTTPAGYACLLGWLRGFGSVDLVGIEGTGSYGAGLARYVQAAGVRVVEVDRSDRQDRRRQGKSDPLDAVSAARAAQSGRARGAPKGRDGAVEAIRTLMVAKRSARGERTQTINQARALVCTAPDDVRTRFAKHTSAALVAETASLRPRPGDTVGYATRVALRELGRRAEFLTDQIHRLDELLVPLVADHAPGLLALHGVGPDTAALLLVAAGDHPERLRSEAAWAHLCASAPIPASSGKVKRHRLNPGGDRHANHALWRIVITRMSSDPRTRAYVERRTKEGLSKMEIIRCLKRYVAREIYPHLRPAAD

SEQ ID NO: 509536 - protein, 322 aa, unidentified
MDSNATPTLGLDISKTKVHCALLQNGKFRSKAIANSDAGFEALGAWLAKQKVKKVHACCEATGIYWEAIALWLSDHGHTLSVVNPARIAAYARSRMTRAKTDPVDARLIADFCAREAPPLWTPPPAEERLLLALLRRLHDLEKVRQAEANRLAVAHPSVRPNIEQLLGFLDQQIAQLKKTIKDHIDRNDNLRGRRDLLDSVPGLGEATIPWLIAYLGDGQRFERSKQAVAFAGMAPRPHQSGTLSRKTHIAKSGHADLRHVLYMPAVAAYRRCAAYAPFVQRLKAAGKPGKVIIVALMRKLLTIAHAVLKSGQPFNPELHQA

SEQ ID NO: 509537 - protein, 482 aa, unidentified
MKKRNIYQNQSQELLGLFQQAADNAKVMCVPIDYAKKDHVVMFCNGHGDILRKPFSVNNSPDGVTYLIDQVTRSCESRAISTQHVFFGGEDVGSFADNFVSTLRHQGWLVAGVNAHHAKKQRENLQASTDRLDLMGIARSLLNCRANCSPAQSGIYANLRNLVRHRRKLVNITTEVRNRIHSIVDRLFPGFLDESKSGILPFSNSSLWLMQDRFSAPQVRRRKTATLAAALRRHGTHKAEYAAAKLQQYASQVLKPPQDLIHTLQLSIAQHVKHFKCLQESIGQLEAEIAVVLAHTQGAFLTSIRGIGIVLAAGTTAEIGNPYEQKPVNNLVSYAGIIPRVKQTGGPQGQTYTGKVAKRCNRILKDYIVQSASHMGLHGPPELMADYKRRDAAGQHADFGMARRYLRITMCLMRTSQVYLPPRLRKPQATMHQRADYYLNNWPNWRKKWKKAQALEVAFEKNQPMGQWRHVIEQLYEIKLEL

SEQ ID NO: 509538 - protein, 344 aa, unidentified
MSEYAGQQFVGIDLHRRRSVVVRTSESGEVLEAVRILNDVDRLNSVMARAGEDPEVVLEATYGWYWAVDALQAGGAQVHLAHPLGVKAFEFRRVKNDVRDATDLADLLRMGRLPEAWIAPPATRELRELVRHRAKLVGLRSGCKAEIHAVLAKCGVQVPMSDLFSPAGEELLDRVQMPGPYAARVQSLRLLIEDLEDEIDLFTRLTRNRLVADPGYTALQQLPGIGPTLAAVFVAEVGDVGRFRTAGQLACWAGLTPKHHESDAHVHRGRITKQGSRLMRWAAVESVSRLGQHTLLGSYKNRVAQRRGTNIGTVAAARKQVEFVFYALRDHHVRALHRGRRSAA

SEQ ID NO: 509539 - protein, 328 aa, unidentified
MFEHYIGIDLHQAFFQACAVTVTGDRAWEDRFPRTEAGIAALLARCTPRTAVAVEASTPTWHFADAIAAGVGALRVVDPVKTKLKAGYAAKTDRLDARRLADALRRDSVVGIYVPPVAIRELRELCRFRLAVVQVRTALIQRLRAVLLRQGLVDRRRLARTPTDAWLETLILPPRAAASVAGLRRMLATVRAEATRVDAEVHAAAAADPIAIALQQIPGIGPILSLMIRAEVADIQRFPTAGHVASYAGLVPRVEASAGHVRHGRITRRGSPWLRWALIEAAMHGTKRTDRVGRWGRRLVIRKGALKARVALARTLCEEVFTHWSAIV

SEQ ID NO: 509540 - protein, 328 aa, unidentified
MCTLGIDVSKNKIDLCLLTAGHGGKKKHKVLTNEPAVARKVIDWLNAQRCVPESVTVVLEATGIYHENLAYGLHEAGVSVCMANPCRVREFAHGMDILNKNDAVDAFVLACYGELKSPAVWVPPSPEVRKLRALLRQRDALREDVQRTVNRLEKANSTSTPQEVIRSLERTKSWLNEELARIEKLITDHTDNDPGLKADLDLLKSIKGVKDQVGREMLALLKDGMFKSASQVAAYLGLTPVEKTSGSSVRGRPHMSKTGPSGVRAKLYVAALTASRWNKQAKAIYERLVAKGKAKKAALGAVMRKLVHLCFGVLKTRLPWDENYVATA

SEQ ID NO: 509541 - protein, 344 aa, unidentified
MKLIRVGVDLAKNVFQLHGVDRNEKVALRRKLTRESWLKVLLNAVEPGCEIGMEACGGAHHWARKLQAHGLIVKLIAPQFVKPYVKSNKNDANDAEAICEAMSRPNMRFVSVKAVEQQDIQAVHRVRSELINHRKAKGNQIRGLVAEYGLVAPKELVHLRAAVPCWLEDAENGLTDRFRRLLNGLWHDLMALDQRVTELDREIAQIANTDPVAKRLQQLRGVGPMIATALVATVGDVKQFANGRQMAASLGLTPRQNSSGGKERLLGISKRGDAYLRTLLIHGARSALRTATGKDDRLSQWVSSIAQRRHHNIAAVALANKTVRIAWAMMKNGTDYHPEMVTTS

SEQ ID NO: 509542 - protein, 337 aa, unidentified
MNFIGMDIHKQFTVAVVKNEMGKEIENEKFENSKEGFRKFLSVYKPEETKIVMESTSVWEPIYDMIEEMKYPIKLANPVKTRAIAEARIKTDKVDASTLADLLRANLVSESYIPSKDVRMLRDIIRARKSLVQGKVKIKNKIQSILTKTGLKLPYKTLCKSSMAWIVEEIETKHFNMKSITVSYINMLEHYNFEINKINEKLSEIALKDNRVQLLKTIPGIGNTIALTIIAEIGDINRFESSKKLTSYAGLVPGIRQSGSTLKFGRLIKQSSKDLKTCFIEASWVLVRTKEANRFKWFYGNLSKKKGKQKAICAVARKLCCISYAMLKKNQEFMLLW

SEQ ID NO: 509543 - protein, 324 aa, unidentified
MSDSILGIDVSKETLDAYCARGQRKQGRTFANSPDGWKLVRAWLKAMGSKQAHVCMEATGRHSLGVALALHEAGHVVSVVNPAQIRDFARTKLGRNKTDKVDAALICEYAELFKPEPWTPPSPAMRRLCELQTMRAGIIRSRAEWKNRIGSGLGDSTATKLAAATIDHFTSQLEAIDRAIGETIKQDAELRGRRDLLLSVIGVGETLAASLMAEMPEPGVLRRSGEMVAYAGLNPSHHRSGTSIDRPTRISKIGNATLRSSLYMPALSAMRFNPAVAILVARLKSAGRLKPKQIVVAAMRKLLVLCFGVLKTGKRFDLAIAMPA

SEQ ID NO: 509544 - protein, 346 aa, unidentified
MKRVLKQVVGIDVAQKELVVSLGQLYEDLSTEMISSRVFVNKREGFVALTDWAAKHSDPDLEIGYVMEATGVYHESLAYWLADKACRVSIVLPNKISNYARTLEVKTVTDRTASQAITRFGLERQLDDWKKPSVIFRKIRQLTRERDQVVHHRTITKNQLHAEQAEAEPNKNTVLRLKKQIRFFNEQEKQIKAELESLIKQDKNVNASVSLLCSLSGIGRLTAATVLGETNNFELFRNKRQLTSYCGLDVREKQSGTSIKGKARISKRGNKYLRKALHLPALAAIRSDDRFKAIFARLVSRHGIKMKAVVAVQRKLLEIMFTLHKTQQPYDKEYFKKLESSLTATP

SEQ ID NO: 509545 - protein, 400 aa, unidentified
MLSIGIDVSKGKSTVCGMKPGGEIVYTPFEIQHTREGMSELLSLLRGSGEEVRVVLESTGSYHCPVVAALLENGIFVSVVNSLRMKRFCSQSIRRVKTDQIDAMQIALYGLAYWQELQPTRLPENTYRELQLLARQYYQMTSLLIKAKVDFNALCDQVLPGMQELMSDHAGRHKLSDFVLRYHHTAHILKMGETRFRKDYCKWAEKKGYRNRERMAALIFATAQNGIPVLPDAPSTQIVITEAIRVLHTVEASRDAILTQMQALAKTLPEYSLVREMPCIGDTLAPRLIAEIGDVRRFHSKRALIAYAGIDAPPYQSGKFCANNRHISKRGNRYLRKTGYEVMQSYVMHKPANDPIFTFIEKKRSEGKSGKLAMVAGLNKFLRVYYGKVTELYRSLPAIE

SEQ ID NO: 509546 - protein, 368 aa, unidentified
MLLPRQRLKLARGPKDKEHAMSQTLNAAIAVIGIDIGKNSFHVVGLDARGAIVLRQRWSRGQVEARFANMPPCLIGMEACVGAHHLSRKLHGFGHDARLMPAKYVRPYSKGQKNDFRDAEAIAEAVQRPTMKFVATKTADQLDLQALHRVRERLVSQRTGIINQIRAFLLERGIAVRQGQRFLRAELPRILATPPVLSPRMVRVIEDLTGDWRRLDERIEDLTSEIEAVARQEAGCERLMSVPGIGPIISSAMVAAIGSGDAFSKGRDFAAWLGLVPRQMSTGDRTILGKISKRGNRYLRVLFVQAAWVVLIKPKSWERHGLKPWLEAAKKRLHHNVLAIALANKLARIAWSVLARGRDFEASKLRVA

SEQ ID NO: 509547 - protein, 369 aa, unidentified
MYGTTVALNPTNFIGMDLHSNNVVVCVLQNAANQAGQLVKKVVKRKKIALSTELEELQHFLNPYCSVQHQATVESTYNWYNIADLFERNGWHLKLADPTTVKNNKTKFSDDISDAEFLADQMRLGALKAADIIPKQDRAFRDLVRLRVDLVQDRARYRTVLKNFFNNQRYMRITTEHLNRMAEHYCDGDVTELYSIFDNDNTCLKAGHYLTAMHHLNLQIQQLEEQIKAQEIKNDLTCHRYLPRLYSMKGCGFILGSIIATEIVDINRFRTEKDFVSYCRLSPAVRLSNEKKKGDGNRKNGNAYLSWAMTELANLMVFHNPVIKKKYDRQLKKSHLRAKAIRSIAAKLARCIWHMLKKDKDFQIDLAFK

SEQ ID NO: 509548 - protein, 351 aa, unidentified
MLIIGVDYHPSFQQMAFLDQETGECDERRLNHSDGEAEKYFRDLKQRGVSVRVGLEATGYSRWFERLLAELGFEVWIGDAAEIKKLRVRKQKTDREDARLMRKLLLENRFPRIWVPSPENRDVRQLLWHRHRLVQMRTRIMNQLQAVAMNEGYRWKKKLFSEQGRALLEKLSLAPWANRRRKELLELLDQLNPKIVELTAAVEQEANQRPDVLRLMTHPGVGAITGLAYVLVIGTPDRFPCGKQIGSYIGLIPCEDSSAGKQRLGHLSKQGNALLRYLLGEAAQAAARCNPDWRRRYVHLAMRRHKNIAKAAMARKLAVRLYWMWRNGWDYSQLVSFGSNAGKLATGHGVK

SEQ ID NO: 509549 - protein, 354 aa, unidentified
MSQTLNSAMAVIGIDIGKNSFHVVGHDARGAIVLRQKWSRGQVEARLANIPPCLIGMEACVGAHHLSRKLASLGHDARLMPAKYVRPYSKGQKNDFNDAEAIAEAVQRPTMKFVATKTAEQLDLQALHRVRERLVSQRTGIINQIRAFMLERGIAVRQGIGFLRKELPTILATRTDALSPRMLHVIEELAGDWRRLDQRIDGLSGEIEALARQDQACSRLMTVPGIGPIISSAMVAAIGTGDVFSKGRDFGAWLGLVPKQISTGDRTILGKISRRGNRYLRVLFVQAAWVVLVRIKDWERYGLKSWIEAAKRRLHHNVLAIALANKLARIAWAVLAKGRAFELTRTDDAGVRPA

SEQ ID NO: 509550 - protein, 343 aa, unidentified
MQIRSVGIDLGKTTFHLVALSAAGRVLLRKKFTQKQLITFTANMQISLIGMEACAGSHFLSRTLREQGHDVRLIPAQFVRPFVKSNKNDFLDAEAIAEAVDRQNMRFVPIKTDDQLDLQAIHRVRDRLIARRTSVINQLRAFLLERGMTFAKTPFKLKVAMPDILENAEANLTSRMRNLVSLLWSEWKDLEQQIVGMNQEIEQIASSDPACQRLRQIPGIGPLVATAIVAAIGNGAAFHKGREFSSWLGLVPRQHSTGGKARLFGISKRGNRYLRKLLVHGARSAVLRVKRERSPFGPWLDTLETRAPINVVVTAAANKLARIAWAVLSSGQDYRAAVNSVAA

SEQ ID NO: 509551 - protein, 424 aa, unidentified
MRLSSGPADDWDRRTGFVGLDWAKNHHDVVAVDRDGRIAMELRIDDDAKGWRRLRERLIEWVGADLSVVAATIETCFGPAVERLLEFGCAVYPISPKAAQSYRDRKAPSGVKDDLLDAWSLADGLRTDGHGWRRLVPDDPMTQHLRMLCRDEKGLIEQRTALVNQLQDALHEYYPAALAAFDDWTMPAAWAFIERFPTPQKLAKAGRRRWEKFLHTHRLYRPQTYEKRLGIFAAATSFCGNEPVTAAKSMLAVALARQLRGLEARLTEYRRQIESLYAQHVDSGIFDSLPGMGPKLGPRILSEMGDRRERFPDAESLQCYAGPAPVSFQSGQIKRVVFRRACNKHLRHAVHLWVDESRQRCVWAQTYYQKKREEGKSHACALRCLGQRWLKILWKMWQTRTPYDEAYHTRNQVRHGSWVVQLSA

SEQ ID NO: 509552 - protein, 373 aa, unidentified
MNYNTVYVGMDVHKETFSLCCYTNEKEQAEYPQKVDAHYSKVLNYLEAMRFHYGDDVMFICGYEAGCLGFTLYHQLTSHNVKCIILAPTTMSKPTGRKKVKTDKRDAALIARCLAHHDYSPVHIPTEQDEQVKEYIRMRQDHKLALKKIKQQILAFCLRHNYRYDTTKSHWTQAHLTWLRSLEPEGLYQEILTEYLATYDQLTDKLERLDKRIEELTSKEDYQENVSHLSCLLGVKIQTALSTLVEVGDFKRFASAQQFASYLGLTPGEDSSGEDQNRLGITKAGNSHIRTLLVEAAQSYTRGKPGYKSKALKARQKGNPADIIAYADKANERLRRRYYQLVLGQNKKANVAKTAVARELACFIWGMMTDNIH

SEQ ID NO: 509553 - protein, 373 aa, unidentified
MEQDTTYVAFDTSKETIAVAIAESGRHREVRFFGTIASRPEAVRKLVAKLAKRHARLVFCYEAGPTGYGLYRQLRALGYDCQVVAPSMVPVRPGGHIKTDRRDATTLAALFRAGELTAIWVPDAAHEAMRDLARGRQAAMEGLRRARQQLLSFLLRHGRIYPTRSHWTRGHRRWLAEQRFEHAAQQIVFEELIQAVEQAQGRRDRLGEEMKALLPSWSLRDVVAALQALRGVAMLSAITLMAEIGDFRRFVNPRQLMAWLGLVPREHSSGATTARGPITKAGNSRARRVLIEGAWTYRLPARVGLALLARSQALPEAVKVIAWKAQVRLCARYRRLQRAGKQTNVITVAIARELAAFVWAIANSIMPPIKPAT

SEQ ID NO: 509554 - protein, 346 aa, unidentified
MSQLKQYVGLDVSLKETSISVVDEADRTIWRGRSQSTPDDIAEKLSARAPHAVRIGLECGQLSNWLYVGLKAKGLPVICIDARHASAALSLKVNKTDTNDALGLAQLMRVGWYRETVVKGIDCRYLRSLLVVRQRLVSQITAIKNCVRGVIKGFGRVMPKALKRHFVPKIRAAIADDPMLAALIEPNLRTLEAAMEQLAVYDRAVLKQARDDATVRLLMTAPGVGPVVALAYVTGVEDPHRFRSSATVAAYFGMTPKRYQSGEVDLAGRISKCGDAMVRGLLYEAAKVLLSRSCRPSAIKSWGQSLARRVGAKKATMAVARKLAVVLHRMWITNQTFQWSREEATA

SEQ ID NO: 509555 - protein, 447 aa, unidentified
MVRSKKTVVEMPMLNPNAAGIDIGSTEHWVAVPTDRDKENVRCFSAFTCDLHQIARWLQKCKIKTVAMESTGIYWLNLFLLLEDYGFEVYLVNARYVKNVSGRKTDMSDAEWIQTLHSCGLLTNSFQPDNYTRKLRCYSRHRQNLIRQASRYIQHMQKSMELMNLKLHKVIRDIAGKTGMAIVGAILQGEHNAEILAELRDRSIRASKETIVKSLQGTWREEFIFTLQQAYDAYNFTQRQISECDEKIHKALKEKSCEINQGREAIIEKKSTRKKNRNTPKFDLDSYLKAHFGVDLTQIDGIDSLSGMNILAEIGSDFRKWPSRKQFLSWLNLVPNNKKSGGRLISSHMLNRKNTAGLIFRKCGSCLWKSKGPLGDYYRIQRAKNGGKAAAIATGNKLASIIYTMVTRQVEYDETILQSMKRNSQLRRLNNLKKKVEHLQKTLEEAA

SEQ ID NO: 509556 - protein, 332 aa, unidentified
MDNFYFIGVDVSKKKLDFCVLFEGKVLREEQVSNHQQAVARLIGELKNDLEMDNEQFLICAEHTGQYTFPLVCACKSVECKLWLENPSQIKYSSGMQRGKNDKVDAKRIAIYASRFGDKVKYYDRPSEEIERLKQLERERALYVTDLAKYKGQMYDQKDFMPAALYRKKTKRMKGLIQELQAAIDAITAEMEKIIGSTEVLARQMELLMSIDGVGKVVALNVIIETEAFTRFDDPRKFCCHAGVAPFSYTSGSSQHSKNKVSHRANKNIKKLLHMAAVSVTHRKEGELKAYYMRKVEEGKNKMSVINALRAKIVARMFAVIKRNEFYTPIYS

SEQ ID NO: 509557 - protein, 409 aa, unidentified
MLFIGDDWAEDHHDIEVEDEQGRRLARRRLPEGVAGIEALHALVADHLPDDAEANQVLVGIETDRGPWVQALIAAGYTVYAVNPLQAARYRDRHGVSGAKSDAGDAHVLAELVRLDRAHHRPVAGDSAIAEHVKVLARAHQSLVWSRQRQTNMLRSMLREFYPGALDAFAGELDGRDALAVLAIAPTPADGRRLSRARVETALRRAGRQRYVATRAAEIVAALRADQLPARDGVEGAYGASVRALVAVISELRHQTLALAGAVEAGFGRHPDVEIYLSQPGLGPVLGARVLAEFGDDPARYADAKARRNYAGTSPITRASGKSSAVLARHVRNRRLADALDQQAFAALQASPGARAYYDARRARGATHHQALRALGNRLVGVLHGCLRRHQRYDEARAWQQHAVVPRAA

SEQ ID NO: 509558 - protein, 429 aa, unidentified
MNIKPIAGIDVGKFFSEMVILSPSNELFARMRIHHDSNADMRRAIELLKKAEKDFASRPFIVIESTGHYHKILFHFLQKSGFEVSTINPIQTNCIKNFGIRKVKNDKVDARKIALLYRFHELKPTSISNEDIDCLRSLCRQYYKLSDELTAYKNRFISIVDQLMLNFKEVFPNVYSKTAIAVLEECPTPTAIIEADRDKLISIIQNNSRKSLEWATKKYELLVSKAREFEPLSINNAANVTMLGIHIAMIKTLQENLDKVLKAIHQLIADDLSKDLPAMALTIQLLQSIPGVGFLSAATIVAEIGDFNAFSKPKKLVAYFGIDPSVRQSGEFTGTHNKMSKRGSRLLRRVLYTIALANIRTKRNNEPCNPVLMEFYKKKSQNKPKKVAIGAVMHKLVFIIFAVLRDRKPFELRSPEQHAKILAKNRTVA

SEQ ID NO: 509559 - protein, 347 aa, unidentified
MLHAGLDLSRKKLDVCLLSDQGEHLDQFAVPPDVDSLRRLAGRIEEVHRQPVCAVIESMTGARIVHDTLEQQGWSVQIADAQKVKGLAPLACKTDKIDAGVLAELARRDLVPEIWLPDPGTRADRERARFRLHLVRKRTALKNRVHSTLIAWGKPCPVSDLFGRRGRGLLGRLSIPEPWRSTLQASLQLIDSIDGEITAQERELRLIGAAHPYVPQLTTVPGIAWVLGFTIACEIGDITRFPSPKKLTGYTGLCPKVNQSGEHDWRGPMKKNGPRYLRWALIEAAQHAGRSPHYRELYERTRKRHGPQRGAKVAAIVVARKLSGAIWHMLTNDEPFAPGSAAGTLAA

SEQ ID NO: 509560 - protein, 418 aa, unidentified
MQQVPGMFRWMGRAVGLDLHRDFCEVAICEDGVVRSAGRVKMTPEGLEALAASLEPTDRVAMEVSGGAWEVARILEPCVQRVVVVSPDDTGIAQARTKTDKLDARTLASLLWRGELEAVWMPDERARVLRRRLARREQLVRTGTRVKNEVHAALMRRLQGKPPFSDLFGVKGRKWLRQLSLPPEEAETVQAALRHIAFLDREIEQVEGLVAKQMLTWPEAKRLMTVPGVNLIAAATFLAAVGDIARFRNSSKLVAYLGLDPRVRQSGEQPARPGSISKRGSVSARWALVEATWSAVNQPGPLRAFYLRIRARRGHGKAIVATARKLTALFWCMLTRGQDYAHQQPSLTAQKLRRLELTAGAPVRKGKPSGVWVTHQKMRQAEKRLAAQAQASYERTVRDWQASGPKKQAGASVTPERA

SEQ ID NO: 509561 - protein, 341 aa, unidentified
MKKFIRTSIDLGKSYFQVHALESEGGQSISRKMKRSKMREFYEQIEPCRVGMEACGSGHYWARELVAMGHEVVLIPPAYIKPYVKRGKNDAVDAAAICEAMSRPGMRFVPIKSADQQAVLMLHKTREMFVKQRTMGVNALRGHLAEFGIIVAKGIGRVDELLALAQSDAELPQIAKSAVAGLAQHLEGLDQSIEAVGDEIARAHKKNPTSRLLDEIPGIGVLIASVIASSVPDPSVFKTGRDFAAWLGLTPKQNSSGGKEKLGSITKQGNRYIRKMLVVGATSVMRVSGKRKGALADWINALQAKKPKRVAAVALANKLARICWAIMSTGEGFRVDTYVRA

SEQ ID NO: 509562 - protein, 400 aa, unidentified
MNAVGIDVSKGKSTVAVIQPFGVVIAEPFDVLHTDSGLKELVNFIKSLSGETKVVMEYTGTYYEPVANALHNAGIFVSVVNPLLIDDYDTNRVRKVKTDRIDALKIASFALDKWIKLLEYTPAETTCKTLQIMNHQCIKLNKMLVMQKNSLIALLDCCFPNANTLFTSPRRESDGHEKWVDFVLKFPHVDFVAKLPLSVFKIKYQSWCKKERYKYSESKAEQIHAYARTLVSTLPMTDAVRKMVSDSAKLLNSILEALGVLRSEMDALASQLPEYETVMNLFAVGKVTCSQLIAEIGDVTKLKSGKSLVALAGIDPPPNQSGKEDKKSRSISKCGSPALRKTLFLIMTIYLQRQPIDEPVYQFLDKKRTEGKPYKVYMIAAARKFLRIYYARVKEVMPME

SEQ ID NO: 509563 - protein, 410 aa, unidentified
MAERFVGIDVALRAHRIAVLDRDGEAVGHSFTIAASTDGVATLLRTLAARGATAAQTLIGLEASGHLWENLEAALVGAGYRVIVLNPLQTRRYRDVVRRKAKTDDIDAHVIAGLLRSGAAQASYVPDEPIQSLRELARLRARLMADRQDYQRQLVAQLDVVLPEHHAVLGDLLTARARGILAQFPTAPHLAHANPRAIRRAAEEAGARGFSLTDATVVRDGARRSLYSGKAAAARAHVVRTLVSQLERLTSAIDEVDRAATALLPPSEPGTGPSDADLLQTIPGIGPQTAATLLGELGALTRFTGARALVAYVGFYPVLNESGDRAAPPRLSRVGSRLARRSLYLAAVNAVRRSGEWRTIYLRKKAQGKTAKQALVVVAVKLLHAVYAMLKHRQPYNPSRLLVAPATIRT

SEQ ID NO: 509564 - protein, 388 aa, unidentified
MIYVGIDIAKLNHFAAAISSDGEILIEPFKFSNDYDGFYLLLSHLAPLDQNSIIIGLESTAHYGDNLVRFLVSKGFKVCVLNPIQTSFMRKNNVRKTKTDKVDTFVIAKTLMMQDSLRFMALEDLDYIELKELGRFRQKLVKQRTRLKIQLTSYVDQVFPELQYFFKSGLHQNSVYAVLKEAPTPNAIASMHLTHLARTLEVASHGHFGKDKARELRVLAQKSVGVNDSSLSIQITHTIEQIELLDSQLFSTELEMANLVTCLHSVIMTIPGIGVVNGGMILGEIGDIHRFSNPKKLLAFAGLDPTVYQSGNFQAHSTRMSKRGSKVLRYALMNAAHNVVKNNATFKAYYDAKRAEGRTHYNALGHCAGKLVRVIWKMLTDEVAFNLE

SEQ ID NO: 509565 - protein, 416 aa, unidentified
MKKHNNSGKKSELTSKRAKSRGPVQRDTKEVLAELVGKLKEKLDRKKVAARSAGEEHPGGELRPNLDRLTVGVDLGDQGSHYCILGLEGETLAEGQLRTTQEDLATFFQGLNAARVVVEVGTHSAWVQEVISGCGHEVLVANPRLMDGSKRRKRKNDRIDAHKLARLGRVDPESLHPIQHRSREVRRDLVMLRARDALVAARTELINTSRGLVKSMGTRLPKCSSRSFAQKGEETVPVEIREALLPLVRLAAALSADIKQYDKKIETLGREKYGHTALLRQVKGVGPITALAYVLTLENPQRFVKSRDVGPYLGLVPKQEDSGESQPQLGISKAGDTMVRKLLVGSAQYILGPFGPDTDLRRYGLRLCERGGKNAKKRAAVAVARKLAVLLHRLWVSGEVYEPLHYAMSAPIAAAA

SEQ ID NO: 509566 - protein, 345 aa, unidentified
MGETTIIGLDVAKQIFQVHGVSADGKVTVKRQLRRSQMLGFFGKLTRCVVGLEACGGSHFWAREIRAFGHDVRLIPPAYVKPYVKRGKTDAVDAEAICEAVSRPTMRFVPIKTAECQAALMVLKTRDLLVRQRTQAINALRGHLAEVGIVAAKGAAKVEMLFEIIRDENDGRLPPAARTALKMLTEQIEALTERVDTLEGKIVAEVRRDDTMRRLTTIPGIGPITAATIQALVPDPGAFTSGRHFAAWIGLTPKMHSSGGKERLGKISKMGNPALRSLLVVGATAVSRQVRRGATMSPWLTALLARRPAKVAAIALANKMARIAWALLTKGGEFIRKNPVAEPAT

SEQ ID NO: 509567 - protein, 317 aa, unidentified
MLQHNTICAGIDVSKHKLDLAFSHQTHVQTIPYTLAGLKRLLESLRKSPVGLVCLEATGGLERTLLAELHRHGIPVAVVNPRQIRDFARAANQLAKTDRIDARIIARFALLMNPRHTEPLTEKRQKIRDLTARKRQVVKLLIQEKNRLAATADVEIQRMIEQALSLYEQQLRELQKQIASLIDADQEAQAKARIISSVPGLGPASVATLISELPELGQLNRQQIARLVGVAPTNRDSGTLRGKRTTGGGRVEVRNALYMPIIVAKQHNPVIKRFYDRLVQSGKPKLVALIASMRKLLAILNVMIRDGQPWKSVTLLT

SEQ ID NO: 509568 - protein, 411 aa, unidentified
MRVHHNVCCGIDVHKKSVTACLMWGPADREPQLEIRRFGTMTRDLQKLAEWLKQAGCEAATMESTGSYWKPVWNVLEGQIPRLVLANAQHVRALPGEKTDRKDGKRLAELTRHGQIRPSYVPPRAIRELRDLTRYRSKLLSAGSSERNRIQKVLEDANIKLGSVLSDMFGVSGQRMLQALVQQDIPDSAEIAKLADWRLKPKMEAIKQSLEGKLSDHHRFLIDLSMQHMRVIEEQLIRLDQEIQRRLQPYQEEYALLQTIPGIKEAGAARILAEIGPDMSAFPDGDHLSSWGGVCPGNNESAGKKFQSKIRKGNLHLLAALTECAWAATHKKDCYFRNKYYRLKSRRGAQRAIVAIDHAMLKCIYVVLAKRQPYQEPKATSLTEVQKQRKASALCRQLRKLGYDVTIAKAA

SEQ ID NO: 509569 - protein, 316 aa, unidentified
MNRQDHNEINIGIDTGQAMLDVYVRPLDEFQSFDNNPEGIRTAIRFIRQFEPVRVLIEATGRLEMAFFCAAHKAGLPVCVCNPIQVRKFAQSMGRLAKTDKLDAQDIAYYGETAKPEPTNLKPEKLRLLSDLLAVRSQCLGMSTMQENRLQRMPKTVHKSIRNILKAITKEIAGIDQQLDKLVAEIPHYQERVDQLTSAKAVGKVLAYTLLSDLPELGHLNRKEIAALVGVAPMNRDSGKHKGKRKIQGGRHKIRTVLFVSMLSAIQCHPTIKPMYQRLVAAGKPKKVAIVACMRKQLTILNTMVKNGTYWDENMI

SEQ ID NO: 509570 - protein, 327 aa, unidentified
MRYLGMDVAKAKLDCLLLSDDGDKGKSKSVANNRSGIADFLAWIGKQHISPNELHIVMDATGVYHEQAALALADAGVTVSIVNPAQVKNFGRGLAVRTKTDGMDSYVLARYGVLLKPAAWTPPAPEARMLQALLARRDAIAQDLHRERNRQEKAEATDTPALIRQSLSDSIEFLSRQLAQLQQDIDQHIDRHPGLKDDLALLQSIPAVGPQVGNNMLAVMRSHDFGSAEQLAAYLGLVPVERQSGSSVMGRAKLSKAGPARIRAVLYMAAVVAIRCNPHVKAVYDRLLTRGKSKMSALGAAMRKLVHLCFGVLKTRQPYRRDYAKNS

SEQ ID NO: 509571 - protein, 365 aa, unidentified
MNLNTATKAGQIIGTMNGLQVIGLDIAKHVFQLHSVDMSTGEIINIQIKRAKVLEYFVNKPPCLIAIEACGGAHHWAREFTAVGHSVRLLHAKIVRPFVGGNKTDATDARAIWQVVQQPGVKFVGIKSTEQQATLTLHRQREMMMKMCIMQTNAVRGLLYEFGATFAQGRQALFKDVEKALEALADQLPQMVRDSLREQVARIKATSEDMKAIEKRLTLQLRQDRQMQRIFQIPGVGLLTATAAIATMGEASAFKSGREFCAWLGLVPSQTGTGGKVRLGNISKRGDTYLRTLIIHGARSVLAHTKEPGPWLDALKGRRPASVVIVAQAAKMARTIWAVTAKEQDYKRDFQSVRPATAAKAPVLA

SEQ ID NO: 509572 - protein, 355 aa, unidentified
MRILSLDLSKYKTVGCDYEAETGRHEFATVLTTHKGLHDLIVDREPDRVVIEICSIAGWVCDLVRSLGIEIQVASTNDERWQWRKVKTKNDRRDGLKLAQLSARNELDLVHVPHSEMRQWRALIAYRQHLVQRRTKIKNHVRELLLREGQLLPRHRSAWTQEGIANLETMARPFAEVSMAELWRGELEVELAQFTAVQAQLTEVVAKLDALGAANHNVRLLQTASGVGPRLAEAVVTMFDDPRRFRRGAAVSAYIGMVPKQWDSGETERLGKITRHGNRLVRSLLVEVAWCALRHNPWARETYQRISGGKKSRKKIAIVAVGRKLLVRCWAMLRDQTPWHWEGQSAVVTPPAPTA

SEQ ID NO: 509573 - protein, 476 aa, unidentified
MKKHKKAKTKSKAASPLHQPEPNAAGIDVGANEIWVAVPPDRLEESVRRFGAFTGELKALVQWLQDGGITTVAMESTGMYWIPLYQLLADSGIKVCLVNARHVKNVPGRKSDVCDCQWLQYLHSVGLLRASYRPDQAVCAARSLYRYRQKLLVQSAQHVQHMQAALDQMNIKLHHVIDDLTGMTGMAIIESILSGERDPQQLAKHRDRRIKASQATILKALEGDWRSEHLFVLRLGWENWRQAQGQIQKCDSQLLEYTRQLEACTTIAKPVKIMRLSPQLATRSAGLSRPSKTRNKTSKNQPEGPWREELLRCFGVDLTAIPGVSVLTGITLLTELGNELSAFKTAHHFSSWLCLCPDNETSASKVLRRATRRSQSRVRQALRMAASTLYRDKSSLGDKFRRLRAKLGAPKAITAMAHQLARIIWHLLVHRVPFDLALFALYEQAHQIRRLKSLASAARHMGFQLTPLATSDQSAS

SEQ ID NO: 509574 - protein, 341 aa, unidentified
MNLKRVGLDTSKAIFTVHGVDQDERAVLRHNLKRAGMEAFFAKLPPTLVALEACGGSHHWARRLAALGHTVRLIPPQYVKPFVRRGKNDRNDAEAIADAASRPGMPCVPVRAAEQQAEAIVLSVRELLVRQRTQLVNAVRGHAAEFGVVAAKNISHLSGLLETVAAEEAVPSTAKEMLAFLGAQVAQLDERIAELERRMKQQHKASAVSQLLAEVPGIGPISALTLALKIEPGRFTSGRHFAAWLGLTPKEHSTGGRQRLGGISRAGNERLRQLLVVGAMAVIRYAKPGSKTASAWLLALLERKPRKLAAVALANKMARIVWAMMATGEAYRGSKGAAAAA

SEQ ID NO: 509575 - protein, 346 aa, unidentified
MVHVGLDLSRTRLDVHVMDEAGSALAITTAAPDRGGLAVLASRIDGFGGPVYAAIESMNGARFVHDQLELAGWQVEIADAQKVKGLAPLACKTDKIDAWVLAELSRRDLVPAIWLPTPTVRAERERARWRLHLVRHRTALKNRIHATLLAFGHPCPVSDLFGVGGRELLHRLELPEPWAADTTAALQLIDQLDTEITAGERALRRLGADHRYVPLLMTTPGVGWVLGYTIAAEIGDIARFPSPTKLAGYTGLCPRVYQSGGKDHRGPLSKNGPKYLRWALIEAATHAARHPIYAERYRRTKTRLGRQRGPKIAQIELARRLAEAIWHMLSPNRPFAPAGAAWSLAP

SEQ ID NO: 509576 - protein, 337 aa, unidentified
MIIGCDFHPRFQQIAFLDQETGEYRACRLGHVAEAEQFYRSLAGETVRIGVEATGNFGWFRRLIGELGFEFLLGDAGAIRASNPRKQKTDKRDARHILKLLVEDRFPVVWQPGAENEELRQLLLHRSRLIQMRRRVKNQLDALAKNEGMLSRRVWTAGRREEIESLPLTGWRRQRRLDLMAMLDDLNRRVEPLDKAVGQAARENSQTRLLMTHPGVGPIVALAFVLVIGDWQRFPRGKQVASYLGLIPAEESSGDKRRLGKITKQGSTLVRWLMVEAAAIAQRKDASWHRQYVRLSMHKHHGVAKVAIAHKLAVRLYWMLRSGQSYEQVVERGSHAG

SEQ ID NO: 509577 - protein, 339 aa, unidentified
MNLIKTLGIDLAKNTFSLVGMDKYGKVIFRKTLSRKKLLPFIAQLHPCLIAMEACSGAHYWAREFKSIGHQVAIIAAKFIEPFRKGGKNDNNDAEAICEAATRPNIWHVPVKTAEQQAIMTLHRVRQGLIKERTAMINQIRGLSAEFGITIPQGRYSLQDKIQSILEDADNKLPTIARQMINDLWQRIKQANEQILSYDRALAQQVREDTVAQRLMTIPGVGEQIATAMSANVPDPRLFRSSRQFCAWLGLVPRQYTTGGKIRLGRITKRGDKYMRMCLIHGARAVMANLGDKQDKVSCWIRELIERRGYLRAAVALAARNARLIWTLMIKQEDYKVVA

SEQ ID NO: 509578 - protein, 399 aa, unidentified
MLAVGIDISKSKSVAAILNQDGSMHTSPFEFHHTQPELDAFIKYILNSKQSATILMENTGHYHYPVLKAFREAGLPVCMVNAYQIKKFGDMDLRKAKTDKKDAVRIARYALEKSYSLVPYTSMEQKYEDLRFLARQYNQRMLTLKTNKVFLLNLLDETMPGITNILPLTTRTPETSLSVLFINRFKSYDRIKKMGKSRFLDAFEKIARKSRNRQTKTYGLAIYEAALRNITTRGENEYTLAAQDQCLELVCESQKAADSIILKMQTLAETLPEYAVLRSMAGVGDRLGPLILAEIGDIRRFHSGKALNAYAGNDAPPYQSGIFESHNRHISKRGNAALRKYCFEVMQALKLTRPQDDPVYLFLLKKEQEGKPYNVAKMAGVNKFLRIYYARAMETLKQQ

SEQ ID NO: 509579 - protein, 475 aa, unidentified
MREVQEIPDEEHERVLDRVCAIDVAKASGMVCTRLPPGGGRAGARVSRVWEVPATTRAVMDLAAHLVDLGVEKVTVESTSDYWRIWFYLLEAAGLDVQLVNARDAKNVPGRPKTDKLDAVWLAKLTERGMLRASFVPPATVRQLRDYTRLRVDLTRERTRHFQRLEKLLEDALIKVTSVASKIGTVSVRDMLEALIAGERDPQVLARLARGRMKVKYPALVEALTGRFDDHHGELARILLDQIDALARQIDQLTVRIDALITAMPGAAAPEPVDPGGGTSVMVDPLTGEILTGPTTTPVPGRANQPPGDHRALSAVERLAEVTGLNIYSAQTVLAEVGLDMTRFPTAGHLTSWAKVTPQTIQSGSRSRGGKTGKGNPYLKGALGQAAAAVSRTQTFLGERYRRLVKRRGKLKALVAVARSILVIVWHLLSNPTARFQDLGPDYYTNRIDKNKQTRNHVRQLEALGYTVTLNTTAA

SEQ ID NO: 509580 - protein, 345 aa, unidentified
MSLMFFLGVDVSKKTLSVVLTDHKDKTLWSNKSIPNDEVGFKKLVETVIKNASKKAGKEEYSIAAGMESTGVYGERLAYYLNGNSHNGRIVTYVLNPAAVRAFGNSVMAPNKNDSADAQLIASYLSMAVTKEQISPWKAPSPEGRALRELSRRREELTELHASECNRLEKLECMQEPPEAIVRNVKELISYLEDSIHNLEKEIEEHIDNDPGMREDIELLRSIPGIGDVTSVTLQGESDGLINFASVKGLVSFVGIAPREHTSGTSVFKKSKISRRGNSRIRHHLYMATLVAARVNPVIKEFYERLLNRGKCKKLALVACMRKMLHIIWGVMKNRKRFDPCYSLK

SEQ ID NO: 509581 - protein, 365 aa, unidentified
MNATAALPVVGIDVANVVFQLAVADGDWRVIEEHRLTRTQFERWFANRAVGLVVMEACGSAHHWARWLNALGIEVRLLPALYVRAYVKRNKTDAADACALLEAARCADITPVKVKSIEQQALQGLHRTRSLWMATRTSRINALRGFCREFGIVIAQGARLGVERIARVLADPHSGVPELIRGTMKLLIEEIRLLEARVAQLERELTIVARASGACTRLLSIPGVGLLTATAMVAATSGGVQHFRDARHFASWFGLTPKERSTGNTRLLGRISKRGDRYLRMLLTHGARSVLHASRRAVQAGKSVDALRQWALAVQERSNHNKAACALANKLARICYATLRDAQPYGIPVRRPNKKLERASFEIAA

SEQ ID NO: 509582 - protein, 348 aa, unidentified
MIIIGVDFHPEFQQIASVDTETGEFQEKRLAHPAEAEKFYRSLLGQKVRMGMEASGHARWFERLVAELQFELRIGDAAEIRSKRVRKQKTDRQDAQLILRLLLEDRFPQIWVPSWENRDLRQLLWHRHRMVQARTRIMNQLQAVALNEGLRCKKKLWRERGRQQLESFRLAPWATRRRRDLLELLDRLTPTIAELSHAIEQEVEKCPAAQRLRTHPGVGSLTALAFVLIIGEVNRFRCGKQVASYLGLVPLEESSGNRRRLGHITKQGSSMMRFLLVEAAQVTVRSLPEWRSKYLHLVLRRGRKIAKVAMARRLAVHLFWMMRKEWNYQQLKKFGSHAGEPGNRHGVQ

SEQ ID NO: 509583 - protein, 402 aa, unidentified
METSKQYLRFCGIDMAKQKHVACIIDQNGQYLLRPKSIRNDVTGFQQILNCLKQSGRAKSILTGMEATGHYWYSLHDFLTREGYAVAVLNPIQTAQQAKQAIRKCKTDKYDAFHIANLLRSGQYKAAVVPGELAMTCRQLTRLRYRIVKQSAMIKQLVNSRLHPVWPEYEGLFSNKFGTTSMKLLQIASTPKELVELDLDDLSEMIRKASRGRFGPAHTQKILHSAKNSVGMQRGHYGISTGIKFLLEQIEALEPVRKKMDVEIEKLAARLPEYLFTLPGATKLTIASLYGEVNPIEAFKKPSQLVAFAGLDPKVFQSGQYDAPRRHVSKRGSPYLRRTLWQMAYRAVCNEGDLRDFWRRKHRQNKHHLVAVTAAANKLCHIVWRIMTDRRDYIPKGYNPKS

SEQ ID NO: 509584 - protein, 358 aa, unidentified
MSNKVIFNLDDLFISVGIDVGADFSWMSIALPNQQFVGKPYKILHSSIDSLTTAVSKIKEAEELYSLESRIFLESTGIYHYPLFCYLRDKGFNCSVINPIITKNSTNINIRKVHNDRFDSKKAALVGLKPDLKVSLMPSDLALNCRNLCREYYDLMDNRGAYVNKLQGELRMAFPQYLGIFSKVTINTSLTLLETYTSPSAFLEADKQEIIDIIKSTARFGLTYAQNKYNAIIQAATDANQFGYIIDSNIKRIRLYISFIRKYDEEINNILESLHELVDANEDADFVKQIHLIETFKGAGFLSAVSIMGEIGDFSAFSKPKQLFAYFGLDPAVKQSGKFEGTKVQMSKRGSAIASQEM

SEQ ID NO: 509585 - protein, 421 aa, unidentified
MSSIENEITKTRNHSRQRGNMMRTVFGIDVSKASSEVAIVINGEKIHGYTMPNDAIGFTRLLDDLKTVQKPEIIFEARGVYSRRLQAFLEENGYAYTQLNPLEAKKQLDSLRVRKTDKIDAETLAISQFVLNRKPTYIQEEVYQELRDLSRFYQNLTEDIVRTKNRLHKVLQVTFPEMENILSTPTREQYWNLVMTFPYKDFVLELSKDELLEGIRQSTSKRISDKRVAYLAQKLAALANQSYCAVKKNSPILEEVRYYAKELLRLSEQRQAVLEQMVELAQPLPEYEILLSIPGIAETTATSMIGELGDIRRFQSANQINAFIGIDLRHYESGNFLAKEHITKRGNPYARKILFKCIHNIAAASHTNHCHIEDFYEKRKRQSQTTSTKPHTIASIHRLIRTMYYLITHNKLYDYTSTQNR

SEQ ID NO: 509586 - protein, 338 aa, unidentified
MQWTVAIGVDTHKDVHVAVALDVFGAQLDSREIATTPAGYRSLLSWAQELGVPAFAIEGTGSYGAGLVRFLERAGVSVYECERPRRQERRRGKSDLLDAALAARKLLGGEGLSFPRGGGRREDLRLLLLERRSAMRARNAALNQLSALLVTAPDHLRARLGALSGDRLAHAAARLRPRPEVMTGVLRRLGQRAVRLSNEVAEAERALAALLAQAAPDLLEECGVGPVCGAQLLVSSGDPSRMTSEASFAALAGTSPVDASSGKQRRHRLNRGGDRQLNWALHVVALARIRHHPTTAAYYQRLLAAGKTTREARRCVKRALARHFYRRLREMSALPLTT

SEQ ID NO: 509587 - protein, 344 aa, unidentified
MNSTTIAVDVAKSVFEVAVSEQPGQVRERQRLSRERFRRFLTERPAATVLMEACGSAHHWARHAQAQGHRAVLVPPHVVRPYVLRNKTDRTDAKGLLEAFRNEDVHPVPVKSETQQALAALHRLRSTWLATRTARINTVRGVLREFGLILPLGAHHVVPHVRTLLEEADSGVPGLLRPALAAAVEEIRAIEARMRAVEQQLEAGAAQTLSVRQLRTIPGIGLLTATALVAAVGDVQRFPSARHFASYLGLTPREDSTGPRRRLGAISKRGDTYLRMLLIHGARAVLWHAKTKTAPPPDRLRAWALQVERLRGHNKAAVALANKLARIVWAVWRHGNDYVGTPAV

SEQ ID NO: 509588 - protein, 404 aa, unidentified
MWYVGLDWADTHHDVEVLDEAGKRVGVRRFVHNHEGLNELKAFLLGIAASPEELACIVETNHGLLITFLLEAGIPVYPVNPKSANQLRKAAGAKTDQIDAHLLAKLGRLDLAELRRMAPDSPTVQELKTLTRDQDALIQTQTRLVNQLTACLKEYYPAALHLFAKLQQRSTLVFLQAYPTPQAAQAASVEELIATLRTGKHTNPTQVAPKIVEELHRPQLVANEVIVRAKSRLMLSLVKQLLVVIEEIASYDKAIRPLFLSHPDQELWSSLPRAGKRLAPRLLAEWGEDRSRYADATSVQTLAGTAPVPFQSGNYAKAHKRFACVKPLRNVLHQFAWQSTRQEAWALAYYQRKRAEGKTHSMAVRALANVWVRIIYRMWVNKTSYRTATFEAAKRAHASRPHAA

SEQ ID NO: 509589 - protein, 414 aa, unidentified
MDRSYLVAGIDVHKSMLAVVVSDVAREGEFQFQRRKFGATASELKALTVWLDEQDVREAVMESTAQYWKPVWQQLEGHCELFLAQAHSNRAPRGRKRDFADAERLLRRHAAGELILSFVPNAEQRLWRTMTRSKHQLTRDRVRLHNQIESLMEDGRIKLSGWVSDLLGVSSRRILQALSTGETDVTKLAALADPGLRATSEQLQDALSAAATLGALHRQVLGLFLERLALIEKHMEMLDKSIAGALHRYREAVERLAEVPGYGIDSAHQVIAEVGAGAESFPSPEQLSSWVGTCPGREESAEVSNNNRSPKGNRMMRRVLTLVANAAVKSKGSVFQNLYRKWVVRMGHNKAIWAVAHRLCRLTWKILHQSVRYVEYGTRANPQAVKKRANKLLRDLKALGYQVQITPTQPEATA

SEQ ID NO: 509590 - protein, 405 aa, unidentified
MVRYIGMDVHREFAQLAVVEDGLVRDEGRIGVTPEALRQWAASLLADDQVSLEATGNSDAIANLLMPLVGRVVVSNPSKTRAIAEAKVKTDKVDARILAQLLAADFLPPVWLPDERTRCLRRQVTRRAHIVRQRTRLKNQVHAILARNLAPTPPVSDLFGTTGRHWLSRQDLPADERASVQALLRQLDFHGAGLAVVDKELALEALTDPVVARLMTIPGVDAIAAISIVAAVGDFTRFDDPDKLVAYVGLNPKVRQSGNSAPVHGRISKAGRAQVRGVLVEAAWSATHAPGPLRAFYLRIKARRGFQTAVVATARKMTVLAWHLVTKDQDYAFARPGLVTHKRRKLELAAGAPSLRGNHRQPGAAYNSKQQRDEENAAAARAERAYEVLVAHWQPRKPAGNQAGA

SEQ ID NO: 509591 - protein, 337 aa, unidentified
MKYSGIDLHSNNSVVSVIDETDRGVAEKRLPNDLKTILAFLAPWQLELAGVVVESTYNWYWLVDGLQEASFQVHLANTTAIKKYDGLKHSGDETDARYLAHLLRLGILPTGTILPAKHRAVRDLARKRMQLVRSRTNHILAVESITARQSGTRITSNQVKRLDEAAVDQMPLPDDVALAVRANVAVITTLSAQIHILERRLQEKVAPNHDYALLTTVPGIGQILATVILLETGTIERFASVGNFASYARCVDSQHTSNGKKKGEGNTKNGNPYLSWAFIEAANFALRHCAEAKRFYERKKAKSNPILARKALAHKLARACFHMLKERKPFDVARCFS

SEQ ID NO: 509592 - protein, 416 aa, unidentified
MIKTKKQRIVNGKALIVTVDISKDKHFGYWRCPDGTDVKPFSFPNNGTGFSEFWERISRAKEIHRLDEIVFGFESTGPYGEALVHFMKARGVRLVQVNPMHTKRVKELQGNSPNKTDQKDPKIIADIIELGRALTVVIPEGPAAELRRLTQARERSTERLTGLTNQLQALLAIIFPEFLQVVKNVRTATAHYLLKHCPAPQSLVAYGLDNLTKTMWNVSRGRLREDRAKALYEAAEGSIGVIEGQASILLETRAILAAMEASEGFIEGLEKEMSHHLKQIPYSNCLLSIKGIGEVTAAGLIGEVGDFRKYSTLGEIMKLAGLDLFEVSSGKHQGTRRISKRGRPLMRKLLYFAAMNMVRRGCVMEHQYQRYLDRGMLKTKALIAVARKLLRIIFAIVRDNSVFDYSRTSFQFKEAA

SEQ ID NO: 509593 - protein, 396 aa, unidentified
MLRENEGTISTQDQPTGSDIFVSVEMSRSKWVVGIHTPLADKIGLHTMACGDVEALMALIDRARVKLVASGSNSPAAMICYEAGYEGFWLYRRLIALGIRVVVIDPASLLVDRRAKRAKTDRIDARAMVRALMAWARSERQVLREVRVPTVEQDDARRGLRERQRLVKERTGHGNRIKGLLKTQGIMDFDPRAADAAARLDAIVTGDGRPLAPCLKREIVRELERLALVMRQIDQVETERDAVVQACDAGAGTDALAAEPEREAAMIGELNRLKGIGMNDATILVREAFWRDFRNQREVGGWSGLAPSPWASGSVLRDQGITKAGPPMLRAHMIQMSWRWLLWQPDSDLAQWFRKRTEGATGRMRRIMVVALARKLLIALWRYATTGMVPHGAIVT

SEQ ID NO: 509594 - protein, 389 aa, unidentified
MKIFVGIDIAKLNHFAAAISSDGEILLEPFKFTNDADGFQLLVSKLESFDKNSIIIGLESTAHYGDNLVRYLVAEFYQVCVLNPIKTCQMRKNNVRKTKTDKVDTFVIAKTLMMQDDLRFITFFDLDMMDLKALGRFRQKTIKQRTRLKIQLTTYVDQVFPEIQYFFKSGLHQHAVYALLKEAPSPKEIASMHMTHLANLLKVNSHGHFTKELAKELRVLAQKSVGANDSAISIQITQTIQQIELLDSQLEKIEAEMTDIMKFNDSVIMTIPGIGYINGGMILGEIGDIHLFSNPNKLLAFAGLDPSVYQSGNFQAKTTRMSKRGSRVLRYALVNAAWNVVRNNATFKAYYDAKRAEGRSHYNALGHCAGKLVRVIWKMLTGEVEFNLE

SEQ ID NO: 509595 - protein, 353 aa, unidentified
MQTASASTAPLASIGIDIGKDVFHFVGFDIKGKIAFRRKIKRLALVETFKKIPPSIVGLEACLSAHFVSRALRALGHEPRIIPAMYVKPFVKGQKNDYNDAEAIAEAALRPNLHFVREKTQDQLDLQACHRVRSRLVSRRTATINQIRAFLIEQGIAVRAGAHALRNSLFVILKNREDEISERMSDLIVGLYEDWLWLDERIETVSKEIGEISQKEESCRRLMNIPGIGPLVSTAIVAAIGSGEAFERGRDFGAWLGLVPRQYSTGGKPILGRISKRGSTYIRTLLVQAAHIILMRPNNWDRFSFGPWLKQGAIRLHKNKLAVALANKLARIAWSVLRYGTAFDTRFRETGAV

SEQ ID NO: 509596 - protein, 408 aa, unidentified
MPDLNLPAWPVFAGIDWGGENHQLCVVAPDGKRLLETRVSHDVAGLHQLDLHLNGFGGQVPIAIERSEGLLVEHLQATGHAVFPVSPRISARARERYKVAAVKDDRFDAFVLADTLRFDHAHWRPLSVPSPLLAEIKALTRDRDRLLETQQATESQLRMILEAYHPAPVRLFSSVDRQITLSFVTDYPTPANASRVKTTRMAGFLSRHHYTGRVPAKTLADRMRQNLLSGSPGTVAGKSFSALAFTQVLQLLNTQLAEYDDAIAAATAEHPDALLFASFPGIGPVLTAVLLAEIGEDRARFPQPEVLLAEAGLAPVTRSSGRSRSVRFRYAANSRLREATMWWAFNSIKMSPWAAAAFRDARDQKGQRYHRALRGLAARWTRILWRCWTNHETYDPARHGSAALITAA

SEQ ID NO: 509597 - protein, 391 aa, unidentified
MIYVGIDVAKDKHDCFIINSDGEVLFKAFSIANNRNGFNDLYQKIESVMEDVTKVKVGLEATGHYSYNLLGYLIDKGLPTYVINPLHTNLYRKSLSLRQTKTDKVDARTIASMLMSDVNLKSYSDTSYHNEELKSLTRYRFDKVKQRAKLKSSVSRLVCILFPELEKLVPTLHIASVYAMLSEFPGAKQVANAHLTRFTNLLSEASKGRYGKETAIAFRDAARTSIGSNMPAKSLELKHTIKLIQELTSEIDEIEHEIKLIMDELNSPILSIPGINYRMGAMIIAEIGDFTRFDSPDKILAYAGFSPSTYQSGQLDGAYSHIEKRGSRYLRYALYNAAKYVCIWDPTFAEYLAKKRSEGKHYTVAISHAVKKLVRVIYHLEKTNQQYIKAA

SEQ ID NO: 509598 - protein, 393 aa, unidentified
MFNPLKVRLMRSVCGLDVHKDSVYLCILSEDGELIEKVFGVLTFQLHQMRDLLLAHHVEKVSMESTSVYWIPIWRILAPHFHLQLVNPYFIKQLPGHKSDVADAQWIAECTMKNLISSSFVPPEDIQQLRQYDRRIFDLDEEIVRKLSKLDAVMQRCNIRLSNYVSNVDCKSYKDVVRKISEGVTDPEILIEEIHGRIIKHHGRETILASLTGVVSQAEVDVLRQLREELDLAEEHKQECLERMLEICQEKYPDELRRLQTIPGVKERTATSLIAEIGTDMSKFETANHLTAWSGLRPRNDESNRKFKSRRITHGNVYLRKNIIQCAWGASRTKNCFFSRFSYHQTQVRKKNKMKVIVAVARKLLVAAWHVIHDKTDYVDFQKQDRQSPASNG

SEQ ID NO: 509599 - protein, 347 aa, unidentified
MTIGIDPHKHTHSGVAVDPLGVQIAQRTVTARREGFGQLLEWARKLDSERVWVLEDVRHVSGSLERFLIDRGETVVRLPPRLMANARRGVRERGKSDPIDALAIARAALREGIDTLPTARLAGTELEIRLLALHRERLIDTRTRLINELRWQLHDLWPDWEIPKRVLVHPAWQTKIARRLGRAETGVRVQIARDMIGRIRELTRTIAQLYEQLASLVKKAAPPLLAERGLGVLIAAKLIGEIAGIDRFTSDAQLARISGCAPIPVSSGRTDRHRLDPGGNRQLNHAFHMLALCKLLHDPRTAVYMAKQRKNGKTNREAIRSLKRHLVRRVYYLLHDPDRVPTTICLT

SEQ ID NO: 509600 - protein, 298 aa, unidentified
MTILDKRAITGGVDTHANVHVAAALDRIGGLLGVAEFPTTAAGYRRLLEWLSGFGPVVLVGIEGTGSYGAGLARYMATAGVAVVEVDRADRQDRRRAGKSDPLDAVSAARAALSGKARGASKARDGTVEAVRTLMVAKRSARSERTKSVNQERALVVTGPDDLRARFAKHSTADLVAGLAGLWPRPGEVVGHATRVALHELGRRAQFLGAQIDRLDELIVPLVASHAPGLMALYGVGPDTAATLLVAAGDHPERLRPEAAWTHLCAAAPIPAGSGKTSGRYRLNRGGDRQANLCWCGT

SEQ ID NO: 509601 - protein, 343 aa, unidentified
MQEITTIGLDIAKSVFQVHGIDASGAVIVRRQLRRSQVLPFFRKLPGCVIGIEACATSHHWARELEKVGHEVGLMPARYVKPYVKRNKNDAADAEAICEAVQRPTMRFVPIKSPEQQSVLMLHRTRQLFVRQRTTLINALRAHMAEFGIVAGIGRNGVEKLLELITRGEDERISPTAHECLVALAAQLAMVKRQILAADRRVLAWHRTSKTSKRLEAIPGVGPLIATALVASIPDPTVFRSGRDLSAWIGLVPKQNSTGGKERLGSISKAGNRYLRSLLVVGALSVIRRAKQLGYTRHPWLVRLMERRSVKTAAIALANKIARIAWAMMARNESYRTPLPASA

SEQ ID NO: 509602 - protein, 372 aa, unidentified
MPVGPVAQLVEQRTENPRVGGSIPPQATTIQRPTLIGWAFCFGRSFAFVSGFRHTTRGCGPICVCHAVATRCPEVAQFDAQRFDNQAEGHSALIAALKPLDVALVVMEATGGYETELACALQAAGLPAAVVNPRQARDFAKSMGRLAKTDAADARVLAEFAAVLLRREDLARFLCPLADPQQQWLAALVTRRRQLLAMLLAERQRLQITPKALHPSIEAIIAAIQAQLDDIEVRMVGHVRTHFAELDRLLQSASGIGPVASATLIAELPELGRLNRREIAALVGIAPMANDSGASRGRRRIQGGRFDVRRVLYMAALTASRRNPVIKAFYERLIAAGKCPKVALVACMRKLLTVLNAMVRTNKPWDNALHGA

SEQ ID NO: 509603 - protein, 412 aa, unidentified
MQDILTCAMGLDIHRDVIVACLVKGELGTEPDIEIRSFSTLIPEMRKLRDWVLEVNCFHIAMESTGIYWQPIYEMLEPCFDGQISILVVNARHMKNVPGRKTDMRDAQWIATLLRAGLLKGSFIPDKTFRELRHLTRYRKSIVHDITAQKNRIDKFLQSSGFRFTAFLSDAFGASGRNIIRHLVEYGNISREALDRCLKTQTRKRIDEILIALNGSLSEHQRSFLRMIFGHLEALEQHRHIVEDAITEEITKHEEALSLLCSIPGIDVTAAAAIIAEIGTDMSAFPDSQHICSWAGLSPGNNESAGKRKSAHINKGNPYLKSMLCEVGWVISGKRTLYLSGWYWRIKQRKGAKRATIALARKLLALIYIMLKTGTPYNEECFEIRRKQSERKRASRMVNELQKLGYFVVAPD

SEQ ID NO: 509604 - protein, 351 aa, unidentified
MNEITLVGVDLGKHVFHVCCQDGSGHAVMRKKVARSQIFEFFGNLPPCTVAMEACPGSHFLSRQVARMGHAPRLISPRFVRAFVKNNKNDFIDAEAICEAASRPTMRFVSPKTEEQQTISALHRVRQALVRERVVLNNQIQAFLLEFGIAASRGMFTAQRLALVTGEGQLPMGMASLLRQLEQRSAQAGAAIRDLEKHMTRLLNGDPAGQRLLSIPGIGPITASALIGELGNGSQFSCGRDFAASLGLTPRQRSTGGVVTLIGISKRGDKDLRTLLVLCARLYMFRLPKESGPLAEWVRALSARRPSSVVACALANKFARIAWAIVARNSQFEVHHLRRNELAKGLSTAQD

SEQ ID NO: 509605 - protein, 342 aa, unidentified
MTISTIGLDLAKHNFHVHAVDAAGSVVRTAALRRGEMIKFFQNAKPCLVGMEACATAHYWARELMKLGHEVKLIPPSYVKPFVRRGAKNDAADAAAICEAVRRPHMRFVPIKSESNQGFLMLHRARGLLVRQRTMTVCAIRAHLAEFGIIFGQGRQRIETIMPSIEDVAASLPEQARFALNSLIRMVGELNTQIEGIEMKLAEVGRSDPVSSLLSSIPGVGPITSTAIAATVPDARMFRSGREFAAWLGLTPRQNSSGGTTRLGAITKQGDAYLRHLLVIGARNIVRYPKARAKVGGAWIDALLHRRRPMIVAVAVANKLARIIWAMMTSGEMFREAHAKIV

SEQ ID NO: 509606 - protein, 350 aa, unidentified
MVVVGADVHKRTHTFVAVDEVGRKLAEKVVKATTDGHRQAVQWVRSQFGVEVVWAIEDCRHLSARLERDLLTADQKVVRVPPKLMAYARASARTRGKSDPIDALAVARAYLREPDLPIASHDQTSRELKLLIDRREDLVGQRTSTINRLLWRVHELDPDHAPKSGSLDLAKHRRLLGDWLDTVPGLVAELARDELADITRLTEQIDALAKRIGERVRVIAPVLLAMPGCGELTAAKIVGETAGVTRFKSEAAFARHSGVAPIPVWSGNTAGRVRMTRTGNRQLNAALHRIAVTQIRLPGLGQTYYRHRLAEGDSSTEALRCLKRRLARVVYSHLHTDHRNRTQPCQTAAA

SEQ ID NO: 509607 - protein, 368 aa, unidentified
MRRNIWAGLDVGVETTSVCVIDDAGEILQQDSCGSDVSSVHQQLRWLRRRRMATVAVEAGALSLARGLRSRGYCVEMYETRQLSKFLRVRRNKTDAGDALGIAEAGRIGASLVSKVHLKSLECQSLQSRLTMRRHLIRQRVAAVNLLCRQIELYGGRIRRSNRQKPLRDQVEVQLKRLFGKHPNGLTLELRHLLAYCEQLFAYQKAIDGEFKRLAVENEVCRSLMTIPGVGPICALTFYAIVSDPHRFGRSASIGSYLGLTPRVHQSGLSNRAGRISRMGNAAMRTLLVQAALAFMRSKHADPALRSWALSIEQRRGRGQSRIALARKLAVIMVAMWKRGEAYRPSSQLPARLPAGTEPSPEAASAHL

SEQ ID NO: 509608 - protein, 417 aa, unidentified
MNLPSPSRPFLRYLAIDLHKKYVVIGGVNAQQELVLQPWRMDLEHFATWLPKHINHDDAVVLEATTNAWDLYDQVSVYAGKTVIAHPGAVKLIAGSKVKTDKVDVFRLARLLAANLIPEVWVPPQPVRELRALIAHRTRLVRTRTTARNRLHSVLHRHNLLPPEGGLFSETNRSWWQQLKLSPIEQLRVRQDLALLEFLDPLIVTLEQELANQSQCEAWSGQCVYLMQLPGLGIVGAMTILAAIGEIQRFPNAKKLVGYAGLGASVHESGETHRTGQITKQGRRDLRWVLVEAAWVAVNHHPYWKEQFVTLQRRKAPSKAIVAIARKLLVVIWHVLSEHCVEKHSNPQMIAFKLMTWAWKLDESQRGGLTTRQFIRYYLMRLQVGETLTRLDRGGTHQTIASVEELLALRPELQPAA

SEQ ID NO: 509609 - protein, 446 aa, unidentified
MGNGSGLSRGDRNRNARLARFRELVPLSNAIVGIDLADDTQAVVVTDHDSRVIARRRVSVRAWELGEVLDWAVARASEAGFASVTVACEPTGHRWRVLDQLAAGRGLALVCVQPLLVYRAREGEDLTRDKSDPKDAVLIARLASELRCYEPERADAVWARLRHLGARRSQLTTGATAAVNQIRDLLECAWPAVLAAAGSPFRSVTWCASLAVVLDRCAGDLRRVRRLGLDRFTAAVRRELPRWGGIRPRLRIIRAVFAALADPAGVTAHRPGALERAHLALGDWRDTRARLADTETRMAAVLDDLGLTELVTTIGGLTVTGAAAILAETGDPARFATPRALVKHAGLCPRDNSSGAAQGRTSISGRGRPGLRVAAWRAVWAAMPNNPVMAARFAHLTTRQDNRLARQQARTACAAALLRWIHVVVTRRVTWDPAIAAGGTPLRQAA

SEQ ID NO: 509610 - protein, 445 aa, unidentified
MICAAVERCAGIDVGKKFLAVCIMTGPLDGEARVQRRRVGTTAAELEGLRDWLKAEGVTHVVMESTGSYWKPVFNILETSVKVYLANPQEVKNRKGHKTDDKDGWWLAHLLRHAMIHPSFIPPRPIRELRDLTRRRKRLLGDATAEKNRIQKILEDANVKLGNVLSDVFGISGQLMLDALLKGKASPEEIAQLAKNKAQRKVPEIIRALEGHRLSEHHRQMIRYSLKHLEFLEEQIAEIDSAIADKIQDGGYEQEWTLLQRLPGIQDRSAASILAETGADMQQFPTAKDLSSWAGVCPGNNRSAGKNKSSRTTGGNPWLRSALTECAWAAAAKKNCFLKDKFWRITSKSGGQKAPAIIAVAHLLLILVYQTLSTHQPFEDRTAPPLDERQKERMIQHHIRRLGKLGIAVRRYAPLGSVPGKCRPLVEVKPPKPTKPRKKRSAASD

SEQ ID NO: 509611 - protein, 407 aa, unidentified
MLFIGDDWAEDHHDVEVQDEQGRVLRRARLSEGMAGITEFGELVGRLLSEDGQAADVLVCTETDRGPWVNALIAAGYRVFSVDPKQAHRHREILSSSGAKSDKGDARGLADMVRTRRHQLREAGGDSEIAEAVKVVARAHQTMIWERTRHMLRLRAALREYFPAILAVCDTVDLSLTSRPLLVLLDKAPTPELAAKLTARQILPMLKGCRNKDAKAAQIQQILRGENLGQPPVVTRAYAASVRSSVAVLMVIVEEITHLETEVKAHFGQHPDADIILSQPGLGPILGARVLAEFGDAPGRYRSSKDRKNYAGTSPITRQSGKMRIVAARYIHNNRLVDALQGQASCAILHDPDVRGYYDQLRARGTKHNAALRQVANRLVGVLHGCLNTRTRYDRNTAWAHRHTAAA

SEQ ID NO: 509612 - protein, 347 aa, unidentified
MNFYNQQHKYYCGIDLHARKMYVCILDHKGKMLLHQNIKTDGELFFELIFPFLEDVIVGVECVFCWYWLADLCAAHKIDFILGHALYMKAIHGGKTKNDKIDSYKIALLLKGGNFPIAYPYPAKWRATRDLLRRRMYLSRRCSELVAHINNTNTQYNLPAFAKKISRKYNRGGVAERFEDPAVRKSIEVDLEVIDALNQTLKKLEWHIEKTARQHDYHTLYLLRSIPGVGLILALVILYEIHDIKRFPRVQDFSSYARLIRPVKESDGKWAGHSNKKIGNAHLKWAIKEAAILMLRDSPEAKSFIAKLERKYNKGKALGIFTHKLGRAIYFMLKNKEAFDMKTFFSH

SEQ ID NO: 509613 - protein, 418 aa, unidentified
MEDSHSKKVKHINKKTLMVTLDIGKAVHYGYMRTPTGEDVKPFPFDNKRKGFNELWDKVCQFKQAQGLDNIVIGFESTGPYAEPLFHFLRTKPVRLVQVNPLHSKRLKELTGNSPCKTDQKDPRVIADIISLGHALTLVVPQGAAAHLRRLTQARERATQRRTALLNQLQHVIFIVFPEFLHEFKRVHSKSALYLLQHHPSPQDILALGYESLAGLLKRVSRGKIPAQRARQLFEAAQGSVGIREGRASIVVELQHLIKAIGHEDQLIDDLEQQMKDYVQQIPYSQSMLSIKGLGTVTVAGLIGEVGDFDAFATVAEVMKLAGLDLYEVSSGKHRGRHHISKRGRALMRKLLYFAALTMVRKQGIMHEQYHHMLDRGIPKVKALVALSRKLLRLIYALVRNRTVYVAHYHQRTIGIAA

SEQ ID NO: 509614 - protein, 345 aa, unidentified
MEQITRIGMDTSKHIFQLHGVTAAEEPALRKKLRRKEMVRFFEKLAPTVIAIEACGASHHWARLLQSFGHSVKLIAPQLVKPYVKRGKNDAADAEALCEATSRPTMRFVPVKTAEQQAALMLVGVRDRLIRNRTQLANAIRGYAAEFGLTAARGRAHLDPLLERIQADESLPALARELFAAQAKEYAQLQAQIDEVDARLMSWHRADECSRRLAKIPGVGPIGAVLLKMKTPEPELFRSGRQFAAWIGLTPKDHSTAGKVRLGVITRAGDEGLRSVLVVGATAVIQHVRRGGRSSPWLTELLKRKSPKLAAVALANKMARIAWKLMVTGEHYAAKSTPAASAGVA

SEQ ID NO: 509615 - protein, 406 aa, unidentified
MAAVMIGVDPHKASHTAAAIGPAEEPLGGIQVRAVASQAAQLLAWAAAWPERTWAVEGATGLGNLLAQQLVTAGEVVLDVQPKMAARVRLLASGNTNKNDPNDARSVAVAALRSPAPRRVAAEDHTAVLKVWSKRYRDLGRTRTQVACRLHAVLADLVPGGFSREITAGQGTSMLKRIRPAGPAARARRELAAEFLADLRRLDAQMRDTRNKLTAAVQASGTTLTGIFGVGPVIAAAILGDAGDASRFGDRDRFAAYNGTAPIEVSSGGRKIHRLSLRGNRRLNHAIHMAAITQIRYQHSPGRAYFDRKLAEGKTGKEALRCLKRQISDAIYAGLVADAAPRGTPAQAEGPVGQSGNGSVSSAVGSHPGRRLFGQATPGPHPSLRPAATARRAVQATAFKTSHRSP

SEQ ID NO: 509616 - protein, 335 aa, unidentified
MKSWSVTVLSENSVLKRFVQDPDPEALHKFLTRNYPEADYYSVYEAGFCGFWIHERLTALGIENIVINPADVPTTAGERIQKTDAVDSAKLARSLRAKELKGIYTPDSTSLEIRSLIRLRSTITKDVTRQKNRIKSHLRFLGYEIPEDMCSRYWPKRFIIWLRELDMKTQSGKQSLDFMLDLLENLRKEKLLMTRALRALSRTEQYEKSLELVMSVPGVGQQVGMALLAEIVDIKRFKDAEHLAKFVGLVPMCHSSGENEGIGDITIRKHAYLRTLIVEAGWQAIRQDPAMTLAFEGYCKRMKPSKAIIKIARKLVNRIYFVMKWQTPYVNSVVS

SEQ ID NO: 509617 - protein, 361 aa, unidentified
MRKIALDLGVRKTAFCEVKNGAVVQRATVTSVETLSSLLGPKEQPAVVAIEACREAWHVHDLLRSWGNEVVLVDTTRSRRLGIGQHGRKTDRIDAEVLALALDRGGIPAAHVLSPHRRELRRWLGVRRALVESRANLITTCRGLAREQGVVLPKCSVGIFVRKARRAAGNVLAVLEPLLKQLDAINPEIAAAEAKLAELCETEPVVKLLMTAPGVGPIIAACFVSVIDDAKRFRSPHQVESYVGLVPSEDSSGGKRRLGAITKKGNPYLRSLLIEGAWGVLRHRDAKEPLRVWAEAVAERRSRKIAVTALARRLVGVLWAMWRDSKPYDPKLLAAASSRGTRQLAHSLQAQARTLEVHAQP

SEQ ID NO: 509618 - protein, 420 aa, unidentified
MSAPKPPEFAALIGIDWADRKHDICELPLSSRKPKFSVISSTPKSILEWAIQLKSRYPGQKIAVATELKKGPLVYALSSHDHIVLFPVNPRTVAKYRKAFTSSGAKDDPGDARILADILDRHRDKLSSIEPDSAEVRALAQLVEHRRKLVHDRVKLTNRITDILKGYYPQVIDWFKEKDTVIFCDFLTRWPSLTEVKRAHKKTLLTFFNQHNAHYSSINKQRINDIKNAVPLTEDEGVVAPNRIMITLLVPQLRYLIDAIESLDSEISLRYKSFSDRRIFDSFPGAGPKLAPRLLVAFGQNRSRFTSAADIQQYAGIAPVIEQSGQKRWTHWRHSCPKFLRQTFIEWAGQSVRFSFWAKAYYEQQKAKGKRHNTIIRALAFKWIRIAFRCWIEHKPYDESTYLQALKERKSPLLNHALTT

SEQ ID NO: 509619 - protein, 335 aa, unidentified
MQSARMVVGIDVGKEWLDVCHPNGKKEHVRNIKSRRTKVIKKAAALGAIVCFEATGPYEEPLADECLARNVRAVRLDAWGTRRFAESQGRIEKTDKIDCEMIRDYALSLKDEKLHFIKQRSDAQKRLKKGVRTRRNLKKARNIIANQFEDDLDPETAKHLRNALKSIDRNIKRIEEECAAAIASDERLKDLDKRFQEVKGVGPCLSRTMLAECPDIGEFNDKSIAKMCGDAPIKHESCTIKGKARPKRGKSELTKALYMAAVSASRNNHILREFYQRLVANGKARKQALTAVARKLAVLLNTIAKYPDFKPAQDLKDIAKANRPKRSRGRPKKTV

SEQ ID NO: 509620 - protein, 346 aa, unidentified
MHSVGIDLHRKRSHVAVIDEGGRELCSRRIINDGQAFLALLGEIEGECRIALEATFGWEWLAELLEDAGYELHLAHPLRTRAIAAARVKTDAVDARTLAQLLRADLLPEAYIAPRPLRDLRTLLRQRIALTQMRSALKCRVHALLATHGVQTSHSDLFGKGGRAFLAELELRDPPRQRLDGLLRLIDDFDREIDLLAGEIDERATVDDRVAVLCQIRGIGRYAAMLIIAEVGEIERFPTARNLCAWAGLTPTIRSSDGKARLGHISRQGSVALRWALVEAAQKAVTGGGPLRDTFEQIAKRRGRKIAKVAVARKILTLCFYGLRDGAIRCLARRARPSATAVTATR

SEQ ID NO: 509621 - protein, 462 aa, unidentified
MRTIGIDLAIVGEHKAVILDDQGNPIGKVFHLQTDPASLEALLRCAREGADEDEPLRAVLEPTGLAWLPVASYLIQRGVTVYLVNTQQVADLRKFYNKHAKSDRIDARVLAHLPWVNSDALHPLQLSPADYLSGQRWCKQQEELDELMTAIKNRVQAWERGFWPGLEEVVGDLFAPWMCRWREEWYNPWQLQEVEPRQLAAFLAQAGADPEEVDSLTAGLQEVARRAVALFGTPQGGLSPYLDYATLQDQVLRELRLLAFFEDEHRTVRRKVQTLYRQVHPERHVESIKGVGGEGAAVYVFFIGDVGRFATQRDFRGWHGIVPASEQSSDAETKGLRITSAGPDPVKKYGYINAEVMRQWDPQIAAIYQDQMMNKGKHHCQAVCACATHLLDRVRAVLRDGRPYELRDVDGRPVTWQEARAIIAERYHVPDEVRQRNSKRVRKAQRDRRAERKQKRRSRPGR

SEQ ID NO: 509622 - protein, 365 aa, unidentified
MASVTSAPGPIHLGMDTSKKTIVVAVLMPGEEIPVLDRIWNEEGSVRHLIGRLGGVGALRACYEAGPCGFELHRLLSSVGVACDVVAPSLIPRRAGERVKTGRRDASRLARLHRAGELTAIRVPTEAEEAVRDLVRARAALMADRRRAQQRITAMLLRHGRVWRGTSWTEAHERWIAGQRFGEPALALALAHYRAALDTRRAELDAVEAELAAWAGKPPLGEAVARLGCYRGIAALNGLTLAAEVVDWRRFPAARAFMGFTGLVPAEYSSGERTRRGSITKAGSAPVRTALIEAAWAYRFRPAIGVTLRRRQHGAAPDTLARSWQAQRRLHARYKAMTARGKPAGVAVTAMARELAGFVWAEMTS

SEQ ID NO: 509623 - protein, 358 aa, unidentified
MVTVGEHVYFIESRGDETMKRYLGVDLHRNCFTVCTLKEDGKSELRKWSIHSLGDFAQGVQATDAVAVEATGNARYFCQALKERGCRLVVVNPQQFQVISRSVKKTDARDAKTLAEFLAKDMLPEVRMKEALPAEIASVLQTRDKLVKLRTTLKNKINNLLAARGILIRKESLSTEKGLEQALSADVGELARLELGVLVEQIRHLNQSIAKLEAAIKQQGPKLPGYENLKSIKGIGDIGGSILLSTIGDIHDFADEGKLAAYFGIVPRVSNSNETERSGRITKRGNKLGRTALVQCALIAMRYSPYLANYYTRIKAARGTGKAIIALARKFLGIIYKTLKNGWVFEDFPKFALAPAAG

SEQ ID NO: 509624 - protein, 379 aa, unidentified
MSASSTASASEQSLYAALELSKNSWLLAIQFPGRDNPSLHPIKGGDADGLMAKLDAARERLAKVSGQAPKVILCYEAGYDGFWLARFLEQRGVDCLVMDPASLQVDRRARRAKTDRIDVEKLLHTLIAWCRGERHVCSMVVKPSGEEEDLRRSHRERDRLVRERTAHINRIKGLLFGQGIRGINVKRHYKALAPADLVTGDGRPLPERLGREIAREIQRLALVQEQLREIERERDLAPTPRQATERKRQQLLRLNGIGTAIAPILSREVYYRQFANRRQVASFIGLAPSPYDSGESRHSQGISKAGNSLVRAVMIQTAWMWLKHQPQSALSQWFHQRTEGQSKRMRCVMIVALARKLAIALWRYLEHGLIPQGATLSAK

SEQ ID NO: 509625 - protein, 408 aa, unidentified
MLFVGDDWAEDHHDVEVQDEHGRAIRAARLSEGVDGMARFHDLVAGVLPGDARPSDVLVCIETDRGPWVRALAAAGYQVYGVNPKQAARHRELLSLSGAKSDKADAHTLADMVRTRRHQLRQVAADSDVAEAVKVVARAHQTLIWERTRHTLRLRAALRDYFPAALTAYQPLTLTGADTLMLLAKAPTPAAAARLTIAQISAVLKKARRRDIPVKAAAIQQALRADHLGQADVVAGAYAATVRALVAILQTLSAEIRTLEGQVEAHFGQHPDAEVYLSQPGIGVILGARVLAEFGDAPGRYADAKARKNYAGTAPITRQSGKTKTVHARFVHNNRLVDALHMQAGVALLHDPGVRAYYDELRGRNIGHNAALRQVGNRLVGILHGCLKTATGYNQTTAWSHRSQPAAA

SEQ ID NO: 509626 - protein, 344 aa, unidentified
MEKHTTIAMDIAKNVFEVAVSDEPGRVKERRRFTKSQMLRFFANREPARVVIEACGAAHALARELEWYGHEMVLLPPGQVRRYVLRNKTDRTDTKGLLEADRNEEIVPVPVKTVAQQALVAVHRLRSGWMATRTARLNAIRGFLRELGVAVPVGATRVLPALTGAMEAGRVPGTLEALLRTTAEEVRDLDRRIEEAESTLKRMSREMAAAVRLQTVPGIGLLTATARIGSVGEPGRFPSGRHLASFLGLVPRESSSGDRRRLGSITKRGDGYVRMLFTHGARSVLRAASVKRQNDRLRTWALETQKRKGHNKATVALANKLTRIAWAVWLKDRPYEGRVLEETL

SEQ ID NO: 509627 - protein, 393 aa, unidentified
MYLVGIDIGKLKHSFCLLEKETGEILVEPVFFKNNRDGFNALLSSFKHLPQKDILIGMEDTGHYNLALLKFLLDRNYQVALINPVATNLTRKMQGGISKNDKLDTLTICDVLSSNQRVKSYRISKYSSFDLYEQKQLTREHHNLKEEENQLSNRLQKCIDVVFPEFNSLFKSKYGIVYMNILKEFGSADAIAHADIRTLRKCFDTGRGKKIALTAEELKEAAKNSIGFPSSSEATQIKHLVARIELIKEQIAEIDKKIEEFSIQNNSPILSIPGISHFSGTSILAELGDIHNYSKPSQIIKFAGVAPLTYESSQFTAQHTAITKKGCKYLRKTLYQIITPVIQYNPVFRKFYLLKIAQGKGHRCVQGHCVRKLMRVIYHLLSTGTQFDPALLR

SEQ ID NO: 509628 - protein, 422 aa, unidentified
MLGVGLDWAEDYHDVALGLPGKGVIEQFRIEHGPAGVARLVARCLAVEPDPAEVRVVLETRHGLLVEALVDAGFTVLPVNPDLVARRRGPAKKKDDAEDARICCLLALDQFVELRRLIPHGELGAELRAIARDDDRAARDERRLGNRLRADLLAVFPAAVDIADGDLGSAVFLRLLQRWPCAEELAAAGRDAVEALARANKHGWPDRFAERVITALAVPRLPIRPELGRAKAGSIRLATAQLLLLREQRRAWHRRMGELLLGGPRHGRTNRPKDPPPGNAFPGGEIYLSMPGLGDRLAARVAGEIGEHIEQFTTPNALQCYAGAAPVTRRSGRSEHVVARRLAYNRYLGNAVRQWAFCSLQQSAWARTFYNAKIVAGKRHHTALRALANRWLEILWHCLHRGTLYDEAIHTANRAHTVTQAA

SEQ ID NO: 509629 - protein, 347 aa, unidentified
MLIIGCDYHPSWQQICWMDVRTGETGEKRLEHAQGEAERYYRSLSGAVRIGMESTGNCQWFTELVVSMGHELWVGDAARIRAAEVRQQKTDRRDAALLLQLLLENRFPKIWTPSPAERDQRQLLLHRHKLVEMRVRVKNELQHLAMNRGITRGRRLWSKTGEKVLHELPLQPWASRRREDLFKVRTMLDEQIGSLDAAVQQVAEQNERARLLMTHPGVGPITSLAFVVTMGDVSRFPRGKQVGSYLGLIPREYSSGGKQRTGSITKQGNRFMRTLLVEAAQSVVRYEPEFRKEYLHRCHGREKGVAKVAAARKLAIRLYWMLRSNTAYPEIVRVESSSRVPLDGQAA

SEQ ID NO: 509630 - protein, 404 aa, unidentified
MGQVYIGIDWADDHHDIHVTDDTTTALDSFTIPHSRDGMEKLMKRVDKCSPDREAVLVAIESHQGLLIYALLEAGYSVYPINPKAMDRYRDRYRMSSSKSDTQDAMVLANILRTDRHLYKPLPKEIAADARLRQLTRTHKTLVQEKVKLLNQLTSQLKSYYPVALRLFSRLDHKITLAFLEHFSTPQKAADTSLEDLRGFFREQSYSHQWKIASIYASLQQLSLRAPRELEEIHQTIVLSLVAVIRSMSGQIEKLADEISQEFEVNPAHEIFSSLPTGEITAARISGELGSDGTRYPAREYVQTAAGTAPVTRRSGKTVVVFFRWQCNKHLRAALQDLARESVKRCPWAREYFTGQMRLGHKPSRAYRALANRWATIIWKMLQTGQCFDQSRLGKHLPRVPAIN

SEQ ID NO: 509631 - protein, 273 aa, unidentified
MSFYKNFIGIDIGKFNFVTSIHESNKVCEYENNATGIAKFISDHKKLLKADTLCVLETTGGCEMLLLLTLCNYNYKVHRSDNRKVKSFIRSYGNTAKTDALDAKALALYGFERNEKLALYEPISKRAYELYQLVQRRQDLKRTLVAEKNRRQAAAISDFVKNSCAKLIEIISDEIESITHTISALIKEDKTLEAMKDVLKTVPGIGDIIANELLILMPELGKLDRRQIASLAGCAPRANDSGRSSGYRRTAPGRGVIKPRVCPFKCVNSFWVI

SEQ ID NO: 509632 - protein, 355 aa, unidentified
MRQLEKVLKEVAGIDVAQKELVVSLGRLLESLSIEIFAYKVFVNSDKGIQSMIEWVSSCCENAAQMRYVMEATGVYHERLAYALESMNIDLSVILPNKISNYARSLDIKTVTDKTASQAIAQFGLERKLDNWVRPKDIYRELKQLTRERDQIVEERAMVKNQRHAEKSEAMPNQKSLVRIEDRIKFLNRQEKEIKLDIATLLKSHPEVKTRVDNICTIPGVGELTAVTVLAETNGFELIRNKKQLTSYAGFDVKEKQSGTSIKGKPRISKRGNRHLRKSMHLPSLSSVKYNQSHKDLYVRLVSKSGIKMKALIAVQRKMLELIFVIDKNQNPYENDYHQKRVHHTNAEVPLQANL

SEQ ID NO: 509633 - protein, 368 aa, unidentified
MTLYIGVDFHPHQQTLSWCDTETGETKTLDMLHDVKRVREFYSSLPEPAIIGIEASSRAVWFENMLFETGHKLLVGNPVLIRKRATSRHKNDRRDAELILELLLRGEFPSLWRRPPESDRILEMLRLRSSLVRQRTQGYNRLQALAHSAGLPRGRMRTAAFQAVIKALDLDETDDLRRMHLFKLVENFNEQITQLDIWLKAKAEADPKVRLLETQKGVGFLTALTTVHTLGDVTRFARLSKQVVSFAGLDPLEDSSAGRIRFGHVSKAGSRLLRFQLGQAAQIAARSDMKLKSFYKRLAKKKPKAVAKTATARRLLVKLAIMLRDHIPAAEFDRRGKHSWQCPSGTRSEMTAALIGPSQPFGDRGREF

SEQ ID NO: 509634 - protein, 363 aa, unidentified
MKRKVYVGMDVHKETIQIAILPSNTKDLVKEQQIKHEEGQIKKFIQKLKSEGTEIHCCYEAGVTGYPLYRYLKTLGVNCIIAAPGKIPRQSSDKIKTDKRDAIKLARLLRSGDLESIHVPSEEDEAVRDYLRSRDSLRLDLGRNRQRLMKFLLRKGIKYSTTKYWTVSHYKWLNNLHFENEILQATFNDYYSRVRVQEENLKAMDQKIQEIAKSEPYREKVGILRCFRGVDYLTAMFLLSEVNDFKRFKTAVLLSFLGLVPGEYSSGSKRKQSSITKTGSPRLRRILVEAAWQHRFPGTGSKVVVARRVGQSALVVSLAEKASLRLHKKFKSMQLRGKTPQVMITAVSRELSGFLWAAMNLVA

SEQ ID NO: 509635 - protein, 409 aa, unidentified
MQVVHEVCCGLDVHKKSVTACVLWASGRRKQIRAFGTFTRELLELGDWLRACGVTHVAMESTGVYWKPVWNLLEGQFEVLLVNAQHIKAVPGRKTDQKDSEWIADLLQHGLLRASFVPPTPIRELRDLTRYRASLAQEINRIANRIQKVLEDANIKLASVATDTLGASGRAMLEAIIHGEQDSQRLAEMSRGLLRNKIPELRQALEGRVTAHHRFLLRELLDHLYFVESKMQRIEQEVAERLGPFQSEVARLCTIPGVDRVTAWGLLAEIGLNMKQFPDAQHLASWAGLCPGSHESAGKRKSGKIRKGSLWLRRCLCQGAWAVSTKKNNYLSALYRRLAARRGTKRATIAVAHNLLVIAYYILRDGTSYRDLGPDYFDRLNPEGLRRRLTKRLEGLGFKVTLEPLAQVA

SEQ ID NO: 509636 - protein, 446 aa, unidentified
MADTDDSGGVEEIEQAEELVARVAAIDIAKASGMVCVRVPHEDKPGKRVQRVFNTVATSGAILDLADHLICQGVTRVVMEATSTYWKPYFFLLESRGLECWLVNARDVKNVPGRPKTDRLDAVWLAKLTERGMLRPSFVPPKPVRELRDLTRARAVMTHERTRHKQRTEKLLEDAQIKLSTVIADIFGVSGRAMLEALIAGERSPKALADLAHGTIKASHATLAESLTGRFEEHHAFMCRMLLDTVNYLTVQIDKLTARITLRLSELSTTEDDEGPGQGTLMPITDTERLDEIPGVGPSTAQVILAETGLDMSVFPTAGHLVSWAKLSPRTIQSGNKNTSGPTGKGNPWLRGALGEAAISAARTDTFLGARYRRIVKRRGHMKALVAVARSILVSVWHLMNDPTARYRDLGADFHTRNLDPNRKSRDLVRQLKALGHDVTLTPAAA

SEQ ID NO: 509637 - protein, 373 aa, unidentified
MSFTSNNILVALELSNSLWLVGTRMPGAQKSHMHRIDAGDTAALLSLLSGLQSRQRAQVSRAPIAVCFEAGRDGFWLHRLLTAHNIPTYVVEPASILVNRRAKRAKTDRLDAEGMLRVLAAYLGGDNQICSMVHVPTPDEEDGKRVHREREYLVQERTRIENRISALLATQGIRSRPSLRSWERDMAALETGDGRKLPRHLAAELNRLRRRLVLVRDLICELDTERDEHLAATSGDAITTKVTALSGIYGIGDNFAAVLAREVFYRHFGNRKQLASYVGLAPTPHQSGNVDKDRRIGRAGNARARKTLVQAAWLWLRYQPGSELAAWFRQRVGELKGRTRRIAIVALARKLLIALWRYTETGEIPAGTIFRAA

SEQ ID NO: 509638 - protein, 367 aa, unidentified
MRKSSKVFVGMDVHKESIDITLAEASGEVRRWGQIGGDRAALEKGVRKLESLGKTLHFVYEAGPCGFWIERWMRARGHECWVVSPSLIPQKSADRIKTDRRDSEKIARMARAGELSPIYVPEVADEALRDLVRARDDAIIAQRRARQQLKALLLRNEVRYVGKSSWTIAHREWISRLKLPQPAQQIAFEEYVDAVEVATHRVERLTGSIERSAEGWRFEPVVHALQALRGVQFVHAVTIISELGDLSRFTEPRCLMAYLGLVPTENSTGERRRQGAITKSGNRFARRALIEAAWAYQHPARVTPIIARRQRGLTKAARDIAWKAQLRLCPRFKKLCARRLNKNKVVVAIARELAGFVWAIAKDVKVA

SEQ ID NO: 509639 - protein, 339 aa, unidentified
MKYIPVGVDIAKHLMQVHFVDEHTGEIIDKQVKREKFLEYFSNREPCLIGMEACGGSHHWARELQKLGHKVRLLKGRFVKAFVMGNKNDVMDARAIWLAVQQPVKSVAVKSEEQQATLGLHRIRQQLVKFRTAQINALHGLLLEFGETTHKGRAALAKEVPEALERLKERLPLYLINMLDEQYQRITELDEHLDHIEKQLQAVARQNETCQRLLNIPGVGPLIATAAVATMGDASAFKSGREFAAFIGLVPRQTGSGGKIRLLGISKRGDKYLRTLFIHGARAAALLTKEPGPWITELKKRRPASVAIVAMANKLARTVWAIAAHGRKYDKNHVSIRPD

SEQ ID NO: 509640 - protein, 354 aa, unidentified
MKTIVKQVLGVDVAQKELVVCLGYRYADLDIELTASGQFPNTPKGFHSLITWVKRISKAEVSIDFVMEATGVYHEKFAVFLVDKGYKVCIVLPNKISSYFRTLDVKTITDKTSSQTIATFGLERKLDSWVKPQAIYKNLRQLTRERDQLIQERTMIKNQLHAERAEADPNVSSIRRAEKRLELLKRQEKEVIRQIAELIAYDEKLKSDTDRICSIPGIGLITAATILGETNGFNLIRNKKQLTSYAGLDIREKQSGTSVKGKPSISKRGNKHLRKAMHLPALAAIRHNPRYKGIFARLVSKHGIKMKAAVAVQRKLLELAYIVFKNKSIYDSQKNEGQLLETSCHPSQAGSTAA

SEQ ID NO: 509641 - protein, 392 aa, unidentified
MEKHSTEFVGLDVHKESTAIGRASAGRAAGRFVGTVGPILAELLKSLKSLGPPEDLSIVYEAGPCGYGLVRELRARGYACEVIAPSKIPRRSGDRVKTDRRDAVRLAELARAGELVSVMVPDERDEAIRDLSRARVDAVRARLAARHQLKAMLLRHGHRYGRSSWTQAHERYLAKITFAHAAQDATFAEYRQAVSEANERAQRIVEALRDQCTTWRMQPVLEALMTLRGIDFVAAVTLVAELGDLKRFAHPRELMSFLGLVPSEYTSGDSRRLGKITKAGNGHVRRILIEAAWNYRFPARMSVVLQKRQEGQPKVVRDIAWRAQLRLAQRYRRLSARHLHHNKVCVAIARELAGFIWDIGRHVSIRDLPVKAVKTGGGNQKGYRASAAPAPL

SEQ ID NO: 509642 - protein, 338 aa, unidentified
MDHYVGIDLHSTNNYIAIIDHDNKRVFKKKTKNDLRLVVEILKPYQESITGIAVESTYNWYWLADGLIEEGYTLHLANPSAIRQYEGLKHSDDVTDAFHLANLLRLGILKTGYIYPKEERPVRDLLRKRLQLVRQRTLQIQSFQNLVSRNLGKRMNGNAVKKLSEDDVAHLFQDKYLVVAGTTSIATIVFLSDRIRELETIINKAAKLKEEYRLLMTVPGIQKILALTIMYETGPIERFEKVGNYASYCRCVGSKRFSNEKVKGKGNRRNGNKHLSWAYVEAAHHALRHYECVKRYYQRKMVKTNIIVARKTIAHKLARACYYIMRNQTRFKPSRVFV

SEQ ID NO: 509643 - protein, 411 aa, unidentified
MDVFCGIDWAEDHHDIAIVGADGTLLARKRIGDNAAGLAALLDLLAAHGDTAEDPVPVAIETPRGLLVACLRATGRKVYPVNPMAVARYRDRHSVAGRKSDPGDAFVLANVLRTDMHAHRPLPADSELAQAIAVLARAQQDAVWNRTTAHNKLRSHLREYFPGFLAAFAGTRDGIVRPEARTILAAAPAPDAAGKLTLAQLRALLKRAGRARGIDAEARRLREAFREQQMRQLPLVEQAMGQQALALLRQLDAACASAGDLERAAVESFNQHPDAGIITSFPGLGPLTGARVLAEIGDDRSRFSDAKGLKAYAGAAPITRASGKHMSVTHRKVKNNRLAAAGYIWAFAALTASPGARRHYDRRREAGDGHAAAQRNLFSRLLGCLHHCLLTGKHYDEATAFPAAASQNDAA

SEQ ID NO: 509644 - protein, 338 aa, unidentified
MSKITTIGLDLAKDVFHVVCCDARGKVVRKRMLKRRQVLAFFANLERCLVGMEACAGSHHWGRELEALGFEVKLIGARYVKAYVRGNKNDYNDALAIAEAVVRPEMRFVARKTPEQQDIQALHRMRRGCIGARTALCNQMRGLAGEYGLVAPKGIATLRRRIPEWLEDGENGLSALFRRLLCEGVERLQELDGHIAFYTREVERLSEHNEACQRLQTLPGYGPIVASAFHGQIGHGEVFRRGRDASASLGLVPRQHSSGGKDTLLGISKRGDRYVRSLLVHGARAVVSRAAHKDDRLSLWINNIRAKRGFNKAVVALANKMARMGWAVLANKTVYRAA

SEQ ID NO: 509645 - protein, 355 aa, unidentified
MKELSFKGQEIYVGIDVHLKQWNVAIYTEKSFHKVFQQPPDASVLGKYLRRNFPGADYQTVYEAGLTGFSTHRQLESEGFNNIVVHPADVPTMDKERRQKRDKSDAKKLGKALRSGDLSAVYVPSLKVQQDRELIRYRCDKLVPKLTRVKNQIKSFLHLYGIDIPAEFKTGPSHWSKAWVAWLHSIQLAHTSGQQVLEHLLEELAFVQARLRQVNRQIVELSRQEYYRDRVELLRSVPGIGLLVAMVILTEIDRMDRFESLDKLCHYVGLVPNVYASDEKERVGHQTRRGNSLLRRLLLQSAWVAKNRDPALLLKFGELTKRMNANKAIVRIQKKLLSRIRRVMLTGEPYQCGIV

SEQ ID NO: 509646 - protein, 410 aa, unidentified
MDLLRREVPATSLVVAVDPGKAFNRVWLTTGEQGLIGEPVTLPVLREGVDELERLIATSGVVGSPVIGLEATGALHRAWAAEIERRWPGSLRLFAPSQTTAARGQLGSRRFKTDDRDCAALVWLLRQGAGRRAEPDMVAAMLGTVRHRRQLVDARTTLQQRLHDQLNVLCPGLSAPAGHGRKLDLDSPTGQAVLACAAAFAGRPPSKRSLLARAPGRMTAPTAAFWAQRWKRLLAPPGDAELRAERLAGDLRRWRDLHGDIARADQQLGDLLAQTAGQILTTLPGVAVVRAAEFSAYTLPIERWPTPEHLYSATGLATATYQSSTITRRGRISRQGLAEHRNALMGIAWGLSLNSPAFRARNAELRARGFRPIQARVALARNACRLCWRLLHTQQPYDDRRYARARRRGR

SEQ ID NO: 509647 - protein, 341 aa, unidentified
MTINIDLGDVWSHYCKLNQDGEVVDRGRFRTTLSGVEKWFTNLRRARIAMEAGTHSIWVSEQLQELGHEVIVANVRELRAISHSDRKSDTVDAEKIARYARADPKILRPISHRTVAQQEALTLIRARNLIVRLRTAAVNSLRGLAKPCGYRLPASSTLCFAKRCMAVLPPGLGVALGPVLEQIAAMTVKIQQYDRTIKRLTETEYPETQALLQVYGVGQLTALTYVLTLGSKERFKRSRDVGCYLGLRPKRSQSGDHDPQLGITKAGNIYLRSLLVECANHVLGPHGRDSTLRQWGLHLASRGGKQSRNRAIVAVARKLAVLLHRIWVTQEPYNPFYAVAA

SEQ ID NO: 509648 - protein, 339 aa, unidentified
MQKKYFLGIDVSKHTLDVAFIINELTSFSKPVWKQFDNTPGGLKQMQKWLSQMDIPLSDQTIVVIENTGIYHRLLWQFFSALHVDLCIENAAHVKWSLGIARGKNDKVDSRRLALYAVRHIDRLKPTPALNQQMLPIKDLLTLRNKLLMQINNLATGIKELKNIHVSGSLDVDSRKLLQPAIKGLKQSLKKVEQQIKVMLKADKTLFDIYKRVMTVPGIGHVTATYLICCSNMFTMCNSGKQLACYCGVVPFDHQSGISIKGKHHVHKMANKELKGLLHMCALSSIKNHEEFKAYYERKKQEGKHAMSILNAIKNKIVLRAFAVVKNERDYVYNYKKVA

SEQ ID NO: 509649 - protein, 343 aa, unidentified
MGIVEVVGGVDTHADFHVAAAVDTNGGLLAVERFQASDDGYQDLLAWLAGFGRVARVGVEGTGSYGVGLARFLIEAAVDVVEVDRQNRQVRRKKGKSDPTDAVTAARAALSGEAAVVPKLRNGPVEQMRVLLVARRSARLQRSQSLNQLRHLVFTAPEPIRVRFKDRPQIGLVKEAAAMRPNPTSDPVTYTTNLMIRNLARRIRALTGEVKDIDRMLKDLVEQAAPELLDIYGVGPDGAATLLVTAGDNPERIRSERSWAHLCGVTPIPASSGKTIRHRLNRGGDRHANSALHRIVLTRMSNHPETRAYVARRRAEGLNSFEIMRCLKRYVARQVFKHLPMAA

SEQ ID NO: 509650 - protein, 403 aa, unidentified
MDRTAGIDLASEEHRLLVVADDGRPLEQRRISHSEDGLQALVRRLLELRVTRVALERPNGLVVDRLLEAGITVVPIHPNQVAAARDRYRSGGGKSDGFDAYVLAELARTDMHRLRVLEPDGDETRALRALTRARDGLVAQRVALANQLRAQLEAFWPGAARIFADVDSPIALAFLERYPSPEDARVLGAKRLGAFLARNGYCGRRSGDELLHRLREAPTGRSGELETEARRQIVLGLVVVLKAIVEQIRLLTSEIRGAVEAHPDGQIFRSLFRDPRSVVTAAELLAEIGDRRHRYDTRARLEARAGQCPVAIESGKKKVASFRWACNKTLRDAVSVLADSSRKHNPWARKIYADAIARGCDHPHAIRILGRAWLRVIWRLWHDRTPYDPNRHGSLNRLLAGQG

SEQ ID NO: 509651 - protein, 343 aa, unidentified
MTLHILGIDIAKNTYQLHGADSSGKEVLKKRLPRHKLAAFIANLPACTIVMESCGGANYWARVFQRSGHAVKLISPQFVKPFVKTNKNDANDALAIVEAACRPSMNFVPIKQVAQQDIQSVHRIRTRVVKNRTALINEIRGLCQEYGIVVAPGAARVKTSLCTIIADGANELTVSSRESMQGLYEELVWTEARLKALDAKIRMLCRLNENCKRILKVPGVGELTATALVAAIPDPKEFRNGRHLSAWLGLVPRQASSGDKQVLLGISKRGDRYLRTLLIHGARAVLSHHKDAANDYSRWVARKKSTLSHNKAAVALANKNARIIWSMLNTGEAFSYGIQTDAA

SEQ ID NO: 509652 - protein, 429 aa, unidentified
MKANNVRLELFKDIRSSIRGSDDYVIVGVDVAKNKHHAFFGTPRGKTLRKDLVFDNCVVGFEHLRNFVSDLQDQFGLCRVVYGLEPTASYHKPLAEYLIRQGEIVVYVSNVAVKHNRSLLDGRWDKNDKKDAANVADLVGQGRCLFYDVPEESLRELRSLIAFRTRLKKQEHALRMRLRNNVVAQYFPELDHLYLRAGSSDDMVLSIAEHCLDPREIAQMEFNAFLKRVTKRKIRIEQETRLRALWEAAPDSAGCLVHEAAKWEAKSLVSQLKTTREAVKEVEHRMTSTAKQYPEYQCLLSIPGFGPIISAMVLAAIGDPSRFGNQKQVLRLAGLDLSASRSGTTSAGATPVISKQGKAALRYALVQAAQVASSLNPTVRTYFSRLLKGRELERGIKMKMKVKLAAKMLVVAWTLMKRKEKFNPSCFLG

SEQ ID NO: 509653 - protein, 311 aa, unidentified
MNTKNDPIHYVAIDVSKSTLQVQDDRRAFAVGNDPNGHRKLLDYLKACANPLVVFEASGGYERDLLRFLHEAGIPLAMVNPARVRDFARSEGVRAKTDPIDGKMILAFAKSKALRPVEAPSEACVKLAALLDRRGHLVEQLAREKNRLQNSEAFIHRSIKRMMRILEKEIAAIQEAIEKLVGTDPGLKSRSEIIQSVKGVGQVTAWTLLAYLSEIEELNRNRLVALAGIAPFNRDSGKFSGKRSILGGRAKVRKCLYMAAHTAATSNPVIAAYVQGLRDRGKPYKCAIVAAMRKLLIHIQSLMKKAQLSPC

SEQ ID NO: 509654 - protein, 359 aa, unidentified
MTVAVGLDVHARSIRLAAVRADELLEERTLPYDEQAVERALRRWQQVRCCYEAGPTGFGLHRHLVEHGIECQVVAPGLVPKRPGDRVKTDARDARKLARLLAGGLLEPIHVPSPELEAARDLVRAREDARLDRMRDRHRLSKFCLRQGRTLPTNSWSVVRRRWLGEQCFEFAAQQQTFDTYVHTVDLVDRRIEQVERAIRETAEQEPWRELVARLRCLRGIDTLTALGIVAEIGDFNRFRSAQEFMAFVGLVPSEHSSGDKRAQGSITKVGNSHVRRLLVESAWHARRRPKVGYELARRQRGQDPLVIERSWRCQQRLYQRWQRMAGRGKPSQKIAVACARELAGFVWAIATEQPLRTS

SEQ ID NO: 509655 - protein, 350 aa, unidentified
MNSMHYVGLDIHKKSISSCVRQADGTIVQESTIAASHQALDRWMDQLPKPWVAGIEATMFTGWIYDHLNSRGAAAKVGHPAMMKAIAAGKKKNDHVDARKISNLLRCDYFPECHMAPQEIRDRRRVLRYRNFLVRQAVRMKNKVSGLLMETGIPYNQQKVHLKKYFGELLKERRQEMPQSLPQLLQLSRSTIETISGMERQLLRVLERDQLLAARVERLATIPGVGRVVALTWALEMGDIQRFRSVKKAVSYCGLCGAEKSSGGKSERTPISKQRNKHLQSMLIEAAKLAPRWNAELALVYEREKQKGNCNQATLAVARKLVAYLLEVDRRERAFDPRVAEQSLNAKQSA

SEQ ID NO: 509656 - protein, 320 aa, unidentified
MMAQNDLVVVGIDVAKDKPDACIRAVALRQMFPNTAQGHRKLVAWLRKHQVSKAVMEASGGYEREWRKVLHNAGIEVRIVDPKRVRSFALSAGRLAKNDAIDAEMIAWFAETFSEAPGQAHDAEHEELVALVKARIALVDLKIRLQSQNEHVVPGPVQKADARLLKTLAAEIAKLEAAISAKIKTTPEFTERAEIIESVPGLAETASATLIAGMPELGQVSDEIAAALIGAAPYDDDSGKRRGERHIRGGRRWVRNAIYMPCLGAATQNNPVLKAFYQRLIAKGKEPKVALTACMRKLIIILNTMIARRQKWDPTRYAVA

SEQ ID NO: 509657 - protein, 358 aa, unidentified
MNSVGLDVHKTRCVACVKTPEGRILEEFAFQNTPHGHMELITHLRAHPQVQVAIESTGNLWIPIYNRLEDEQIHTVLTNPKKTRLIAEAKIKTDKLDARILADLLRANLLSASYVPPRETRMQRSVIRERARLTQLRTIIKNRIHSLLDKHGYKSPYTDLFGKHGLEWLSKLELPAGDRILLEVNLEQLNSLNHSIHRLNETIATSAVDNPEVKLLMGFTGIDYYSAMFLINEIGPVARFSSPKKLVSYAGLAPSTHQSGNHTTHGPITKEGNSHIRWILVEAAQHASRHDPRLSQFYLRIMKRRGHNRALVAVARKMLVTIYHVLNHHSQYRGLRPELYTNKIRRLQRITESSLQTS

SEQ ID NO: 509658 - protein, 293 aa, unidentified
MLIHYIDIAKRNFVIAVSSLSKTKTETNNPKGIAYTIEYLKKHKVALVVTESTGGLEIPAAKAIRRAGIAVIIANPRQTHQFAQSQPLTKTDAKDAKMPAFFAQMTAQKEDSQTMPYQPPTEAEEVLEALVNRRNQPADMRTAEKNRLHQVHETQVGSVKQLIAHFDRLIDELDKQIDNHTRTHFDGKAQVAEQIKGIGSITTATLMAMLPELGRLSHKRIASLVGIAPHPRESEETKFKAAALAEGLRCVRHCIWLPWQRHVLNRLFGISTNARCPRVSRIRLPLRHVCANC

SEQ ID NO: 509659 - protein, 315 aa, unidentified
MQTPVDIGADISKDYVMVSCATGSFPSLRLANRRAALSAWLKRLPAGTRIGMEATGTYHELLATLAHRLGLVVYVLNAKHVHHYAQATAQRGKTDRVDAELIARYVAKEHSHLHIWHPASPAQRQLQRLMRRRGKLTRARAALRSTLQGVPSLRTDVRVLLKQFDALIAKLDTQARALVKASVEREQAFQRLDAIPSVGSAVGIGLLAALERWSLPRADSFVAFIGLDPRPDDSGKRSGRRRLSKDGDPELRRLLYTAAMSASRTRVWAPVYQRALARGLSRIQALVILARHIARTAWSVYTHKTQFDPARVHSS

SEQ ID NO: 509660 - protein, 338 aa, unidentified
MKVYCGIDLHSTNNYLVVLDDDRQPVLSRRLPNRLDTILDCLQPYRENLAGIAVESTFNWYWLVDGLMEHGYRVQLVNTSAVRQYEGLKYRDDRHDARWLAHLLQLGVLPCGYIYPKEERPLRDLLRRRSFLVRQRTADLLSLKNLFSRQTGQQVSSHELKRLTAEDIEQRFADPYLALSFTSTLKVISDLNVQITTIEKAVLKEARLRPDFKRLLEIPGIGQILALTIMYETGSMARFPDVGHFCSYCRCVPSKHLSNGKVKGSGNVKNGNPYLSWAFTEAAHFLIRFEPRAKRYYERKSAKTNPILALRAVANKTARAVFYVLHDQTPFRVERAFG

SEQ ID NO: 509661 - protein, 332 aa, unidentified
MSIVSTVGIDLAKNVFSVHAVDAQGTTLVRRSLSRAKLSELVAQLPPCLIGMEACSGAHEWARRFTAFGHTVKLMAPKFVTPYRKSGKNDGNDAEAICEAVARPNMRFVPVKTAEQQSDLSLHRVRQGFVEERTATFNRLRGLLAEFGHVLPVRTSELCRRVPQLLDKLPSRLAGCVRDLLEHAEQLQAKALEYEREIKAHVHSNALACRAQTRLGIGPITASALVATVGNGRDFKNGRQFAAWLGLVPRQYSTGGRTRLGHITKRGDSYLRTLLVMGARAVLQRAATLTDPLSRWALAVRERRGYHRACVAIAAKNARVAWALLSKEPMPA

SEQ ID NO: 509662 - protein, 351 aa, unidentified
MSHKTAATVAHTIGIDTGKNTLHLIGLDDQGAIVLREKIARGRIAARLANVPRCLIGIEAGMATHYVARELGALGHDVKQVPPAYSKPFRQGHKNDFRDAHAIAEAVQRPSTRCVPVKTDDQLDLQALHRVRSRLVGQRTAVINQIRGFLLEHGIAVRQGLRFLRQQLPDILAQRSDVLSPRMIRIMEDLSGDWRRLDERIEHITKEIEVLAGTDVNCGQLMTVPGIGPIVASATVAAIGNGAAFARGRDFAAWLGLVPKQMSTGDRTILGRITKRGNRYLRMLFVQGARAILLRPKSWVKHSFGPWLTAAARRLHRNILTIALANKLARIALSVLIQGRSYETRIVPAAA

SEQ ID NO: 509663 - protein, 385 aa, unidentified
MQVKLHKSQEYYIFEKPNLKHKTQGLMQTQRKELNFEGQNIFVGIDVHLRSWNVSIFTENLHHKTFNQPPKAESLSTYLKLNFPNAIYHSVYEAGFSGLHAHYELTKLGIHNIVTNPADVPTTDKEKRRKTDKVDSNKLARSLRNKELKGIYTPSQDILEDRSFIRVRSSIVKDQSRLKNRLKSMLYFYGIEFPVEFQKSNTHWSKRFMAWLKTVQLKSQSGNIALAMLIKEAEHLRSLLLEVNKELKVLAITEKYAKNMELIRSVPGIGLVTGMLFLSEIETIKRFENNDRFAGMIGIVPDCYSSGDNEQIGEITPRRHIHLRAGLIESSWIAVRIDTALSKAFSDYCKRMEPNKAIVRIARKLSNRIYFVLKNEKKYETRIIK

SEQ ID NO: 509664 - protein, 345 aa, unidentified
MKHYAGLDLSMESTQVCIVDDNGRKVVSEKVESSPEAIAMMLERYGPIERAVIETGRMSPAICLGLRELDVPVVCIDARQAHQSLKAMKANKTDPHDAAGLAQLARTGFYKEVHVKSPAAHGVRSVITARSHLVEARVRLDNTIRGLCATFGYRPGAGQGKAFLERIMQAAHIPGLGDAIASLLSVRTELVQQIKEMDRRLRLIASQSQACEILMTIPGVGVQTSAAFAAAVDEAGRFRQSRNAGAYFGLVPRRHQSGELDWTGRITKQGDGAVRKLLYEAANSILTRSRETFALKTWAMKIAKRRGLKKARVALARRLAVIMHAMLRDGTLFQARGRIEPVCQR

SEQ ID NO: 509665 - protein, 335 aa, unidentified
MHYLYYVGLDVSKETFDASLVAFEDANEMAHRKFANSRKGICSCLHWVEKRHGIRLDDVIFCAEDMGSYISEMAVCASDRTLNFNFSLISPLVIKYSMGIARGKTDRVDARRIAEYAITHYRKIALYLPAEKELCQLRTWLILRAHLAKQRVAKLVLLEKLDYKEKIADVSIQRSMLQEEIAYAETHMKTIEREMKELIAADSNICRNYKLLTSIKGVGPITAIVMLCSTLNFTKITDHRKFACYCGLAPFEHSSGTSVRGGCHTSSMANRDIKVQLNRSALIAIRCDPQLKAYYERKVAEGKHKFSVLNAVRAKIAARCFAVVRRGTPYVALQI

SEQ ID NO: 509666 - protein, 351 aa, unidentified
MNKVSTLAANGNGENIPTVIGIDLAKNVFALHAVNRHGKPVLVKPQIRRDQFLEFLAQLPPCIIGMEACSGAHHWAREMITLGHTPKLMAPKFVIPYRIQGKRGKNDANDAAAICEAVTRPNMRFVPIKTVDAQSILTLHRVRQGFVEERTATINRIRGLMSEFGIVLAQRAEVIRKQAQLAAERMPSWAASAVYDLLAHLVTLDMRVAEYDEHLKRMANRDERCKRLMALTGVAHITATALVASIGNGHDFKNGRQLAAWLGLVPGQYSSGGKVKLGHITKAGDRYLRTLLILGARAMLANAVRKNDRISRWAVALQARAGYGKALVAIAAKNARIAWALLAKGETFEPA

SEQ ID NO: 509667 - protein, 315 aa, unidentified
MTPAPWFVGIDVSKAQLDIALRPEGRFVVPNDGTGLAHVVERLRALPVALIVLEATGGLELPLIGALVAAGLPVVVANPRQVRDFAKATGKLAKTDPLDAQILAHFADVIRPVPRPLPDEQMQALAALLARRRQLIEMLTAEKNRLGSAPHLVHKRLNAHITWLDREVTQAERTLAHAIHESPIWREKDDRLRTVPGVGPGLARTLIVDLPELGALSRKQIAALVGVAPVNRDSGTLRGKRTLWGGRAHVRAALDMAALVGARCNPVIRSFYQRLCDAGKAKKVALTACMRKLLTILNAMMKHRTRWSTNEIIGS

SEQ ID NO: 509668 - protein, 348 aa, unidentified
MMLIGCDFHPSWQQVCWLDTETGETEESPVVHAAGEVEKFYRRFAAPALIGMESTGNCQWFVELLEKLGHEVWIGDAAKIRASDVRQQKHDRRDAALLLRLLSEGRFPRIWTPSSEQRDQRQLLIHRYKLVRMRAQVKNELQHLAMNRGVQKKRRLWSEAGQKALRELALKPWADRRREDLLKLLAMLDEQVAALDEAVRKAAEQNENARLLMTQPGVGPITSLAFVLTMGDVTRFPRGKQVASYLGLIPREYSSGGHQRLGSISKQGNRFMRMLLVEAAQVAVRCDPEFRSEYLHRCHSKPKGVAKVAAARKLAIRLYWMLRTQKRYPEIVRIESSPRVPLVVRHGG

SEQ ID NO: 509669 - protein, 412 aa, unidentified
MTAKDQFAAHVGLDWADKKHDVCVQFKNGDRIFHVIEHTPEALDIWLNELHQRAKGRIAIAVELKKGPVVYALQKYPFVTVFPVHALSLARYRQAFWPSGAKDDPQDAELALDLMLRYPHKINAIEVDNPDIRLLQQLVEQRRLLVEDKRRFVNRLINTLKQYYPQPLEWFSHRDSSLFCELIIRWPSLQQLKRARSDTVRHFMNAKGGPAVAYTEQRVASIASAIPLTTDKTVIEANALMATALASQIKLTGDLIRTYDERIESLFDTLPDAELFKSLPGMGPCMGPRMLAALGDNRDRFNSAEEIQNYAGIAPVTERSGQKSWVHWRWQCAKFVRQTFVEWTAKTVNSSYWARLYYQGQREKGKSHQSAIRALAFKWIRIIYRCWKTRTRYDEAKYLLALEARKSPLLKP

SEQ ID NO: 509670 - protein, 367 aa, unidentified
MFTERTSVGLDVHARSVAAAAIDGVTGELVQAKLTPSYEHIRSWIQGLPGPVAATYEAGPTGFGLHRYLSATGIRCEVAAPSKLQKPSGDRVKTDAKDAIHLARLLRLDEVTAVAIPSADQEAARDLVRAREDCRGDLMRARHRLSKLLLRHGIVYYDGDAWTGKHDNWLRHEALPQLSDRATRLAFDSDYDTVLVTKARRDRLDDAICEMASDSEFTPLVRRLGCLRGVSTLTGFALAVEIGDWHRFTGNTIGSFVGLVPSEYSSGTSRVQGSITKTGNTHVRRLLVEAAWHHRSRYRVGKTMRDRWDLAPAAARARGDEGNRRLHQRWVRFIDRKKKPTIANVAIARELAGWCWSLAVLEDSGQE

SEQ ID NO: 509671 - protein, 307 aa, unidentified
MNPTTLGIDLAKNSFSLHGVDAKGNVVLRKTLSRSKLLEFISQLPPCTIGMEACSGAHHWARHCQTIGHRARIMAPRFVAPYRKGGKNDGNDAEAICEAVARPSMRFVPVKSEEQQAILCLHRIRQAQLPDILEDADNGLPALARRLLSDVHQRLRELNQDLLAYDRELEHLAKTSDSARRLMGIPGIGATTATALLASIGDPGQFHNGRQLAAWLGLVPRQYTTGGVIRLGRITKQGDKYLRTLLIHGTRAVLATVAEKTDKLSVWIKQLIERRGYKRACVALAAKNARIVWALLTQHGEYQRKAA

SEQ ID NO: 509672 - protein, 350 aa, unidentified
MILIGVDFHPEYQEIASVDTDTGEYQEKRLAHPKEAEEFYRSLSCVGQVVRVGMEASGHGRWFERLLEGLGVELWRGDAEVIRAKRGRKQKTDREDARHILKLLLKDDFPRIWVANWENRDLRQLLWHRHRMVQARTRVMNQLQAVALNEGLRCKKRLFRTDGRQQLESFQLAPWASRRRRELLELLDRLNPTIAELSQAVEREAEKCPEAQRLMTHPGVGALTALAFVLIIGETERFQCGKQIAAYLGLVPLEKSSGNRRRLGHITKQGSSIVRFLLVEAAQVTVRSLPEWRSKYVHLMMRRGRKTAKVAMARKLAVRLYWMWRKGWDYEQWKKFGSYVGQPVHRYGVQ

SEQ ID NO: 509673 - protein, 435 aa, unidentified
MRIKLSAHIWTGLIMELQRNKVCGVDVHKKFLVATSLSRDGIKDTKRFSIVIEDLLRFKDWVIENNCEQVAVESTGIYWYPIHAVLEGKIDLIVANAYKIKHTPGRKTDASDSEWIAELCLNGMIEPSRIFPKEDRELRRLTRARESYVKEITQEKNKIHHALDSSCIKLASVLSDIFGRSGRYILSCLMEGKSVEDIIEGLPTKRIKKKADLIREAIVSSLEVSQIIQIRGSLKLIDAIQERIDELDREIQSRVVRRKDDLRIAMSIPGVGFISAATILAEIGNYADFKNAEQLAAWCGLVPSLYQSAEKTVFGRITKHGSKHIRRMLVQVAYAISRMKDSKLKRFFLRIQKKKGSKIAAVALARKVLCILFHLLTNQETYQEDISKRNKSVKIDKIQPLAEISLNEMIDCIIKAGYVVEKKLTKGGMDTASKG

SEQ ID NO: 509674 - protein, 357 aa, unidentified
MKKLFIGIDFSKEKLDATIILACGMNEIGSREYGCFPNNTTGYRKLCNWVKTNAWNTIAEEWLFCGEDTGSCSIGLSKWLYGKGYDIWIENAYAIKHSSGIQRVKNDKADSAIIAEYAWRQQDKVVPFEPLNESLAQLREIFLYRHKLVGQRVAMELRKEDKSQSNKSKAISFINRKSKHLIAEINKTIAECDKAIDSIIEADEELKENYAIITSIKGVARQNATCMLVYTNNFKKFGYDPRKIACYYGVAPFGKQSGTSVNTPAHTSHFANKLIKSLLGQAAHIAKIYNPGIRDYYQRLISKGKKPQVALNNVKNKLIRIIVALVRKKVPYDQNTYKYYEEREVIERKKNEKLIYC

SEQ ID NO: 509675 - protein, 376 aa, unidentified
MGHHSAAFIGIDPSKLKNAIAIAEGGRDGEVRYLGEIDTTDAATRQLIRKLAAKYAKLTFCYEAGPTGYGLYRLITSLGHECSVVAPSLIPRKAGDHVKTNRRDAQSLARNLRAGELTAVWVPDERHEAMRDLSRARESAVDDLKSKRQQILSLLLRLGLHYPGKKTWGKSHRNWLASQTIGQREQRIVIEELFGAERQAQDRVGRLEQAIRAAVPDWSLAEVVTALMSVRGIDLVAAVTILAELGDLSRFASPRELMAYLGLVPSEHSTGDNIKRGGITKAGNRRARRILVEASWSYRYPPRIGRDKQAKVDAAPEPVRAIAWKAQTRLSSRFRMLSKKGKRPTIVATAIARELCGFIWAIHRAVTSPGLTTASY

SEQ ID NO: 509676 - protein, 417 aa, unidentified
MKSIKAEKIKRINEKTLVVALDIGKKVHYGYFRTPENQDVKPFRIYNTGQSFNKFWGKLCRFKEKHMLDEVVIGFESTGPYAEPIANYLRKKPVKLVQVNPMHTKRIKELTGNSPNKTDKKDPRVIADVISLGHSLTVIVPEGAAAQLRRLAHARERAMERRTAMNNQLQDLVFVVFPEFGDIIKPSTKTGMYLIKNYPDPESIAYIGIETLCNIVRKISRGKFGIDRVEKLYKAAKESVGITDGKESILLETSHLVSNIEAENRYIESLEEQMIVYLEEIPYSHSILSIKGVGNITVAGLIGEVGDFRKFKTISEVMKLAGLDLFEVSSGKHKGGHRISKRGRALIRKLLFFAAINAVKSHGIMHAKYQKMLNNGTPKIKALIAISRNLFRIIFALARDNTEYVEGYKSHEFKLAA

SEQ ID NO: 509677 - protein, 342 aa, unidentified
MQSEADVKNVLKYIEGLKKELGDDVEFLCGYEAGCLGFSLYQQLKKQGVECVILAPSTMMASKGKRIKTDARDAKRIAQCLAYGTYRSVHIPSSDDDAVKEYIRMRDDHKIALKKLKQQINALCLRNGRQYTRTKWTLAHLRWLRETDWQEAVLKETLQEYLMTFEQMTNKLEALDRRIEELAQGEKYKEKVKKLVCLLGVKMRTALASIVEVGDFCRFEKGSTYAAYLGLTPGESSSGDTVRRGGLSKAGNAHLRTLYIEAAQGICKGRIGHKSKELKARQAGSSQEVIAYADQANERLCRKYCRLTHREKKRNVAVAAIARELACFIWGLMTNHTEQRVA

SEQ ID NO: 509678 - protein, 348 aa, unidentified
MTEQMMAGIDLHSNNLVIGIVNQDGQRLKHQKLDCDLKQVAAFLAPFKPQLQSIAVESTYNWYWLVDGLRALSYPVVLANPAQIDQYSGIKHADDKNDAFFLAELQRLNILPTGHIYDPQLRPVRDLLRRRMSLVHQRTALMLSFKSLYARTTGQTMSLSRLKDMEIAEAKTLYEHPANCLIAKIQKEHIERLDQSIETIEKAVLKCAGELPCYEKLNTLPGIGRILGMTITMETGQINRFKTPGDFASYCRTVDSRRMSNGKKKGDNNQKCGNKYLAWAFVEAANFAKRYDEHCRKWFDRKAAKTSTVIATKALACKLAKAAWHVMSQSTDYDSKRMFPEPAMKNEK

SEQ ID NO: 509679 - protein, 418 aa, unidentified
MRVLFIGDDWAEDHHDIEIVDADGRRLARARLPEGLEGITRLHALVAEHAPSSWTEQPDDQAAGQVVVGIETDRGPWVTALRAAGYQVFAINPLSAARYRQRHSTSGAKSDAADAHLLAEIVRLDRDHHRPIAGDSDLADAVKLLARAHQTATWERTRHVLRLRSTLREFFPAAVELLEDLAAADALALLERAPDPGRAARLTRAQVTAALKAARRHHVEAKADTLMAALRRPTLRQSSILEGAYAAIVVAEVKIIRALNEQISALGTVVGEHFGRHPTADIYHSQPGLGTVLAARTLGEFGDDTGRFSDARGRKNYSGQSPITRASGKKTVVLARFATNRRLGVALHLQAYSALTSSPGARAYYDSLRARNIGHHAALRQLANRLVGILHGCLKTGTNYNEDTAWAHRRADTDAVAA

SEQ ID NO: 509680 - protein, 324 aa, unidentified
MKVVFPTCCGVDVHKSFVVATIITTPTDSLQPHYQKKRFSTFNSDLNRFADWLLEHNCLDVCMESTGKYWVPVFNILEKRGIRVVIANPKWVKAVKGNKDDTKDSKWIGDLFRIGLVKSSFIPELKIRILREFLRYRYKLVSMKSSEKNRFQNAFTVCNVALDSVVSDMFGKSATAITDYLTSDESFDPEHCVSLLQRSLKKKAEKVLESIEGYSISDEQKARIKIIREHYDFIEKLIAKVDTCVNEMVEKYEGEINLLCTIPGIDRNSAITIISEIGTDMSQFGSSKRLCCWAGLTPGNNESAGKKKSVRISRAGVYLKPALV

SEQ ID NO: 509681 - protein, 349 aa, unidentified
MKIIGCDFHPGYQQIAMLDKSTGELIEKRLSHSHEGEEAKKFYSQLTGPVLVGLEASGQSQWFERLLAELGHKLWIGDAAKIRASTDRQQKTDRRDAHLLLDLLEQERFPQIWVPTPAERDVRQLLLHRAKLVRVRTQVKNQLQALALNQCVQRRWKLWTAVGRKQLENLPLLPWASRRRTELLKLLDELDGSITALDGAVCQEANTRPAVRRLMTHPGVGPITALAFTLTLGPAERFRRGKQVASYFGLIPREHSSGGKQHLGPISKQGSSFVRGLLVEAATSAVRYEPQLRREYQRLSQRRCRALAKVAIARKLAVRLYWMLRKEVDYAQLLQGSYAGQPESFRGRG

SEQ ID NO: 509682 - protein, 339 aa, unidentified
MLYVGIDIAKNKHDVTALNVPGKTVLKPLTFSNNKAGFELLDLSLRQLNQDCLIALENTGHYAFNLLNFLYEQGYKVYTYTPLLIKEFAKSLSLRKTKTNKKDAHGIALKLLSDPNREQFQHDNRQVELKILARHIHRLKKKQSDWKVQYTRCLDIIFPELDKIVEKHSEYTYQLLTCYPNPQKRLEAGFDKLIEIKRLTASKIQDILSVAPRSIGTTSPAREFEIIKHYKRLIDKAETCVNDLMAEFNSVITTVTGIGNRLEAVILAEIRNIHAFDNPAQLQAFAGLDSSIYQSGQIDLAGRMIKRGSPHLRWALIQAAKACPRFSPAFKAYLKTKLE

SEQ ID NO: 509683 - protein, 527 aa, unidentified
MESEILMRSAKADKKVNTEIFSDAFDPETGEIISDDQTKTLLLKDYEGNTVMPAYPYAIGIDVHSRFIQVSVMVRTGQSVKEYHFQSDTDFQSLSDAKRLAIKIIESFSDPLISVDETALRYACESTGNYHHPLMKIWGGHPIVINPSIAKAGRRKSDRIDAFVLAQNALMGTWAESFIVPDDVNVLRMLYQQRRHCERSATQIGNSINSELLRFGVNIGRDGSVTSNKTVREHVMDQLSEHPLMEPGCSHDFLPDEVKKNLLESYDKWDSCKKDSEDYQEQIRKKIESMNWKSGDHELNGREMIDLLTTVPGIGRTTAMIWMTFIVDVNRFPTYQKCIAYCGFDPSAATSAGKVVSGKKRKGNKDLHEAISRSASNLMSRNSEPFGKWAYNIYVQNGKWKKASNALGRKLVTALYYVQKKGTVFDYSMYRIEEPNVIDIPLEELVVIEPGFRRYSKKLIPLEITTSQQMVHTYHICGFKKVKGLGKGFYGLVRKFIDKQDDYREKYIETCRGGILEDEEAREDYNE

SEQ ID NO: 509684 - protein, 412 aa, unidentified
MEVVYECCCGLDVHAKTVVACLVTKGRKEIRTFATMTDELLQLGDWLSSAGCTHVAIESTGVYWKPVFNILEGLLTVVLVNARHIKAVPGRKTDVRDCEWLADLLRHGLLKASFIPPLEIRELRELIRYRQTVVTEHTAVANRIQKLIESANIKLGQVASEVLGLSGRLMLRALAKGEQDVTKLAELAQGKLKNKKAELRRALAGRFTQVQRWVLAEFLTRVEELEVALTRVEARIGEEVTACADPFVPAAVELLESIPGVGVRTAQTIVAEIGVDMERFPSAKHLASWAGVCPGNHESAGKRKSGQPTQGNKSVRTVLVEAAWAATRAKGTFLQAKYQRLVKRMPKQKALGAVAHRLLVISYHLLSRRVPYAELGSAPRDHQQVERQRRRLVEQLTTLGVKVTIEERTQAA

SEQ ID NO: 509685 - protein, 344 aa, unidentified
MLYVGLDLSRKRLDFDARLVGGELFERGAVPPDGDGLAGLVRRLGDAEVLAVIESMNGARFVHDRLELHGWDVRIADAVKAKGLAPLACKTDKIDAWVLAELARLDLVPEIWLPDPEVRAERERARFRLHLVKHRSALKNRVHSILIAHGVPNPSSDLFGVGGRRLLERLPLPEPWRSTTTASLALIDTLDEEIDRCERELRRLGADHRYVPLLMTCPGIAWILAFTIASEIGDIGRFATPVKLVGYSGLTPKVNQSGENDRRGPLRKNGPNHLRWALVEAAHTAARHPSFQPILERKRAQFGHKRGTKIAAIEIARRLVRAIWHMLTRGQPFAPAGATRPLAA

SEQ ID NO: 509686 - protein, 334 aa, unidentified
MTTWILGIDISKRKFDAALSMGEKFKTKAFPNTPSGHRALLEWLARYGADHVHACMEATGSYWEALATFLHDEGHRVSVVNPAQIHAFAKGLLTRTKTDRQDARLIARFCEAMKPGFWQPRPREERELFALIRRLDALKGMRGQERARLQEAHEAVADEIEGHIEGLERAIRELEERIRDHIERHPGLRDKRDLLASIPGVGETTVHQILSRLSVLSLLGSAKQWAAYAGLSPGERSSGQRQAASSGMVRLGDARLRKALYFPAMVAKQHNPVFRRFAQRLRSNGKRPKQIVVACMRKLLHIMYGVLKSGERFDPSCYGMPAQTISEMSVGRHG

SEQ ID NO: 509687 - protein, 343 aa, unidentified
MQTITTIGLDIAKSVFQVHGVDADGHVVVRRQLKRRYVLAFFQKLPPCLVGIEACASAHHWARELQALGHTAKLMPPAYVKPYVKRQKNDATDAEAICEAVSRPNMRFVETKTPEQQSCLMLHRTRHLFIRQQTAVINAIRSHLAEFGIVAPVGRNGVDQLLGVVADAGDKRLPEIARACVAALGAQLQTLKAQVLQFDRLITAWHRSSEASRRLDAIPGVGPALATALVASVANPKAFRSGRDFSAWIGLVPKQNSSGGKDRLGSISKRGDRYLRSLFTAGALAVIRYAKIHGTKQRPWLTSLLARRPTKVAAIALANKIARMAWAMMAKGESYKEPAALAA

SEQ ID NO: 509688 - protein, 411 aa, unidentified
MHERQKHFYVGVDLHKQHHVAVIINCWQEKLDEIKFENRPSSFSTFLLDIYKHMEDGLTPIFGLEDVGGYGRALAKYLADHEQIVKEVNPALSYAERKSNMTTQKSDSWDAECVARILVNKLDQLPDAKPHDLYWSIQQLVSRRNALVKAQGALKNQLHIQLSHHYPSYKKFFSEVDGKTALAFWERYPSPPCLEAVSVKQLTIFLLEASSNTCSVKKASEILKLVKEDGNTIREHQETRDFLVKSIVRDISFKKQEMRYVERELKGLMSLLDFQLDTMPGIDLVTASALIAEIGDVRRFPNANKLARFAGIAPVYFGSGGKGREQKSKQGNRALHALFYNLAVQQVQVAKGSKLPRNPVFHAYYQRKLKEGKTKGQALVCIMRRLVNIIYGMMKHKTAYKLPIMKEEEVV

SEQ ID NO: 509689 - protein, 379 aa, unidentified
MLVYHNSGLLRPSAPLKTLGERNEKSRNQIRRNRLWKKTLEVIRIGDNSLHQRQQFSTTEIGISKLINWLNPNDVVGLEAGSQSFRIAKSILNKGIQVIVLNPGDLATIYQSLKKTDKEDSLKIARLIQRFPIEELPTVPIPNDEEEDNRRLCTEQENWTRQLTQSKNRLHSLFTQAGLTHITKKHLRTKANREISVALLPSRYQKEAERILKVLDLVEQNLKLIEEEIKEALKKNKAYAQTIMSMPGIGMITSLAIMSYMGNCKRFSSAKQAAYYVGLVPRVDISGDSAYYGRIVNRGCHSIRRVIVQAAWSLVRCQYGGKIKEFYQRLYPKKGAKKSIIATSRKMIEILYTMIKTGELFDSMPEKVLNRKLTQYGLM

SEQ ID NO: 509690 - protein, 351 aa, unidentified
MTMVGGFDVHRKQITFDYVDDDGLVRVGEIRPATRTTLRHWLSEHCPAGDAEFALEGCTGWRYVVDELATAGVVAHLGDPAEIATLRGPKKRAKTDRADARLLRTLLLEGRFPESWIPPAHVVEVRTLGRLYCTLMDERRAWQQRIHAQLFHQGCPPIRALLSVAGRDALAQAQLSAAGRQYVDTALRRIDELTVEIGPVRGQLVSFARRQVACQALQARQYGVGWLCAAIMWAEIGDARRFSSSDQLVRFAGLDVTVYSSADKRSPGHLSRQGSPELRWATFEAAKCAARHGSPDHAYYQRLATKHDGHNGKNPTLAVERKILRRSYHTLRELGDAALAMPVPEEQGVAA

SEQ ID NO: 509691 - protein, 318 aa, unidentified
MPKLIEVGIDVAKATFDVCLGVAGELCHFDNDAPGHERVISRLKEFEVSLTVLEATGGYERALVCALQAAGYVVAVVNPRQARDFAKAMGYLEKTDRVDAGMLAEFAQTLDRHPKRATFITPLLDAERAQLAALVGRRRQLVDMLTAERDRLAMSHKAARTSISAIIKALQRQLDDIEAKMAAHVHKHHADLAELLSSAKGVGGTTAACLIAQLPELGRLSNRQIGKLVGVAPLNRDSGRQRGRRTIFGGRAALRSALYMPTLAAITHNAVIRAFYQRLVAAGKLKKVAIIAAMRKLLTILNAMVRDGKRWDDSLHKA

SEQ ID NO: 509692 - protein, 347 aa, unidentified
MLHVGLDLSRTRLDVHVMDEAGAPLSVTTAAPDAGGLASLAHRVGELGGPVAAAIESMNGARFVHDQLEWHGWRVEIADALKVKGFAPLACKTDKIDAWVLAELSRRDLVPAIWLPTPGIRAERERARWRLHVVRHRTALKNRIHATLMAFGHPCPVSDLFGVAGRRVLADLALPEPWSGDVTAALRLIDLLDGEIDQCEAALRTAGADHRYVPLLMSTPGIGWVLGYTIAAEIGDIGRFSTPKKLVGYTGLCPSVDQSGGHDWRGELAKNGPKYLRWALIEAATHAARHPVYAERYQRTKTRLGKQRGAKVARVDIARKLAEAIWWMLSTNKPFAPAGAPRRPLAA

SEQ ID NO: 509693 - protein, 375 aa, unidentified
MSEHSEAFVGLDTSKRRNAVAIADGGRDGEVRFFGEIENSTEATAKLVRKLAGKYERLTFCYEAGPTGYGLYRQITGLGHGCNVVAPSLVPKKPGDRVKTNRRDAVGLAKLLRAGELTAVWVPDEGHEAMRDLTRARDTAVNDLRAKRQQVSALLLRLGRHYPQARKTWTKAHMNWLASQKFEHPQHRLVFEEMMLAMRQAQERLTRLEDAIRSAVPEWSLAAVVTALMAMRGIDLISAATLLAEIGDLSRFRTPHELMAYLGLVPSEDSTGDTVRRGSITKAGNGRARRMLVECSWSYQHPPRVGAHKQHKVDAAPPAVREIAWKAQCRLHKRYRALIRRGKLKTIAITAVARELAGFIWAINREITTARGVAR

SEQ ID NO: 509694 - protein, 399 aa, unidentified
MDRIRTVAGLDVHKDSIYLCIMGHDEAIIFEKTYGVLTPELRQMCQDMVEHGVTEAAMESTAVYWVPVWNELCNSMELKLVNPYFIKQLPGRKSDIKDAQWIAECLLKNLIKGSFVPEPIVQDMRKLNRRIMDLNEDMTYNCNKLDAALQRCGFRLSNYVSTIKSKSYQSVLQAIINGMTNPEELAKMVHGRTVNKHGRDKIKAAVSGLFSETDITILRQTKEFIDTIERQIEECQKELTALCQEHFPEQYRRIQTIPGVKERAATAIIAETGVDMKMFATAACLVGWCGLKPRNDVSNGRYKSRKVTHGNRYLRQILIEIAWVASRTRNCFFSNFSYLQTTVKKKSKMKIQVAIARKILVALWHMLSKEEDFIDIYRKCLEEQRLMEEKLKSLESKKA

SEQ ID NO: 509695 - protein, 413 aa, unidentified
MAEEPFGWFVGVDWGSEKHQVCILDQHGTIVGERNFPHGGAGLAELGDWLLSVAGTATAVAVGIEVPHGPVVDSLIDRGFVVHAINPKQLDRLRDRFSVAGAKDDRRDGYVLADSVRTDRRLFRGLHVADPRLVALRAWSRLAEELTEERVRLGNRVHHELWRYYPQMTKLTDDIAASWFLELWTIAPTPAKARQLRKATVGQLLKQHRIRRIDAETVIRTLREPAIKVADGVAEAASVHMRSLIARLHVVNRELREAERQLDKICAEIGAAEAASGDGLQRQDVMILKSMPGIGRINLAALLSEGSGPLSRRDYPALRTLCGAAPVTRRSGKSQVVIMRYAAHVRLRNTVYHWARVASQHDPTSKSRYAALRQRGHSHGRALRGVADRLLGLACVLLQRQTPFDPQYGHPAT

SEQ ID NO: 509696 - protein, 324 aa, unidentified
MNKNKQFLGIDISKDVFDVFDYTDNHYQFRNDPSGFKKFGKILTEHSHCVMEVTGSYYQNLASWLYSKSIAVSVVNPLSVKRFIQMRLKTSKTDKSDARMIRVYGEYEDPKLWQPSSEYIIEANELHKLIDLLLRQRTALKNKLHGLKSKGILRSSVVVSVRRQIKSLDKEVSALELKLENLIKEYQAELLTRLCSIPGIGKRTAIFLIVLTQGFEKFENSRQLISYFGLNPTIHESGSSIRGRSRISKTGNNHIRNLLFMCSFTACKHNKSCREIYQRITAKGKSKKLALIAVANKLLKQSLAIAKSGLFYDEDFKSVFVNIR

SEQ ID NO: 509697 - protein, 349 aa, unidentified
MTEQRRSYAGECVYVGVDVHKETYTVTCVCHKQIVKTATVQAEPASLAASLRRWFPGATLASAYEAGFSAFVLHRALTTAGITNIVVNPASIAVAANDKVKTDRRDSKRLAVDLADGRLRGIYVPTEEEELARLLPRTRAQLVEHRATLARQIKAKLHQFGLIAPSSRRMLSHRYLREIESWTLPPELRASLKLLAEQWRFVTRQLIEMRRLLREQATGQAAIDKVYRSVPGIGEVVARTLATELGDMTRFANERALFSYTGLTPSEYSSGASVQRGHISRQGSSRVRHLLVETAWRALPYDAVLQTMFERIAATRGKKRAIVAIARRLIGRIRACFRQGTMYAVGTLA

SEQ ID NO: 509698 - protein, 455 aa, unidentified
MEGIYAGVDWASEKHDVLVADAAGEKLLAATFAHDERGLRSLCRALVRLRVQLVAVERPDGVMVERLLDAGLRVLALHPNQVAAARDRFRVSGGKSDGFDAFVLCELARTDHHRFRVLEPDSDATKAIRALTRGREDLVGARTALVNQLRAELERFWPGPLGLFSDLHSQISLAFLERYPSPADAHGLGEARVRAFLARERYSGRQKPAQLLAKLKAAPTGRVGERELAIRRQLVCGLVAMIKTLNAQITELERQIATAIREHPDGAVFTSLFKGAVITAAELLAEMGDCRGRYPTRDTLAGDAGQAAVAIESGKRKAACFRWGCNKRLRQAFHTLADSSRHHNPWAQDLYAQALARGHDHPRALRTVGRAWSRIVWRCWQDRVPYDPARHRALQRHVTVTIPNASGPVPDIAASQRMAGDAVTRRAARRAERPALDGKPTSAKPAARRTKRQRG

SEQ ID NO: 509699 - protein, 343 aa, unidentified
MQIHSVGIDLGKTTFHLVALGEAGKVLVKKKFTQRQLLTYTANMQTSLIGLEACSGAHFLGRALRKQGHDVRLIAAQFVKLFVKSNKNDFVDAEAIAEAVERKNMRFVPIKTDDQLDLQAIHRVRDRLISRRTAVINQLRAFLLERGLVFAKTPSKLREAMPGILENAEADLTPQMRNLIDLLWREWKMVEEQIEVLSSELERISVTDAGCTRIRKIPGIGPVVATAIVAAIGNGAAFRRGRDFAAWLGLVPRQCSTGGKAKLLGISKRGNVFLRKVLIHGARAAVLRIKRNRAPIGAWLDALDSRAPKNVVVVAMANKLARIAWAVLSTGEDYRPVANGLAA

SEQ ID NO: 509700 - protein, 373 aa, unidentified
MRDHSEAFVALDVAKLKNAVAIAEAGRKGELRYLGEIDNTPEATRKLVGKLAAKYRHLTFCYEAGPTGYGLHRWIRELGHDCLVVAPSLIPAKPGDRVKTNRRDAESLAKLLRAGELTAVWVPDDKHEAIRDLARARDGSVKDLRGKRQQLTSFLLRQGRSFPGKTTWGRAHARWLAEQKFEHHAHHLVLQESIGAIRDADARLVRIESSMLELANGWSMGPVAEALQAMRGIDRIAAVTFLAEVGDLSRFSNPRQLMGYLGLVPSERSTGDNVKRGSITKTGNARARRTLIECAWGYRHPARIGRLKLYQTRDLPKAVQDIAWKAQVRLCARYRTLTGKGKKSTVAATAIAREISAFIWAIAREVAPISKPA

SEQ ID NO: 509701 - protein, 331 aa, unidentified
MEEVKRFVGIDVAKVALDVFIGSVGAAFSVANDEVGIRELLRQLEPADFVILEATGGLETPVASALAAAGIAVAIVNPRQVRDFARATGKLAKTDRLDAEALARFGEAARPEARPLADEQAQALEALVTRRRQLVEMLTAEKNRRARAPKVLHRSIDEHIRWLEKRLAGFDDELGELIRNTPLWRERDELLRSVPGVGKVLSSTLLAQLPELGMLNRKQIAALAGLAPFNRDSGGMRGSRCIWGGRAQVRRVLYMATVAGVRSNPVIKNFYSQLRARGKYPKSALTACMRKLLVILNAMLHNQTPWQTPALTPSISPLSPRLGADTQHGCC

SEQ ID NO: 509702 - protein, 387 aa, unidentified
MIYVGIDIAKDKHFCAIADSDGEILEQPFGLDNNRTGYSLLLSKLKPFSRESVLIGMESTAHYGENLLFFLHDNGYSISVINPIQTATLRKAGIRKTKTDAADSLLIIKSLILNKNRVFDKQDIAYLRLKNLCRFRSKQKKSTTRLKIQLVTFVDIAFPELQTFFKSGIHGKACYELLKSCPAKDDIAALHLTRLGNLLSKSSHGRFGKEEAIALKSLAKSSVGTSDTSISHQIVSTIEQIELLEKQTASLDSLIISQVSDLDSVLLSVPGMSHIICAMILGEIGDIKRFSEPSKLLAFAGLDPSVNQSGKFKAKSTRMSKRGSYLLRYALVFAAWNVCRNNNTFNTYYELKRSQGHSHYSALGHVAHKLVRVIFKMLKDNVAFSLD

SEQ ID NO: 509703 - protein, 347 aa, unidentified
MNFYTQQHKHYCGIDLHARAMYVCILDEQGTKLVHKNLPTTPEAFLRLIAPYREDLVVGVECMFTWYWLADLCSQEGIAFVLGHALYMKAIHGGKAKNDKIDAHKIAVLLRGGMFPQAYVYPSEMRATRDLLRRRCHLARKRAELLAHIHNPNSQYNLPEIGKRLANKSNREDVADHFPDPSVRKAIEVDVALIDQYDQLLGEVELYLTRSAKAHDVQPFARLQSVPGIGQILALVILSEIQDIARFPRVQDFVSYCRLVKCAKESNGKRFGTSGKKIGNVHLRWAFAEAAVLFIRQSQPGKEYFAKLEHKHGKAKALTVLAHKLGRAVYYMLSREQAFDLKRFVTA

SEQ ID NO: 509704 - protein, 400 aa, unidentified
MEPCIRVGIDVGCKAHRVGVAGPDGALLDEFDVSHTREGFEDFFRRVGRHEQERKLPVAVAMEGWNGYARPLDREIRGHGWRLYNVNNLKLARFREVFPGPAKTDALDARKILELFHLKDHLPLAKDVLQEVGEVPPENEKLKRLSRRRRVLVEEKIRVMDRLQADLQAVSPGLLSMTKNVGNLWFLRFLTSRDDLTELSRLRRSSVLAIQGIGEKWAGVIADWQKRATFSSEADYVGPMILADARRILALLQEIRALDQAMAELTDVSSLGRRVRTIPGFGKTSAAELAGEIGTLDRFTSEASLALYLGMATLDNQSGQYHGTKRPRQVNGRAKAAMMTAVARHIEWVPQSKAYYDKKRAEGKRHNQAVRALGRHLVRVIWSMLRQERDYELRDSPPAS

SEQ ID NO: 509705 - protein, 343 aa, unidentified
MHVNTIGVDLAKNVFQVHGVDSAGKVVITRQLRRKQVLDFFSKLPSCLVGMEACGTGHHWAREISKLGHTVRLMPPSYVKGYVKRSKNDAADAAAICEAVTRPSMRFVPIKSTDQQALLMLHRTRDLLIRQRTQLINALRAHLAEFGLVAETGREGVAQLGAIITDEGNHEVLPSAMKQALQAIVDQLAALELQVGALDRAIHAHHRANDMSCRLETVPGIGVIGATAIASTVTDPSGFKSGRDFAAWIGLVPRQHSTGGKERLGGISKQGDRYLRRLLVIGATAVVRQARLHPQKHVWIMRLLAKKPAKLVAVAVANKMARIAWAIMARGGHYRAPELAAAT

SEQ ID NO: 509706 - protein, 340 aa, unidentified
MQVTTIGVDLAKNVFQVHGIAENDVVLFNKPLRRAQFLPFFAKLEPCLIGMESCSSAHHWARELTALGHEVRLIPPMYVKPYVKRGKSDAIDAEAICEAVTRPTMRFVAIKTVEQQALLSLHRARDLLVRERTQLINGLRGLVAEFGVYIPRGLARVIGFAEDITLGEVLDLPDIANEVIRNLSEQLMALHKRIRWYEERLKQVAKEDARVRLLRTIPGVGAVTASAIIASIGDGHQFRNGREFAAWLGLTPANKSSGGKEKLGRITKMGDQYLRSLLVVGMTSLVRQTRSHPERASKWLTSLLERKPARVATVAMANKTARIVWAVLTRDEPYSPRAAV

SEQ ID NO: 509707 - protein, 329 aa, unidentified
MARNGRIVGIDISKAKADGWIRSLRQRRSEPSTPEGQAAMIGWLLVSDVGTAVMEASGGYERPWARALRAAGIAVRIVDPKRVRHFAKSAGRLAKNDPIDAEMIAWFAETFEDDVGSPHDPARDELDVLVTARVGLSKLLSQVANRSEHQPPPVVAKALAAITKGIRTQLARLDAAIAAAIKAKADFTERARIIESVPGLAERTATGIIAWAPELGHITDKEAAALIGLAPYDDDSGARSGERHIKGGRRELRNLIYMATLGAATKHNPVLTAYYLRLRAKGKKAKVALVACMRKLIVILNTMLARGQTWNPPTRAATPPSADAIPATA

SEQ ID NO: 509708 - protein, 405 aa, unidentified
MKQPATLHYAGIDWATRTHAVCVVDQTGAIRARFEVPNTGKSFAGLIKRLGKLGVAGVAIERPDGPLVEAMLDQGLRVVVVTPRQVKALRSRYSASGAKSDPADAYLLADVLRTDGHRLQPLTHDSDPTKVLRALSRTRKDLQEARVALVNQLTAQLERCFPGAIGLFADLHTPVAIAFLRRYPTGHAAAGLTQAKLAAFLRRLHYPGRTPVATLLGRIQAAPAAGISPGEAAGRAVCVLALLDAVQACARQERELEAEIVERLETHADAAIFTSLPKAGHGVRAAALLGELGDVRARFPDNDCLAALGGAAPVTITSGKRRVVKFRWACDKKLRNALVDFADDSRHASPWAAKVYAQALARTGRHQHAVRILARAWVRVIWRIWQDGVAYDPAKHRGAVMLQAT

SEQ ID NO: 509709 - protein, 326 aa, unidentified
MTLGTRLIRPEASREEDSYGTTCGNRRVFKLSSVCIVDTSGKIVRETKVASEPEALIAFFKGLSVPVTRIGLEAGPLSRWLHAELLRAGFEAVLLETRHVKAALSAMSTKTDRNDARGIAQLMRMGWFRAVHAKSVGSREVRALLVARKQLLSKLMDLEASMRGILRGFGLKMGVVTRKGFEARVRELSAGQAMLERITNAMLDARAALWREFEQLHGEMLRIVRDDEICRRLMSIPGVGPLVAVTFKSAIDNPGRIVKSKSVGALFGLVPKKYQSGERDFSGSITRTGDESVRTALYEAANVMLTRTTRFSSLSAGRSRWRSGAV

SEQ ID NO: 509710 - protein, 519 aa, unidentified
MNASISKGKRRDLVVKPNGRIDKQVEEVGPRRFGIVSVDCHKGSSKWMLCDFFGKVLIEPTQVMHTRNGFRKTVQQIEEQTKLSKLGKVIVVVERAGTYHELPKRVFSEAGYNTRVVHPFATKHFRQPADHSVKTDDTDLAAIHRATVVGFALVQPTLTVHQRQLQLAVRLRRDLIKKRSALKCQIREQLHGAMPGYDMLYGEYLWQSKVAIPIARHYRSAEKIHQATLGELKSYCQNLGVRASKPGLQKAKAWAQTAAVSEANGDLRWPAIELLLDDLDLKTQQIQQAEVQLATLLAGTPYILLLAVPGVNVISAAGVAGEMGDIRWYANPNAITGRAGLFPGSYQTCNTDVKNIPLVRHGNKRLRNALLQLASNLLSVNHFYSRQKIIWDREKVHPKVQRTRVAKKFSRLLFSSVSSGRIIPHPCCREQDYVLNKLMTFLLKHEASWETIQRTMFAAVAQLPANRRQAEAEHLQKEQKLTPRKRGAIQKAGDIINLVVAKLLGLPTTEDNLEEQASD

SEQ ID NO: 509711 - protein, 450 aa, unidentified
MGQDMMHVDVADDDEVVQRVAAIDVAKATGMVCTRVPHGATPGRRVTKVWQVSATTNALLELGEQLAAQGVERVVVESTSDYWRPFFYLLEAQGLQVWLVNARDVKNVPGRPKTDKLDAIWLAKLNERGMLRASFVPPGEIRRLRDYTRLRLDLTTERSRHVQRLEKLLEDALIKLATVATDIMGVSGRAMIEALIAGEREPRTLADLARGRMKAKHAALVEALTGRFDDHHGELARVLLDQVDALTHQIDHLTTRIEEMIAAIPAAQGVDADGATGPQAGIGPNSPVLSAIARLDEVPGIGPRAAQIIIAEIGLDMTRFPTAGHLASWAKLCPRANQSGAKNRSGATGKGNPYLKGVLGEVAAAAAKTNTFLGQRYRRLVKRVGKLKALVAVARSILVIIWNLLTDPASRYVDLGPDFYDTRLGPERTKRNHIRQLEALGYQVTLTPAA

SEQ ID NO: 509712 - protein, 402 aa, unidentified
MSTYFAGLDWASRTHAVCVIDEHGTVCKQFEVAHSAAGLAELQRHLAAYGKPPVAIERPSGLVVDTLIEAGFTVVPIHPNAVKATRPRYRSHGAKSDASDAYLLADLLRTDGHRFKPLLPQSDEIRALRALVRGRDDLVATRVRLTNQLRTLLESFWPGAAAIFADVDSLIALAFIERYPTPDTAARLGRKRMAAFCAQHAYTGRRSPEELLVRLHQAPAPVCAELQTKANGELARSLARTLNCLLEQIRLLTGRIEHCVASLDDGRILMSFPRAGRVCAAQILAELGSVRERFPSDAQLAAEAGVAAVTYQSGKSRVVTFRWACNHRLRAALTCLADNSRHASAWAARVYAQARARGCDHPHAVRILARAWVRVIWRAWTDRRPYRPDLHRAAAQLLAAAG

SEQ ID NO: 509713 - protein, 355 aa, unidentified
MNVYSQQHAYYCGIDLHARTMYICILDDNGTKVLHKNYPCSPQAFMEAVAPYRNDLVVTTECVFCWYWLADLCEQENIPFVLGHALYMKLIHGTKSKNDRNDSLKIARLLRGGNYPLAYVYPAGMRSTRDLMRRRNFFVRKRAQLVAHIQNTVSQYNLAPLGKLARPHHRRDRDIAGHFPDPVVGLMIQANLDTIDHFDPLIKELDKQILALAKQHDPTSFHLLKSVPGIGPVLGLTILYEIHDINRFASRQDFCSYARLVKGQKQSAGKNYGTTGGRIGNAHLKWAFSEATLLYLRGNKQAEKYYNRLISKHGKGKALSIIAKRLGTAVYYMLKRREPFNEHKFLNMTENKATT

SEQ ID NO: 509714 - protein, 343 aa, unidentified
MKHHAGLDVSVKETSVCIVDEGGKVCREMKVPSHPEDLVQALKDPAWRLERVGLEAGPLSQWLFSGLAEAGLPVVCIETRHTKAFLQAQVNKSDRNDARGIAQMMRVNLFRPVHVKTLASQRRRTLLTARKLLQEKAIAVDNDIRGLLRNFGLKVGPVGASKFEARIRELIEDMPELAEIIGPLLDARRKLRELFALLHRKLLAIVRDDAVCRRLMTVPGIGPVVSMAFTATVDVPARFKNSKVVGAALGLTPILNQSGESKRIGRVSLCGDGMTRTLLYEAAQVMLTRTTKWSWLKAWAMKVAARRGMQKAIVALARRLAVVLHRMWVSGTDFRWTRDVQPT

SEQ ID NO: 509715 - protein, 409 aa, unidentified
MKFEKDTNGIKRYIGFDIHKEYALVGGQNAQQEWVMQPRRIGIEKLREWAKANLCKGDAVVIETTTNVWDVYDIVEPLVSNVVVAHAGGVRQIAEARVKTDKKDIERLIRLLIADIVPEVWVPPADVRELRGMISYRNRLVKTSTMIRNRLQSLVHRHNLILPKGMLRDQGWWEGQQVSAMERIQIRQELAMLDEIQKHKEEVDAELGRQSLGEVWGQRAMSLLQLSGFGVIVSMTVLSAIGDVSRFESAKKLVGYSGLGAGVHDSGKEHIEKRITKSGRKELRWALVEAAWRAIRISPYWKEQYEKYLRRMRKPNQAIVVIARKLLVVVWHVLTKQETDEHVSEEDLAYKMLVLVQEQTRILEKWYKRWYETANLCTETDQKGKTGDANWFAFQGSICAQAQSNCSGE

SEQ ID NO: 509716 - protein, 391 aa, unidentified
MIYVGIDVAKDKHDCFITNSDGEVLFKAFTITNNLDGFNDLYQKIETVMKDITKVKVGLEATGHYSYNLLGYLIDKGLPTYVINPLHTNLYRKSLSLRQTKTDKVDARTIASMLMSDVNLKSYSDISYHNEELKSLTRYRFDKVKERAKLKSSVSRLICILFPELEKLVPTLHMASVYALLSEFPSAKHVATAHLTRLTNLLSESSKGRYGKDTAITFRDSARASIGSNMPAKSLELKHTIKLIQELDSEIDEIENEIKIIMDEINSPILSIPGINYRMGSMIIAEIGDFNRFDSPDKILAYAGFSPSTYQSGQLDGAYAHMEKRGSRYLRYALYNATKYVCHWDPTFAAYLAKKRAEGKHYNVAISHAVKKLVRVIYHLEKTKQQYITAA

SEQ ID NO: 509717 - protein, 338 aa, unidentified
MDKITTIGLDLAKQVFHAVCCDRRGKVVKKRMLKRGQVRGYFAKLPSCLVAMEACASAHYWAREITALGHEVKLIAPQYVKPHVRGNKNDYNDALGITEAVHCAEMRFVAVKTPAQQDIQALHRLRERRVAERTALCNQVRGLLAEYGLVVAKGVGRLRRELPRLLEDGENGLSGLFRRLLAECYEQLQELDGHIEGYTEEMTRHSREDDACRRLQTIPGYGPIVSSVFSAVVGNGETYRRGRDVSASLGLVPKQHSTGGKTVLLGISKRGDRYLRCLLVHGARSAVRAASTKDDRLSRWINKTVAERGVNRATVALANKMARIGWAILAHNTVYRAA

SEQ ID NO: 509718 - protein, 350 aa, unidentified
MLIIGCDYHPGFQQIAFVDTETGECGERRLTHREEAEQFYRKLSERSLHVRVGMEASGHARWFERLLSDLEFELWIGDAAEIRTKRVRKQKTDRQDAQLLLRLMVEDRFPRIWVPDADNRDLRQLLWHRHRLVQMRTRIMNQLHVVALNKGVRRKKALWRPAGRSQLESLGLAPWASRRRQDLLDVFDQLTPKIQELTRALEEEVEKRPVARRLMTHPGVGPLTALAFELVIGTPERFHCGKQIASYVGLVPSEESSGDRRRLGHISKQGNSLLRFLLVEAAQVTVRSHPQWRSKFFHLAMRRGRKIAKVAMARKLAVHLYWMWRRGWDYGQFAKLGSHAGEPGNRHGVL

SEQ ID NO: 509719 - protein, 354 aa, unidentified
MKNEPIHYLGLDVHQSTTVACVKDEQGSVRMRATVPTEEKAIVQLAASAGRRVHVAFEEGTQAQWLHDVLVERVERVVVFNARGRGAKDNKDDRIDAEAAAEGLRTGALKPVFHGAPEMLTLRELVRNYESLVQDATRVMLRIKAMFRARGIATPGVSVYRPSQRKAWLSKLDGGARVRAATLLTQLDTLSELRAKAKTAMIAAARRLPAWKVLSSVPFFGPVRVAQVMAIMRTPFRFRTKRNLWPYAGLAVVRRSSADQEFTNGKLQRSSKQPMTRGLNRNHHPTLKAVFKGAANDAVSRPGPLRDCYEASIARGVDKELAKVTLARKIAAVMLHLWKKGERFDPTKLTMQAP

SEQ ID NO: 509720 - protein, 356 aa, unidentified
MSHEVKYIGMDVHKEAIVIAVLNGSGKLVMETILETKGSSILQFLHGLRGELHVTWEEGTWAAWLYDLLQPQVQEVVVCNPRRNALLKEGSKSDKVDARKLADLLRTGMLRPVYHGENGLRTLRELARSYQTIGKDLIRVMNRLKALYRGWGIACAGTQVYAPRYREEWLRKIAQAGVRRRAELLYQQLDGLQALRRNLRPEFLAESRKHKAAKLLHQIPCIGPIRAARLIALMQTPHRFRSKRQLWTYSGLGIETHDSAQYRYVGGQVQRSKKPQQIRGLNQNHNHEMKEIFKSTATRASCASGPFRDFYAALLAKGMKPEMARLTLARKIAAITLTLWKKEERFDAEQLKTQAA

SEQ ID NO: 509721 - protein, 346 aa, unidentified
MGKSISDFSSVTTVGLDLAKHVFQIHGIDASGRVVVAKAMRRNKLLEFFASLPPCLVGLEASGSAHHWARELIKLGHDARMMPPAYVKPYVRRQKNDASDAAAICEAVSRPSMRFVGVRSLENQAALMRHKTREMLVSQRTQLLNGLRGHLTEVGVIAAQGPRHARELAELIEACDDTIPVEVCEALAPLAVQLRTLDEAIAQLDRAITKLVQKDETARRLMSIPGFGPITASAMAATVQDASSFAGPREFAAFLGLTPKQNSSGGKQKLGRISKMGNRNLRKLLVVGAHAVLFHRMSHTDPLRMWAKKLLEKKPFKLVAVALANKMARIAFAILRGKTTYREIPA

SEQ ID NO: 509722 - protein, 340 aa, unidentified
MNNVTTIGIDLAKNSFSVHGVDVRGKRVFRKTLSRGKLLPFLAQQPPSLIGMEACSGAHHWGRQLQAMGHRAGIMASRFVVPYRKGGKNDGNDAEAICEAVARPGMRFVPVKSAEQQALLSLHRVRQGLIKERTAAINQLRGLLSEFGLIMPKGRYPAQHPIPGILEDAENGLPVLVCRLLNDVYLRLRGMNEQLLAYDRELEHLSKESEIAQRLMTIPGIGAVTATALIASVGDSKQFRNGRQFAAWLGLTPRQYTTGGKIRLGRITKKGDVYLRTLLIHGTRAVLATLKDKQDRLSIWTRALIERRGYKRAAVALAAKNARILWALMMRGDTFQRKTA

SEQ ID NO: 509723 - protein, 320 aa, unidentified
MDGVLGIDMANTKFDVALVGPDGTVRRKSGANTPAGFADLPAWLTRQAVTPVHAALEATGTYGDALAEYLYDAGHVVSVLNPAITHAFAASQLKRAKTDRIDAALIAEYTATQHPPAWTPAPREIRELQALVRRLDALHGMRTPEANRLAAGPLVDAVHTSITTGLGTLDAELAAVPQQIQNHFRQHPGLRAQRELLTSLPGIGDATAAGLIAELFDKPSHSARQAAAFAGVVPRVAASGTLRTRGRLVKLGPGRLRKALSLPALTALRCNPTLPSLRARMRAAGQPPMVIVGAAMRTLIHLAYGVLKSGRAYDPTYARP

SEQ ID NO: 509724 - protein, 370 aa, unidentified
MQTVRSFVGMDVHKETISISVAEDGRNGPVRFLGVIPNSADDIAKMAKRLSKHGELDFCYEASGCGYGIHRQLTALGHKCIVVAPSMIPRKPGERIKTDRRDSEKLAILHRSGDLTPVWVPDTTHEALRDLVRARVDASMHLMRARQQLLAFLLRHGRSYPTGKHWTQRHRSWLAGQTFHEHAHGIVFQDYLETVWTAQQRRDALIERISMMVGTWSLGPLVEALRGLRGIDMISAATFIASTGDLSRFESPRLLMGYLGLVPSEHSSGGTIRRGGITKTGNREARRMLIEAAWSYQYPARIAKEKAEILVRLPKNIRDIAWKAQTRLCTRYRSMVARGKKPTVVAAAIARELAGFIWAIGQEMRTQMTT

SEQ ID NO: 509725 - protein, 314 aa, unidentified
MAYFVGLDVSLEETAICVVDESGTILREGKAESEPEAIVTWLKSINVSMERLGLEAGPLSPWLCGELQAAGLPAVCIETRRMKGATAAMAVKTDRNDARAIAQAMRVGWFTAVHIKTTESQELRLLLANRKMLLRSRIALENEIRGTLKAFGLKIGRVSTLTFEARAIELTANRSPLQAMVRPMLTARQALQLQYQALHALVLKAVRSNQVCRRLLTVPGVGAVTALVFATAIDDPARFIRSRDVGAHLGLTPRKYASGEIDRNGTISKSGDRLAREALFVAAHSLLTRVTRWSALKAWGMAVARQSPSRASSR

SEQ ID NO: 509726 - protein, 347 aa, unidentified
MGKSITDLSSVTTVGLDLAKHVFQVHGVDASGRVIVAKALRRKDVLAFFAQLPACLVGMEACGSAHHWARELIKLGHDARMMPPAYVKPYVRRQKNDAADAAGICEAVTRPSMRFTGVRTLENQAALMHHKAREMLVAQRTQLINALRGHLAEIGVIAAQGLKNARELARVILAEGDETIPACVRAALAPLVRQLHVLDQEIARSDRTIAAMARDDEMARRLMTIPGLGPVTASAMAASVQDVSAFTGPREFAAFLGLTPRQNSSGGKEQLGRISKMGNRYLRKLLVVGAHAVLYHRKPHEDALRSWAKKLMQTKPFKLVAVALANKMARIAFAIMRGKTTYSAAPA

SEQ ID NO: 509727 - protein, 343 aa, unidentified
MQMITTIGLDIAKSVFQVHGVDAAGEVVIRRQLKRRYVLAFFQKLSPCLVGIEACASSHYWSRELQALGHTVRLMPPAYVKPYVKRQKNDMADAEAICEAVTRANMRFVPTKTPEQQSCLMLHRTRHLFIRQQTAVINSIRAHLAEFGIVAPVGRKGVTELLQVVADPGDKRVPEVARACLAALGTQLLHLKEQIVEFDRLIMAWHRSNQTSKRLHYIPGVGPMLATALVASVADPRTFRSGRNFSAWIGLVPKQHSSGGKDRLGSISKQGDRYLRSLFVAGALAVIRYAKIHGTKHRPWLTALLGRRPTKVVAIALANKIARMAWAMMAKGERYKQPVALAA

SEQ ID NO: 509728 - protein, 406 aa, unidentified
MNAVGIDVSKGKSTVSILRPGGEVVASPFEVSHNPRELHELVKLMKNLDGDTKIVIEYTGNYYLPVALFLQKSGLFVSVVNPILVKDYSNKSLTVRKGKTDKKDSIKLAAFALDHWNELPLFSARSDTRTLLKAFNRKYNQYIKLKVMLKNNLFSILDLTFPGVNTLFNTPAKKADGHEKWIDFVLKFPHCECISRKTYSVFSKCYLSWCRKCGYHFSGAKAKEFYSFACNCAPSLADSETAHSLVSTAIAQLNTLNEALASLQKEMDLLASSLPEYDTVLSFFGVGSVLGSQLIAEIGDVLRFSNKKALVGFASIYAPPFQSGNFNPQSRSISKRGSAALRKTLFQVMSVILQNAPPNEPVFLFMDKKRSEGKHFYVYMMAGANKFLRIYYARVLEHLNALREAA

SEQ ID NO: 509729 - protein, 410 aa, unidentified
MSVQESPEPVYVGLDWAAAIHAVCVMSAAGEVLAQLAIEHTAEGIASLIRRLAKYGEPTDVQIGIERPNGRLVDLLLDAGHPVVPVTPNAIKTWREGEVISGAKSDAGDAIVIAEYLRLRHHRLRPVQPYSAETKALRTVVRTRDEIVDMRVAATNQLAALLDDHWPGAKEIFADIESPISLTFLRRYPTAAAAAHLGHKRLAAFLVKHGYSGRRSAAVLLARLRYAPAGTTDPVLTEAIHDAVLALVTVLEALNTAGKNLDRSVAAHLGEHPDGVVFTSLPRSGQINAAQMLAEWGDSRAAYDHPDAVAALAGVTPVTKASGKQRAVHFRWACNKRFRQAMTIFADNSRHASPCAAHIYAQARARGHDHPHAVRILARAWIRVIYRCWHNNQPYNPDLHGGAQKLPTAA

SEQ ID NO: 509730 - protein, 392 aa, unidentified
MMVSVGIDVSKDKHDCFIVNSEGEILADVFTIPNNMDGFHYLLQRIQDCANTQNKIKVGLEATGHYSYNLLGFLLDNGLTTYVLNPLRTNLYRKSLSLRKTKTDRVDARTIASMLLSDVGLKPYTDTAYHNEELKSLTRYRFDKVKERAKLKSSIARLVCILFPELEKLVPSLHIASVYALLEEFPGAKQIAAAHLTRLKTLLETASKGHYKRDMALEIRDAARNSIGSWMPAKSLELQHTIRLIRELDDEIAEIEKQIQAIMDELNSPITTIPGIGFRMAAMIFAEVGDFTRFDSPDKLLAYAGMSPSTYQSGQLKNCYPHMEKRGSRYLRYALYNATKYVCHWDPTFAAYLAKKRAEGKHYNVALSHATKKLVRLIFAMEKSRQPYRLVA

SEQ ID NO: 509731 - protein, 351 aa, unidentified
MPRRSTVRAVTTIGIDMGKNALHMVGLDSLGAIVLRERVSRGRITSRLANLPPCLIGIEAGMATHYVARELAALGHDVKQVPPTYAKPFRQGHKNDFRDAHAVAEAVQRPTTRFVPAKTNEQLDLQALHRVRSRLVSERTAVSNQIRGFLLERGIIVRQGLRFLRHLLPDILAKRTDVLSPRMARIVSDLVGDWRQLDERIETVTDEIETLAKSDDSCRRVMTVPGIGPLISSAMVAAIGNGTAFAKGRDYSAWLGLVPRQMSTGDRTILGRLSKRGNGYLRMLFMQAARVILLRPANWPKHGFGAWLVRAAQRLHPNVLAAALANKLARIAWTVLAQERSYEARVTKAAA

SEQ ID NO: 509732 - protein, 371 aa, unidentified
MEQNIKYFIGLDVHKDSIAIAAAPANSREEPRFIGTTAYSVSQIVKALSRSECAPSELAIVYEAGPCGYGLQRELVAKGYRCEVVAPSKVPRRPADRIKTDRRDALLLARLHRSAELVAVVVPDPADEAVRDLLRAREDAVTAQRCARQQLMALLLRLGKPYRGGRGWTAKHLRFLADLSFDEPHHRIVYTEYRLAVQSAGERIERLEAAIRQAADTWRWQSVVKALMSLRSVDFLTAMTLVAEIGDLRRFEHPRQLMNYLGLVPSEFSSGNSIQRGPITRTGNGRVRRLLIEAAWNYRHPARISPAIHARHDGLPTSVVEIAWKAQVRLCHRFRKLRLRGLHPNKTCAAIARELVGFIWDIGRQVRPTAP

SEQ ID NO: 509733 - protein, 312 aa, unidentified
MAQTAPSVGIDVSCDRLDAALYPDEQRLSVSNDAAGWKQLCHWLRPLGARAIGIEASGGYERGVIGALLDAGLPVRSVNPWRLRQFAKAAGVLAKNDKLDAAIIGWFVATLPCRPVQRDRDREHVAELVNGRRQLVDLKLALSNQLAQLSDAELRRLQTRRLRQIETDLARLEQRIAAAIAAVPALAAKAALLGSMPGVGPVLIATLLARMPELGQIGHRQIGALAGVVPYDWDSGKMKGLRCIFGGRADVRQVLYMAAVSAVRHNPVLKARYQRLLAVGKSAMVAIVAVMRTMLVQLNAMLRENQPWRAPA

SEQ ID NO: 509734 - protein, 408 aa, unidentified
MSVHAAPVSASTIALAVDVGKSSFACSVTDSGRNRLLGSVECAMTGPGVRELVARVERLLPTRAQVKVGIEAAGHYHRPLLNRAVWPTGWELLELNPAHVTEQRRVMGRRRVKTDAIDLEAITELLLAGRGTPVLSPSTVVAELGAWAAHRSRRVATRTATKNQLLGQLDRAFPGLTRALPDVLGTKIGRLIAAEFADPARLAGLGEARFIRFAGHRGLQVRRPQAQRLVAAARAALPTAEAAVARRVLIADLRLLAGLDVEVQAAEVELARLLPASPFAPLTSVPGWGVVRAANYGAAVGEPARWPGPRQLYRAAGLNPMQYESAGRRRDGAISREGSVALRRALIDLGLGLWLTDPASRTRAAQLRARGKHGSVIACALAHRANRIAYALVRDQADYDPARWSPEA

SEQ ID NO: 509735 - protein, 334 aa, unidentified
MKTFKTFAGIDISKTTIDISFINADATSTTKHLKINNDIKTIAALVDKITKQEDLQNTLFTCEHTGVYTMPFITVMHMKQLNYWIVPAIEIKRSQGLHRGKNDKADSKMIALYALTHQHRYIPSVLPETEIQQLKLLFTEREKILKAIALFERTQENESYLNKDVFSVIKKLNRQQIDHLNKALLQVEKQLLLIIKQHNELNKQYELLTSVPGIGKQTAIYLIITTRSFKAFKTWRQMACYAGVAPFEYSSGTSIKGRSKVNHVADKKMKSMLQMCVLSAVKHDAEIKQYYEKKKAEGKHVMLVMNNIRCKLLARAFAVINRATPFVNTQKFAA

SEQ ID NO: 509736 - protein, 412 aa, unidentified
MEMIVERPGALDVHKESVTACVRVPGPDGKRVQVVEQFSTTVRGLLVLHDWLKAHGVTQVAMEATGCYWKPIWAILEDDFDCLLVNARHVKQVPGRKTDVQDAAWLCQLLEAGLLKRSFVPPKPIRTLRNLTRYRKAQIAERQREANRLHKILEDTGIKLDCVATDILGKSGRAMLDALCHGTTDPVVLADLAKGRMRAKIPALQEALEGRFSSEHAIVVSAILAHIDFLDEQIDRLSDAVEDQIRPFAPAVELLCTIPGVKLRTAEVIIAEIGTDMSVFPTAGHLVSWAGLCPGHDESAGKRRSGRTRKGSKWLRIALLESALAAANAKDSYLAAQYRRLKARRGHGRASIAVCHSILAAAWHMLQTGEVYRDAGGDYFTRLDPERQTRHLVRKLEALGHQVTLETLPQAA

SEQ ID NO: 509737 - protein, 376 aa, unidentified
MAMMHQQRTLRYLGLDVHKASISVAIAEESGPPTTYGRIPNEPTGIRTLMTRLGGPGIELRVAYEAGPTGYALHRQLTRLGIACLVVAPSLIPRQPGNKVKTDRRDALKLARLLRSGDLTPVWVPDEAHEALRSLVRARADAKADQLRAKHRLSKCLLRHGCWPPIGIRHWSKRYFTWLHQLEFEHLPDRIVFADYLAEVNAAGERITRLERALHECAQSSRQVALIRGLQAFRGIGFLSAVTLAAEAGDLRRFRTAPQFMAYAGIVPSESSSGEKHQRGPITKTGNRLLRHVLGEAAHHARHAPRVTSKVKQRQADVPPELIDLAWRAQVRLHTRYRQLSARIGALKALVAIARELAGFIWAAGHLLQEEVPAAA

SEQ ID NO: 509738 - protein, 409 aa, unidentified
MNLYLGIDVGKNKLDFCALDSDQRCCFQGETTNDLNGAIKIKQTVLTETQTHHYEKITAGMEATSVYNFHPMTFLAEDSELQALGLSVITINPYTSHHFSQLFNDGKTDAIDAKQLADLLRVEPLGTPVARQENYVALQRLTRERYHLVKQMTDSKNHFLNNLYYRCNTLERELPTSVFGSAMMTLITDEELTLDEAAALPLDELVTHLQQLAHGKFGDAEAVTKAIKKATRSSYRLSKVVTDSVDEILAVYANEIRMLKKQIQVLDKTITQISTQNTDINCLTSVPGIGPVYAAGIVAEIGQIERFPDESHIAKYAGLAWLPHESGTSVRQATPRTRKGNQYLRYYLVEAANSIRRYDITYQRYYHKKYEEVPKYRHRRAIVLTARKLVRLVEVLLRNHQFYIPPKVV

SEQ ID NO: 509739 - protein, 410 aa, unidentified
MEVIHPRCAGVDVSKRDAKVCVRIAGAGRRSATSTVSTWGAVTNQVLSLRDHLIQEQVTLVVMEATGDYWKPFYFLLEDALNVMLVNARHVKNMPGRKSDVSDAAWLADLGAHGLVRGSFVPPEPIRQLRDLTRTRTAITRERGREVQRLEKLLEDAGVKLSSVASDINGVSGRAMLEAMIAGQRDPAVLADLAKRRLRVKIPALTEALTGRFSEHHAFLARLHLDLIDRHTTAIQEVTDRIEVVVEPFRGFRELICTIPGISTLVADVITAETGADMSRFPTAEHLASWAGTSPGSNESAGRVKSTNTRPGNPYLKGALGVAAMSVARSKNTYLAAKYRRIASRRGPMKAIVAVEHAILIAIWNMATTGALYDDPGSDFYTRRNPDKTKRRAIEQLRGMGYNVTLEPTG

SEQ ID NO: 509740 - protein, 357 aa, unidentified
MQLQNNDLDFSNQEFYLGIDVHKKSWNVTVRSSNIVLKTFSMNPKPKEISNYMKKNYPKGKYYSVYEAGFSGYAAHRELIKDGFENIVVSPTDIPTSGKERIYKTDKIDSKKLARELENKNLNGIFIPSLLQQEIRSISRLRYQQVKKQTRIKNQIKSYLDFYGHRLPKNSEMKHWSEAFIEHLENLKFHYSMGKEQLYIYLEELQIAKKRIIELVDSLKKHCIQYGIDNDIELLCSVPGIGFITAVTIETEIMDISRFSNTDKFASYIGLVPSTRSSGEKDNVLGLTYLYNRYIRSLIIESAWIAVRKDPALTLAFNNYSKRMSKQEAIVRIAKKLLNRIYFVLKNNKEYVCAVVK

SEQ ID NO: 509741 - protein, 400 aa, unidentified
MNSNRRVAGLDVHKDSIYLCIMGHDENIILQKTYGVLTPELRQMREDMLFHGVTECAMESTAVYWIPVWNELYGSMELKLVNPYFIKQLPGRKSDVKDAQWIAECVLKNLIRGSFVPEPIIQDMRKLNRRIMDLNEDMTYNCNKLDAALQRCGFRLSNYVSSTKSKSYQSVLRSIIEGRSSPDELVGLVHGRTLNKHGRSSIKASVTASFSRTDMTIFKQLKETIDLIERQIDECQKELTELCKEHFPKQYGRLQTIPGVKERAATAIIAETGVDMKMFATAACLVGWCGLKPRNDVSNGRFKSRKVTHGNRYLRQILIEIAWAASRSRNCFFSHFSYIQTTLKKKGKMKIQVAIARKILVAVWHMITKEEDFIDIYLKRLEELKSTKERIRQFESCMAK

SEQ ID NO: 509742 - protein, 370 aa, unidentified
MKSIVYVGMDVHTTSYTLCCYRLGNNEVFAVSQMGADYKHIIRYLDRIRQVQGESIRFLCGYEAGCLGYTLYHQLTAYGIDCVILAPTSMPQTKGRSIKTDKRDAASIAKCLAYGTYSAVYIPSEEDNAVKEYVRMRDDAKIALKKLKQQIMSFCIRNGMMFTDGSSYWTLKHIAWLKRQDLGNTILQETYQEILTSYFQVADKVGRFDRRIEELAQIESYRGRVKKLSCLIGIGSLAALSIIVETGDFRRFPTAQHYSAYLGLVPGEDSSGTRIHRTGITKAGNSHLRKLLVESAQCYGRGTVGAKSKMLSRRQEGNDSAVIAYADKANERLRRRFYKINFRSKRNIAVVAVARELACFIWGMMTGNVA

SEQ ID NO: 509743 - protein, 408 aa, unidentified
MEILYPRCAGLDVHKDSVVARIRCVSEPVHDEVKTFATTTSALLELNEFLSAQGVTHVAMEATGVYWKPVWHLLEGDFELILANAQHIRNVPGRKTDVSDAGWIADLLAHGLIRSSFVPPAPIQELRDLTRTRKQLVREVSQHSSRIQKVLEDANLKLGSVLSNVLGKSGRAIIEALIAGQSDPDKLADLAQGTARKKRAELIEALHGRIRPHHRGLLKVHLTLVVTLEQAIADIDTTVGKSLASVHESARLLSTMPGISDVTAHVIVAEIGVDMTRFASDAHLRSWAGFCPRSDESAGKRRSTRVRKGAPWLKTTLVTAAWAAVRVKESYLQAQFHRLRARRGAKKAILAVASSMLTAAYHMLKNGVEYQDLGASHFTRRDREKIILRLVRRINDLGCQVQIVPQAA

SEQ ID NO: 509744 - protein, 335 aa, unidentified
MFQLGIDVSKNTLDLCLLREGVKGKMKTRKLKNDVRATSAVINWLHKQHCEPVEVHIIMEATGVYHESLAFGLHNAGARVSLANPHRSREFARGMGMLMKNDQVDAYMLACYGALREPLPWAPPPENVRYLSSLLRRRDALVADRTREKNRLEKCRATDCPLVISESIESMLLSLSSELVHLDNLIEEHLEQYPELKKDFDLLTSIKSVGFQLGLHMLVILRGHNFDTAEQAAAFLGVVPVEKSSGSSVNGKPRLSKIGPPEIRAKLYLASLCGLRFNPVMKAMYERLCQRGKAKMCAIGALMRKLVHWCYGVLNTQRPFNPEHLSNARGMCMAT

SEQ ID NO: 509745 - protein, 398 aa, unidentified
MSRIWAGTDCGKTHHHCLVLDSKGDTLLSRRVANDEPELLKLIGDVLDLADGGKTTWALDMTGGEPGLLIALLVNHGQELVYIPGIAVNRATDSYRGQGKTDARDARVIADQARMRRDLQPIRPGDEATLELRLLTDHRVDLVADRTRTTNRLKALLNSMFLALERALDLGNVGPLVLLTGYQTPAAIRRAGSRRLTAWLRNRKVCNAAALAEKVVEAAERQHTAVVGEKAIAKMVHTLAKEVMVLNEKITETDKLIEGRFREHELADVIQSMPGIGTILGAEFLVAVGGSLDAFPTADRLAAFAGTAPAPRDSGQVSGNDHRPTRYHRRLQRVFYISALVSVQRDPNSRKFYDRKRAEGKRHVQAVLALARRRVNVLWALIRDRRCYQVTPPVTTAA

SEQ ID NO: 509746 - protein, 375 aa, unidentified
MGHHSEAFIGIDTAKLRNAVAVAEAGRRGEVRYLGEIDTSECATRKLVAGLSTKYRKLTFCYEAGPTGYGLQRLIEGLGHPCMVAAPSLVPKKAGDRVKTNRRDAEGLARLLRAGELTSVWVPGAHHEAMRELTRARGSARADLTRKRQQVSSMLLRMGRHYPGIKTWGARHRSWLANLKLDHAEQRFVLEELLQAEGQAGERVVRLEQAIRAAMADWSLASIVPALMAMRGIDLVSAVTILAEIGDLSRFASPRQLMAYLGLVPSERSTGESVRRGSITKAGNGRARRVLVEAAWAYRHPPRVGYEKQAQVAAAPRRAREIAWKAQVRLCARFRTLSRKGKKSTVVATAIARELAGFIWAIHRATTGTLGMSRA

SEQ ID NO: 509747 - protein, 370 aa, unidentified
MKKNSTVAQSPKRAAARKGGPITIGMDLGDKISRYCVLGANGERLSEGSVATTRKAMAQKFSGMRRCRVAMEVGTHSPWLSRWLTSLGFEVIVANARQVQLISASSRKNDRMDAHLLARLARVDPQLLRPIRHRSEQAQADLMTIRIRAALVEARTSLVNAARGFAKAQGDRLPACDADAMGVEKMEALPAEMRERLRPLLEQVESLTEKIQESEAKIEQIARTEYPETELLQQVSGVGTLIALTFVLTVEDRDRFQKSRDVGCYVGLRPKQSESGQSQPQLRITKEGDRYLRTLLVQGAHCILSRRGPDTDLKRWGLKLAERGGKNAKKRAIVAVALKLAVLLHRLWVTGEVYDALRNNQAARSSKQAA

SEQ ID NO: 509748 - protein, 370 aa, unidentified
MSVRRILAKTIDTDLEYEAIGIDLAKNCVSAALSTTDGEVICIDRLDYSELEKSAQALSSTTFAMEPCTEMNYLVQKLEAWGHRCLVIGGKNVQNYVENHYSGQKTDLNDAQALAFLAQDTQLRTIKAKDVEQQKYASLTTLREQYIKQYRQTIVSLKGICQAWGLNISKGISGKARLKDLIENHVAFPEELKESLVDMVTHAQTAQKALNKITKTLEELAKSDKVCQLIQTIPGLGSICSCRLRATVGDIKRFKSPKDFPAYYGLVPRSIATGHNERKGKITHRGDRTMRSLMVQAAGSLVNMATKGKLKSKQLTKWILKKQKEKMPWGKLVCAVAAKLLRIVRAVLISNKPYNSKIAGVAKCSLPKGS

SEQ ID NO: 509749 - protein, 317 aa, unidentified
MNSKNNQNEINICVDTGKTQLDIYIRPQDIYFTVTNDEKGINKAIKEIKKYKPKRIVIEATGRLEQAFIIACSKEKLPFVIANPAHIKKFAGAIGQLAKTDKLDAKLIAHYSEAIKPKLSTLKPATLRFMSDLMSRRCQLMEIRTMEKNRLQIMPKEITSSINPLLTVINNQLVKIDKKLHKLIQSCDEYKIKNDIIQSVPSVGNVVAFSLLSNMPELGYITNKEAAALVGVAPINRESGSFEGKRMIRGGRHQIRTAMFMSMMSAMQCNPVFEATYQRLVATGKPKKVAIIACVRKMVVLLNSMLRDGVYWDPKMS

SEQ ID NO: 509750 - protein, 341 aa, unidentified
MAKFIRAAIDLGKNYFQVHGLESEGGRSISRKVKRSKMHEVFSQIEPCRVGMEACGSAHYWARQLVAMGHEVVLLPPAYIKPYVKRGKNDAVDAAAICEAMSRPVMRFVPIKSADQQAVLMLHKTRELLVKQRTMAVNALRGHLAEFGIVAAKGIGRVDELLTLAKADAALPPMAMAAVACLAQHLEGLDLSIATMEKEIARSHRQNPISRVLDEIPGVGTLIASVVAASVPDPGVFKSGRDFAAWLGLTPRQNSSGGKEKLGAITKQGNRYIRKMLVTGATSVLRVVGKRKGSFADWINAMLARKPERLVAVALANKLARICWAIMTTGEGFRTETYLKA

SEQ ID NO: 509751 - protein, 351 aa, unidentified
MHIIGCDFHTRYQEIAWLDTETGEIQERRLMHAGDEVRKFYSSLTGPVRVGIEATGYSQWFERMLHQMGHECWIGDAAEIRASVVRKQKTDRRDAAHVLELLITNRFPKIWVPTPAERDLRQLVLHRVKLVQMRTRVQNQLQAMAMGQGVCRKKKLWSVRGRAELEKLPLDRWAQRRRQELLQLLDQLDRSIGELHAEVEQQARQNPDAALLMTHPGVGPVTSMAFVLTIGPASRFARGKKVASYLGLNPSEHSSGGRQRLGSISKQGNSTLRWLLVEAGQTAARRDPELGRVYQRLKFRKGSAIAKVAVARKLAVRLYWMLRSQSDYAALVRMSGSSGSAVVPEVQESGR

SEQ ID NO: 509752 - protein, 338 aa, unidentified
MAVYSGIDLHSNNNVVLVSDEADRVLYRRRLPNELGKVLEALEPFKEELAGVVVESTYNWYWLVDGLQAAGYRVHLANTAAMKKYDGLKRSDDETDAAHLAHLLRLGILPAGYIYPKEERAVRDLGRRRMQLVRSRTMHVLAVENVQARETGSRMSGERVKRLDEEAVQAFGLGEDVTLGMQTNVAVIGALNEQIARVERRLLERLRPRSEYALLCTAPGIARVLAPVIVLETGAISRFEEVGNYASYARCVDSVRLSNGKKKGEGNRRNGNKYLAWAYIEAANMAKRWCPEAKRFWDRKKARTNGVVATKALAHKLARACYHMLKTQQPFDVKRCFG

SEQ ID NO: 509753 - protein, 419 aa, unidentified
MNEQGEIGLWIGMDWADQKHQYALRESDSSRVEEGEIAQKPEALREWLNRLRERAGGRWVAIAVEQSRGALIYALMDYDFVLIYPINPKSLANYRKVFYPSGGKDDPRDADLALDYLFKHRDRLRLWKPESPEIRCLRLLTEERRKWVDLRTELTNQLTSNLKTYYPQALEWAGLLKDDTACDFLERWPTLAELQKAGTGTIRRFFRAHGARRQNLEEQLGQVPGAQPLTRDSAVLTAGAMLTVSLVQQIRPLNRSIERFDRKIAELFKNHPDHFIFTGIPGCGPALGPRLLTLFGDDRDRFDSAEQVQIVTGIAPLIESSGKKTKQSPGVVHFRWACPKFVRQSVHEFAVHSLSRCPWARAYYKMQLSRGKTHHMAARALGFKWLRILFVCWRDGVAYDDGRYMESLKANNSPLLAFL

SEQ ID NO: 509754 - protein, 416 aa, unidentified
MNAVGIDVSSRKSTVAVLRPLGEVVCLPFDVTHDIAGLASLVEKLKALDGETRVVMEHTGRYYEAVEKALHEAGLFVCAVNPLLIKEYGANSLRRVKTDKADAVKIARYALDNWADLRDFTPMDAIRYDLKTLNRQFQLASKQRTASANNLIALLEQSFPGIRKCFDSPVRSDGTQKWVDFAHSFWHVDCVRKQPFPAFCERYRKWCKRHAYLFKLSNAEEVYALAKRAVVLTPKSKVVKVLVQEAANQLISISRSVEVYRAEMDRLAAMLPEYPVVMAMYGVGKSYGPQLMAEIGDVRRFERKQALVAFAGIDPMPNQSGDKNVRSNKSSKRGSPYLRKTLFNVIRTYLQCAPQDEPVFQFLNRKRAEGKPFYVYMLAAANKFLRRYYAKLRDYFASLDTLQPAAPIPTILKATL

SEQ ID NO: 509755 - protein, 338 aa, unidentified
MTIVRVGIDLAKQIFAIHAVDESGKAILVRPKVSRKELLGVIAAFPPCVIGMEACSGAHFWARQFEQFGHTVRLMAPKLVAPYRMSGKRGKNDAADAAAICEAVGRPNMRFVPMKSEHSQAVLCLHRVRTGLVEERTATINRLRGLLSEFGVVLALKAQTVRREAGAALEGLPGYAQRAIGDLLSHLHFLDDRVGEYDVLIREAARADARSKRLMEMPGIGPTTASALLASIGNGHDFKAGRQFAAWLGLTPGQYSSGGKARLGRITKAGDAYLRTLLILGARALLARAREKTDRISRWAIAIAERRGYWRAVVAIAAKNARMTWAMLAKGESFAPLA

SEQ ID NO: 509756 - protein, 337 aa, unidentified
MNNYIGIDVAKATLQVYIPKNELNLEIQNSLVGLKKLSSKLIKLYKKAFSDIVFVYESTGCYSTTLEHYCQIKEIKCFKVGAYQSASFSKVIKNRNKTDKIDAKMLSQMHILAKNDSIKVPIRDNQAHEIRSLIKYYYSLIKDEGRAKNYLEAATINLESDYVLKRVKKKITNLKKEQESVIKEAMQIITSNDDYYEAYQNITSIKGIGEKSAIILIYLFLRYPNASRQHLTALCGLDPIQRSSGTSVNRKQRISKQGLTLVRAILYMPTLTTIQHNEEMKLFYERLINRGKPKMLAQMAIMRKMILLSHSLYKNKETYDSKRYLNFTQIQKEKNIE

SEQ ID NO: 509757 - protein, 334 aa, unidentified
MENIALIGIDLGKNSFHIHCQDRRGKAVFRKKFTRPKLFEFLVTCPATTIVMEACGGSHFMARKLTELGHTPKLISPQFVRPFVKTNKNDFVDAEAICEAASRPSMRFVQPRTESQQAMRALHRVRESLVQDKVKTTNQMHAFLLEFGVSVPRGAAVISRLSTILEDNKLPLYLNQLLQKLQQHYHYLVEQIKDLEAQLKRKLNEDEVGQRLLTIPCVGTLTASTISTELGDGKQYASSRDFAAATGLVPRQYSTGGRTTLLGISKRGNKKIRTLLVQCARVFIQKLEHQSGKLADWVRELLCRKSNFVVTCALANKLARIARALTARQQTFHS

SEQ ID NO: 509758 - protein, 342 aa, unidentified
MNGDYDGRQYVGIDLHRRRSVIVRTTEQGEQLGWVRIDNDPVALGLELAKAGPDPEVVLEATYGWYWAVDALQTAGAHVHLAHPLGVKGFAYRRVKNDVRDAADLADLLRMGRLPEAYIATPHERELRELVRHRAKLVALRSGLKAQVHATLAKQGQLPAASDVFGRSGMAWLRSAPLELVYRQRIDSLLELIDAHDGEIECFRAMIANRFTGHRGYRVIQQISGVGPTFAAVLVAEIGDVNRFSRPEKLCCWAGLTPRHRESDATVHRGPITKQGSRLVRWAAIEACQRTRPGSKLAADRTRIITARGRNIGVVAAARRLLTLVFYGLRDGQIRALAAGAA

SEQ ID NO: 509759 - protein, 355 aa, unidentified
MKYYTSTTQFNCGIDLHARQMYVCLMDRDGKKLVHTNIKNNDFDFFLKLIAPYQHDLTVCAECMFGWYWLADACQAAGLHFVLAHALYLKAIHGGKNKNDRIDSEKIAHLLRSNLIPPAYVYPADKRPLRALLRQRLFFVWRRSELLSRIHSHQLAHNRIPKKQTRSNRDPWEQQLLAAENDPLRQLALKNDLAMIRHFDHQIGQLEEELQRQAKKTAARDYALLQTVPGIGENLGMTILCEIGDIARFPTVKNFLSYSRLVKGTVASAGKIKGLRGAKLGNPYLRWAFGEAAVIAKRDHAVIGPLAQRLEARMNGNKFKANTVVAIKLARAVYFMLKSKTVFDSDRLVAALSRN

SEQ ID NO: 509760 - protein, 343 aa, unidentified
MKLHVLGIDLGKTVFHLVGLDSTGRVVIRKKCSRTQLLAFTANLQVQLIGMESCSGAHFLGRALREQGHEVRLMPAQYVKPYVQTNKSDFLDAEAIAEAVQRPRMRFVPIKTEEQLDLQALHRVRERWVMRRTAVVNQIRSLLLERGLTLPKGRRYVDRQLPRILEDGGLRLSGCFRVLLAQLKIELEQLTARIEEMDRVIQKTAKENEACQRLTEIPGVGPVTATALIAAVGNGSTFQKGRNLAAWMGIVPGEYSTGGKQKLLGISKRGNKYLRTLFIQGARSVLQQRDKQAPGLSSWLAQLLTRAHQNVVIVALANKLVRMAWAVLSKNERYRAPVLAVTT

SEQ ID NO: 509761 - protein, 461 aa, unidentified
MSRPRAHQTRPRPAPPSTLPRLNRNAAGVDVGASAHYVAVPADRDPQPVREFSAFTADLYRLADWLQACGIESVAMESTGVYWIPLFQVLEERGFQVKLVDARQLKRVPGRKTDVVDCQWLQQLHTFGLLVGAFRPDNQVCILRSYMRQRAMLASYAGQHVQHMQKALVQLNLQLQLVLDDITGATGLRIIRAILAGERDPARLAALRAGRCKHSAATIAKALQGNWRQEHLFALAQAVELVEAYQAKIAACDGRIQAHLQTFSDRADGQPPPAGPAPRADRHDLSFEATAELYRLTGVDLTAVNGLQAHTVLKVLSETGLDMTKWPSSKHFGSWLGLAPNNRVSGGKVLSRRTASNANRAATALRVAAQSLHHSKSALGAFLRRKAAHLGMPKAITATAYKLARIIYSMLTKGDAFVELGQDYYERAYQARVLKTLTRRANDLGYCLVKHQLTLTHPASG

SEQ ID NO: 509762 - protein, 334 aa, unidentified
MNATTYGLDVAKRVFQIYWVDAETGEIVNRRFGRDDLIQYLSRRPPGRVALEACGSAHWWARKIKALGHDVVLLHAKFIRPFVQTNKTDAADARAIWTAVQQPGMRTVAVKTQQQQAMLSLHRIRSLLVKFRTMQVNQLRGLLYEFGASFRAGRVAGLSEIRARMAELEESLPGTMMCCLQDQLKRIDELQKEIDQLEKRIGAWQKQDAACSAISAVPGIGKLTATALVATMGDARSFKSGREFAAFLGLVPRQSGTGGRVRLGSISKRGDPYLRTLLIHGARSVLCHTKVPTAWQSAIQARRPANVAAVAVASKMARTAWQSSRTDRLTSETT

SEQ ID NO: 509763 - protein, 381 aa, unidentified
MESLIYVGMDVHKDTYSLCCYAPSEGSFFAEARIDADARLVKKYLEEVGKARPGSRFATCYEAGCLGFSLYKELSKLGIDCKIVAPTTLAKEPGSSAKKTDRKDARMLARNLAFGLCRFVHIPDEIDLEAREFVRMRMAHKKALKKIKQQILSFCLRAGRKYADGIRKQYWTAAHISWLRGLGLSPTMREILDEYLDTYDKYAAKLERLDGRLLERSNSERYKEATDKLNCLKGVTKQGALTIVSEIGDFSRFATPNELCSYLGLTPGQSSSGQSVNYLGITKQGNSIVRLQLVESAQSIVRGTPGRKSKRTLSKQSGMPARVVSYCDGAAERMMRKFNRLVLSGKERNKAVTAIARELACFIWGLMTDSLDGRRRGAPSK

SEQ ID NO: 509764 - protein, 404 aa, unidentified
MRVIGLDVHRSFAQVAILDQGVVKDHGRFTMEREAVLAFADRVLTKEDDIVLEATGNTAVIVRLLAPFVHRVVIANPLQVRAIAWAKVKTDKIDAATLARLHAAQFLPEVWMPPEDVELQRRVIAERTQLVSQMTRLKNRIHSILHANLMPRETGRIFSKSGRARLEALPLPVDQMRMALRHHDELGRLAAELAVIDRDLAQRALDDPNVRRLMTIGGINAIVAASVLAAIGDITRFASPEKLVSYLGLNPSVHQSGDHPAFHGHITHRGRGHARGMLVEAAWSLAPSPGPLSAFFHRISLKRGKQVAAVATARKLTVLVWHMLTKSQDYAWTRPALLQYKLRALELTAGRASRRGGNKPGPARDYSLKTVRDQERAWLAKAEHEYRHFVAAWRERPPAKTRPA

SEQ ID NO: 509765 - protein, 412 aa, unidentified
MRVVHPICAGMDVHKEDVKVCLIWRNESGERCEEVKAFSTMTRPLLSMREWLESYGCKVVVIESTGVYWKPIYNLLDGDFEVMLVNPSHLKYVEGFKTDPKDARWLAGLLEYGLLRGSFIPPREIRDLRDMTRYRRRLIEQHTDEVNRVQKILEDANIKLACVATDIFGVSGRAMLDELLKGEMSPEQMAELAKGRLRNKREQLAESLEGRFRSHHALLLSRMLEHIDFLDDAIDQCDTVIEDMLRPFVSKIENMDTVPGIDVRAAQDIIAEIGLDMSVFPSHKHLCSWAAICPGNRESGGKRKSGKTRKGNKWLRAMLVQCAHAAGHSRKTYLGAQFGRFAARKGKQRAAIAVGHSILEAIYFILRDDVPYQELGPEYFDKLNKDHIIRSYKKRLEALGLVVEVSEAPVAA

SEQ ID NO: 509766 - protein, 356 aa, unidentified
MKNKELDFTGQTISVGIDTHKKNMVITPRCQGMQLKTISMDPEPEQLVRYLHKNYQNARYESVYEAGFSGYWMDRKLREVGIKNIIVNPADVPTKQKEKRKKTDKIDSRKLARELSAGNLEGIYIPSEEHEAIRALSRLRKQITKDQTRQKCRIKSLLNFVGITLPENSELKHWSGRFIKYLSEIEFKHTAMKIILERLLESLINGRQILLGIVKNLREIVKEDTEIKKITEYLQSVPGIGFITATTLYTEIMEIKRFGKFDELSSYVGFSPSTDSSGEKDKVIGLSKQQNRYLRNMLIESFWLAVRKDPALLQAYGNLVRRMSKQKAIIRIAKKLLSRIMYVWRNEKYYVCAVVS

SEQ ID NO: 509767 - protein, 343 aa, unidentified
MSNDVTIGVDLAKNVFQLHAASMAGQPQFRKKLSRQSFGKFMAEQPPAVVVMEACGSAHYWAREMIRLGHVVKLIAPQYVKPFVKRQKNDAADAEAIVIAAQRPEMRFVEPKTAEQQSRAILFRARERLVHQRTELVNALRACLYEYGHAVPQRIHQIKRIAEILDAPNSDLPDLTREECRELLEQIAEKTVRINARTSKIKALAAEADTARRLQTIPGVGPLTALTVEAFAPPMENFRCGRDFAAWLGPVPRQFSSGGKERLGRISKAGQADIRRLLIIGAMSRLNWLGRKSIPEGSWLARIAARKPRMLVAIALANKMARTIWALMTKNEDYRDPAQAVAA

SEQ ID NO: 509768 - protein, 338 aa, unidentified
MNYVGIDHHRQYSHITWLDEKGEVVKSGRVANLRRELEGFLQGARDIKAVIEAGRSSYTMVDVLTDLGIETTVAHPKDVRAIAKAKIKTDERDSYKLAHLLRTGYIPEVHKRSRENRSSQRVLRQRAFYVGKQTSVKNRLRALLAQQGEEIRLEVERVENLFTDKGMKVLKGLALPEREAKLVGALVRTYDHLEARINETNALVKELYEAMPSAQLIQSVPGFGIFLAVLVAVEIEDIGRFEEVSQFHAYAGVIPSTHSSGDRSWHGKIIKEGNRWLRWAAVEAVWPALRADFDIRCFYDRLRSRKGANSAKVATARRLLTIIYRMLKENRSYIPYKR

SEQ ID NO: 509769 - protein, 343 aa, unidentified
MTAIVTIGIDLAKNVFAVHGVDATGKPALVRPTVPRAKLLELIASLPPCLIGMEACSGAHQWAREFQKFGHTVRLMAPKFVIPYRLAGKRGKNDAADAAAICEAVTRPNMRFVPIKSTEQQGQLLVHRARQGFVEQRTATLNRIRGLLSELGIVLPLKAAVVRREAMARLEDLPGWANTVIGDLLSEVSRLDERIGQYDQHIRTMARQSTPAQQLMQLAGIGETTATALVSTVGNGHDFACGRQFCAWLGLVPGQYSSGGKQRLGRITKAGDPYLRSLLVMGARAVLALAMNKTNPRQDPVSRWARSLAERRGYWRAVVALAAKNARMCWAVLQRGEGFKMPT

SEQ ID NO: 509770 - protein, 367 aa, unidentified
MKKISTAAAKQSKNFSQPKLTIGLDLGDRNSWYCVVDEAGQIQLEQRVRTTAKALQEVFGRMPRSRIALEIGTHSPWISRMLSDLGHEVIVANSRKVRLIGESRKKDDRLDAQTLARLARIDPELLYPVKHRSAQAQADLTLIRARAGLVRARTGLVNMARGLAKSYGERLRGCNVRNMNPEKADSLSPELQAAVEPLLNAIESLSERIVEYNERIENLAQQSYPQVALLKQIKGVGTLIALTFLLTLEDPHRFRKSRDVGCYLGLQPGRRNSGQSEPQLHISKEGDPYLRTLLVQGAQHILGPFGVDCDLRRWGLKLAERGGRSGKKRAIVATARKLAVLLHHLWVRGEVYEPLHNSNQKAMPAAA

SEQ ID NO: 509771 - protein, 328 aa, unidentified
MAKRTMICAGIDAAKLKLDAALECCSERLRVDNTPAGHKALLDWLRRHQVTRVGIEASGGYEQAVVAELRRNGFVVIVFQPGRVRAYAMFHLKRAKNDNIDADLIAICTAAVKKIHAPPDPRLAPFAEHLTMIDQIVDDIARHKNRLETCRDARIRQVWKEEIARLEKHRKIELKSLVAAIRRHQDLAVRLDLINSVDGIGLPTAVAILVRVPEIGRLTREQVAALVGLAPYDDDSGGRSGTRHIAGGRKRPRSALYAAALPASMRWNAQLIALYQRLIAAGKLHKVALVACARKLLIFVNTVVARGTPWQRHQNPRPSAIPHAATAR

SEQ ID NO: 509772 - protein, 314 aa, unidentified
MKDISTFVGIDVAKKSLDVATLPATTPRTFSHDANGRRELLDNLPQPETCLVIVEATGGYERLLVADLLDAGYLVAVVNPRQVRDFAKALGILAKTDRIDAAVIARFGQQVKPRPLAEVHEKQGELDQLVTRRRQLVVLRTAEKNRFTMAHSKPVKRSLQLVIDTLNKEIKRIEKNILALVESNDQWQGKADILSSVPGVGDVTAATLIAEFPELGQINRQQAAALAGLAPFNRDSGKFKGKRTISGGRRTVRTALYMAALSAKKHNPVIRKFAERLKAKGKLPKVILTACMRKLLVILNTMLKNNTLWNPRIV

SEQ ID NO: 509773 - protein, 429 aa, unidentified
MNYTQNEKIEQVTDSTMVVGIDIGSQIHYARAFDNRGRELTKRIFSFHNDLEGFNSFNLWAETLKTENKKTAVLVGCEPTGHYWFAFAKYVNDHQKRLVMVNPFSVKKIKELDDNSPKKTDLKDPKTIAKLVVDGRYSIPYMPEGIYAEIRDLVYSRDRIMKQHNISANRIQRWLAIHFPEYLGLYTRFDAISGLAVLEKAPLPKDVIALGVNGIRKIWHDKKMRGRGVTEDRAKTLVEAAHNSVGLDGGIGTKSELYMLLEEHRLWTSQLEAVNKVLEEMILKVPHVEKLLAIKGVGSITIAGFIAEVGDIRRFDSPKQIQKYAGLELVENSSGKHKGRTRISKRGRRKLRKILYQVMVPLLARNKEFRGIYDYYVTRVKNPLKRRQAMVAVSCKLIRVFYAVLTKGVEYDRFKMMSDIHRKSDIIAA

SEQ ID NO: 509774 - protein, 337 aa, unidentified
MDYFAGLDISMDETHVCVLDREGEVVRESKTVSTAQAIADELVKAPSCSRIVFETGRMAPILFHGLRELGFPVVCVESRQAYQALKSLSTHKTDRNDARGLAHLARTGFFKSVHVKSLPAHAVRSLISARKKLVGQRVTLENQIRGLAVVFGVRLPRALTAAFINEALKASEGIAGLSAAMRGLIAARTAVMTAVAAIDADMRRMTRASAACRRLMTIPGVGQLTALAFVAAIDDPSRIRRSREIGAYLGLVPRRYQSGEVDYVGGISKCGDRRVRTLLYEAANVMLTRYKGQLKLKDWAFAIARRSTMRKARVALARRLAIIMHAMLRDGTEFAPT

SEQ ID NO: 509775 - protein, 421 aa, unidentified
MRGVRSSKVKAVKKDTLMVTVDVGMTSNMGYCSTVDGRDIKPFKFGNTREGLDKLWSLVLANKKRFRCNEVIVGYESTGPYAEPFVHSLRSKPVTIVQVNPMHTKRVKEINNNSPLKTDEKDPRVIADILRLGHALSVVVPEGDAAYLRRLNNARERHIRERTALLNQLQQLVFIMFPEFKMVIKDIKIKTARWILRNYTTPDKIGGLDKDRLGEEMRKRSRGKFGIQDADLLISLARDTIGVKEGVAGIAMDIQHILVQLDAADGFIEEIESEMEVTLTRIPYSARILSMKGLGTVTVAGLIGEVGDFTKFRTQSEIMKLAGLNLYEISSGKRKGQRRISKRGRSLLRKILYYAAISTIRKNGIMHSYYMRLTGRGTKRTSALIVIAKKLLRIIHAIVRDDRDYVKDYGSPKRMVIQKAA

SEQ ID NO: 509776 - protein, 340 aa, unidentified
MPTQFFCGVDLAKHHFSLHAVDDHGKVILHKSVSRAKLLATLANMPTMCIGIEACSGAHYWAREFNKLGHDTRIMAAKYVGPYRTKGKNDLNDAVAICDAVQRPNSRFIPVKSPERQAILATHRVREHWVNERTALINRIRALLAEFGIIIPTGRAAIHREVPLILEAAENGLPDIARAVVADCFDHLQTLNQRIADTEQCFDMVTKASPNAQRILNVRGIGPQTATAIIATIGKGEQFDSGRDFAAWLGLVPKQYSTGGKPRLGRISKRGDKYLRTLLVHGARAVITNLGDKQDRLSVWGRNILERRGMNRAIVALAAKNARIVWALLHHQTDYQDYAA

SEQ ID NO: 509777 - protein, 400 aa, unidentified
MKGPIVSIDVSNGNSHFQCFIQRGTKMGKVHRIQHTVEGFRFLKSKVEELAMKTKEEVVVVYEATGVYTTPLQRFLEKSEIKQYQISPLQSAKQRKTEIHNKKTDKKDPESIAEVYYVKELREYEREADIYHQLRTANRVYEDCLEHLRKYKVTFQSHLSIVFPGYMKLFQDGYSPISLQLLEMYPHPDRLKNKQPETVAKKLNKHTDHSFEVCLKNAKRVIEFANKTYPGCDKEDPWVAVLVEDIHQLQAMIEQAEAKLDKIIKLAKTTPYYFIILSIDGIGPNLASRIIAEFGDISKFKTRGAMAAYVGNDPNRAESGDIDGYHLSISKKGNKRLRCILYLAVTCSIRSKKENPINAFYQKKRQQSTPLKSKAAKVACITKLIRTIHGMCKNGTEFTS

SEQ ID NO: 509778 - protein, 341 aa, unidentified
MEQYVGLDVSMRETSIAVRQNGKRVWRGKCPSDPRALADVIRQHAPDAVRVVLETGPLSTWLYHALKAEALPVVCIDARHAKAALDMAPNKTDANDADGLAQIAEVGFYREVRVKGYAPMLARTLVGARGQLLRISIQLSNQIRGVMKTFGLIVPKGAGRVFESHARALLGTNEAVARVVLPLLEAWRAVRARAAELDRQLIAAARTSPACRRLMTIPGVGAVTAASFVAAVEAPENFGTSRAVGAWLGLTPRRHQSGEADYDGHISRRGDGHLRALVYEAAAAVLTRTRTDSALRSWGLELREKVGFKRAAVAVARKLAVIMHAMLKTGAAFDPAPNTTA

SEQ ID NO: 509779 - protein, 380 aa, unidentified
MSDINKNYQPKEATLYLAFELGDLNWRLGFTVGLGQTPWEQTVKVSDVMGVEEEIQKAKKRFGLEPEARVVSCYEAGRDGFWLHRHLVSQRIENLIVDSASIEVNRRAKRAKTDKLDVKKLVTMLMRHDSGEPKVWSVVRVPSEEAEDSRHLHRQLGKFKGDRTRHSNRIKGVLAGQGIRIPVSADFEQRLEKVRLWNGAALPPGLRSRLKREYAGYQFVTEQIYELEAERRELIRNSTEASVQQVRQLLKLRGIGDNSAWLFVMEFFSWRQFRTRRQVGGLAGLTPTPYQSSAQSREQGIDKSGHSPVRSMAIEISWGWIRHQPESELTLWFNNRFGQGRKRLRKIGIVAVARKLLIVLWRYLEFDEFPAGARLKPVLE

SEQ ID NO: 509780 - protein, 322 aa, unidentified
MTISAQSESGVNVGIDVGKAQLDVVWHESGEHQAVENSAKAIKVLVRRLAKEKPARVVIEATGRYERAFVLAAVEAGLPVIVAKPLTIRRYAGAVGRLAKTDRIDAGLIAEYAAVIKPEVREITTGKTLQIRDLLSRRRQLLMMRTMEMNRQKIMGSELSTSCKRVIALLEKEVAHIEQRLNAAIEEVSEWKERKAILTSVPGVGDTLAYTLLGDLPELGSMNQREAAALVGVAPFNRDSGKLRGKRRIQGGRGSIRPVLFMAIMSAVQHNRAIKRFYERLVAAGKHKKVALVACMRKMICILNAMLKDGTSWEEKYAQIPA

SEQ ID NO: 509781 - protein, 357 aa, unidentified
MSRDIKYIGMDVHKEAIVIAVLNGSGKLVMETILETKASSILQFIHGLRGELHVTWEEGTWAAWLYDLLQPQVQQVLVCNPRRNALLKEGSKSDKVDARKLADLLRTGMLRPVYHGENGLRTLRELGRSYQTISKDLTRVMNRLKALYRGWGIPCAGTQVYAARAREEWINKLPQAGVRRRAELLYQQLDALQALRREVRPEFLAESRKHKAAKLLRQIPYIGPVRAARLIALMQTPHRFRSKRQLWTYSGLGIETHDSAQYCFVRGQVQRSKKPQQVRGLNRNHNHEMKEIFKSAATRASGGRGPFHDFYTGQGDEAGDGASDTSAQDRGHYVNTLEEGGTFRRRTTEDASSLSIE

SEQ ID NO: 509782 - protein, 454 aa, unidentified
MQEVKFLSNLPIFNESAIGCDVHSDNVVCCSLKKKTDGSWVQTKEVFDTNFRTLPLFTAWCQQFEPNVILMESTGTYWMSPYDALESAKLPITIVNPAQVKGLAGHKTDVEDAHWLAQIGVNGSYKKSFIPEKRYRDLRMVSRNITKMKNQLSSCKNRETKIFVTAGYRLSVFSSEFGKLAEMAKDAILAGQSPEEILAIIYAEKASKRLKATKAEVLEALHGELTPSLRLAIESNRQLRKSIEEQIKICTDFLLSEVQASDERAFNLLRTVPGIDDLAAAIVIVELGGMSKFIEAFENSQKFAGWVGFCPGQNESNKKRTGKKGRHGDKYLRKILCEVANAAVKTKGTTFRSKFESLKVRMTYKRAVFAIAHKIAKVIYSILAHNHPYIDPKVDYRALSCKKNKSRWLRQLLACDDIEFTAIDKQTGQIYDSQRYKAYVRDTRVAALRNAVNG

SEQ ID NO: 509783 - protein, 378 aa, unidentified
MTKNNSGLTQTKVATMAEAPSQVASKQPSYQAVVGFDVSDRRTHYCVMDLDGGLALEGMVATKEAPLRMQFAGKPWMRVAMEAGTHSGWISRLLAELGHEVIVANPRQLRLITESDSKNDRADARLLARLAHVGPELLSPVQPRSERTQNDLSLVRAREVAVQARTKIINAVRGITKSAGRRLPASASLTFARKAKDLCPEALKPALLPLLRIIEELTREIQLYDRMVAKKAQTEYPETQAIQTIHGVGSLTALTFVLVLNNDRRRFRRSRDVGCYIGLRPKQRESGTGSPQLGITKSGDPLLRRLATQCAQYILGPFGRDSALRRWGMSLACRGGKNAKKRAIVAVARKLVILMHRLWVTQQVYEPMRGLAPQPAAA

SEQ ID NO: 509784 - protein, 344 aa, unidentified
MTVYCGVDFHARKQTISYLTTEDGEIHQLELEHEKQNEIRAFYAQFSGRVVVGFESSGYAAWFEEMLEELGCEIWIGHAAEIRRFARRRQKNDRRDADLILDLMVRGDFPRIHRYSPESRQVLQQLRYRQRLVKMRTMVLNSLMFMASSRGVSLRSKLLTKRGQARLNQLALPPHLQQQREEMCQLLAELTSKIESVEDWLEPQAEQDPRVKRLRTHHGIGPLTGLCLAHTLECVERFANPRKVTGYVGFDPVEDSSGERQRIGAISKQGSRLLRFFLVEAGQVAVRRDEDLRRFYYRVQLRRGHATAKVAVGRRLLVRAFIMLRDEIDYEEFQRRGVAARSSR

SEQ ID NO: 509785 - protein, 415 aa, unidentified
MIVLEPLLLRELSAGQLVVAIDPGKVTNRVWLTTGERGLIGKPVSLPVLRDGVDELARLIAASGVRGSPVIGIEATGALHRAWAAEVERRWPGSLRLFAPSETQAARAQLGSRRYTTDDRDCAALVWLLRQGAGRPTPPSAIDALLGAVRHRRQLVDARRVLQQRLHDQLNGLCRGLSAPVGHGRVLELEDPSGRAVLACAVAFAGRAPTVRSLRARSPGRLTETNAGFWVGRWRRLLPPPPDAELRAQRLGRDVDRWLGLRDDIATLETQLTDLLARSDGQILTSLPGVAVIRAAAFTAHTLPIERWPTAEHLHSATGLAPASYQSASLTRRGRISRQGLAEHRDALMGIAWGLSQHSPAFAQRDREYRARGFRPIQARVALARHACRLCWRLLSSQQPYDERRYDRARHRRGR

SEQ ID NO: 509786 - protein, 482 aa, unidentified
MPTKQNPKNNSRKPERAKRPSRKKRQKGMCLEDRPLLEPNAAGVDIGAREIFVAIPPNRDGHAVRVCATFTEDLQQLADWLVACGITTVAMESTGVYWIPLYDILEAQGIKVCLVNARHMKNVPGRRTDWHECQWLQYLHSVGLLRAAFRPEATVTAVRTIMRHRHELVQMSSQHILHMHKALTQMNLQIHHVIDDITGLTGLSIVDAILAGQRDPVELAKLRNWRIKADEETIRRSLVGNWREEHLFTLRQSRELYRSYQEQISKCDREIEKLIGGFEPRVDPEIKPLPPDQKRYRTDKKRAKKAGCKKLGFDLRTEAYKLFGVDVTQIPGLETTAFSLFGEVGRDMSKWPTADHFASWLGLCPDNDISGGRVLWKGTRKLQNQAGRMFRQAAYSLHHNLTPMGDYLRRMKIKIGPAGAITATAHKIAVIFYTIVKNQLEYDDTIWATRDSKRQQRIQAKLERQAHQLGYRLVPLEKQPAA

SEQ ID NO: 509787 - protein, 346 aa, unidentified
MIIIGCDFHPSWEQVAWLDTETGETAERRLIHAAGEAEPFYRQWQAPALIGMESTGNCQWLIDLLNELGHEVWIGDAAQIRATMVRQQKTDRRDAAHLLELLVEGRFPRIWVPSSGERDQRQLLIHRYKLVTLRARVKNELQHLALNQGVQKKRKLWSEAGQKLLRELPLKPWASRRREDLLKVLSMLDGQIKPLDEAAKEAAEKSEMARLLMTQPGVGPITSLAFVLTIGDVKRFARGKQVASYLGLIPREYSSGGRQRLGSISKQGNRFLRMLLVEAAQGAVRYDPGFRKEYLHRCHHKAKGVAKVAAARKLAIRLYWMLRTQTPYPEVVRIESSPRVPLVGRS

SEQ ID NO: 509788 - protein, 329 aa, unidentified
MNVNSQGREAVTAPRANAGIDVSKDWLDVAFGSRSERFANDAAGMESLAVLLRQEGIDLVVLEASGGYEAAAAAALQAAGMAVAVVNPRQARDFAKSVGVLAKTDKVDARVLRAFADVIARHEKRSHFLHAVPDEQRAHLQALVIRRRQLLEMRKAEANRMGMAHKAARKSLNKVILFLDKQLAEIDRDLDQHMREHFRDLSKLLSSAKGIGPVTTTTLAAALPELGRLDRRAIASLVGVAPLACDSGKRRGGRHVWGGRADVRAVLYMAVLGATRHNPAIRVFYERLVAKGKPKKVALVACMRKLLTILNAMVRDGQTWNPALHLKNV

SEQ ID NO: 509789 - protein, 345 aa, unidentified
MEISTIGLDLAKDVFQVHGISATGEVVIRKALRRSQMLPFFAKLPPCLVGAEACGTSHHWARELTKLGHEVRLMPASYVKPYVKRGKNDAADAEAICEAVTRQTMRFVPIKSREQQAVLSIHRARSLLIKQRTQLVNMMRSVLAELGIAIPVGVEKALQMARKVVDGEAELDLPDEAENVIVVLAGQVLQLHAQLRKLDLRLAALQRSDDKARRLATIPGIGPIGATALAASVGDPAQFKSGRQFAAWLGLTPRQRSSGGKERLGRITKMGDTYLRQLLVVGATSLIRSAKSKPETVDPRFVALLARKPARLASVAIANKMARVAWAVMARGGVFERGHAPMLAA

SEQ ID NO: 509790 - protein, 343 aa, unidentified
MPDYVGLDVFLDQTSLCVLDAAGQIVRETKLDTDPDAIAEYLGQAALVIERVGLEAGPLSQWLHAGLVAHGLPAVCIETRHTKAALGAMPVKTDRGDARGIAQLMRTGWFKAVHVKTQQAQEWRLLLTQRRLLVNKLIDVEAEIRGTLRGFGLKMGRVGRAGFAGRVRELLADRPSLLRVVEPVLLVQAMLLSQREALHRMVLQAVREEEVCRRMMTVPGVGPITALAFRATVDKAERFAHSRDVGAHFGLTPRRYQSNETDRSGTITKTGDALMRHALYEAATSMLVHATKPSALRNWALVVAKRRGLQKARVALARRLAVVLHRMWRDGNVFQPQGRLTTI

SEQ ID NO: 509791 - protein, 340 aa, unidentified
MKQYVGLDVSQKETSVCVVDEVGQILFEGKAKSAPGALAALLRKRAPQAERIGFETGAMASWLWHELRRVDLPVVCIDARHAHAALSVRMNKSDQNDARGLAELVRVDWYREVKVKSEESQKIRAILVARSRLVSMRRDIENQVRSLIKEYGLLFPRAIGQQFRNLVSELLGDNHPLLSVISPLLLIHEHICQQQQNKFDDEVRQLAKADETTRRLMTVPGVGVVTALTFRHTIDDPLSALTVGAYLGLTPRRNQSGETDINGKISRWGDRLLRTYLFEAATVLLYRTKKWSSLKAWGMKLAKRIGMRKAKVAVARKIAVILHCIWVDGTSFDWGQPQPV

SEQ ID NO: 509792 - protein, 348 aa, unidentified
MSMVCGLDLHRRQITFDAFDVESGDSWRGRLWQPDRQRFRRWLRDDVAPRAAGRPVALAVEGCTGWRYVVEEITAAGFEAHLAEPADTQAARGRKHRAKTDRSDSQLLRELLQTGDLPESWIPPAGVLEWRERVRLYKSLVDHRTVWVQRIHAELYQHGVAVPESAIRSAATRTWLATDQVELSDAARQRIAAGYRMIDATDAEAQPLKRDLQRFGTKQPACRALVDAQYGIGGLIAVAVWSELGDCRRFSRSMQVVRHTGLDVTVDASDRRRANGYLSRQGPETLRWALYEAAKNSSHQRSPDHDYYRTVKARHDGKIAAISMARKLARRCYHVLRTMEAESVYAMP

SEQ ID NO: 509793 - protein, 358 aa, unidentified
MIAMKYYTSTTQFNCGIDLHARQMYVCLMDRDGKKLVHTNIKNNDFDFFLKLIAPYKHDLTVCAECMFGWYWLADACQAAGLHFVLAHALYLKAIHGGKNKNDRIDSEKIAHLLRSNLIPPAYVYPAAKRPLRALLRQRLFFVWRRSELLARIHSHQLAHNRVPQKQTRSNRDPWEAQLLAAEPEPLRQLALKNDLAMIKHFDHQIAQLEEELQRQAKRFAAREYALLQTVPGIGENLGMTILCEIGDITRFPTVKNFLSYSRLVKGTVASAGKIKGLRGAKLGNPYLRWAFGEAAVIAKRDHAVMGPLAQRLEARMNGNKFKANTVVAIKLARAVYFMLRSHTVFDPDRLVAALSRN

SEQ ID NO: 509794 - protein, 341 aa, unidentified
MAVIIGIDPHKLSHAACAIDNNEHELAQLHVRAGQRQLELLLGWAQPFSERRWAIESAAGLGYLLAQQLVGAGECVMDVPATLSSRVRLLGTGRSNKNDPNDARAVAIAALRAPSLAVVRREGHLTVLRLLAKAHLDAGRARNRACCRLHALARELVAGGIRKEVVVSQAESLLAGVEPVGVAQRQRLELAHELVDEIRALDAKLRRSKARITTAVVASATTVTDLYGVGPIVAATVIGYSGDVRRFPTAGHYAAYNGTAPIELSSAGRTVHRLSRRGNRVLNHAIHMAAVTQIRNLPSEGRAYYDTKVAAGKTKREAMRALKRRLSDRVYRQLLADTRPR

SEQ ID NO: 509795 - protein, 605 aa, unidentified
MLPHSGSPSQLSTPPADTGGSPNPTRIGVGIDTARYGHYAVFLRADLQPAAADLAFAESGAGYAELRTRLEQIAQRHAAVAWHVRIDAAGQYADNLQHFLHFLAAAAPSDRSTFTLSLGDPQRNKNYRAAIYGSKKSDPTEAAAAARFALTERPAGVPPMSTELRTLRQVAGRLQATVRQRTRLINQFHKLLALVFPELALLTKDVAAGWVLELVHRFPTARRLAAATPDQLQDIPYLAHDRIDTLLTHARTSVASLHDAALQELIRDQVRQLRDVHARQKRLENTLIAVYRRLPQPNHLDTIPGIGPVTAAVLTAFILDIDRFETPGKLVAYFGILPIEAASGIDRDGKPRGPKRYVMSKRGNDLVRRYLWMAGLCAVGHNPAVRPLYARVVARHPQHKAIAIGHAMRKLLHLAFAVWKSGKPFDPEHYPWGAASAASNEAAAEDARLRVPKSNPNDMPLSPKQPAAGLTLSAKPAQTEVTAAGNANVSPTPPRREPLVDFDHLKKQLPMTRLLDHLGLTSRLKGAGLQKRCTCPIHRGDARGRTFSVHLGQNVFQCFDQACRHKGDVIDLWAALHGLSLRQAAVDLIATFQLEAAPPTEKRNG

SEQ ID NO: 509796 - protein, 402 aa, unidentified
MNKSIKYVGLDVHKDSITIAIADEGRDGNVRVYGKIANNNDQIDKVMRKLMSQSSTLRCVYEAGPCGYPLYRHLKSKGIDCIVAAPALIPRKGGDRVKNDRRDATKLAALHRAGELTAVYVPDQHDEALRDLVRARADVQKALRAVKQQINAFLLRHAITYQGKTKWCKAHLNWLENIKMSHPAQQVALTEYLDTMATTEARVRRISQQIEEFSQNWRLGPVVDALQCLRGISLISAVTVVAELGDLTRFDHPAQLMGYLGLLPSEHSSGPKIKKGGITKAGNTHARKTLIESAQAYRLPARRSKTIRKRQNDKPDDIVAISWRAQLRLCHRYRSMIARGKKHNVVITAIARELVGFIWAIACAVPYVKENKEVRGNWYRRQDQDCSVPTTALSRPSPAGAR

SEQ ID NO: 509797 - protein, 405 aa, unidentified
MREFPSFTVDLNALADWLTACGVDTVAMESTGVYWIPLFELLESSGFKVLLVNARHVKNVSGRKSDVLDCQWLQQLMTYGLLRGAFRPADAVCVLRALWRQRGMLLRGQGRQVQHMQKALTQMNIQLTNVISDVVGETGQKILRAIVAGERDGFVLAAMKNVRIRASVDEIAKSLSGNWRAEHLFALKQALAMFDFIGTQLAECDREIEQQLQSLQAHEGEPAKGKKRGRARNAPKFDLRTQLFQMCGVDLTRIDGIDVTTALAVISETGADMSRFPTVGHFASWLGLCPGTKITGGKVMSGKTRRVANRAAQALRLAAAALRSSQSALGAYFRRMCSRMDKPKAVTAAAHKLARLIYSMLTKGEEYTDQGQDYYEERYRQRVLHQLAQRAEKLGMKLVATEQPA

SEQ ID NO: 509798 - protein, 368 aa, unidentified
MRDASTFVGLDVHKNTISVALLRPGQPVLEWSLANETAAVCRLIRRLEREAEGALRCCYEAGPTGFVLQRRLTRAGIDCRVIAPSLIPVKPGARIKTDRRDARKLAELLRAGLLTEVMPPTEEEEAVRDLTRSRDDAQRDLTRARNRLSKFLLRRGCVYVVGRKPTWSAKYRAWLRALTFPRRADQIVFEDYLLAVEQVEGRLEGLNEEIESVAQEQPWRERVQALRCFHGIDTVTAVALVAEIHDPQRFPHPRQLMSYLGLVPREHTSGMRERRGGITGTGNRHVRRLLVEAAWHYRHKPVVGRDLRLRRRGQSPKAIALADRALRRLTLRQRRMLYQGKHPNLVNIAVARELAGFVWNVLHPASAN

SEQ ID NO: 509799 - protein, 428 aa, unidentified
MNYNQNEKIAQITSQTLIIGVDIAKYKHVARAQDFRGLEFSAPLYFENTDSSFNCFIEWIKKLMDQNNMEKVIVGMEPTGHYWLNLAHFLKGKNIKFVVVNPMHVKKSKELDDNSPTKNDVKDARVIAQLVKDGRYAEPNIPQGVYAELRVARKIRDLLSVDLQAVQGQVHNWIDRYFPEFLTVFKDWEGKSAIQLLKLNLLPHELVVLSEQEILVHLRKAVKRAVGLSKIKELKKVAVASIGIREGSGMAKLELRTLIDKYELINEKFEELESNIDKLLEQIPGVEQMLAIKGIGKDTVAGFFSEVGDLSYYSHPRQIIKLAGLSLKENTSGKHKGQTKITKRGRKTLRALLFRVAMPLVAKNTAFKALHEYFTKRPNNPLKKMQSLIAICNKLIRILFTIGKKQCEFSEERMLTDIPHMDVLQEAA

SEQ ID NO: 509800 - protein, 338 aa, unidentified
MLYTGIDLHKRTTVIATIDARGKVVAQASLPTSRIAVARYFEQLPGPSIATVEATSCWYWLHDLLGREGVPLTLAHAKFVKAIAYAKVKTDAVDALTLAQLHRAELIPRAHMVSPELRGMRDLLRTRLHLVEKRTSAKNSVHRLLEKYNVPEPDQLPGEATLSASLYEEQIALLEQQIRRIELELQPQLIPNPDVQRLIWIPGIGKLVAFTLYLEIDGIERFPSVRQFFSYCRVVPGADNSAGRQRHGHRKDGNRYLKLALGHAAIRAIQYFPEIKRFYQRKARQKNPAIARTLVQKELARAVYVVLKEQVDFNHTFKGQPLSRRKSAKWPRQASPDA

SEQ ID NO: 509801 - protein, 314 aa, unidentified
MEAAVVVGIDVSKRTLEVALSSGGGFSVANNEDGISELLARLRPSGAALVVLEASGGYERPAYLALWEAGVPTALINPRDAYHFAQANRQLAKTDQLDARGLCEFGLRMQPEPLPPPEAADEELKALAVRRRQVVKMLAAERTRVQQAPRSVRPSVKRMIRVLERELGAVDHQIEQRLRDNPGLAQRCAQLEQVPGLGAVTCAILVSRLPELGRLGPKQVAALVGVAPYDHQSGEWRGRSPIFGGRAEVRSALYMATLSAIRCNPVLRSFYRRLRAGGKPAKVAIIAAMRKLLVILNAMLKTNSPWRPPCAVVA

SEQ ID NO: 509802 - protein, 457 aa, unidentified
MESYYMGIDVSKGYADFVILDAKKNVVEPNFQLDDTFSSHCRLFEILKRFFVSHSESVLFAAVESTGGYENNWLHSLGGFQGTLDIRSARLNPLGVRANSKASLRRIITDKISARDVAEYLIAHPEKVSYQQEDSLAGLRRQWGFVRLLVKQKTQILNQFESLLYTANPELIAYCQSGVPAWLLKLLKQYPTATKLAKARATSVARIPYLTAGRAKELIDQAKKSVASATDETTGSLITAMTEQIIRMEETIRTQTQQMAKQCAIPEVALLKTIPGISDASAIGLMLEIQSVKRFSSVKKLAAYFGLHPAFKTSGDGTSGVRMSKQGRKEPRKILFMVAMVSLTANPHIRKIYEEHTEKGMKKMAVIGLCMHKILRIIYGMLKNNQAYDSLVDQKNRENRTARQATHNAKNENRRYEMFDQQAPISRRQGNKRKEWKQSQGDNITQCGIGVPIPSVA

SEQ ID NO: 509803 - protein, 407 aa, unidentified
MSKEVLYLGLDVHAENIAVAIAEAGRDGEVRSHGIISSDLQNVEKVLRRLGHPHKELRVCYEAGPCGFVLARRLKQWGIACDVVAPSLTPKGSGDKIKTDRRDARMLARLHRAGELTAVHVPDERDEAMRDLCRARTDAVQDLRRGRHQLKAFLLRNGYRYSEKTSWGVAHMRYLRELVLPHPAMKVVLEEYLQAIDAAAERIERLEVHMKALLDDWHMKPVVLALMGLRGYQTVAAMITVSEIGDIHRFAHPRQLMAYMGLVPSESSSGGSRTQGTINKCGNGHLRWIFNECAQHYRLPPKVSQELTTRQEAIPKAHRRAVQELCWRCQNRLHERGRKLAARGKTRQKVQIAMARELAAFVWELMRLTTPLADGIHAIITPRREAANTSREAKNKKQGRNYTLKAK

SEQ ID NO: 509804 - protein, 369 aa, unidentified
MRENMSVAALSELKKRTIVGRMTIGIDLGDKKSHFCVLNDQAQVIARGFLPTTITAFRREFEGLPPSLVAIEAGSHSLWANQVLKVCGHDVLVGTPRKIRLITESDRKSDRVDAESLARLARADRLLLAPIQHRTQEKQVQLAVIRARHVIVRSRTALINCARGLVKPMGLRFRACSADAFAKRAAATPLPEVLRIALAPLLKQIEAVNESIREYDRQIEQIAATEYPETSLLKQIKGVGTLISLTYVLTLEDPHRFAKSRDVGAFLGFLPRERQSGERAPRLGISRAGNEYLRTLLVQGAHYILGPLGPDTDLRRWGLQLASRGGGGAKKRAVTAVARKLAVLLHHFWKTGEVYEPLRKNPVSDVAAA

SEQ ID NO: 509805 - protein, 344 aa, unidentified
MKHCKRLSIDLAKDVFQICGLDSHNKILFNRKTTRAKLLIDVLNCKPDKIFMESCYSSNYWGRLFESHGFTVKLIPAQHVKPFVKGNKNDKNDALAIIEACMRPNIHFVPIKTIEQQDIQCLHRVRKRLISYRTGLSNQIRGLLSDYGIIFSKGHHIILQSLPLLIEDMANNLSFYMRELLNDLFEELKNRNAQIKKTEERIKTISKKCAGFANLMDMPGIGLINSSALVSAIGDAKQFSSARGFAAFLGLVPKHQQSGTTLKSMGISKNGDRYLRTLLIHGARSVVCRYKNMDDPLKQFAMKIKKNRGKHKAYVAVAHKMSRIIWAMLTKNQAYNPDYILTKK

SEQ ID NO: 509806 - protein, 369 aa, unidentified
METKQRSPDSFLYVGVDVHKDQHTAVAANCFGQALFEREIDNSKEEFKELVKDVRGLSEEKELNAVFGLEDTSAYGQRLAEYLFKESFPVKVVSPVLVNRERKSLTHPEKSDSQDALGVARALIQGIGTLPNFSISENNKAAQGLKELVIDREFLIKEQTRIKNQMHRLLHRAYNTEYRERFKNVFAVRALEYWHRHPVPKEFKDDILLKDQIKRKVKRLQDIKKEVMEIEKGMRILMDRMGQKLETLNGCGLVLTATVLAEIKDIERFKSGDSLAKYGGFCPREKSSGKTIRHIKTKAGNRRLNRAVHMIALSQLGRKGNEHSKEYFKRKVGEGKNKSQAICCLKRRLINIIYAILKHQTAYEYAVRS

SEQ ID NO: 509807 - protein, 360 aa, unidentified
MRIIGCDLHARQQTLAMLDTQTGEVVNRTLTHEGDEVRKFYSALPRPVLVGIEAIGPMQWFLDLLAQLGIECQVGDAAKIRAAEPRKQKHDRRDAALILKLLVEKRFPAIWMPSKELLDLRALLLHRHQWVRLRTQVQNALQAIALANGLRRGPGLWSYDGQAKIAFLPLPPHASLRRSALQAQYRHMDEEIEKLTVQVAEQAEQRSGAQLLMTHPGVGPVTALATDVFLGDPQRFADGKALASYTGLIPQERSSGRRRRLGRISKQGNPLLRFLWNEAGAHAARRDPDLRRFYRRKLVQKGMGKARVAVARKLGIRLWIMLRDQIDYQEFCRRGQKQSGAVCAGMPETRFGANRHRPVE

SEQ ID NO: 509808 - protein, 347 aa, unidentified
MIYLGIDHHKQWDQVAAINVVGEVVLECRVPSTREAWEQLKSALPAGEPVCSVLEAGWNWGKLYDVLEELGLNPKLANALKVRLIAESRIKTDKRDALALAQLLRMGWIPEVHVPGRETRDSKNLLRQRAWLIRQRTGIKNRIHAILDRNHLELPEVSDVFGARGKTWLKAVELREPDDRLLEAHLGLLDTIQNQVRETETWIDGALKEHPDLKILMSLPGVGKLLGALIALEIDGIERFSQPEKLSAYAGLVSSLHQSGETVNHGRLISGCNRHLRYAFIEAAWTAVRVSPYFSAFHRRVKSRKGSQKAIGAAARKLCVIAYHCMTQRRNYVEKVYRFRSAALVVS

SEQ ID NO: 509809 - protein, 392 aa, unidentified
MICVGIDVAKDKHDCIILNSEGKILAGAFTFPNNAEGFDTLLHKIHSCANSNDKIKVGLEATGHYSYNILGFLLNQGLPTYVINPLHTNLFRKSMSLRKTKTDRVDAKTIATMLMSNVDLKSYTNTAYHNEELKSLTRYRFVKVRERAQLKQSVSRLVTILFPELEKLVPTLHMSSVYALLIEFPGAKQIAGAHLTHLNHLLNDASKGRYGRDMATKIRDAAQHSIGSVMPAKSLELLHTIRLIRELDSEIEDIEAAIQTIMNELQSPITTIPGMGVRMGAMILAEIGDFSRFDSPDNILAYAGMSPSIYQSGQLSLTGAYSHMEKRGSRYLRYALYNATKYVCHWDPTFSAYLAKKRAEGKHYNVALSHAAKKLVRLIYAMEKSRQPYKSM

SEQ ID NO: 509810 - protein, 346 aa, unidentified
MEIYRIGVDLAKNVFQLHGADVKGKTVWKRQLSRSKWIRILCQMAKPGTEIGMEACSGAHHWARLLTQRGFEVKIIPPQYVKPFVKSNKNDANDAQAICEAMGRPDMYPVRVKTVEQQDLQAIHRVREEIKGHRTAKANQIRGLVSEYGLVAPLQLRALRGAIPDWLEDAENGLTPLFRQLLEGLWNDLCVLDTRMAELDQQIGVIAQQDPVAKRLQQLRGVGPLIATALIATVGDGSQCRKGRDMDAAIGLTPRQHSSGGKDRLLGISKRGDAYLRCLLVHGGRSAIRTAKGKDDRLSRWITNLQSRRHVNVVAVAMANKIARMAWAMMTKGTDYDPEFNPVIAN

SEQ ID NO: 509811 - protein, 412 aa, unidentified
MDTVVAYIGLDWADERHSVHLQTAEGTVEHFELEQKPAVLHEWVAQLQRRFGGGKIAVALEQRKGAVIHALLMYDCFVLYPMNPKALARYREAFRTSGAKDDPLDSALLLDLVVRHRDKLRAWVPDTVESRKLQALCEQRRKLVNQRVALTNRLTSLLKQYFPQALEWVGDIASVQACDFLTQWPTLAAVQRARPNTIRQFYRAHNCRKADVIEARLAAIAGARPLTTDAAVVEPFSLSVQTYATQLRALIAAIQTFDQRIAEVFAAHADHDVFTSFPGAGDVCAPRLAAAFGTDRSRWDSAAELQAHSGIAPVTERSGKSLWVHHRLACPKFVKQTFHEFADQSIRFSRWARAYYDQQRARGNDHHAALRALAYKWIRILFRCWKERRPYDEDIYLDALRRHGSPLTTHFA

SEQ ID NO: 509812 - protein, 362 aa, unidentified
MKKGIREMESEWKQRPERTVGIDLGDRFSRYCVLNRDGEVLEEGQVRTGAEGFRRHWEGELRQRIVMETGTHSPWISRLLQSFGHQVIVANARKLRAISQNESKNDRQDAEMLARLGYCDPKLLAPIRHRSAERQRDLNLLRARDTLVRARTMLINATRGLVKSAGGRLPAAASDYFVARVAAAVPAELEAATQPLLHQIAALSAAIRRLDQAIEKLGERYPEIIRLRTVPGVGPVIAAAYVLTLDGVDAVERSRSVGAFLGLRPRQSQSGNSDPEHNISKTGNQYLRRLLVQAAHYTLGRFGPDSALRRWGLKLAAGGKRAKQRAVVAVARKLAVLLHHLWRTGQDYRNFPEAAAVAGSAV

SEQ ID NO: 509813 - protein, 364 aa, unidentified
MSVYVGIDVHRKRSQVAVVTEDGTVQLNKNTVNGTAPILRLIGNLPSGTPVAFEAAFGWGWLVRLLEDYGFDAHLVHPLRCKAIASARLKNDKVDAATLAQLLRADLLPEAWIAPAEVRQLRALLRHRAGLVRLRTMLQNRIHAVVADFGYDRSGSYLTGPGRGWLAELELPAISRELVTDYLAVIDGLAPLTDRIDGELRQHAKADPRVKILTTLPGVGQFTALVMLAEIGDITRFPSARKLASWAGLTPTVRGSDLSVRHGHISKQGSAWLRWVMNQAAQTAKRSPEFAETYTAIAKRRGKKIATIAISRKLLTRAWHLLAAAGPDTPDATAAHPQTGRVTKPRASSLSRHEPASGRARSSD

SEQ ID NO: 509814 - protein, 351 aa, unidentified
MRFYTQRHQYTLGIDLHARTMYLCLLDSAGQIVLHRNVPTSPEALLEAVEPYRDDLVVAAECMFAWYWLADTCVDHGIAFVLGHALYMKAIYGGKAKNDRIDAEKIARLTFGMTLPIAYVYPPRMRATRDLMRRRTFLVRQRALLLTHIQTTCQQYNLPSFNRRIAYRANRDGLDEHFASVDVSVGDMVRMDMQLINELDTLIRHAELAIVNRAKVHDAAMFYRLRSIPGVGKVLGLIMMYEIHQISRFPRVQDFVSYCRLVRPAKESAGKRSGGSSGKKIGNAHLKWALSEATTLLMSKSPEAKKFVERKSKKYGKAKAISVLAAKLGRAVYHMLRDEKPFDEGTFFAGL

SEQ ID NO: 509815 - protein, 354 aa, unidentified
MSQNLHSAVAVIGIDIGKNSFHVVGLDARGAIVLRQKWSRGQVEARLANMPPCLIGMEACVGAHHLSRKLKAFGHDARLMPAKYVRPYSKGQKNDFRDAEAIAEAVQRPTMKFVATKTADQLDLQALHRVRERLVSQRTGIINQIRAFLLERGVAVRQGLRFLRAELPGILATPPDVLSPRMVRIIEGLAEDWHRLNERVDHLSGEIAALARQDSGCDRLMTVPGIGPIISSAMVAAIGAGDGFSNGRDFAAWLGLVPKQISTGDRTILGKISKRGNRYLRVLFVQAAWVVLIKPKTWQRHGLKPWIEAAKKRLHHNVLAIALANKLARIAWSVLARGRSFEARKIDEMAIQPA

SEQ ID NO: 509816 - protein, 333 aa, unidentified
MKILKQSIGIDVSKNDFKVCLGVMDEQLETKNVYEYAYTNNKKGISQFIKDITKKTDQVITLSFVMEATGVYHQELAYALADNAFPVVILLPNKAKSFSKSINIRAKSDVIDAKLLCQMGLERKLKTWQPPETIFATLKVLTREREALVLQRSKLKNQLHAYQTAFVKANKTISRIKAHIAYLTKQISDTQADMKALVKQAQPVADKVKKITKVKGLSFLSVVTILAETDGFNIILNQKQLIGYSGLDVRIDQSGEKTIKGRITKKGNSHLRKALYMPALSACRTNKAMKLFYTQLNERQRAKKQGVIAVQRKLLLLTYSLWKSGQDYLEKCA

SEQ ID NO: 509817 - protein, 349 aa, unidentified
MNIQHYIGFDVHKKSISYCVKVADGKIVEEGKLKATRQAIEEWAGKRTEPWHGALEATLFSAWIYDVLKPFAAELQMGNPSMMKAISASKKKNDKVDARKIADLVRCNLLPSCYVAPTEMRDLRRLLRYRNLVVRQSVQMKNRMSGLLMEVGAEYNKRRLHGARYFSELLDQLEEIPESVKDLLQVSRGAVEGFAATQRRLLDRLQKEPLLLKRVKLLRTIPGVGEVTALTWALEICDPRRFPSIGDAMSYCGLTSAQNASAGKEQRGPISKQRNGHLQTVLVEAAKLAPRWNQQLAQVHERELKNGHRNRATLEVARKLVAYLLAVDKSGKPFEVRNQRAAKKETKVA

SEQ ID NO: 509818 - protein, 416 aa, unidentified
MNAAGIDVSSRKSTVAVLRPFGEVVRVPFEVNHSAEGLASLVQQLKAIEGETRVVMEHTGRYYEAVANVLHEAGFFVSAVNPLLIKEYGGNSLRRVKTDKADAVKIARYALDNWADLRDYTPMDRIRYDLKTLNRQFHLASKQKTATSNNLIALLEQSFPGVRKCFDSPVRSDGTQKWVNFAHDFWHADCVRKHSLAAFTERYRKWCKRHGYHFRQGTAQQVYDLAKSVVVLEPKSDLTKVLVQEAANQLTTISKSVETYRAEMDHLASQLPEYPVVMGMYGVGDSLGPQLMAEIGDVRRFERKQSLVAFAGVDPMPNQSGEKNVRSNKSSKRGSPYLRKALFNVMICYLQKAPADEPVFQFLDRKRAEGKPYYVYMTAGANKFLRRYYGKVMEYLSTLEDLPPVDMDSTGLPKHP

SEQ ID NO: 509819 - protein, 316 aa, unidentified
MTEAALWIGIDVAKAWLDVADAGTERPWRVANDATGIAAVVETLAARSPRLIVLEPTGGLETAVVAALAAAGQVVAVVNPAQVRAFAAAHGQRAKTDALDARLLARYGERMRPPARPLPDAATQELRGILARRRQVVEMHTAEVNRRPTTAPSLLPRLEAHRAYLEAELAELDRALERAIQASPVWQAKAALLCSIPGIGPVVARTLLAELPELGTVTRQEAAALVGVAPLNRDSGRTQRPRSIGGGRGGVRAALYMAALTAARCDPGMQAFYDRLERHGNPTKVALVACMRKLLTIANAILRDGVAWRPQGGVAA

SEQ ID NO: 509820 - protein, 356 aa, unidentified
MEQFIGCDAHKKYSVFVAVNEHGVSGKAIRVDHCREDYRKFLNALPGNSVIALEAGGHYYWLVDEIQRAGHQAKLANPLEAKKRMGHVGKKTDKADAEGLAILLRNGTLPTVWIPPAELRDQRELLRLRMFLVRQRTQWKNRINGALARYNVALASKDVFTQIGREELGGRLDDLPRHTRASVESHLTTLDFLELQIQDVEHQLSAIMAPCSEADLLKTMPYVGRILSAVMALETGAVDRFPSPAHLASYAGLVPRVHSSGGHTRLGQVCGNVNRYLKWAFVEAANVIVMHQQRLGDSHAVGLYQRVKRKQNHAKAAVAVARHLAEAAYWILTKQQPYQEPRKAPRAAQCSTSTHG

SEQ ID NO: 509821 - protein, 262 aa, unidentified
MQITTIGLDIAKNVFQVHCIDAAEKVVVRKQLRRNQVIAFFKDLAPCLVGMEACATAHYWARELAKLGHEVRLMPAKDVKAYVKRNKNDAADAEAICEAVRRPTMRFVQVKSAEQQAHLMQHRARDLLMHQRTQLINATRSHLAELGIIAPQGREGVKELLAIIANDADTQLPNDARASLVVLAAQLQALQTTIGAIEKRIVAQHRGNKENKRIQTIPGIGVIGASAIAATVPNPKIFRSGRDFAAWIGLVHDKCRPGESRS

SEQ ID NO: 509822 - protein, 354 aa, unidentified
MIIIGVDFHPEFQQIASVDTDTGEFQEKRLVHREEAENFYRALAATGHNVRVGMEASGQARWFERLLSELQFELWIGDAAVICTKRVRKQKTDRQDAQLILQLMIEDRFPQIWVPSWENRDLRQLLWHRHRTVQTRTRIMNQLQALALNEGLRCKKRLWRERGRQQLESFRLGPWASRRRRDLLELLDRLNPTIAELTQAIEQEAEKCPAAQRLRTHPGVGALTALAFVLIIGEADRFHCGKQVASYLGLVPLEDSSGNRRRLGHITKQGSSILRFLLVEAAQVTVRSLPEWRSKYFHLAMRRGRKIAKVAMARKLAVCLYWMWRKGWNYEQLTKFGSHAGKPGTGHGVQLNTE

SEQ ID NO: 509823 - protein, 376 aa, unidentified
MENDSTLYVGLDVHKDSITIAYALGAGEVELLGKIGTTKADIDRLCKRLQSKARRIRIVYEAGPCGYGLYRQLVQKGFDCMVCAPSLIPRKPGERVKTDRRDAIKLVRTLRAGDLSAVYVPSVEDEAFRDLARAWVSAKDDLKRGRQRLKAFLLSHGVRYTGRSDWGAAHRRWLSAFAFDNAWQQLAFEELRRTIEDRLAQCERLEAALREAVVSWRFYPAILGLQAMRGVQFTTAVGMLAELGDLSRFAHPRQLMAWLGVTPSEHSSGEKRRQGSITKNGNSYARKLLVEAAWSYRYPARVSPEIQRRHEGIPKPIVDRAWDAQVRLCRRYRKLVARGKEKNIAVVAVARELSAFIWDISRLAMSLTVPRAALPV

SEQ ID NO: 509824 - protein, 347 aa, unidentified
MDRYIGIDVHQESCTVAVMGPSGRRLQHHRVETNGSTLVGFIKGVSGDKHVCFEEGTQSAWIYELLEPVCSDVTVVQMDKRKGVKSDAADAWELADLLRRGGKCRRIFKAKGQYTALRQAVATHRMAVQDMVRSKNRLKALYRSRGVRTNATIYDPEQRGSWLKKLPPAQRRGAVLQCAQLDGVTETARQAEDWLLEEARRCAAVQLVATAPGIGQIRGAQIVATVVAPHRFRTKRQLWSYCGLAVVTEVTGEWTQSNQGRWERRRQPQPRGLNRNRHPLLKEVFKGAALTVVTLMPEHPLGQKYTQALVGGMKPDLARLTLARRISAAVLAMWKSKQPYDEKRHAM

SEQ ID NO: 509825 - protein, 379 aa, unidentified
MIATTRPEMSVSEPTLYVAFELGKKEWKLAMTSGFGVAPWLRSVVSGDWRGVDRAIAQGRARFGLAAAVPVVSCYEAGRDGFWIHRALQQRGIRNRVVDSASIEVNRRARRAKTDRLDALKLVTMLVRVCWGERRVWSEVHVPSVAAEAARQVSRERTALTQEQTRLTNQLKGWLATWGATLPRRRPSGWWTTVSDWAGAPLPVEVQARVARAEARRAVLEGQIAELDDQQQAAVTTAAPGSAVRQLVQLKGVATRSASVLLDEGLVWRAFQNRRQIGGFLGFAPTPYESGESAREQGISRAGNNRLQSISIQLAWNWVRWQPHSALTAWYREQFGKGKRSRRIGIVAVARKLVIALWRYVTTGVVPAGAILKGALPVA

SEQ ID NO: 509826 - protein, 400 aa, unidentified
MRAVFGIDVSKASSEVAILVNGEKVHNYTISNDALGFARLLGDLKTVHKPEIIFEATGVYSRRLQAFLEDNGYAYTRLNPLEAKKQLDSLRVRKTDQIDAEKLAQSQFVLNRKPTYVQEEVYQELRDLSRFYQNLTEDIVRAKNRLHKVLQVTFPELETILSTPTGEQYGNLVVAFPCKDFVLDLSKDELSESIRQSTSKRISDKRVAYLAEKLIALANQSYCAVKKTSPMLEEVRYYAKELLRLSEQRQTVLDQMVELAQPLPEYDILLSIPGIAETTATSIIGELGDIRRFQSANQINAFIGIDLRHYESGNFLAKEHITKRGNPYARKILFKCIHNIASASNTNPCHIADFYEKRKRQSQTTSTKPHTIASIHRLIRTMYYLIMHNKLYDYASTQNR

SEQ ID NO: 509827 - protein, 405 aa, unidentified
MFCGIDWASERHAVCVLDDAGHQATAFEIAHTAEGFDQLLARLRRYRDPATLPVAIERPDGRLVDRLLEAGHPVVAVQPNAIKAWRDAEVLSGAKNDPGDAALIADYLRLRQHRLRVLQPFSAETRALRAVVRTRDDLVDQPTTASNQLGACLDAFWPGAKGVFADLASPITLDFLARYPTPESAASLGERRMAAFLTKHGYCGRRPAAELLARLRAAPPGLCGTVEVEARRDAVLAMVRVLRALVAAIKDLDRAVVAHLGEHPDAEIFTSLPRSGRINAAQVLAEWGDCRPAYVDAEAVACLAGATPVTKQSGKHTAVSFRWACNKRFRQAICTFADNSRHGSPWAAKVYAEALARGHDHPHAIRVLARAWIRVIWRCWIDQVPYDPAKHGAAHKLTEMATSAA

SEQ ID NO: 509828 - protein, 367 aa, unidentified
MKQSSKIFVGMDVHKDSIDITLAEQGGEVRRFGEVGGERAALLKAVRKLTSRGSELVFVYEAGPCGFWIHREITALGHACWVVPPSLIPQRPGNHVKTDRRDSENLARLARAGELTCVHVPDVRDEAVRDLVRARDDAVIAQRRARQQLKALLLRNDIRYVGKTSWTSAHLRWLSELKLPQPAQQIAFQEYVDAITVATGRIERFEQAMRDEVSTWRFAPAVAALQAMRGIQFVHAMTLVAELGDLTRFESPRQLMAYLGLVPSENSSGQRRRQGSITKAGNTYARRVLVEAAWAYRHPARLTRIIALRQEALPKRVCDIAWKAQLRLCAKYRRLRARRVLETKIIVALARELSGFVWAIGQHVKPR

SEQ ID NO: 509829 - protein, 341 aa, unidentified
MSVIAPVFSFGLNGYAGSGLALQDKAEKSLMQITIGIDISKETLDAYRFPDNHHIQVANGRAGHKTLVRWIGKQNGSLVVFEATGAYHRNLEAALAANGTAFAKVNPRQARRFAEATGRLAKTDRVDAIMLAKMGAILGLKAHEPRTEALHILRELITARRALMKDKVAAKTRLQTTRQTLLKNQINARLKQIKIQIQQVDAAITEKVAQDEALSNKLDILTSIPGIAETTAFSMLIEMPELGTLEGKQAASLAGLAPMSRQSGKWQGKERIKGGRAFLRRAIYMPALVATRYNPGLKAKYDQLIRAGKSGKVALTAIMRKLVVMANALLRDGRTWSELRP

SEQ ID NO: 509830 - protein, 348 aa, unidentified
MNTTHYIGLDVHKKSVSYCTKLADGTIVAEGKVASRREDLRKWATQLPQPWEGAMEATLFSGWIYDTLKPYAAKLEMAHPRMLEAITAAKKKSDGIDAGKLSDLLRVNLLPSCYVATSQIRELRRMLRYRNLVVSEAVRMKNRISGLLMETGVEYNQQRLHGKGYFAELMKNLVEVPDSVRQLLRLSRAALEMFEVTQLGLLKALRTDAHLAERVERLASIPGVGEVTALTWALEIADPSRFPSIGEAQSYCGLTAALNSSADKQKRGPLSKQRNPHLQTVLIEAAKLAPRWNSALAAVHEKELARGNRNRATLEVARKLVAYLLAVDRSGRPFQMPTAATTASAAQG

SEQ ID NO: 509831 - protein, 346 aa, unidentified
MEYYVGLDVSLKHTSICVVNQTGSIVQEGVVESDPEAIALFVRSRAPGTVRIGIETGPTTTWLWTELNRLGLPVICIDARHAKAVLKMQINKSDRNDAAGIARIMQTGWFKEVRVKDLDSHAVKALLASRALLVKIKRDLENQIRGLLKNFGLVIGRGKFNVFAVRAAELIENRPELIAAVRPLLEARKAIEQQVDDLDRKVHKLARHDVQVRRFMTVPGVGPITALCFKATIDDPTRFKRSRSVGAYIGLTTRRHASGEIDWSGRISKCGDAMLRMYLFEAAGVLLTRVPKWSGLKAWGAKLTKRNGLRKAKVAVARKLAVILHRMWIDGTEFNWSTKKAAAEHA

SEQ ID NO: 509832 - protein, 438 aa, unidentified
MRAKCNDDLSTVNFSTIGLDVHKNRLVACAVHVQHDAKGREVHEKEYFESTGTYSGRQRLTEWCSSQNADLILMESTGIFWKAPFRDLEKADLHPVLINPRIFNRGSDKRKTDKSDATWLANLARLGLYRASFIPEEPYRSLRLVQSQIKSLVAERQRLKNRLVKVLDDSGFRFTVAFADIGGASSQSLIAGILEDAPREELALMIDPLCKKSIEEILDAVSGELSQINKDIVQSILRLIETHTKEIETLEQTVIRELKKCEKVKQNIRLMTTIPGVSEKSAQLLMSMIGPDFVENFPSPHAFARWLGVCPGNNESAGQIKSGRTPHGQRLIKKVLTECAQAACHTKGSHLSVLFGGWKHKGFCKAVMAVAHKLALLIHWVVVNQKPYIDKEFDYTGVFKQDGQRRPRWIRALRRYGLMTLADVEKEKAARGWIIAKA

SEQ ID NO: 509833 - protein, 343 aa, unidentified
MEHYVGLDVSLKLTAICIVDQTGRIEREGVVASNPEAIAAFIKSHAPHVARIGLETGATSTWLWTELNKMGLPVICIDARHAKAALRMQINKSDRNDAVGIARIMQCGWYKEVRVKDLDSHAIKALLVSRALLVKIKRDLENQIRGLLKNLGLVIGRAKMNVFAVRATELTEDRPELAGAVEPLLKAREAIERQIADLDRKVLRLARNDAQVRQFMTAPGVGAITALCFLATIDDPTRFKRSRSVGAYVGLTTRRYASGEVDWTGRISKCGDKLLRSYLYEAANVLLTRVAKWSALKAWGIRLAKRSGLRKAKVAVARKLAVILHRMWIDGTEFNWSTKKAAA

SEQ ID NO: 509834 - protein, 348 aa, unidentified
MEMVGGLDLHRSQITFRTVDLRTGEVKRGKIYPGAREAVREWLERFEAGTEAHFALEGTTGWRFVAEEIERRGFVAHLADPAELSTLRGPKRRAKTDHADCELMVNLLLEGRLPESWIPPAHILELRALVRLRKTLLDQRTEWQQRLQAQLFHQGVVAGLRLRSPQDRRRLTGVEMSPAGRQTMGTGLVMLDDFDAQLEPLSAQLVALAKTQPGCRALEHELYGVGWLTAVAVVAELGDCRRFHSADQAVRSSGLDITVHESNGKRPGGHLARQGPQVLRWALFEAAQCAARKGSPDHAYYLKVRERIDHNRACLSVARKLCRRACRILRDLGDAAMAPPASQEPKAA

SEQ ID NO: 509835 - protein, 351 aa, unidentified
MMIIGVDYHPSFQQIAFLIEETGEYGEQQLNHSDAEAERFYRELQQRGIRVRVGMEATGFSRWFERLLAELGFELWIGDPAEIKAKRVKKRKTDREDARLLLKLMQENRFPRIWVPSPENRDLRQLLWHRHRLVQMRTRIMNQLQALAMNEGKRWKSKLWNEQGRAQLEKLPLGFWASRRRQELLQLLDRMNPTIEELTAAAAQEVKKRPEALRLMTHPGVGPLTALAYVLIIGTPTRFHCGKQIGTYVGLIPSEDSSGGKQRLGHISRQGSSLLRFLLVEAAQAAIRISPEWRRRYIHLAMRRHKSIAKVALGRRLAVRLYWMWRNGCGYSPSLEFGSYAGQPDVRHGGK

SEQ ID NO: 509836 - protein, 392 aa, unidentified
MRISVGMDVAKAIHWACAFDETGRTLLDRAVENTPEAIASFAADLRTLGGEPVIGLDVVGSFAHFLGASLLAEGFRLVHAPGIAVNRAGQGFAGGERKSDPRDARTIADLVRTRDLRPILPDDETVTAIRLKVGRRRDLIEEQTRRLNRLRGLLSSVHPGPERDLDVTCKGPLVLLTRYVTPAEIRQAGKRRIMAHLAKTPHVQRAEALADHALAAARAQTLAVPGETAMAELVREMATEALETRTKITRLDRDLAALLAVHPDGALIQSLPGMGAVLAAEFIACVGDIRRFPSADALASAAGLAPVIRQSGRKAGWRRTYGGDKALKRVFYQGAFCAVCRKDPLSRAFYDRKRREGKHHTQALIALARRRVTVLWTMLQTRQTFDPLKNAA

SEQ ID NO: 509837 - protein, 412 aa, unidentified
MDVLYPRCCGIDIHKKSITVCVLIRESGRKEQKQIREFGTTTSAILSCGDWLRDLGVTHVAMESTGVYWRPIWNLLEGQFELLLANATHVKNVPGRKTDVKDSEWIAQLMQHGLLKPSFVPDTVLRDLRELSRDRTSLVAERSRLKNRIQKILEDANIKLGSVASDILGKSGRAMLTAMVKGNENPQELADLAQGQLRLKIPQLVEALRGRVRAVHRFRLQQQLARIDFIDAQIAQLEEEIEKQNAPFEEAVSLLTEIPGFDRTTAWAVIAEIGINMKQFPSADDLASWAGVCPGNNESAGKRLSGKTRKGSRWLRQKLCQSAWCASRCKKSYFSAFFQRVAAHRGRKRAIVALSHALLVVCYYLLQRKCHFQDLGVNYFDQLNHERLTHYFVKRLTRLGHRVTIEACPAAA

SEQ ID NO: 509838 - protein, 311 aa, unidentified
MSDKTTVGIDVSKYALDVFIDSSERLIHLDNSASGILQLFKELEGLHISGVIMEATSRYHSLAESMLISAGLPVAVINPRQIKNFARAMGKVAKSDSIDARIICEYGRRMKPEFRPARDKELQELTMLLTRRRQLVQNRVMETIRLQEKNGVWIEMGIAEHIGWLNVQIDALDKEIKYQLNHNAALTSKRKMLEKVKGIGPVTQAAILSQLPELGHLNRRQISALVGVCPYDRDSGQLRGKRAIWGGRSGLRATLYMAMLSAVRYNPQIKDFYTSLTARGKPKKVAITACIRKFITILNAMFRDQKDWIYS

SEQ ID NO: 509839 - protein, 460 aa, unidentified
MNPKRSKSTNGGEMPMVHPNAAAIDVGATMHMAAVRADRAPGPVRSFGTFTADLHRLVDWFTECGVETVVMESTSVYWIPIFELLDARGFTVFLVNARDAKHVPGRKTDVSDAQWLQRLHSFGLLRASFRPKGQIAELRAYVRQRERLLEYAASHIQHMQKALTEMNLQLHHVVADITGATGLRIIRAILAGERDPEALACLRHYSCHSSAETIAKALTGSYRAEHLFALEQALALYDAYHEKASACDVRIEAVLKELSIHRGHGHGSAPRASRRRNRTDQANALAFDVREALFALLGKDITTIDGLGPYLSLKLIAECGDDLSSWPNAKHFTSWLGLAPSNKVSGGKMLSSRTRRSGGRAAALLRLAAVTVGRTDTALGAFYRRLSARIGKAKAVTATARKIAVLFYNAVRYGMDYVDPGASSYETRYRTRVVNNLHRRAKAFGFVLQPLEPKAGAAVS

SEQ ID NO: 509840 - protein, 370 aa, unidentified
MRGCRCSMIMGFTKPIEHFNLQRKKVITMNTLYVGIDVSSKSNVVYLMLPNRDKHSNFSVANSHEGYTLLVKKIYSALTSHSLDTVLIGLEATSVYGDNLVYFLREDATLAPFNRKIHVLNPKQVKKFHDTYNDLPKNDYVDSFVIADCLRFGRINKEVYMGEYRYKALQNLTRARFFAVQNLVKEKQRFMNVLFKKYSTMTQEKVFSDAFSTTALAVYDEFESAEALANMDLHELTDFIIEKGKNRFPDPDAVAKAIQKAARSSYRLPKTVNDSVNQVLSISITSMKALESQIKEFDKAIKALMELLPNVLISIPGIGPVYSAGIMAEIGDINRFDNQASLAKYAGLAWKQHQSGGFEAEVTRLIPSGN

SEQ ID NO: 509841 - protein, 347 aa, unidentified
MRYFAGLDVSLEETTVCVVDDGGLIVREARVASEPEALVAFFRGCGLVMERVGLEACSLTAWLHQGLTEAGIVAICIEARQAKAAMGAMPNKTDRNDARGIAQILRTGWYRAVHVKNPSCRSWRALLTARRMVLNKRRDVENGVRALLREAGLKVGTPSRKNFAARVGELVADDPVLAGLARSLLSVIDVMTQEVDRLTKRVLDEVRVEPTCRRLMTVQGVGPLTALAFRATIDRPDRFRRSRDVGAHLGLTPRRYQSGETDVQGRISRCGDELARTALYEAAHSLLIRSTKWSVLRAWGMNVAKRRGMARARVAVALKLAVILHRVWSDGSEFRWGKQVVTTTAAA

SEQ ID NO: 509842 - protein, 447 aa, unidentified
MTKFKEHGKSFAAHIGLDWADKKHFWTMQTADGKRSRGELKHTPEAIDAWAAELAERFGGRPVAITLEQARGALIAILSKYAHLHLFVVDPSRLNHYRKSVSPSGAKSDPVDGDLILDFQLKHPELLRCLEPDTVETRSLQFLTEQRRDLVNQHTGQVQIFNSWLKQVFPQILEWFDDVSTPLVGDLLKRWPELAKLKKARPETLLQFFHDHNCRSVERNQQRLEAIRTAVTATHDAALLKAANLMIQTSIQLLATLRTAIEQFECQIQAVFATHPDRFIVESFPGAGPALEPRLIAALGTDRSRFQSAADMACCFGIAPVTESSGNARWVHWRWACSKFVRQTFHEWAACTVRQEGWARDHYERQRAKGKGHHAAVRSVAYKWIRILYRCWRDRVPYSEQRYLEALRTHGAAKGTPPANAAEPSIGLPAVQWKNCGGFSKPTKFSS

SEQ ID NO: 509843 - protein, 449 aa, unidentified
MRKKQQKGRPLTNLQLEIKHACAAGIDVGSMSMMVSYPGFDGVQTVQEYDAYTDDLAAMAAQLKQAGVTHVCMEATGVYWMAVYEILENNGFAVTLVNARHYKNVAGQKTDVKDCQWLQQLHAHGLLRASHIAEEQYRELRTYIHERSMLQKSKSDTLNRIHKVLTQMNIKVQHIISDIEGVAGMTIINHIASGETSVEAILAGVNTKVLKASNEDLEKSLNGIFKPHFIKVLKNQLTACHFYKQQMLEWEKEIEALLLKMLPDSREAVAPKKQKARKNQYGFNLKEYLHRIAGVDLTEIDGLDENTVLTIISVVGLNINKWPTANHFASWLNLAARPSITGGKVTGYQKRFTTNAATQAFRMAAQTMWQQKGPLGQLYRRLASKKGSPKAIKAVARRLAIIFYNMLKKQTAYDAKIVAMDADRIRAQKIARLSKEAKKLGCRTEIETA

SEQ ID NO: 509844 - protein, 327 aa, unidentified
MQGWAREGAHSTTNVAGVDVSKKELVVAVGGLAALRRYSNDTGGRRRLCGDLVKIAGAGTLRVGLEASGGYERKTVAALRRAGFEVIVFQPIQVRAYAQYIGQRAKTDPIDARVIALAVAAHEGEIRHSDDRLAPLAEHLTFIEQIDDDIARLKTRRDGFTVIALKNKLEAEIKRLTRRRNAEVRSLLKSLRQHDDLAFRLDLVASIEGIGERTAITLIIRMPELGTLTREEAASLAGLAPFDQQSGKADHARHITGGRAKVRRSLYAAALPAAFHWNPALINLYNRLIAKGATHKKALIACARKLIIFANTVLARGTPWDKSAAAQ

SEQ ID NO: 509845 - protein, 416 aa, unidentified
MEILYRCCCGMDVHKKFVVACVLRIDEQGEETRQVQRFETYTEDLLRLSDWLTRSGCTHVAMESTGVYWKPIYNLLEGQLELLVVNAHHIKAVPGRKTDVKDSEWIAELLQHGLLKASFIPPQSQRDWRDLTRYRTSLVQERVRIVNRLQKVLEDANLKLAGVATDVMGKSGRVMLEAILTGATDPEQLAELAKGRLRKKLPQLKQALNGRVREHHRFLLVEQLSHIDYLDEAIGRLSGEIAERLRPFQAEIERLDTIPGINRAIAEVLLAEIGPDMNRFPDAHHLASWAGMCPGHNESGGKRQSGKTRKGNRWLRQALIEAAHGASHTKDTYLSSQYRRLVGRRGKKRALVAVGHSLLVIAYHVLNRQATYVELGSNYFEQLHRCRLEQNLVQRLQKLGYTVTLEANSASMVLPA

SEQ ID NO: 509846 - protein, 410 aa, unidentified
MEVLYPHCAGLDVHKDMVVACLRRVVDGTIKREVRTVKTTTKALLDLSQWLASEGCTHIVMEATGVYWKPVWHILEDGDFDLALANAAHVKTVPGRKTDVNDATWLADLLAHGLVRGSFVPNAQTQEMRGLLRTRKQLVRERTSHVQRLQKTLEDANIKLDSVISDVMGLSGRTMIEALIAGETDPNTLAALAHRRIRAPAEELCEALRGRVTKHHRFLLRLHLQQIDIFDAAIVEIDQEVDANVEPFRAAITILTTIPGVSDLSARTIVAEIGTDMSRFPTDGHLISWAGLCPRNDESAGKRRSNRMRKGAPWLKTTLIQCAWSATRKKASYLQAQFHRLRARRGAKKAIAAVAASILTAIYHMLTNGTLYQDLGADHFDRRGKTAQTKRLVAKLQNLGYAVQITPLAA

SEQ ID NO: 509847 - protein, 342 aa, unidentified
MYYIGLDVHKKTISYCVKDARGRIHDEGKIGATRNDLDSWMKTLVRPWMVAMEATIFTGWIYDHLLPHAERVKVAHPLMLRAIAASKKKNDRIDAGKIADCLRCDFLPECHMASTDIRDRRRTLRYRHLLVRQMVQMKNRISGLLMETGVSHNKQRLHKVGYFRELLSTNKEVHESIRPLLRLSRDTIVRCQKTEYALVSSLQRDPLLSERIKLLRTVPGVGPITALTWALEMGDVSRFRSIKQAISYCGLCGEEKSSADTVLRTPLSKQRNKHIQHVLVEAAKLAPRQNHELALVYEKEKQKGNANRATLAVARKMVAYLLAVDRGKPAFVLLEDHSTTAA

SEQ ID NO: 509848 - protein, 342 aa, unidentified
MSIVGAFDVHRRQLTFEYLDTVTGELRRGRVVPADREHLREWLARFTGQPDVAFALEGCTGWRYVVEELLAAGIEPHLAEPADTAALRGKKRHAKTDKTDTRHLRVHLLAGDLPESWIPPQHVLEARAVVRLYKDLLDERGGWHQRIAATLFHQGAPAGIGSMCAAAGRAAAAEADLSPAGRQAVETGLRQIDRLSDELDPLRRQLNMLSRRQPGCRALRAACFGIGAVTSVAIWAELGDVRRFASSDNVIRHTGLDITVYSSDTKRPAGHLSRQGPPLLRWALYEAAKCAARPAAPDHGYYTAARDRRTAGLATLSVARKLARRCYHTLRELGEEALQPAA

SEQ ID NO: 509849 - protein, 320 aa, unidentified
MVSATTVVGIDVSRDWLDGFCLPGLQRFRLANSPEGHESLILMIRQMPAPIRVGFEATGGQEWAVWTALADAGIDARQLPPAQIKAFAKSRGTRAKTDRIDAELIARFMLFRPDAGRTLPNDNLRILRTLTTRRAQIVDMRKRLAAQIAARKKQGVPADVEGLDDALKAVLDIQIAALDQRIENAIAWEETSAIKAGLLRSIPGIGPVSAAMLIAEMPELGRMTAGEASAMAGLAPVPHDSGAMRGRRAIAGGRRSLRHVLFQAALAAACHNPVLKPVARRLKEGGKPHKVVIIAIARRLITIANAILKTGETWRHQTSR

SEQ ID NO: 509850 - protein, 371 aa, unidentified
MKQFSKFVGMDVHKATIAVSVADANGGEVRYVGEIANTPEAIEKLVRQLRKGDAHLSFCYEAGPCGYGIHRQLSDLGWDCQVVAPSLIPRKAGERVKTDRRDSLMLARLHRAGELTAVWVPDDAQEGLRDLTRAREDMKHLQRQAKQRLCAFLLRYGKCYSGKSNWTQAHYRWLEEQQFGHSVQQIVFQEYVDTVKALSKRVDGLDAQLESAASESVFWPVIEGLMALRGVNLLTATTVVAEIGDLKRFASAPQLMAYLGLVPSEHSSGATKSRGAITKTGNAHVRRVLVEASWTYRHPARKTAHLQRRAERTSEAVQDIAWKAQKRLCARYRLMEAKGKLKVQACTAVARELTGFIWAIGQELPQPVPNR

SEQ ID NO: 509851 - protein, 350 aa, unidentified
MLIIGCDYHPGFQQIAFLNTDGGELGERRLAHREEAEQFYGKLKEQNLCVRVGMEASGHARWFERLLHNLGFELWIGDAAEIRTKRVRKQKTDRQDAQLLLRLMMEDRFPRIWVADAQNRDLRQLLWHRHRLVQMRTRVMNQLHVVALNEGLRRKKALWRPAGRHELESLTLAPWASRRRQDLLDVLDQLTPKIQELTLALETEVGKRPVTRRLMTHPGVGPLTALAFELVIGTAQRFHCGKQIASYVGLVPSEESSGDRRRLGHISKQGNALLRFLLVEAAQVTVRSQPQWRSKFFHLAIRRGRKIAKIAMARKLAVHLYWMWRQGLDYGQFEKLGSHAGEPGNRHGVQ

SEQ ID NO: 509852 - protein, 332 aa, unidentified
MKYAHFIGIDISKLSFDVFIHGTGLHKQFANDREGFAAFLKWIKSALKKVKLPELMICFEHTGLYSLTLSMYLEEIQVPYFMISALQIKRSLGITRGKNDKIDSRRIAEYAYLHRETLTPTRLPSRAIFKLQPLMTLRNRLVRHRAGYKATRTEQRRFLPENELSELFEAYSVMISTLDNEIRKVEQAIKSIIQSDEELTKTFKLITGIKGVGFLVGTYLIMFTHNFTRFDSWRQFACYAGIAPFEHQSGTSIRGKTKVSPIANKLIKKLLHLSALCAAHKDKELSAYFKKRVEQGKSKMSTLNIIRNKVLARVFAVAKRKTEYVDFMKYVA

SEQ ID NO: 509853 - protein, 423 aa, unidentified
MDTMHERVAGLDVHKATIVACVRILAGAKVERECRTFDTTTDGLSALLAWLVDCRCSHVAMEATGVYWMPVWKILSDGAFSLIVANAAHIKNVPGRKTDMNDAMWIADLLACGLIQASFVPEEDVQELRSLMRTRKQLGREQTRHLQRIQKTLTEAHIQLDSGLYDIMGASGRRIIEAMISGVRDPRKLTALASVQIKATPKQLYDALHGRLTDHHRFLLKLHLQQWDGLDATIREIDREVEARIARGDKEVKAGEAPFRDLIKLLSTIPGVSILSATTILSEIGRDMSRFPTAGHLVAWAGLCPGQNESAGKVKSTRLRKGAPWLKTMLVQCAWAAKRKKDSYYKAQFFRLQSRRGPQKAICAVAASILTAIYHILKDGTPHRDLGPDHFNRRSTEGQAKRLVVLLTKLGFDVQLQRKAEAA

SEQ ID NO: 509854 - protein, 412 aa, unidentified
MEQIHDRVAGLDVHRDQVAACVRTPGPRGGVQAEKARFDTTTGGLAALAEWLAGHAVSLTAMEATGVYWKPVYYALEGRFLVWLCNAHHVKNVPGRKTDMSDAEWLADVAAHGMVRPGFVPPPPVRELRELTRYRKTQIDARAAEIARLEKVLQDAGIKLTSVASKVLTQSGRAMVEALIAGERDPAALAELAKGKLRPKIPQLTAALRGHFGAHHAIAAARILAHLDFLDETIAQLDEQVAARVAARWQPAARLLAGVPGLERRSIEVIIAETGADMSRFPSPAQLASWAGLCPGNHESAGKRRRVATTPGDQWLRRTMIESARAAARTKGTYFAAQYRQIARRRGPNKAAVAVAHSLLDTIWHMLTTGEAFADLGEDYFTSRNDKEHQASRLVSQLEKLGYTVQLAAAAT

SEQ ID NO: 509855 - protein, 411 aa, unidentified
MEAAVITAVGIDVSKSKSTVAVRRPGGEIVLRPFEVHHTNSDLKKRASALKKLGGDIRIVMEHTSTYWRPIALTLKEAGFFVSVVNAMLIHDFSDNTIRKLKTDRADALKIANYALTFWDTLPPFNSEEETRLLLKMQSRANERITATATALRNGLIALADQTFPGVNIAFDPNTKNANGHEKWVDFFLRYWHKDCVCQYSMEAFTESYRGWCKRKNYKFRTNTAHRIYLLAQEGVDTLPKCESTKMLITQACKSLNAVCEAKQSTQLEMLRLAAMLPEYEVVMQMEGAGPITEPALMAEIGDVRRFKNKKALVAFAGIDAPPFQSGAFKSKSRHVSKRGSPHLRRTIFIVSNIILTRSNPENAVYCFMDKKRSEGKHYYVYTVAGSAKFLRVYYARVTEFLCSQPSPDAC

SEQ ID NO: 509856 - protein, 343 aa, unidentified
MEHVAIDLGGRESQVCVRAADGTIVEEKRCRTRELGAYLATRPKSRVIVETCAESFFVVNHATRLGHETRVVAATLVKALGVGERGMKTDKRDARKLSEVSCRIDLPSVHVASTESRERKTMCGMREALVQSRTKLINTVRGWMRGGVLSIRSGSAESLPARVRQAVGEAIPSYVARQLAMIDALTEQIADANKQLRTLAKSDSTCPRLMSVPGVGPITALRYVAALDSIERFPSAHHAEAYLGLTPGEDSSSERQRRTGITKAGSPAARWVLVQAAWAARRAKGDHPMVRWSLEVEKRRGKRVAILALARKIAGIMFAIWRDGTVYERLHAKPILLPTASTT

SEQ ID NO: 509857 - protein, 346 aa, unidentified
MNITTVGIDLAKNVFQVHGVDERGSAVLRKMLKRGELVKFFTKLLPCLIGMEACGGAHFWARKLTELGHNVRLMAPQFVKPYVKTNKNDARDAEAICEAVGRPNMRFVPIKSIEQQTLLGLHRARQAFVAARTAQANQLRGLLSEFGIVIPNGIHYLNGLPEVLEKAGSGVSSTSRELFNRLYSHFRQLDRQVGELDLQIRAWHRESAASKRLEAIPGIGPITASAMVASIGDAKTFKNGRQLAAWLGLVPRQDSSGGKDRLLGISKRGDTYLRTLLIHGARSVLIRLKFRTDQAEGWLARLAKRRNPNIAAVALANKNARIIWALLARDRDYQAGHVSVRTKALA

SEQ ID NO: 509858 - protein, 344 aa, unidentified
MLQVSTIGLDIAKHVFHVHGADGKGRTVFSKRISRGKLLDFFAAQPSCTVALEACGGAHHWARQLTQLGHQVRLIPPAYVKPFVKRQKNDAIDAEAICEAAQRPSMRFVAVKSEEQQAAGLVFRTRDLLVRQRTQLINAIRGHLTEYGWIAPKGPSHVARLADLIEEEAMASSLPEAARPMFRVMLEFLAELNGKIADLDNEIARRAREDEVSRRLMTIPGIGPISATAIAALAPPIETFAKGRDFAAWLGLTPLQKSTGGKQKLGATSKMGERTLRRLLIIGSSAVVQQASKRGAPKGSWLEQMLTRKPRMLVTVALANKMARIVWALLVKQESYRAPVSAKA

SEQ ID NO: 509859 - protein, 366 aa, unidentified
MVAKEYYIGMDVHKEFVQMAVFEERGEEPIYERRLKNDTNLLVKEVKAFNKKGITEAAYEAGCLGYVIQRAMEKSGITCHVLPANKVAKNRRDRIKTDKRDARLIGRELRSKSIRPISVPDASDEAVRDLLRCREDISEDSRRAKQRLLKFLIRHGYIFTEGKTKWTEMHWRWMDKITFNYEHEQSVYEEYRSQIWALEERLARLEQQIVEIAESSRYKAKVSRLRAFKGIDYIIALSVICEIGDFRRFANAKSFMSYLGFVPSENSSGGRRNQGKITKAGNGHLRRLLIEGAWSYTRSARTGKRLELRRKDCSANMIETADRALHRLHKKYVKLVFSGKHTNLAVTAVARELAGFIWAAQVSDVA

SEQ ID NO: 509860 - protein, 404 aa, unidentified
MGARYAGIDWAKDEHVVCVVDPEGRPVDTTRHRSDERGLGGLLSELRRRRVERVAIERPDGLLVERLLGAGLEVLAIHPNQVKAARARFRASGGKSDAFDAFVLAELCRTDAHRFTPLRPDGDLIQALRALTRHRQDLVEQRIRLANRLRAELERSWPGAAQIFSEVDSPIALAFLARYPAPADARRLGQKRLAAFLARHGYSGRRTSAELLRRLEQAPKAALGAAQAEARRCVVLDLVACLQPVLERIRLATGHIAHLLDAHPDGALFRSLFRDPTSVVTAAELLAEIGEVRERYPDPQALAAEAGMSPVAVESGRQKAAVFRWACDKRLRRAFGVLADASRHHNPWAAKLYGEARARGKDHPHAIRILGRAWITVIWRLWQDGVPYEPAKHRALQRLLTEGG

SEQ ID NO: 509861 - protein, 403 aa, unidentified
MNAVGIDVSKGKSMVTILRPFGEIVSSPFEIKHTSSDILSLIKLIHSIEGESRIVMEHTGHYYEVLAQQFSAAGLFVSAVNPKLVKNFNNDSLRKVKSDKADSIKIARYALDKWQNLKPYSIVDELRTQLKAMNRQFHFYVKQKTAMKNNLINLIDQTYPNANTYFNSPPRSDGSQKWVDFVYTYWHVDCVRKISLNSFVKHYQNWCKQKKYIFNKSKAEEIYTKATELVPVFPKNEITKRIIRQAIAQLNSTSATVETIRILMNETASNLPEYPIVMQFKGIGPSLGPQLMAEIGDITRFTHKGALTAFAGVDPGVNESGSYAQKSVPTSKRGSSNLRKTLFQVMDVLIKTMPQDDPVYQFMDRKRAQGKPYYVYMTAGANKFLRIYYGRVKEYLCILSESS

SEQ ID NO: 509862 - protein, 345 aa, unidentified
MQGMYYIGLDVHKRTISYCVKDVTGKIFCEGKMPATRLDVDRWMKTLPQPWTAAMEATVFTGWIYDYLRPHAAALKVAHPLMLRAIAAAKKKNDRIDASKICDCLRCDFLPECYMASTAIRERRRTLRYRNLLVRQMVQMKNKLAVLLMEAGVSYNKQRLHKAGYFRELLATNPDIDEGLCSLLRLCRETVVRLQRTESALVRSLEGDSLLNDRVERLMTIPAVGPITALTWALEVGDVKRFSSIKKAISYCGLCGSEKSSANTVQRTPLSKQRNKHLQTTLIEAAKMAPRYNPELAMLYDKERKKGNANRATLAVARKLVAYLMAVDRGQRNFQVLQAAHQPAA

SEQ ID NO: 509863 - protein, 402 aa, unidentified
MKKSSRMSVIHPHAAGVDIGAEFHVVAVPPDADAAPVRTFQRFTGDLHRMSGWLKTCHITTIAMESTGFYWLPAFEIPEAAGFNVILVNARDAKNVPGRKTDVNDAQWLQKLHSFGLLRASFRPEHDISVLRSYLRQRERLTEYRAAHIQHMQKALMQMNVQLHHAVSDITGVTGLSIVRAIVSGERDPSVLIQYRDVRCKKTPEVLQQALTGNWQPEHLFAPEQSVAFFDFYQEKIRECDDQIETSLLQLSTGTEEPEGVLPSARHRTKQPNQLSFDVRPLLWKITGADLTQIHGFGPYLALKFVAECGTDMNRWPDASHFTSWLCLSPGNKISGGKVLSPKTRRSSSRIAAALRLAATTIGRSDTALGAFYRLLSSRIGKAKAVTATARKLAILFYNALK

SEQ ID NO: 509864 - protein, 345 aa, unidentified
MKITTIGIDLAKAVFQVHGVDGRGKVLVRKQFKRKDVVGFFANLEPCLIGMEACGSAHYWGRTLSALGHTVRLMAPQFVKPYVKTNKNDRNDAEAICEAVGRPNMRFVPIKSAEMQAVLALHRARQGFVKGRTAQANQIRGLLGEFGIVIAKGIGHIGERLPEVLEDGENALPGMMRQLLARLGENLKEMDKQVGELERQIKLWHRDNEQSRKLEAIAGIGPITATAFVATVGDVTSFKNARQVPAWLGMVPRHEGTGGKATLGRISKRGDVYLRTMLIHGARTVVAQLERKRDATDEWLRKLVARRNKNIAAVALAAKNARIAWAVLAHERSYERDYVANRAGA

SEQ ID NO: 509865 - protein, 414 aa, unidentified
MARVVEIVHPVCCGIDVHKSFLVACIATTDARNKTTHIIRRFSTFTGDLKRLAAWLESHNCKDVCMESTGKYWIPVFNVLEKTVNVCLTHPKYVKAIKGKKTDKKDAKWIAELFKCDLVRSSFIPPPLTRDLRELCRYHNKLTYMNTSEKNRGQNCLTVCNFKLDEVFRDVFGVSATRVLDKLVELGHSNFDIAPLLHKRCKATPEQVKAALDGELSYAQAQKLGIIRQHMKHLDSIRDSLESTIYGISTPYQPQVDLLMSVPGIGCKFTAIRILAEIGIDMSVFETAKHLTSWAGLTPQNNESANKKKTTRISRAGAFLKPLLIQVALGAIRTCPWLSDKYHALKKRRGHKKAIIAIARKILTAIWHMLSKQEFYNHDLYQKSDLPPINRVLSPEQAYAMLRKQGYQIADTAA

SEQ ID NO: 509866 - protein, 371 aa, unidentified
MKEFSKYVGLDVHKETIAVSMAEASGGEVRYFGEIANTPEAVAKLARQLNKGDARLSFCYEAGACGYGVYRQLRELKHDCMVVAPSLIPKKAGDRVKTDRRDSLSLARLHRAHELTPVWVPEGAQEALRDLTRAREDMKHLQRQVKQRLLAFLLRHGKRYGGKSRWTQAHFRWLETVKCDHPVQQIVFQEYVDTVSALTQRVKGFDQHIESASRESVFWPVIEALMALRGVNLLSATTVVAEIGDLRRFAGAPQLMAYLGVVPSEHSSGGKRSRGGITKTGNGHVRRVLVEAAWTYRHPARKSAVLQRRALCTSEAVQAIAWKAQQRLCQRYRLLEGKGKLKVQVCTAIARELAGFIWAIGQALPQTAAQG

SEQ ID NO: 509867 - protein, 348 aa, unidentified
MEPASIHPTAVRTDLGAIFVSLELSRSIWLITSLSPGSGEKMSKHVVAGGNVAELLDRFKQLQQKARLRTGRSFPIVTIQEAGLDGFWIHRVLEAHGIESYVVDAASIATSRRRRRAKTDKIDGEALTRTLLAFKRGEPRVCAMVRAPDPEDEDRRRICRERKVLIAERVRHVNRVKGLLFAQGVSGYQPLRKDRRQRLEELQTGDGRELPKHLKAQINRELDRLELLLEQIATVESERNSLLSTYEQPAVEATSPAAMLLSLRGVGAEFAAVLWTEALSRHFDNRRQIAAYAGLTPTPWMSGTIDHEQGVSKAGNPRLRTTMIQLSWLWLRNQPASALSRWLWIGFS

SEQ ID NO: 509868 - protein, 355 aa, unidentified
MNEIKYIGMDVHQTSTSIVVLNAAGRVLTSALVETQGQALVAFIQGQRGTLHLTFEEGAYAAWLYDLLAPHVSRIVVCDPRHNALLKAGCKNDPIDAHKLAELLRVNALRPVYHGQHSLRTLKELTRSYTTLVQDSTRVMNRLKALYRSRGIACQGTQVYSPSRRTSWVDQLQEAGVHQRAQLLYQHLDLLGLLRREAKRALLAESRKHLVSRILRPVPGLGPVRIAILLAMVQTPFRFRSKRLFWAYVGLGLVTRISAEFAVVNGQLKRSGKAPAIRGLNPHHQRELKEIFKSAASAAVRRPGPWQQFYQRRVEAGRKPELVRLTVARKLAAIALHLWKKGERYDVKHLKSTAV

SEQ ID NO: 509869 - protein, 313 aa, unidentified
MGDFLSVAGVDVHKDSISITMLFQEGGKWKQEYFESQTFSQDLIIAGKKIKSKKITEVAMESTGIYWKPIFHIWNEMGIKITLVNAHHLKRVPGRKTDASDSAWIAELHQKGLLKSSYIPDETFQELRALTRHRTTLVNANSPIKNRVQKILEDGNVKLSSVLSDVFGVAGTEVIKGIISGEDDPDKLVELIKTNVKETKETIRKSLVHTLKPYHRLLIKQLYQDYLFRSQLIFEIEHEIDEKMKPFEAQIKLLDTIPGVDKVTAQIIIAEATTETKNFENERIFASWAGVVPGNNESGGKKKDQNVGMEIPL

SEQ ID NO: 509870 - protein, 376 aa, unidentified
MGHDSTVYVGLDVHKESITAAYAVGIGEVELLGKIGTSKTDIDRLCQRMQSKATHVRIVYEAGPCGYGLYRQLVQKGFDCMVCAPSLIPKKPGERVKTDRRDALKLVRSLRAGDLSSVYVPGVEDEAFRDLARAWAAAKADLKHARQRLKSFLLSHGVRYTGSANWGPAHRRWISTFVFPNHWQQLAFDECRRTIEDRLAQCDRLEAALREAVVNWRFYPAVLGLQTMRGIQFTTAVGMLAELGDLSRFEHPRQLMAWLGVTPSEHSSGERRRQGSITKNGNSYARKLLVEAAWSYRYPARVSPDIQRRHEGIPKPIIDRAWDAQLRLCRRYRKLAARGKNVNTGVVAVARELSGFIWDIGRLAMSLAIPKDARPV

SEQ ID NO: 509871 - protein, 350 aa, unidentified
MMILSIDLAKARSLFCWYQASDQSHEFKTVVSTPSAFHDALVDRPVDRVVIEVCDMAGWVQDLCRTLGLAIQVANVNVEGWRWKNVKNKTDKTDALKLARLSAADDLKTVYLPERTTRQWRSLILYRHKLIERRTAIKNSIHALLVCEGKAMKGGREAWTEESLEHLGSLAKPISACSKEELWSGHLQMELDSLAHLGEQIEKLDQKLNELGSADRRVIRLQTIPGVGPRLSELVVAVIDDPKRFENVRQVSAYAGLVPRRYQSGQMDRSGRISKAGCGKLRKLLLEIAWGMLRNNARGSGVFKRISKGQKTRRKQAAVALARRVLVWCWAMLRDGTDWKDAPAPLRATG

SEQ ID NO: 509872 - protein, 377 aa, unidentified
MKKELYLGLDVHKDCILRAVAEEGRRGEVRDTGAISNDLHAVEKWIGRLRKVHGREVLLRACYEAGPCGFGLARRLGQLGVECEVVAPSMTPKRTGDRVKTDRRDARKLARLLRAGELTPVYIPEATDEAIRDLCRARTDAVDDRRRSRHRLKGFLLRHGYHYQGKTSWSAAHQRYLGELVLAHPAMKVILEEYLQAIAAAGERIERCEVGMRALLEKWRLAPAVRALMAFKGFQTVAAMIVVSELGEVDRFAHPRQVMAYLGLVPTENTSNDKRRQGRITKCGNAHARWLLVECAQHYVTPPKVSKELSRRQQGQPAQVRAISWRAQNRLHSRYRRLLGRRLQRNKAMVAIARELCGFIWELLRTQSCYHVQATSV

SEQ ID NO: 509873 - protein, 332 aa, unidentified
MDNFYFIGVDVSKKKLDFCVMFEGKVLHEEEIANHQVAIISLLRHLEEDYGMSNGQMLVCAEHTGQYTFPLACACKAVECRLWLENAAEIKYSSGVQRGKNDKVDAKRIAIYASRFQDKVRYYERPTEDIERLKQLESERTLYVTDLAKYKGQMKDQKEYMPKSLYERKMKRLQALMDDLEEAIQSITDEMDEVIASCPVLFRQRELLMSIDGVGRVVATNMIIATEAFTRFDDPRKFNCYAGVAPFSYSSGSSQHSKARVSHRADKVMKRLLHLAAVAITHRIGGELKKYYERKVAEGKNKMSVINALRAKIVARMFAVIKRNEKYKPILS

SEQ ID NO: 509874 - protein, 462 aa, unidentified
MMNIQEQREMVEKANRILNEMKSYTWRDFETQGKFSKNDKLSFISDDMLIVGCDIGSETHYVRAIDARGRELSKKVLAFENDAEGFRKAHDWAVQLAAANDKKQIVLGLEPTGHYWFCLAAWMVSNGISVVQVNPYAVKQTKELEDNSQQKDDRKDPKLIANLVKDGNYGMPYLPEKVYAELRRLSMFREQLMEDRNRHMNRLHREMKIYFPEYKDAFGKIDGAFCIAVLKEAPFPEDILRLGAEGLRDIWHKAKLRGRGYSRAEEIVKYAETSIGLEEGTAAGKEAVRWFAEKITELDEELAEIENKLEGKCGEIPHAENVLEIPGIGGKILAGILAEMGDITRFDDVKEIQKLSGLGLVSCSSGKHKGETRISHRGRKRLRYWLFQAARSAVAHGEEYKWIHAHYTTRAGNPLQKMQSLVVIACKLLRVIYTMLKTGKKYDPEKLLKDIRYPESVQSTAA

SEQ ID NO: 509875 - protein, 451 aa, unidentified
MANSKTRADRIISRQLSHCTVEAAHLSAVGIDVHHDQLICCFQKLDPIAGELTSEHRSFGTTIPQLLEFAAWCRVRESSVILMESTGVLWFSPYRSLEDVGSDNDTLALVNARDVKAAVGRKTDAQDAKRLAEYARLGKFHKSFVPSRPFRDMRMVSRDIIRLSDDISRQKNRYNKNLNSVGCRATSVFSDVHGKAAGKILDAYIRGDRDFEEIVRSARKQLRATQQEILEAINFAMSDALRELLRSSYEHLQYLIARRDSQIALLERMQAPYQEYIDRLMTIPGVKELSARLLFCEFTNEQQSFPDAAHFASWLGLCLGNNKSAGKSSSGKTPKGNRWARKTLTEVAHGIGLMKRGALKALFQAFKERRGARRAVVAIAHKVAMIMFAMIWDGSEYVETTCSALRDTRVKRLLQTSKNLREQRTVITLSGQIVDKDTGELIGQLSVDAAT

SEQ ID NO: 509876 - protein, 416 aa, unidentified
MLFVGDDWAEDHHDLEIEDEAGRRLVRVRLPEGLAGITGLHTLLAEHAPADWAELPAEQMAAQVVVGIETDRGPWVRALRAAGYQVYAINPLSAARYRQRHSTSGAKSDAGDAHVLAEIVRLDRDHHRPVAGDSDLADAVKLLARAHQTAVWERTRHVLRLRSLLLEFFPAAVDAYPDLAAADSLQLLARAPDPARAAKLSRTQLVSALRAARRHHVEAKADAVQAVLRAPGLRQLSTTEGAYATIVRTQVSLITALNEQIATLQTAVDEHFGRHPAAEIYLSQPGFGVILSARTLGEFGDDAGRFVNARARKNYSGQSPITRASGKKTVVLARYATNRRLGAALHLQAFAALGASPGARAYYDALRNRNIGHHAALRQLANRLVGILHGCLKAGTVYNEHTAWAHHNTDTATAAA

SEQ ID NO: 509877 - protein, 353 aa, unidentified
MKKIVKQVVGVDVAQSELVVCLGRMTDDWSAELYANKTFANTKGGMQALAVWVKKQTDPEVAVRFVMEATGVYHEGLAYFLEEKGCQVSIVLPNKISNYMRTLEVKTITDKTSSQAIALFGLERKLDNWKRPKEIFRKLRQLTRERDQIIVERTMVKNQLHAEQTEAYPNKTSLKRIKARITILTKQEKEIKNELAVLIAQDAEVKKMKATISSAPGIGLLTAATVLAETNGFDLIRNKRQLASYAGYDVKEKQSGTSVKGKPRISKKGNKYLRKAMHLPALAAIRHNERFKAIYARLMSKHGIKMKAAVAVQRKLLEMTYTLYKTNKPFDKNYLKEKNINGTKNLERSLQPL

SEQ ID NO: 509878 - protein, 367 aa, unidentified
MSKAETGRLCVGVDLHKTQFTICALNEDGEYLLEKQYPTKEEGYREFAREMHRFEEQGCSIELAVETTGNARFFKNRMESEYFAVKVVNTNRFKVITMSTKKTDANDAATLAYYLMKDLLPEAHLCSQTSEEIRRLLKTRSVLVQSMVKIKNQIHGMMLGYGIETKAAQLQSKRKRQELINDLEDHNFSAYTAPSLKVMLKILDDLSAEIKGIEKLLEEMVASNEDVALLMTVPGIGINTATVIAAYTAELERFDGNYKKFASYVGIIPSVHNSNETTHYGRITKHGPQELRTAFVQAALGMIRLTNVSSEWRIIKEYQRRKGDKGSGRAIIALARKITRIVFVMLSKREGFNPEMMRCEEAIQQTA

SEQ ID NO: 509879 - protein, 371 aa, unidentified
MVKIAKYVGLDVHKDTIAVATCEGGPLASAKDEGILPHDLVKLRRKLLALAPAEHLNVVYEAGPTGFGLCRDLKAHGISCIIVAPNKVPQMPGPRIKTDKRDARYLAWQLRMGTLAGIALPDEELEALRDLIRAREDALHTRRRTRQQLAGMLLRHGARWPGKSTWGVRYIEWIKSLRLGSEAQELAKKQYTGEIEHFDERIEQLGTDIERLAAMLQGTHGELYRALHALRGVSTIVAATLVCELGDLRRFGTASQLMSYVGLVPREHSSGSRVWRGSITKAGNPHVRRVLIEAAWSGRLRPATSERLKRRQEGLDQAVIDIAWKAQKRLYSRFCSMRARGKPQNLTIVALARELLGFIWSIGQEVGKKSA

SEQ ID NO: 509880 - protein, 312 aa, unidentified
MADMVRLAGIDVSKDKLDVYVTPSGESRTVGYDRRGVAGLRRWLVGLGVAVVAVEASGGYEREVSEVLEEAGLVVHRLNPLRVRRFAQLKGRLAKTDRLDARTIAEFARTWPQEYQLRRDPRRERLAEHLLVRRHTQDTILDCINQLEHLRDSRLRRLVAARKASMERTLARLDRCLAELIAEHADLAELSQRLRSVPAVGPVLATTLIALLPELGSLTRRQVASLVGVAPFDRSSGRQIGAKSIQAGRGLVRQALYMAAMVASRHNPIIAAFAKRLAGKPGKVRLVACMRKLIVTLNAVVRDGSQWQLRSA

SEQ ID NO: 509881 - protein, 425 aa, unidentified
MPYILAGIDVHKRMLAVVVTDVAGEGEYQFERRKFGASPDQLQLLAEWLVAQEVDEVVMESTAQYWKPVWGALERYWQPARRQREGAGPMSGSLHLAQAKSNRGPRGRKNDFADGERLIKRLVAQELVLSFVPDPEQRLWRTITRRKQQLTRDRVRLQNQLEALLEQAHIKLSSIVSDLLGVSARRMLQALADGETDPGTLAALAHTRLRATPEQLRDALGACTQLNAVYRRLLQMMLEELKLLERHMDELDKEISTLLQPHQPAVQRLAEVPGLGVDSAQQIIAEIGVTAATFPSAKDLSSWVGVCPGEEESAEVSQSSRSPNGNRNMRRLLNQAAHAAVKVKGSIFEVVFSRLKIGLEYQEAIWAIAHRICRLIWKILHQGVCYEERGPAVSAKSRRTRTTKMIRELRKLGYRVEPISAGSPA

SEQ ID NO: 509882 - protein, 365 aa, unidentified
MLHRLNSAATLIQRTTMEAPRGDMYYIGLDVHKKTISYCVKDASGRVQQEGKVGSTRRELDCWMKTLPRPWTAAMEATIFSGWIYDHLLPHATQIKVAHPLMLRAIAAAKKKNDRIDAGKIADCLRCDFLPECHMMPAEIRDRRRTLRYRHLLVRQMVQMKNRVSGLLMETGVEYNKQRLHKVSYFRELLSTNAEVHPSLRPLLKLSRETIERCQKTEYALVSSLQRDPVLADRIKRLRTVPGVGPITALTWALEIGDVSRFRTIKQAISYCGLCGDERSSADKAMRMPLSKQRNKHIQRTLVEAAKLAPRQSHELAVIYDREKQKGNGNRATLAVARKMVAYLLAVDRQQRDFGPAKQRSTAAA

SEQ ID NO: 509883 - protein, 471 aa, unidentified
MSQNDPTRCLFPYYRKMMKLYVGIDIGKKSHYAGFLSRPLLSHFHRVESCPTLSFQQSREGFHELLARMRSYAPLAECAVLVEHTGHYAFPLLQYLFEMGISCYMLHVHEKGHRKQKSDKRDALVLARQLYNEVELGVQPDDTGRPLHPLIPPSSLALRLHALVQRNEELTRDIVRHLNRLTAICDELFPEFTQVFKNPNKQHALTYREHFPTPASLKEASMDDLRSLRIRSHPSNKQLALLQQLASESIGIKSTDRQYGLLLEQKQLIAELRLLQSYQADLEREITAIVSDSREGKILLSIPAIGPIQAATIIAHIGTIANFRSASDLKGYCGWSPRQRQTGTTIDSMKLARGGNRSLRQVFYMATMVAIGHDTEFAALYQRLLPLKGSYNPRKKKYIGAKKVFGRVAGQLITLVYALLRHDYDVLSSLKDGEETPAPVLYDRTVHHAARNGRYVPLKKPHAHDDAPLPC

SEQ ID NO: 509884 - protein, 320 aa, unidentified
MSKVVLGIDISKSQFDVALLLNSKFKHKKFDNKEKGFLQLVEWLNQYQIHELHICMESTGTYGEALATYLFDTGYKVSVVNPAQIKGFSQSELSRTKTDQADAKLIARFCYAMNPKYWAPKPPNIRVLQALVHRLESLQSMYYQENNRLDVASNTVKPSIESVMAKLSEEIAAVKEKIRNHIDQNPDLRQKQLLLDTIPGIGEATIAQILAFIGNVEDFKSAKQLAAFVGLNPKQHRSGSSVIGRTRLSKVGSSSLRKAFYMPALVAKRFNPVVKVFCDRLIGAGKPTRLVLGAAMRKLIHIIYGVLKSEKPFNATLAFK

SEQ ID NO: 509885 - protein, 361 aa, unidentified
MDATTVAVDLAKSVFQLAVADSSWRVTESHRLTRNQFEHWFANRTVSLVIMEACGSAHHWARWLNSLGIEVRLLPAAYIRAYVRRNKTDAADARALLEAARAADIDPVRVKSVEQQALQGLHRIRSLWMSTRTSRINALRGFCREFGLSIPQGARTGVEAISRVLADPRSPVPVLIRETMRLLIEEIRLLEQRVAQLEREFTGLARHSPACTQLMSVPGIGLLTATAMVAATGGDVTHFRDARHFASWFGLTPKEYSSGSARKLGRISKRGDRYLRMLLTHGARAVLRAAALARDASRPLDGLRTWATEVQRRTNHNKAACALANKLARVCYAVLRDHATYGNPQPRPNKKLERTAFAIAA

SEQ ID NO: 509886 - protein, 391 aa, unidentified
MSMYFIGIDISKYKHDCCIISAADQKVVSKVTIKNNKAGFNELLTIIHSLANPADIRIGFESTAHYALNLELFLENSLLTFMEVNPVLISEYKKSKTLRRTKTDSVDCESIARWLMTVEYKPHSKGFYHAYSLKSLTRLRDKLIRQRSFYLIKITNVLDHTFPEFKPFFNERLSKTALYLLENYGSAEKMAHMNSASYEKLRSLSRGKFSPQQFLRLKELAANTVGVNNSIFDVELNSLLSLYKSLVKEINTIEKEINKLIEEVHPHYMSVPGIGPLSAAVIYSEYGDISNFTNPGQMLAFAGIEPGINESGTESHGGKMVKRGSSQLRYTLINCCLPLIRFDMTFATYYAKKRGEGKPHRVAITHVAKKLIRVIYALERQDIDFNAQKLR

SEQ ID NO: 509887 - protein, 344 aa, unidentified
MTCYVGIDVSLRTVNICVIDDQGELVAETKLASDVQDIIAYLDELELDLASVGLEAGTLTQYLTYGLQAAGFDVVCMEARQVKGALSAMRNKTDKHDARGIAQILRSGWYSRVHVKSMESHHIRMLLSSRKAVLSKCVDLENEVRGLFKIFGIKLPPKLGHGAFDIAVRDIIETDDTLSQALLPLLDARLFLYQAFRVLDNRTRKRAHADPVCVRLMSVPGVGFVTALTFKAGVDDPHRFKRSRTVGAYFGLTARRFQSGEMDIDGHISKCGDADVRGTLYTAANALLTRSSRWSPLKAWGMKLAKTRGHRRAVIAVARKLAVILHRVWIDDTQFRWGTEGARS

SEQ ID NO: 509888 - protein, 340 aa, unidentified
MRALYAGFDLHGNSNYLGIIDGDGKRVFRKKLSNDLGWIREVLVPFEAEMVGIAVESTYNWYWLVDGLMEEGYRVHLANPSAIQQYSGMKHSDDRHDAFWLAEMLRLGILPEGYIYPKEERPVRDLLRKRGHLVRLRTSLVISLQNILSRNLGRKVNVNDVKALREDRVAPLLERSEDLALAGQVSKEAIDFLTHQIRRVEGVVERRMELREEYRYLLTLPGVGKILALTIMLETGPIGRFATVGDYVSYCRKVPSQWTSNGKRKGSGNKKNGNKYLAWAYSEASELARRFYSEPRAYYHRKMQKTNAPVAHSALAHKLARAGYYIMRDQVPFRPERLFG

SEQ ID NO: 509889 - protein, 309 aa, unidentified
MVFDVTDSDGNYYQFKNTISGFRKFVKLLGSDSYCVMEATGYYHYQLAYYLLESGIKVSVENPLSVKRFIQMKLSKIKTDKSDSKLICEYAKQVELKLWKGNSKHQTECLQMTRLLAVYTKQTTMLKNKLHGEAVLGNPSKVVVSSLKRSLKQVQKEIKTLEDKLIILVKEVHQDVLTRLKSIPGIGAKTSLMLVVLTDGFERFTSGSELCSYAGLTPVIRKSGSSVTGRPRISKIGNQKLRSLLFMCSFNACKYNKACREIYERIVAKGKSKKLALIAVCNKLLKQAFAIAKSGLVYDDSHRSTLVKN

SEQ ID NO: 509890 - protein, 334 aa, unidentified
MNYKNFIGVDISKNTFDVAILKDVPSEKVITAKFPNNYKGIVALEELIHKQKLIKEEILFCMEHTGLYCRILASYLTENNYSVWIEMPVQILRSLGIQRGKNDKIDAQRIATYAYTFKDNVRLWQPPRQEVQKISDLLSLRDRLIESRTSILVPIEELVDCGLTREADTLRKLCRRSLEALDKEIDQIEKELDKIINNDTDLKNKYTLAKSVPGIGKITALSLLYYTNGFTLFNSGKKLACYCGVAPFSNESGTSVKRKPRVSNFANKKLKKLLHMAAMSAISSNKELRAYYDRKVAEGKNKMLVINAVRNKIILRLFAVINRGTPYCSDFQLA

SEQ ID NO: 509891 - protein, 428 aa, unidentified
MNKVERTRLEEFRQLKKEIRGSEGYLIVGIDIAKDKHNAFFGTATGKTLLKRLVFENTIEGFGRLRARTEAMKVQHCLNKVVYGMEPTANYHKPLAEYLIKCGHHVVLVSGMAVNKNRELLDGWWDKHDTKDSANVADLISQAKCLYYDYPSTRLRDLRNLLSLKRRLKKQEHGTRVRIRNHLLAQYFPEFDRYIGKGCSESLEIVKWCLNPSMIAGMEYDEFVQLVAPRMKTIGQEKRLKSIWGMAIDSIGCEVGHEIDFEAKLMVEDLQQIKDSIRAVEDHIEDICLGFPEYSYLLTIPGFGPDISSKVLGAIGDPFRFDNGKQVLKLAGYDLCAHRSGKTSDSAVPVISKRGKAYLRYALYQAAFIASTSNRHFIIYYTNKLCDREREKGIKTKMKVKLAAKMLIIAWTLMKKKEPFDPEYLNTE

SEQ ID NO: 509892 - protein, 405 aa, unidentified
MPYILALDVSMGHSYSVLYKDDTCLFEDEIEHTQRGFHALLEEIQHLPERPLIVFEATGIYSRPVEKFFQDHHFSYCLLNPLEAKKQMEENTLRSWKTDKSDAHRLAQTHLKNQRQPKEVQSNFYLEMRDLARFYQEIEKKITRLRMDLHNCLQLTFPELEQFFSNRLTPYALTLIRLFPHPDFVLASTRTKIKNKLINETREKISANRAEQKADQIIHYAQCAYPAVEKDSIHCQKTIYYAELLQDLLEQKKALATQMIKKAEASPCFLLYQTFPGIGALTAALLLGELGDITRFKTHKQLNAFVGIDIRRYHSGKYTGQDRINKRGNPKARKIIFFTIRNMIRQQRAAPNHIVDYYYKLKKQPIPKKEKVATVACMNKLLKCMHAMVRAHTEYDYAYAVSVDH

SEQ ID NO: 509893 - protein, 427 aa, unidentified
MKYKQNQKILQLTDETLIVGIDIAKHKHVARAQDFRGIQFGKALTFENSYLGFRSLTSWMNSLKDQHHKHEIIIGMEPTGHYWLPLAYWLKEQEIKVVVVNPAHVKKSKELDDNSPTKNDVKDARVISRLIEDGRYSEPYLPEGIYADLREGMNLYDQLMKDLQTVQGRVHQWIDRYFPEYIKIFKDWEGKAALQVLRMGLFPDEIVKCSEEEILAKIREEVKRGVGMKKVRQIKDAARSSIGLKEGRHLARLKLNTLMTQYDLIQNEISTVWEKIKEILRQIPAVKEMAEISGIGEKTVAAFFAEIGDLQNYDHPNQIIKLAGLNLKLATSGKWKGRTVITKRGRPKLRALLFKVILPLVSKNPAFKTLHQYFITRNDNPLKKKQSLIALCCKLIRILFTIGKKQITFCPEKMLKDIPHFGLQETA

SEQ ID NO: 509894 - protein, 333 aa, unidentified
MQRINVGIDIAQEKFDACFFKGDYKSSKIKTYQNNQRGFHTFVNDFKNLFPDSEPYILFESTGNYMRDFQIFIASNAFNYMLLNARIVKKYSQFLNMQGKTDAKDSYMLAHLAASYSDEKFIIDYNFDTELLSKYNSLLNFVTNLKQKLMNFNHSIDYGSSSDIVDGILSELKLALTTAQKELKKISVELLSKVYPVTKIIDKEVTSVSGSLLLSLVPLIYDSVGHYTKSQITALVGMNPTQYQSGKYKGKDRLNMFGNKQLKRSLFMSALSASRFNPVLAAKHKELVEGGKSKKSSIIILMRKILLLVIAYILKDKRERGLLLHRLDNKVFD

SEQ ID NO: 509895 - protein, 340 aa, unidentified
MGKFIKKKWFIGIDISKNFIDAAILNEKEPGRFINHRFSNDLKGFENMKVWYVKHEVKLSSCLFCMEHTGTYGLLLFAWLSQQDADFSVEPGLQIKKSLGMTRGKNDVIDARRIATYALNKRADLKPYVLPTGIIIRMKQMLTYRDQLVRLRSGLKISLQSHMEYQKISTDDFVTKDIHGQIDHLTQSVTELEKQIMGLIESEEQLKENFNLATSVKGIGLVIAAFMLVTTHNFTGFENGRKYACYAGIAPFPNESGTSIKGKSKVSHLGNKKLKTLLSNGANSAKSWDPEIRAYYKRKIDEGKEHKAVINAISCKLVNRVFAVVKRQTPYVSIYQQNFA

SEQ ID NO: 509896 - protein, 423 aa, unidentified
MKTYLLREAQPVEPQKVRRAPRPHPVAATPAREGLGRPAHPQNSPVLFIGLDVHTDSIAVSLAPADSCEVRRYGMIGGTHDDVLRLAKKLQAAHPATDLRFCYEAGPHGYPLGRCLQTHGYDCILVAPSKIPRQPGDRVKTNRRDADQLARLHRAGELTAIYVPDPQDEAVRDLIRARYQVQKQQHRARQQLKMFLLRHNFRYAGTKAWTAAHLRYLATVKLPFPEQQFVFQEMVNVITEAGERLARYETQLPRVVAGWRWTPVVHALMSLRGVALLTAATLVAELGDLHRFSTARQLMGYLGLVPSEDSTGNERHQGGITKMGNGLARRVLIEAAWNYRTPARLSRELLKRQEGLSKEVKAIAWVAQTRLHHRFKHLTGVRHKKSPVAAAALGRELSGFVWALGQIVAPHPAKKETVNPVAA

SEQ ID NO: 509897 - protein, 349 aa, unidentified
MIVGVDVHRREHCAALIDERGVVLGTLSFPNTAAGVRKLRTWLGARDAGGAVVGIENGAGYGQLLCSSLAAAGHEVLNVPAWRTKRDRGKHGPGKSDPGDAVAVARVVLCDRERLGPALEPELVRALAVVETLRRQTVARRTDAIQRLRALWTQFDPEAEVAVGNVLAARTLKRLRRLRLGSGVLGDVATSCFHCIVAEIARLDAVVHDLDKQLAELVAQNGNPLEDVCGAGLQVAATLIAQSGDVRRFRNRAAYARYGGVAPIPCGSGASAGRHRLHRGGNRQVNAALHRIAIVQAQWDPAAQAYLERKLAEGKTPREARRALKRHLANLVYRRLRRWAEDTLPATSS

SEQ ID NO: 509898 - protein, 322 aa, unidentified
MTEYVGLDVSKEETSFCVKDLAGKVLARGTVATDPDALFEALKAHCLCPERIVLETGTLSGWLARELGRLGLAVDVIDARQAHAVMGLQHNKTDANDAALLAEIARTGFYRGVAVKSEAAQEARILLKARCHLVRQRRDTENTIRGLLATLGIRFPKGSGKLAGRVREALEDAPGLRLMIEPLLSSVAALGRELGRLDEAVTARAFAATIDDPARFAKSRTVGAYMGLTSRRWQSGEMDYSGRISKHGDAMLRSLLYEAANSLLTVVRRAHPLKDWARRIRKRTSHKKACVALARKLAVILHRMLITGEAFRWPEKEVAETA

SEQ ID NO: 509899 - protein, 448 aa, unidentified
MAQRSGLTRGDRRRNDRIEGLRAVIRADRAILAIDLGEDKQVAVLMDHDGRVLGRRVVMVKAYALGGVLSWAAGQAARYGFARVVVGCEPTGHRWRSVMQLADDAGMGFVCVQSLRVHLAREAEDYTRDKTDHKDAVVIGKLIARLEGYLPERAEPDWARLRHLGARRARLVTEATSCQQQIADLLGCCWPAVLAAAVKPLDSTTWLACLSVVVDAGADLAGLAAGGLDGFTAAARARLPRFGVTRLAHRIVRACYAALTDPAGVPAQRPGALERVGLVLADWQHTNARLCDVQSRMVGVLDALGLTRLVTSIPGLSALGAAVILAETGDLSRFASARSVVKHAGLNPAENTSASLRGQTHLSRRGRPRLRLAAWRAVWGALPHNQVLHAKYTHLTRRDHNQLTGGQARAVCAATLLRWLHAIITTRRPFDPDIAAGRTRHPATTIAA

SEQ ID NO: 509900 - protein, 451 aa, unidentified
MQKRNVKMEVVNPNAAGIDVGSRSHFAAVGQGSGDIKEFGVYNEDLQQLTKWFADNEIKTVAMESTGTYWQHLYITLQAAGFQVILCNGKFTKNIKGKKTDVKDAQWIQKLHTIGLLTGSFLPDEATEQLRTYCRHRTNLLQQAADTIRKMRKYLRLLNLRLDVVVKDIAGLRGLTIINAICKGEKSPEKLAGLKHGNCKKSEEEIAKALQSNGRKDYLFGLEQEYQLYVNFQEKIKECDIEIEKLLNEQINSDDEKRQHVIDKKVYKKVNKNTPKNLDINLLSYQYFGGVDLLAIEGVSHATVLALMSEVGNGIHKFETAKQFASWLRLAPNNRISGGKMLSSRIPKGSNRLKIALRNGANAIGNLKDTALSNFFKRIAFRKGRPAAISATARKLAVIIWNMIVKNIPYKPVTDYEFLDQKRKRKVQEMKKLIHKFDIKTDELGLQLSGL

SEQ ID NO: 509901 - protein, 339 aa, unidentified
MDLHGGMDLHGDNVYCALMDREYRTVYERRLPNELSTILESLEPYRERIAELAVESTYNWYWLVDGLLEHKYATRLANPAKMQENIGLKNANDKTDARFLAKQMVMGVLPEGYIYPKPERSVRDLLRRRARLVHTRTGEWLSLEGLVARHSGQDLGIQALNGLEDGELSKLLGNDPLVLQAAQICYRHIAFLDEEVRQIEKVAEGRVKLVDGYERLLNVPGIGRILAMTIMLETGPISRFPGPGNYASYSRAVKAVHSSNERKKGEGNSKSGNRYLAWAYVEAANFAVRYSPELRAWYQRKAARTKRVVALKALANKLAKACFFILRDRVDFDVRKLVG

SEQ ID NO: 509902 - protein, 354 aa, unidentified
MSATVIGVDPHKRSHTAVVLDDCEQIASEIRVTASGGQVEELLAWAPPGERVWAIENANGLGRLLAQQLVAKDETVVDVPAALACRARKLSGNSGRKTDEFDARAVAIAATYNRGLRRVQPDNVSAVLGLLVDRRWQLVSQRQRTICQLHALLTDMVAAGAKGHLTSKKAAALLRTIPAGDVVTLERKLLARELIDDVRRLDRRIAPARRRLTAALTAYDTTLTDIHGIGDVGAATIIGIVDDPTRFPTSGHFAAFTGTAPLQASSGDVERHRLSRRGNRQLNKVLHTAAKTQIRRGGPGRDYYQRKLAEGKSPMEALRALKRQLSDVVYRRLLADHQKRAARGGQTRTSPKAA

SEQ ID NO: 509903 - protein, 349 aa, unidentified
MLVLGIDAHKRTHTVVAVDEAGRKLGQHTTTSATTADHLELVRWADHFGADRRWAVEDCRHLSRRLERDLLTAGEAIVRVPTKMMAHARDAARTYGKSDPIDALAVARAALREPDLPAARLDDETRQVRLLVDHREDLIAERTRQINRLRWHLHELDPAWDPPERSLNRYKQLDEIIARLADFDGLVARLALELATSIRTLTVRINDLEREITVLVRTLAPTLLTRPGIGVLTAAKLLGETADITRFRNKDAYARHTGTAPLPVWSGNRTRHRLAHTGNRQLNCAIHRIAVTQSRCHPDARAFIARRIASGNTPSEARRALKRRLSDLVYRDLLHDASNAASHPSALAA

SEQ ID NO: 509904 - protein, 394 aa, unidentified
MIYAGVDIAKTDHVMGAVDERGAEMCPPMPFKNTEAGLERAVAWLEGLAGSPSDVVVGMEATGHYWMACYSFLVARGYSVAVINPMQVKAVRKLKGLDKVKNDRVDAGLIAEALRIGQYDETRLATDEVASLRSLSRYLQSLRGMVAELKTQCICLMDAHFPEYAGIFSDMFGAGSRAVLSKSPLPFELARRRADSLARDIAEASRRGGKSSGYAAKIKAAAKSSIGVRLGQEAASFQVKSLIRQIEFADSECAGVEARLRSLLDEVEPLVLTIPGVSYVTGAQIVSEIGDVSRFRNAPALVSYAGLNSSVSQSGRFDSGGGPITKHGSPYLRRALWLAANRARQYDPGLRAFYDRKRAEGKPHRVAVTAVARKLCHIVFAVMRDQVPYDPGRE

SEQ ID NO: 509905 - protein, 390 aa, unidentified
MHRAAEQPQAPTAVRTDLGAIFVSLELSRSTWLITSLSPGGGEKMSKHQVRGGDIAALLARFAELKAKALARTGKSFPLLVIQEAGLDGFWIHRALVGEGIESHVVDPASIATSRRRRRAKTDRIDGEALVRTLLAHKRGEPRVCAMVRVPTPEEEDRRRLCRELKSLIGERIRHGNRLKGLFSAQGIGDYEPRRSDRRERLDGLRTGDGRPLPEHLKALARRELDVIELLNAQIEEVKAGRDALLAAARATASPPAPVAMLLGLKGIGPGFAGALWSEGLFRHFDNRRQVAAYAGLAPTPWQSGRVDHEQGVSKAGNPRLRAVIVEMAWLWLRHQPDSALARWYRDRVRRDGGRMRKVAVVALARKLLVALWKYVTAGVVIEGAAMKSA

SEQ ID NO: 509906 - protein, 376 aa, unidentified
MEHDSTLYVGLDVHKDSITVAYALGSGEVEVLGKIGTTKADIERLCKRLQSKASRICVVYEAGPCGYGLYRQLVQKGFDCIVCAPSLIPRKPGERVKTDRRDAVKLVRSLRAGDLSAVYVPTVDDEAFRDLARAWVSAKDDLKRARQRVKAFLLSHGVRYTGRADWGPAHRRWLSAFSFDSLWQQLAFDELRRTIEDRLAQCARLEAALREAVVNWRFYPVVLALQTMRGVQFTTAVGILAELGDLSRFAHPRQLMAWLGVTPCEHSSGDKRSQGSITKNGNSYARKLLIEAAWSYQHPARVSPEIQRRHEGIPKPIVDRAWDAQVRLCRRYRRLVARGKQKNIAVVAVARELSGFIWDISRLAMSLAIPREELTA

SEQ ID NO: 509907 - protein, 362 aa, unidentified
MSTNSTSTQIRLDNPPKPRIMTDIIKQNIGIDISKKDFAVCFSQLRLDGKTVIVGSRKFNNTFKGISKFIDWVEKKRVSAISVRFTMEATGIYYEELAYFLKDNDCYVSVVLPNKTKAFMQSYNIKTKNDSVDAKLLGQMGLERDLKEWTPLSPNMRTLKKLCRERVMLLDEKTAVCNRLHAEQSSHQPNCDIVERYQKRIEFIQQQVKDVESQVRSIIKADEVLNKKVELICTIKGVGITTAATIIAETDGFVLIKNQAQLVSYAGYDVVQNQSGSSINGKTKISKKGNKYIRRALHFPALGAVRREPMFEAIFKRIFERTRIKMKGYVAVQRKLLVLIYAIFKNDLVFDPEFHLKQVTNR

SEQ ID NO: 509908 - protein, 390 aa, unidentified
MSLHVAIDVHDRTLFAVGVDPATGEECFRRRFPHTPPGTADLHGRLAPGDIAVLEATRGSQHLARHLETSGATILLLDPQQCRLVGFRGKKTDYRDCRALLSHLRSGYLPVVWRPDAPTRERRQLARERQAYNQTVTQLKNRMIALLREEGVLPPGAELWEAAGEAWLRGAPVPAATRAVLLRSWTLLRAALAVKELQTESFHAQALADPRVWRLMQLPGFGPTASVTVLGELGELSRFAEGKQVASYAGLDPRIAQSGDVCHGGRISKSGRPLLRWAMVEVAWAHVLADGPEAGLYHRLVARGKPKGVAITALARHLLVLAWKLLTRGENYQKLERWGYLRKLAILAASRPAAERKAGGGTTDIAWARERYRELTGEEPPAAAPSAKPA

SEQ ID NO: 509909 - protein, 402 aa, unidentified
MNCVGIDVSKGKSMIAVMRPFGEVVVSPFEVRHTANELSELAGLLKSLDGETRVVMESTGNYHAPVAWLLHDAGLYVSVVNAMLVHDYGNNSLRRAKTDKKDAVKLANYGLDHWLTLPRYIPEEDTRLMLKICYRQYQQYSKVQTMLKNNLISLLDTTFPDANRLFTSPPRADGSEKWVDFVATFWHCECVCGRSEKAFTTQYQKWCRKHGYNFSEDKALDIYASACRHFGVIPKTDTAKLLVEQAISQLQTTSSALAALKQEMQSLAASLPEYPVVMGMFGVGPTLGPQLLAEIGDVRRFHSKKALVAFAGIDAPPYQSGQIDVRSRSISKRGSASLRRTLFLVMSVILQCAPIDEPVYQFMDKKRSEGNPYRVYMMASANKFLRIYYASVKAYLESLEHD

SEQ ID NO: 509910 - protein, 437 aa, unidentified
MTSPCQFYSYKYQEVILLAFKIFRFNCCGLDVHKTWIYACIGITDSNGRTDYKQARFSSFSKGLKELCDWLAKYNCSEVCMESTGKYWIPVFNVLEKADISVILAHPKYTKPQKGNKTDRKDAKWICNLFMCEMIKPSFIPPADIRHLRDLVRYRFKLTCMITGEKNRAQNCLTVSNLKLDDVFSDVFGKSSRSITEYMLAHPGEIFDVAPFVDGRCKTPVDEIQAAVDGAISPEQAVKLRQCLNHIDELEKHLKEIEREILRLSDKYEAALDLIRTVPGFGKRPMTAIQILSEIGGDMSVFPTAKHLVSWAGCCPRNDQSNKKIKSTRISRAGNYIKPILVQIANGLLRSKKHPEITDRYKRIKSHRGHKKAIIAICRMLLTAIWHILSDLKPYTPEGYLEPRPVKESKVLTKSQALHLLKQRGYIIKDDAEPALN

SEQ ID NO: 509911 - protein, 353 aa, unidentified
MIVIGIDPHKSTHTATALDSATNTDLGSIRIDASVIEYKRLIVWAKAWPDRRWAIENADGLGHHLALWLLAIGEVVHDIPTTATARVRELSRGGRRKNDRIDAAAAASVAALHGDARQVYPETVNDALALLDERRVNLSSSRTRTVNQLHALLRELMAGGAPTSLTPKKAAAAIRGFRARTAPDKIRLELAKELITDFARFDEQLAANSRKITALLDEHGTHLRNIDGVGPVLAARILGRSGRASRFPTAAAYASYTGTAPVQIASADSSHNRLSRFGDRQLNSALYTIAMIQIRMPSSTGRAFYDKKIAEGKTPRTAARAPKRHLATHLWRVMLADEKRGIRAISRESLTAA

SEQ ID NO: 509912 - protein, 355 aa, unidentified
MTRTVYCGVDFHARMQTIAYCDSANGEIQLAQLDHRKDDVRGFYSQFTGQVIVGLETGGYSSWFEAMLEELGHTVWIGHANEIRRRANWRQKNDRRDAELVLEIMLKGDFPRIHCHSRESVEVLRMLRYRARLIKMRTMISNSLQAIAISSGLSERSRMLSRARQQQLKSARMTPAIKHQTEDLVTLLVPINERISRVDKWLKEQASIDDRVKLLMSHPGVGVLTALGVVHTLEPFNRFSKQRSVVAYVGLEPMERSSGERKRYIGISKAGSRLLRFLMGEAAHVAVRFDPELKQFYERVGKRRGKSKATIAVARKLLIRCWIMLRDNIDYAEFRSRGVEARLARNIDRPSVPVE

SEQ ID NO: 509913 - protein, 352 aa, unidentified
MIVLGADTHKSSHTIAAVDAATGQLLGEKTIAVGARGFGALVLWARSLAGERAWALEDCRHVSGALERFLIGRGERVVRVSTRLMATSRRSGRERGKSDSIDSIAVARAALREGLDELPTAQLDGPELDLRLLVDHRERLVRQRVGLNNTLQWHLHDLWPELVLPGGALFSRKWSSRIGRRLARAEQTMRVRIARDELRRQRELTQAIKVLEVEIAALVAQVAPQLLTEPGFGPLTAAKLVGEIAGADRFASDAKLARAAGLAPIPVSSGRTHRHRLDRGGNRQVNAAIHRVAVTRARCHPETRDYVARKTAEGKTHREAIRCLKRHLARRVWQLLRAPHPGQGTLPSPSTS

SEQ ID NO: 509914 - protein, 411 aa, unidentified
METIVERPAGLDVHKAQVTACVRLPGEGRAREAHFAEFATTVAGLLTLRDWLAAHRVTQVTMEATGVYWKPVWAILEDDFELLLVNARHVKNVPGRKTDMSDSAWLCQLAEAGLLRASFVPPKPIRALRNLTRYRKTQIQERAREANRLHKALEDTGIKLDCVASDILGVSGRKMLDALVAGTTDPEVLADLAKGRLRAKLPALREALQGRFDRMHAMWIGSILAHIDFLDEQISGLTEMIAEQIVPFEKAVDLLCTIPGVQRRTAETIIAEIGVDMSIFPSAKELASWAGMCPGNDQSAGKRRSGKTRKGSKWLDWGLEEAALAATRSKNTYLAAQYARLRPRRGHKKALGAVKHSIIVACWHMLSTGEIYNDLGGDYFQRRDPAKTTKRLVAQLERLGHTVTLLEANAA

SEQ ID NO: 509915 - protein, 280 aa, unidentified
MTYVGIDVSKATFVVAYSSAKSSETKTFKNTSKGIREFIRTISPKENHCVLEATGNYSMLLVYLLSKAGVTVSMENPLKIKNFARVMLSVVKTDVIDARLIALYGERMQPAPFKLRSDSLLLLKQKRTVLRQLKKQLTANRNLEGSLKVLPFIDSKCKKVLEKTIKFLEKQIEEMEEELTSLAEIEYKKQMNLLTSIKGIGATLAAALIIATGGFTYFDNAKQLTRYLGLSPTYQQSGTSVNVKGHINRNGDAYLRSQLYIGAMASLRCNTECKVIISLK

SEQ ID NO: 509916 - protein, 341 aa, unidentified
MEQATTIGLDIAKYVFQVHGADGAGHVLFRKRITRAKLLGFLASQTRCIVAMEACAGAHYWAREIAKLGHHVRLIAPAYVKPFTRRQKNDAADAEAICEAAQRPSMRFVPVKTEEQQANGIVFRARDLLVRQRTQCVNALRGHLMEYGYVFPKGITHVETLVALVEDLQSSLPDSVRVILKLLVDTFTALEAQITALDAEINQRSKSDPTARRLMTIPGVGPIASTAITALVPAAEGFPAGRDFAAWLGLTPLQKSTGGKQKLGAVSKRGERTIRRLLIIGASAVVQQASRRGAPKGSWLAQMLARKPKMLVTVALANKMARIIWALLVKGGTYRTPIAAA

SEQ ID NO: 509917 - protein, 474 aa, unidentified
MARTGSRPASPPVPGDAGAEVTDEPVQVISRAAAIDVAKGSGMVCLRLPHESRAGRRTQKVWEVTAIFASVVALMDHLVCQGVERLVLESASDYWRIWYYLAEAAGLEVWLAGARDVKHLPGRSKTDRLDCVWLCKLNEWGMPRRSFVPPEPVRDLRALTRLRANLTHDRVRHQNRIEKILEDALLKVSSVISDLMGGSSRRFLQALADAERSPAALAALGDYRLHASKAELQEALTGRFRDIHGFEISMLLELIDDLSAKITELDERIEAQLENVPGLGGVCTSCGQPGPDGPCTGCGEPVLGVIARLDEITGIGRGAAQVIVAELGTDMTQFPTPGHAASWAKLTPRAIQSGATSKAGRTGKGNPYLRGATGVAVMTAARTETFLGARYRRHARRRGKQKAIVAGCRTIIEIAWRVIADPGFRYIELGPDYHDQLDPRRKTRDKIRQLEKLNPGMTVTLTPRPEPGGQAPAA

SEQ ID NO: 509918 - protein, 339 aa, unidentified
MEDTIYDHYIAIDWSIENMAIARMTKKSNKIAAIDVPSDIVELQAYLKNLKGTKILVIEETTTSQWLYTELKEYVERIFICDPNRNKLLNEGPKTDKIDATKLVRLLKAGLMKEVYHSTDKFLYLRRVVSGYEDLVKAGVRLKNQRYALLRACGKRGKEKRNLNIGSHGEQFVLECLDRQIEAYEEEKEGYEKEFIRLARKYPEIKHQKGLPGIGVINAVKIVARVVSPYRFADKGHYLSYTGLIKLDKISGGRSYGKKNPRFSRQLKSVYKSGILAAIGGNNPINDYYEYLIQEKGYSEHNARHKACRRLAILSLGVLKSGKKYRPYRRDQVKGSKGL

SEQ ID NO: 509919 - protein, 346 aa, unidentified
MKTAIKILKYAVGIDISKADFKACLSKIDSSQQVKVVARRTFCNTFTGFNQLHQWITKHRKDKGIPLVLVLEATGVYYENLAFFLQDKQYALSVVLPNRAKKYLAYLGLKSKTDKIDAQGLAQMAAQQQLRLWQPATKFYYELRGLTRHYQSLQEQKTAAGNRLEALTHSANSSNFVLKSLKLQIKRLKAEIIKTNQAIKDHIQSDEKNYEKIIGICKLKGLAILSVSTVLAETFGFELFENYKQVISYSGYDVVENQSGKRSGKTKISKKGNSRIRRILHMPAMVSIKYENTAFCNLYNRTYEKHGIKMKSLVAVQKKLLITIYAMWKNNSAYDNQYYLANIQRK

SEQ ID NO: 509920 - protein, 387 aa, unidentified
MPQPNDLSRSLVALDQDSTIIAVVEMSQSSWLVGGVLPGIERQPCKKLEPSAERLLGLLHRWRDEAVKAGSHITRIALAFEAGRDGFWLARWLRARGVEAHVIHPSSVAVSREHRRAKTDRLDTELLKRGFLGWLRGERGHCTMARVPTIAEEDAKRPNRERECLVGERTRIVNRMKGTLARLGIRNFKPTLRKSAERLATLHTPEGSPLPPNVLAELQRDMARLGFLICQIREIEEARQKRLEQEPETGPHAMVRLLARVVGVGIETADMLVHEVLSRPMRDRKAVARYAGLTGAPDESGAKRREQGLAKAGNARVRRGMIQLAWRFLLFQKQSALARWYQARTADARAGARKTMIVALARKLLIALWRFVTTGETLEGVVLRPAG

SEQ ID NO: 509921 - protein, 400 aa, unidentified
MRTVFGIDVSKASSEVAILVNGERVHSYTMPNDIIGFSHLLKDLKTVSNPEIIFEATGVYSRRLQAFLEENSYDYTRLNPLEAKKQLDSLRVRKTDKIDAEKLASSQFVLNRKPTYVQEEVYQNLHDLSRFYQNLTEDIVRTKNRLHKVLQVAFPEIENILSTPTGEQYWNLVSIFPTKHWVLELSEVELKETIRNSTSKRISENRVGNLAEKLVGLAKQSYSAISKTSPMIEEVKYNAQELIRLTNRREQVLQQLIALAEPLPEYEILLSIPGIAETTATNIIGELGDIRRFKSANQINAFIGIDLKHYESGDFLGQEHITKRGNPYARKIMYKCIHNIASASHTNPCHIADFYEKRKRQSQTTSTKPHTIASIHRLIRTMYYLIMHNKLYDYTLAKSH

SEQ ID NO: 509922 - protein, 379 aa, unidentified
MSGNGMARPCSYPEDVESHEESAQRSTSHVTSTNAVCHHNDRHRYRQEHIPFGGLDQRGSIILQLKTSREQLERRVANVPRCLIGMEACSGAHHIGRQLVALGHDVRLIPAQYVKPFLKGHKNDYRDAEAIAEAVQRPTMHFVSIKTPGQMDLLALHRVRSRLVSQRTGVINQIRAFLIERGITVRQGPAPLRKALPEILSSTSGALSPRMICLIVGLTEDWRRLDNRVATVSAEIEALAEQDGSCQRLMTVPGIGPVISSAVVAGIGDGSGFRQGRDFGAWLGLVPKQESTGDRTILGKISKRGNKYLRTLFVQAAHVILARRPSAAMRGLWPWIERASKRLHRNMLAIALANKLARIAWAVLARGREYQPMLMPRAA

SEQ ID NO: 509923 - protein, 353 aa, unidentified
MEYGAIDLHKKESQVRIMTEGGEVIDRRIETTRDRLTTLFWGRPHARILIEASTESEWVAQHLETLGHEVVVADPNYTLMYGHRSRRVKTDRRDVAALAEACRHGIYRSAHRRSAQQRTVQWQLNIRRELVATRTRAISVVRAITRHGGYRVAGGTPEKFLQRVTDLNLPLTLEETLSPVRKVMKVLDQELAQADALFEALIADDPVVKRLTTCPSIGAITAAAFVAALDDVGRFAGRRGAAQVTSYLGLVPREYSSGEQQQRGRVMRSAHPYVQSLLVQAAWRVRRSSDPRVAALRSWEQAIERRRGKKIAIVALARRLARILYAMWREGTDYRPATIRTHQPVAGTQPAPV

SEQ ID NO: 509924 - protein, 345 aa, unidentified
MSMVRMIVGGVDTHADTHVAAAVDANGGVLGIESFPADHAGFEALLGWLMSHGEIDRVGVEGTGSWGVGLARFLYNHEVTVIEVDRLNRQDRRKFGKSDPTDALSAARAALSGSASVIPKTRNGPVEQIRILLVARRSARSQRIETLNQLRHLIYTGPETVRSRFKDRYKTGLVTEVAKLRPRKGSDPVLYTTQVTMRGLARRIQMLNAEIKSLDGMLVELVTNTAPSLVALFGVGTDTAATLLVAAGDNPDRLRSERSWAHLCGVSPIPAGSGKTSGRHRLNRGGNRQANAALYRIVLTRMSHEERTKTYVARRRSEGKNTAEIMRCLKRYVARETFKHLPRTA

SEQ ID NO: 509925 - protein, 361 aa, unidentified
MKKPAHHLIAEVPRKRAKVELTIGIDLGDVWSHYCTLNQQGEVIDRGRFRTTPKAIDKWFTDVPHARVAMEAGVHSIWISEQLEQLGHEVIVANVRELRAISHSDRKSDDVDAEKLARYARLDPEILRPISHRTVQQQEALTLIRARELLVRLRTAAVNAVRGLTKACGHRMPASSTKCFAQRGQAAMPPGLKLALGPILTQIAEMTLKIKQYDREIQRMTQTEYAETQPMMTIHGVGHITALTFVLTLGDKTRFCRSRDVGCYLGLRPKRSQSGERDPQLVITKAGNAYLRSLLIECANHILRPHGRDSALRQWGLHLAARGGKQAKNKSVVAVARKLAVLLHHLWTTQEPYIPFYQQAA

SEQ ID NO: 509926 - protein, 413 aa, unidentified
MTEEIFGWFVGVDWGSEKQQVCILDQHGTIVGERNFPHGGAGLAELGDWLLSVAGTATAVAVGIEVPHGPVVDSLIDRGFVVHAINPKQLDRLRDRFSVAGAKDDRRDGYVLADSVRTDRRLFRGLHVADPRLVALRAWSRLAEELTEERVRLGNRVHHELWRYYPQMTKLTDDIAASWFLELWTIAPTPAKARQLRKATVGQLLKQHRIRRIDAETVIRTLREPAIKVADGVAEAASVHMRSLIARLHVVNRELREAERQLDKICAEIGAAEAASGDGLQRQDVMILKSMPGIGRINLAALLSEGSGPLSRRDYPALRTLCGAAPVTRRSGKSQVVIMRYAAHVRLRNTVYHWARVASQHDPTSKSRYAALRQRGHSHGRALRGVADRLLGLACVLLQRQTPFDPQYGHPAT

SEQ ID NO: 509927 - protein, 343 aa, unidentified
MDHFAGLDVSVKETSICIVDDTGRIVREVKVASEPEALLQVLGNPIYRFKRIGLEAGPLSQWLFSALAEAGLPVICVETRHMRAVLQAQINKTDRNDARGMAQMMRAGLYRPVHVKTLRSQKLRMLLTHRKLLQSKAIAIDNDLRGTLRNFGLKVGMVGTVKFEARIKELVENLPDLAVLVEPLLMVRRVLREQFSILHRRLLAIVRDDEVCRRLMTVPGVGPVVALTYRATVDVPARFRNSKAVGAAFGLTPSKYQSGQINRTGAISKCGDEMMRVMLYEAAQIMLVRLAKWSWLKAWAMKIARHRGMKKAIVALARRLAVIMHRIWVDGTEFQWTREVTAA

SEQ ID NO: 509928 - protein, 407 aa, unidentified
MKVVYRCCCGIDVHKKLIVACLDKGGKQELREFGTTTGEIRVLADWLLADNCEMIAMESTGVYWKPLYNLFELMGLSAIIVNASHMKALPGRKTDVKDAEWIADLLRHGLLKGSFIPDREQRELREISRYRKSLIEERSREVNRLQKILEGANIKLDSVVTNINGKSARSLLDVIIANETPNTEEVGQIVHGRLLPKLDQLMQSIDGITTPLQRKLLAQIVDHIDDMTKRIGNIDELIKGYMEQYETAIAAIDDLPGIAQRSAEVIIAEIGTDMERFPSAAHLCSWAGVSPGNHQSAGKRGSGRTTKGNKTLKSILTQCAKVASHSKASYFSAQYQRIAARRGKNRATIAVAHSMLIAIYHVLKHGVAFHDLGSDYYDSFNREHKIKGYLKRLQALGWTPDLVAITA

SEQ ID NO: 509929 - protein, 440 aa, unidentified
MINKDAAGIDIGSGEHWVAVPEDRDEEPVRCFGCFTADLQAMARWLKECGVTTVAMESTGVYWIPCYQILEEHGFEVRLVNARHVKNVPGRKSDVSDCQWLQRLHTYGLLSGSFRPDDQICVLRSYWRHRSNLVRYASDHIQHMQKALTQMNLHLHKVLSNVTGVTGLNIIRAIISGERDPEKLALMRERGVKNTPEAIAKALEGDYRQEHLFALKQAVELYDFYHRQIEACDREIERYLHTFEAKVDPVQNPLPKQKRKKEMRYQSFVDLRTELYRVSGIDFTQIPGLDVVTVQTILSEIGLDPGKFLTEKRFVSWLGLCPNNRITGGQVKSTKTRKTANRAANAFRMAAQSVANSNTGLGGFYRRIRARLGAPKAITATAHKLARIFYRMWTTGQSYTDLGSDYYENRYKERVLRNITRRARELGYDAVLQPIEQRVA

SEQ ID NO: 509930 - protein, 321 aa, unidentified
MNKYNTIYGIDISKDVFDVVDSNKVYCQFENTPKGFKTFLKTLASSSLVVMEATGYYHYRLAQYLFKHGVAASVVNPLSVKRFIQMKLAKVKTDKSDAKAICDYALANEVPLYNALTDVQSECLQLFRLLDSYLKKRTATKNKLHGEETLGFPSKFVHQSLKRDLKHLDKEIGALEDRLLELVKQDQQYQLTLLKGIPGLGTKTALFLIVITDGFQKFETAGQLCSYVGITPTIRQSGSSVRGRSKISKVGNKKLRNLLFLCAFSACKHNKACRDIYERIVAKGKSKKLALIAVANKLLKQAFAIAKSGLPYDENFVSKLA

SEQ ID NO: 509931 - protein, 322 aa, unidentified
MKMQSVCGIDVSKDRLDIMVLPEQQCFSVRNDAAGWVELVERLRGFSISAIGLEASGGYERGAMRALLAAGMPARQVNPFKLRQFARASGVLAKNDPLDARMIASFVAIMPTQPAQLRAPAIERLAEMLAVRRQLSAEKVAAENASRLLEDPMLQRLSRRRIRRLAADIEMLDRHLAEIVGTDAALAHRYRLLTSMPGVGLVLACTLIALLPELGRMSRKQVAALVGVAPYAFESGKFKGRRCIWGGRAPVRNVLYMGAMSASNWNPVLKAFHDRLKAAGKLPKVVIVAIMRKMITALNAMVRDDVVWADHLSGRHSVPTAR

SEQ ID NO: 509932 - protein, 427 aa, unidentified
MKEAPVAGFDISKSSSDICVLAPGNEVVWRSKMAHTSQSMAQVARRLTDIGVQYGAAPVIIMEATGHYHRIVLQFMKNEGFDVVVVNPIQSGALKNISIRKVKNDRVDAYRIALLYRLKAAKRTNLPTDLIADLRSLCRQHYDLTQDLIAYRSRLHAQLDQCFPGFAGVFSSLVNLSALSVLERFPLPSLILSASDQDIEGAILSVVTRKSAYLQKKIHALRQAARNALPIAISTPSCAVIMKNLVSMLQILKKSIREVDLQIRALIRSDAGLRTDAELPKSIPGIADYAAAVILSEIGSVSSFQSAKQLVAFCGLDPTERQSGQFTGTRSKISKRGSKYLRCILNMSAHISIQPGCKGTYANPVLAEYFQRKRQSKPYKSALCAVMHKIVNIIFAVLRDQKPFELRSPELHCQIMRDRAAKLSLAA

SEQ ID NO: 509933 - protein, 402 aa, unidentified
MLHDHLKHPTAIRVQFGAIFVSLELSRKTWLITSLSPGKGEKMSKHSVTAGDIAGLLARFSELQRKAAVRTGKSFHLIVIQEAGLDGFWIHRVLQQEGIESHVVDPASIAVPRRRRRAKTDKIDGEALLRALLAYKRGEPRVCSMVVAPSPEDEDRRRLCRERDTLTAERVRHVNRIKGLLFAQGIADYAPLLRNRRKRLDELCTGDGRPLPQYVKAQISRELDRLELVLEQIKVVEKERDRILLSPAPVVLNTGPEAACDQPRGASGVRMLTALRGFAADGATKLWSEGLSRHFSNRRQIAAYAGLAPTPWQSGGIAHEQGMSKAGNPRLRTTMVQIAWLWLRHQPQSALARWYFARVGVGATKARKKVAITALARKLLVALWKYVTAGELIEGAIMKPVA

SEQ ID NO: 509934 - protein, 355 aa, unidentified
MRILSLDLSKYKTVACDYEAETGRHQFATVLTTHKGLHDLIVDRAPDRVVIEICSIAGWVCDLVRSLGIEMQVASTNDERWHWRKVKTKNDRRDGLKLAQLSARNELDLVHVPQSEMRQWRALIAYRQHLVQRRTKIKNHVRELLLREGQLLPRHRSAWTQEGIANLETMARPFAEVSMDELWRGELGVELAQFKAVQAQLTEVVAKLDALGAANHNVRLLQTASGVGPRLAEAVVTMFDDPRRFRRGASVSAYIGMVPKQWDSGETERLGKITRHGNRLVRSLLVEVAWCALRHNPWARETYQRISGGKKSRKKIAIVAVGRKLLVRCWAMLRDQTPWHWEGQSAVVTPPAPIA

SEQ ID NO: 509935 - protein, 392 aa, unidentified
MNPCALGWDNHRKFSKVSVMEQTPDGEIRPVERARLEHHDKDAMRAWLSHLDPEIPVALEATFGWPWVADLLEELGHPVHLAHPPVIRALAKHEAKTDRCDSDRLGKFQLRGILPESYLAPPEVRQRRERTRYRMALSALRTAVKNRAQAVLHRHGVLHDFSDLFGKAGRRFLNDLALPEGSRQALDGCLQLLDSLTLLIEEVEQWMVENLAEDDIVRLLMTIPGVGLILAHVIRAEIGEIQRFPTFRHLASYAGLAPVSDDTAGREGPRHCSSACNHVLRWALIEAVHGVQRTKGPHGFRLRQLYARLCGSGRPKGRKSSAVVAVAHELSKVVHVVWTKRVPYTDTPPPRPGSRQGRRESQEIPTAKTTLRSDQPRHPMVRRRATVGQTRV

SEQ ID NO: 509936 - protein, 342 aa, unidentified
MYYIGLDVHKKTISYCVKDAAGRVHQEGKIGSTRRELDAWVKTLPQPRMIAMEATLFTGWIYHHLLPHAEKVKVAHPLMLRAIAAAKKKNDRIDASKIADCLRCDFLPECHMSSQAIRERRRTLRYRNLLVKQMVQMKNRVACLLMEDGVSYDKQRLHRVGYFSELLTSGEINESIRPLLQLGREHIQRSQRLEQALISSLESDPLLSERLLRLKTIPGVGPITALTWILEIGDPTRFQSVKQVISYCGLCSAEKSSADKVMRTPISKQRNKHLQTILVEAAKLAPRYSSDLALVRDREMQKGNRNRATLAVARKLVAYMLAVERRQQDFIVLERMADKAVA

SEQ ID NO: 509937 - protein, 396 aa, unidentified
MIFVGIDVASTKHDCAILDSHGRVVCEFMIGNDIIGFEMLASRLQAVCNESELKLSDIQIGLESTGHYSINLVKYLHEKRLSVKVFNPLSVARLKKASTLRRTKTDKTDARFLAIMLFNDDSKPYEQSVAQMDELKTLTRHRGRLVKESSEHKLHITRLITIVFPEFASVFSSTSGATARAILLEFPSAHDIAKADIRRLTNTISKASKNRFGRDKADEIRTLAKKSIGTSDRALCFELKQHLAAIIFIKEQISELESFIKEIMIELDSPITTIPGIGYTLGAIIISEIGSVENFATPAKLLAYAGLDPSTYQSGKFTATLTPMVKHGSTYLRYALMMAATTVRRNEPTFDAYFNKKQAEGKHYFVAASHTAKKLVRVIFHLLKYNETYTPQDIAS

SEQ ID NO: 509938 - protein, 393 aa, unidentified
MANEAGAVGKVALASRARIHDTRRQVPTRWEPECLVRGLICPYNLRRFVLMHNGENSPADTITVAGADVSQAWIDVACQNPGQGAVAESRFDNTPAGHSRLIGWLRKEGVPARITIEASGIYSLDLALALHEAEGIELMVAHPKALKNYRSARGRRAKTDRVDARLICDFCRRMPFQAWTPPSKEAFELRALARRLQTLIEERVREKARLHAATTSRHASSYVANDIEVNIRHLERRIERIEAEALALIGGHDALAQACEHLRSVKGIGDRSAVKLLGELVMMPKDLTVRQWVAFAGLDVRHHESGTSVSKPGRISKQGNARLRKALYMPAQVAIQNEPNVRAFYDKLLKRGKKPMVAIVAVMRKLLHSIYGMLKHDQDFDGRKFYRIPVSAA

SEQ ID NO: 509939 - protein, 347 aa, unidentified
MDKVSTIGLDIAKSVFQVHGVDAAGAVLIRKRISRAKVLEYFGELPPCLVGIEACPSAHHWGRELQGLGHTVRLIPPSYVKAYLKRGKNDANDAAAICEAVTRPSMRFVPIKTKEQQTALMLHRARQLLVRQRTMLSNALRGHLAELGIVSAKGRNGTAELLRIIADGRVSPAVCGILKVLTRQYGAVGTEIASIDKSIMALHRGCEASQRLAEIPGIGPIGATALVAEIGDWKTFSSGRSFAAWIGLVPKQHTTGGKDRLGSITKQGNRYLRWLLVVGAMAVIRYARKHGTQKRPWLGRLMERRPTKVAAVALANKIARMALGHHGSGREIQGAETVAGGMTRAGR

SEQ ID NO: 509940 - protein, 374 aa, unidentified
MATIARLGIDTSKSLFQLHGVNEREEAVLRKQVRRGQFLGFIAKLAPTEIGLEACGASHHWARQLQALGHVAVLLPPQHVKPYVGLNKNDKIDAAAICEAMSRPKIRQRFVAVKSAEQSAAQMLLGTRDGLLRRRTQLSNTIRGHAAEFGLVTPKGLAHIQPLLDRIAADQTVPALARELFATLGQEFTELRPRIAQLDRKLKTFQRSNELCRRLLEVPTIGPVIASSMVVKISNPAAFRSARRCAAWLGLTPKDHSTAGKMRHGGITRAGDEGLRAALVSGATAYIQQVKRGRTRPSPWLAQLLKRKPEKLAAVALANKTARIAWKLMTSGQRYDRVRAEAREGLGAAQQGGSAPSPSLHPHSADHASAMTAA

SEQ ID NO: 509941 - protein, 320 aa, unidentified
MTILTSQTVVGIDVAKAEIVVYRSDLQTADTIKNDRVALKRWLKTLPAQSAIAIEATNIYHLDTIDLAHAMGHQVYVVDAYRVSNYRRGIGQRAKNDPCDARLLARYLTNEQHELRLWCPPPKAYTTLKSLLHRRATLVKNHAALKLSWTDEPLLKKALAAQQKAFVQAIKTIQKLLRKVSKESGIEANIVRCKAIEGVGELVATGLATSFMRGNFANSDAFIAFIGMDLRVDDSGKKNGARHLTKKGDPEIRRLAHIAAMTASRSSRWKPFYESYLARGFSKTQALVVLARKLCRVAFALMKNQGEYQSKPMSQGCPAT

SEQ ID NO: 509942 - protein, 406 aa, unidentified
MDGPIITVDVSKGNCHYQPWLTAGHSLRKPKVLNDTKDGFEALSETIEMVKEKSEADTVPVVFEATGVYHRCLQKYLDDIGNPYIVVPPLLSAAYRKTNLHGNKTDNADCAHIAKVYYQEEHMQCHQNESDTYARLRAKNRMYESELKILRQRKCTFRAMLDVIYPRMDKCFKGHASLYDSVPMEVLKKYPHPSLLLRHREETIVKAIQKPAGHKKGFTENIVHKMYQCAEKCYSGVDADSVEVQQFPQMINELMEQMELCNTYLEELIEDASKLPSFAILLSIPGIGRNIAARIIAEIGDVTRFRNARGIVAYAGLNPKINQSGEKDGTHLAISKKGNRHLRCLLYLAVTCNYRLKKGDSIYQFNQKKRQQATSPLKPKAANIAAADKLLVVIYSLMKNGSTFRS

SEQ ID NO: 509943 - protein, 431 aa, unidentified
MGNRENRRLDEITVGTLIMGVDVAKTDQWVRFVDDRGREIGKAVSIRNDRRGFETIVAEIRLRRNNKLLRQPITQVIVGMEPTGHYWKPLANYLMYKGFRVVGINPFHTKKAKELDDNSPTKSDKKDALTIARLVKDGRFFDPYLPQDVYAELRGLTNARVGIIKRGNAVKNNITAILDEYFPELWTVFKKPLKSKAARQVLRACPFPTMILALGEVGVLTEIKKAVKRSPGIKRVLRLMEAARQSIGVAYGQQAAKLRLGWLLDELEQNERQLAQVEAVMQEMLETTGYAEQILSVKGIGIVTAASFLGEVGDPLRFQNARQIANYAGYNLVEDSSGKNKSGTCISKRGRSQLRSVLYLMAYTAVGTNPEMKRLYHHLTTRKVNPLKKKQALVVVSKKIITVIFTLLKKQQSYHPELVFGAARQEMLLAA

SEQ ID NO: 509944 - protein, 341 aa, unidentified
MKNLFIGVDFSKEKVDVAILFADGLVETAARVFNEFKTTVSGYRQLVKWVEQNSCGIDSSLWLFCGENTGDYSKGLCNFLYGKGYDMWLENAKSIKDASGLRRLKSDRADASMIAEYAMRNYDKAVMYEPLSESLTQLRELFLYRQMIVRHRCSFQVRRGEKRLTMEKSPVKTMISQSGRHIVSELNKEIEKIDKRIANLIKSDEELTKVFTIVTSVPGIGTQNAVCLMVYTDNFRRFNYDSRKIACYYGLAPFGKDSGTSVHSDPHVHYMANRQIKAMLTQAALAAVNFNPIMARYYMRLVERGKKKQVALNNVKNKLVHLVTAMVRNRQTFTPEYKISA

SEQ ID NO: 509945 - protein, 344 aa, unidentified
MEHFAGLDVSVKETSVCIVDETGKIVREVKVASEPDALLAVLKNPAYRFKRIGLEAGPLSQWLFSSLAEAGLPVICVETRHMRAVLKAQINKTDRNDARGIAQMMRVGLYRPVHVKTLRSQKLRMLLTHRQLLLSKAIALENELRGTLRNFGLKVGMVGKVRFEARIRKLVENFPDLAVLVEPMLIVRRVLREQVVILHRRLLSIVRDDEVCQRLMTTPGVGPVVSLTYRATVDIPARFRKSKSVGAVFGLTCAKYQSGEVDWDGRISRCGDEMMRTMLYEAAQAMMRSKKWSWLKAWAMQIARRRGMKKAIVALARRLAVIMHRIWVDGTEFRWAREQAIAPA

SEQ ID NO: 509946 - protein, 353 aa, unidentified
MSIISPCLGVDVAAKDVQVCFMVKTDTGHCKIKGSRSFANTVKGISSLEQWLKKRHQDGLILSVVMEATGVYYENLAYTLYESGHRIHVLLPNRVKGYMKFLNLKSKTDKIEAKALAQLGLNQQLPNWQPATPQMYALKRVCREKTMLTDEKTMISNRLHAEQSCKDPQKTIIKRLKQRLKLVDKQIDEVESQVRKMCTQDEQLNQRIENITTIKGVGFMTAITLIAETNGFELITHKSQLVSYAGYDVIERQSGSSVKGKTRISKKGNSHIRRCLHFPALSAVKYNDEFKALFTRVFDRTKIKMKGYVAVQRKLLVLVYTLYKKNQPYDPKYAQKQAQEQNCRQDTMPAYAG

SEQ ID NO: 509947 - protein, 338 aa, unidentified
MSVYAAIDLHSNNSVLAVLDETDRVLRQRRLPNELPAILRELEPFHEELAGVVVESTYNWYWLVDGLMAHGYRVHLAHTSAVPQYAGLKHGDDESDARHLAHLLRLGILPEGYIYPRAQRSVRDLLRRRFGLVRTATRLLLSVQSSWARHTGKSLSANAFRQLDDLSIEAALPDPIVRLSVLTQIKVWQGIQEQVRQMEKWVSESAACRRELIALRSIPGVGVTLSTTIALETGDVTRFAAVGDYASYCRMVKSERLSNGKRKGAGNRKSGNKYLAWAYIEAATFTLRFSPEIKRWYTRKCGKRHKVSALKAVAHKLARVCFYLLRDGGQFDVRRAFG

SEQ ID NO: 509948 - protein, 376 aa, unidentified
MGQRPFIPQEYDVFGGLDVDKKSISVTFINHQQGFIRSLHMPYSVEHLVKHVRKHFAEQKVAFAYEAGPTGYGLYDGLSAQGYNCLVAAPSMIPRALGQRVKTNRLDSRGLSENLRGGQLKSIHVPSPIYRELRHLTQLRDTLVSEGAGTKQRIKSLLLFEGIPFPLAPAGSQWSLKVKAQLRKLQCSKSVRFKLDQLLDRVEFSEKQVVKVSKEIRQFCHNDPELSQCIEYMMSVCGIGWIVASQLLARIGDWRELQNVRQLAGFLGLVPSERSTGEKTHRGAITHTGDGRLRSKLIQASWSAIRQDGELREFFRSVCRRHPRGVGARVAIVAVARKLSTRISVVLMQQRPYVVRQKIHSAPLIQEETSPQGTTR

SEQ ID NO: 509949 - protein, 391 aa, unidentified
MIYVGIDVAKDKHDCFITNSDGEVLFKAFSIANNRNGFNDLYQKIESVMEDVTKVKVGLEATGHYSYNLLGYLIDKGLPTYVINPLHTNLYRKSLSLRQTKTDKVDARTIASMLMSDVNLKSYSDTSYHNEELKSLTRYRFDKVKERAKLKSSVSRLICILFPELEKLVPTLHMASVYALLSEFPGAKQVANAHLTRLTNLLSEASKGRYSKDTAITFRDAARTSIGSNMPAKSLELKHTIKLIKELDSEIDEIENEIKIIMDEINSPILSIPGINYRMGAMIIAEIGDFSRFDSPDKILAYAGFSPSTYQSGHLYGAYAHMEKRGSRYLRYALYNAAKYVCHWDPTFTAYLAKKRAEGKHYNVAISHAVKKLIRVIYHLEKTNQQYIKAS

SEQ ID NO: 509950 - protein, 409 aa, unidentified
MQVMHPRCAGLDLGKDVLAAAVRVQDADGVKRECRTYGTTSHWLGELSAWLHSRGVTHVVMEATGSYWKSVWHALESQFELTLANPVQIRNVPGRKSDVNDATWMADLLAHGLIRGSFVPSAEIGALRELTRARKQFGREIARHTLRIQKILDIANLKVTGTISQILGVSGRAILKALIAGETDPEKLADLAHPRVRVSRARLVESLRGHLTAQQRQLLKMHMTLIEALEASIEQLDRDIAKAVTPFRQTVQRLKGVPGLSDINVPAMLGEIGVDMTRFKTHRHLVSWARLCPRLDESAGKIHSTRTMKGAAWIKTLMIQAAWCAIRVKDSYPRAQFLRLRARRGTKKAIVAVAASLLTAVYYMVRDETPYKDLGIGYFEKHDRSRVARRFVARLQQLGFNVHLTEAVA

SEQ ID NO: 509951 - protein, 312 aa, unidentified
MKIICGVDVSKARLDACIEPGAIFASFDNNPAGIAKLAAFCRQHAAGLVVMEATGGYERRAFLSLWEAGMPCAMTNPRSVRRYAEAMGVLEKTDRLDASVIARFAHAKNLQPTPAPTSAQQRLKALVARLRQVTDDLTVQKQRRSSLLDNAEMLASIDEVIVLLKRQSRTLEGEIASMIDDDPLWEKLAEAWRSVKGVAGRTVARLMADLPEIGTYSNKAIAKLAGLAPIADDSGKRQGKRPIRGGRASVRSILFLVARIAANYDKTLADFRDRLLAAGKPKMVVRIALAHKLLVRLNAKARDARAQYANAT

SEQ ID NO: 509952 - protein, 352 aa, unidentified
MIVLGADTHKRSHTIAAVSAVSGELLGEQTVVSGAKGAAGLLKWARGLSDDRVWAIEDCRHVSGSLERFLIERGERVLRVHSTLTASSRREARGRGKSDGIDALAVARAALREGLDTLPAAHLDGPELDLRLLVDHRERLVRARVAVNNTLQWHLHDLWPDLEIPGSSLFYGRWGPRIARRLARAQQTMRVRIARDELRRLRELTHSIKALEAEIADLVAQIAPHLLAEPGFGPLTAAKLVGEIAGADRFSSDAKLARAAGIAPIPVSSGNTRRHRLDRGGNRQINATIHRIAVTRLRCHPETQDYIARKRAEGKSTKDAIRCLKRHLTRRVWHLLQTPAPIPGRTITHSIS

SEQ ID NO: 509953 - protein, 417 aa, unidentified
MTVNSLMQRRSAIKPDTLIVGIDVAKFNHFARTLVPGGAISRPLEFSNSREGFLALSAEIEARKPTPTSAVIVGLESTGVYWINLARWLTEHDYQVVQVSGLYVHRAKELTDNSRGTSDGKDALLIADLVAQGKYLSFVRPVGVLADLRQLVGLRQRLVRERTARYSLLHQSVDLLFPEFPTVFKGVTGPGARRVLRRFPAPAAALAHPPDEMRRQLAEDGRVQASVAKLTQLQVVARQSIGTLEGTAGLQYALNDTLLELDSLDTRVKQVEAEINRLLAQIDETPILTSLVGPMTAAIILGETGGLRQYSCAAAVLKLAGLNLYQISSGQYHGDRHISQMGRPLLRQALYLAVLQHTHPGMPLYPYYAELLRRGKPKPVALIALCCRLVRLLYALVRDGRCYSPRPPDKNQQTQAA

SEQ ID NO: 509954 - protein, 460 aa, unidentified
MKRHKMEQAQRIRSHLKQVNLFAAGIDIGSRSHFVAVPEELDEQPVREFAGFTGDLHRLADWLVEMGIQTMAMESTGVYWIPVYEILESRGLEVLLVDARHVKNVPGRKTDVLDCQWIQQLHTYGLLRGAFRPPEEMVALRSYLRQREGLIASASDCIRHMQKALRQMNLLLENVVSDITGVTGLAIIRAILAGERDSKQLAKLRDKRCRSDERTIAGSLEGHYREEHLFALQQAVECYDFYQQQIKACEGGIERHMREIEGDNDNDQDVPPASKPKGHNKNGFDFDVRSQLYRLAGVDLTEINGMSESNVLTIVSETGLDMNAWPSEKHFASWLGLSPGNKITGGKQLSGKTKPSPNRAAAAFRLAAYSLANSKTALGAFYRRLRNRLGAPKAITATAHKLARLFYRLLKNRTPFIDPGQDYYEQQYQERATRNLKKRAAALGYKLIPESTGGLQESMC

SEQ ID NO: 509955 - protein, 321 aa, unidentified
MIPPAHDYVGMDVAKATLQVHLNGHQFEFKNDANGHAKLIKKLSQLPLPHVICEATGGYERPVVEACHKAKILVSVVNPAHTLAASQAQGKRAKSDPCDAAALTDYGQRFQPEPTAAVPPEAREITALTLWLKQLIDQRAVVKVQAEHLANTFVGQQHAELLAHYESQIQTVETEIKKLVAAQKTFQQRVDCLTQIKGVGFRTALLTLVFMPELGFMNRGGVAALAGLAPWTRDSGTMKGKRCIGGGRAQVRPVLYMAALSASRSNPVLAPFYKGLVKRGKLKKVALTAVMRKLVVHMNSELKKLAAKPTLEKPGKSKKQK

SEQ ID NO: 509956 - protein, 370 aa, unidentified
MKQRLLYVGLDVHKKTTDVAIASDRSNGKVRSYGKIVSTLDALNKLIKKLQDGNKELRFVYEAGPCGYQIYRYLDAKGIYCSVVAPSMIPRRSGDRIKTDRRDAINLVRLFRSGELTSIYIPTPEDEAIRDLIRCRDDMRRFERKARQRLLSFLLRHGYQYSGKKHWTKGFYTWLATVRFSRPAQQVTLQEYIDVTNECSERIQRITQQIQIHVEEWSRAPFVKAYQALRGVSMIVAATVVAEIGDMNRFQSPKQLMAYLGLIPSEHSSGKTVRRGPITKTGNSHVRRVLIEAAWTYKMQARVSNVLLKRQKGLPKSVCDISWKAQTRLCTRYRRLFARGKSRQTVVTAIARELSAFIWAIDKEVQLTTL

SEQ ID NO: 509957 - protein, 417 aa, unidentified
MNTENYGALVTLDWGETEHAFATQVDESPVETGKMPATPETLHGWLEQIHERTGGRPVAIALEGGKSAVVHALLEHPWLTIFPVHPATSDRFRKAFTPSGAKDDIPDALVLLTILKQHRELLRPLKLDSPETRKVAGLVAARRQAVDRRTRIACELASTLKTYFPQAMELCGREPATDLMLDFLTRWPELRSLKAARTATLRAFYAAHNSRHAEVVAARLALIDKARALTEDRAVIEPAMLEVKMLVDLLRPLQKNIAIIEERIAEAFEAHPEAALFRGLPGAGPATAPRLLAAFGTDRSRLPHASSMQKCAGIAPVKQKSGHSLWIHWRWNAPKFLRQTFVEWAGQSVPKCAWAKAYYQQQRAAGKHHQATLRALAFKWIRILWRCWQDRVPYNEARYLASLQRQKSPLAARLSFT

SEQ ID NO: 509958 - protein, 248 aa, unidentified
MKHEGKVYCGVDVAKKHLDALINGKTVRFENTVKGSRSLMARAGKVHFVFESTGGYERLPAWMIMAAGGAASIVNPARVRHYAIGIGQLAKTDAIDARVITAFADNTHPEPAEKPSKQQRSLTALVDRRQQLTEMRTAKTNRLETAGDSILRKMVQKHLRWIEREIKSIEKKIAKTIREDADMKKKAQCIERITGLGKVCSATLLAHLPEIGTISRQRATALAGLAPYNRDSGNPAQSRYEGVLHPLG

SEQ ID NO: 509959 - protein, 453 aa, unidentified
MRKMTTGGHPDLKLVNPRAAAIDIGSTMHMAAVNPDSDDMPVRAFGTFTQDLHNLAEWFRSCGVTSIAMESTGVYWIPAFEILEQHGFEVILVNARYAKNVPGRKTDVSDAGWLRQLHSYGLLRGSFRPEAEIAILRAYLRQRERLVEYAAAHIQHMQKALMEMNLQLHHVVSDITGATGMRIIRAIVAGERDPDVLASFRDSRCHSPVETIRAALVGNDRDEHVFALAQSLELFDFYQEKILECDHKLEAAISNMTVRAEEQLPPLAKARTKTKQVNEPSFDVRAALYGVLGVDLTQIHGLGPSLALKLVGECGADLRAWPSAKHFTSWLCLAPGNKISGGKLLSSRTRRSSSRAAALLRLAATTIGRSETALGAFYRRLSSRIGKQKAVTATARKIAVLFYNTLRFRTTYRDPGAAAYEERHRGRVLANLQRRAKSLGYALAPIPNVEAVS

SEQ ID NO: 509960 - protein, 392 aa, unidentified
MVCVGIDVAKDKHDCFILSSEGEILADVFTIANNREGFETLLQQIRSCTRLEDKIKVGLEATGHYSYNILGFLLDKGLATYVINPLHTNLYRKSLSLRQTKTDRIDARTIATMLMSDVDLKSYTDTAYHNEELKSLTRYRFDKVQQRAKLKQSVSRLVNILFPELETLVPTLHMASVYTMLSEFPGAKQIASAHLTHFKTVLSDASKGRYDRDKAVEIRETARRSIGSAMPAKSLELQHTIRLIRELDNEIDEVETAIKAIIDEMAPPILTIPGISYRMGAMILAEIGDFSRFDSPDKLLAYAGLSPSTYESGKFKATGAYAHMEKRGSRYLRYALFNAAKFVCVWEPSFAAYLAKKRAEGKHYNVAVSHASKKLVRLIYALQTSGKAFLPT

SEQ ID NO: 509961 - protein, 458 aa, unidentified
MSKRSKKTKSQSFKAPSLPRHLQHINLNAAGIDIGSERHLVAVPEGRDEISVREFGTFTADLEVLAAWLKQCGVTTVAMESTGVYWIPLFELLERRGFEVKLVDARHVKNVSGRKSDVLDCQWIQQLHTYGLLAGAFRPPDEVCVLRSYLRQREMLIQTASRHIQHMQKALQQMNLLLHNVVSDITGLTGMKIIKAILAGERDPRVLAGNRHERCQNDAATIAKSLVGNYREEHLFALRQAVDLYETYQAKIADCDQAIIKQVEKQPDISDDEPPTPEKQVQARDRIRDGVDVRDLLFKKSGVDLFAIPGLAADTLLTLVSEVGFDMKPWKTEKHFASWLGLCPGTKKSGGKVLNNKTKRNPNRATQAFRMAAASLYRSQTALGAFYRRIKSRAGGQQAVTATAHKIARIYYAMLTKGTSYVELGQQAYEQRYKQRRIDHIMTQAKSLGFQLVPCVTS

SEQ ID NO: 509962 - protein, 398 aa, unidentified
MTESSDYESVQVFIGVDVGKDTHHAVAINRSGKRLFDKALPNDENKLRSLISDLKQHGQILLVVDQPATIGALPVAVARSEGVLVGYLPGLAMRRIADLHAGEAKTDARDAAIIAEAARTLPHALRTLKLADEQIAELSMLCGFDDDLAAQTTQASNRIRGLLTQIHPALERVLGPRLDHPAVLDLLQRYPSPEKLASLGEKKLAAQLCKLAPRLGKRLAADIAQALAEQTVVVPGTNAAAVVLPRLALQLITLRKQRDEVALAVEQRVLAHPLYPVLTSMPGVGVRTAARLLTEVACRAFASVAHLAAYAGLAPVTRRSGSSIRGEHPSRRGNKALKRALFLSAVAALRDPLSRAYYTRKMSQGKRHNQALIALARRRCDVLFAMMRDGTFYTPQAS

SEQ ID NO: 509963 - protein, 351 aa, unidentified
MKKVAYLAMDVHSGHCVLGHMDFDGTFIGNRRFPTSEQHIIEALKAVKAKQKYLALEESNLAYWAAQVARAYVTEVISSDPKENALIYRSPNKRDKVDTHKLCRLLRLGELKRVYHPENDERAIFKAAVQHYIDLRDQQVVLKNKIKAMYRHWGVIDVAGQAVYGIRTRDDYLKRVKHLHIGNQLHRLYCLMDETESMQKKALKAMKQLGRKYPEIKQFEKMPGIGEILSHTFDAFIQTPHRFADKRKLWRYCRLAITDRSSDGKPLGFKRLDKSGVSELKALSYRAWLCAMGSDNEVSRFYSRSLRRTHSHVHARLNTQRKILAVMYGMWKRGEAYRPQLFLDSPQMSVV

SEQ ID NO: 509964 - protein, 343 aa, unidentified
MSVVIGVDPHKASHTAVAISAGEVELAQKKVRSGAAQVRQLLSWAEPFGSRCWAIESANGLGYLLAQQLVNAGETVVDVPATLASRARLLARGRSNKNDGNDALSVAVAALRAQGLRRVEPAGHVEVLRLLAKRNTDIGNQRTRVVCRLHALVAELAGGGIAKEINASDVDRFLETTTPVTPVEQVRYDLVAELLDDVRRLDTQLKLSHERIRTAVRASETSLTELFGVGPIIAGMLIGYSGDITRFASRDHYASYNGTAPVEFSSAGRVVHRLSQRGNRQLNHAMHMAAISQLRQPHSDGHAYVQRKLAEGRTKKEAIRSLKRHISNAVYRQLRMDAERCTQ

SEQ ID NO: 509965 - protein, 347 aa, unidentified
MRFYTRQHRFYCGVDLHARSMYVCVLDQEGNVLVSKNIITAPEPFLGLIAPYRDDLAVAVECMFTWYWLADLCARERLVFVLGHALYMRAIHGGKAKNDRIDAHKIAALLRGGMLPQAYVYPQAMRATRDLMRRRNYLMRQRAELLAHITNTNHQYNLPALGVRPARPAERSGVAEHFAEVSVRKSIEADLSLINHYDRELPRLERYIESSAQGHDPLALAIVRTIHGMGKVLGLSILYEVQDIGRFARAQEFLSYCRLVKPTKESGGKILGHSGKKIGNAHLKWAFSEAAVGFLRANKPAQALRQRLMAKHGKGKSLAIIAAKLARALYFMLKRGEAFDAERFFAH

SEQ ID NO: 509966 - protein, 320 aa, unidentified
MAMTVSQSIIGVDVAKAEVVVYQSETAETKIVPNKKNELKAWLKSLPAGSAIAIEATNIYHVDTVNLAHSMGHIVYVIDGYRLSHYRKGTGGRAKTDLSDAQLLARYLKNEQADLRVWNPPPKIYTKLQSLLRRRAALVKMRVALNQSWAGEPLLKASSKSISACLDRHEGLIEKRILEAVTEAGLLHQVKRCQAVEGIGFLTAVALTMAFQRGEFENADAYIAFLGMDLRVSDSGQMNGRRSLSKKGDSEIRRLLHNAASAGIRSEAWKPLYEGYLARGLKTTQALVIIGRKLARIAFSLMKNLSEYQSKAVLGASPKP

SEQ ID NO: 509967 - protein, 383 aa, unidentified
MKAVCGLDVHKDSVYLCILSEFGELIEKVFGVLTFQLEEMRDLMLHHHVVEVSMESTSVYWIPIWRVLSPHFKLNLANPYFIKQLPGRKSDVKDAQWIAECTMKELIRGSFVPPEIIQQLRQYDRRIFDLNEEIVRKLSKLDAVLQRCNIRLSNYVSNVDSKSYKTVVRAISQGITAPEELVKLIHGRIINHHGIDVITASLKGVVSLAEIDMISQLRDELDMAEAHKEKCQARMLEICERVFPEELKRLQTIPGIKERAATSLIAEIGTDMNKFETANHLASWSGLKPRNDESNKKIKSRSITHGNVYLRKTIIECAWAASRTKDCFFSRFSYHQTQVRKKNKMKVLVAVARKMLIAVWHVLHDNTNYIDFTTDRKTSRTKG

SEQ ID NO: 509968 - protein, 400 aa, unidentified
MRAVFGIDMSKASSEVAILVNSEKVHGYSMPNDAIGFSRLLKDLNTVSNPEIIFEATGVYSRRLQAFLEENGYAYTRLNPLEAKKQLDSLRVRKTDKIDAEKLAESQFILNRKPTYGQEEVYQNLRDLSRFYQNLTEDMVRTKNRLHKTLQVTFPELEQLLSAPTGEQYWNLVSSFPSKDFVLELSHSELTEAIRQSTSKRISEKRVTLLSDKLTALAKQSYCAVKKTSPMIEEVKYYAQELLRLTKRRQVILDEMVSLAQPLPEYEILLSIPGIAETTATSIIGELGDVRRFQSANQINAFIGIDLRHYESGNFLAQEHITKRGNPYARKILFKCIHNIAAASHTNPCHIADFYEKRKRQSQTTSTKPHTIAAVHRLIRTMYYLITHNKLYDYTATQSH

SEQ ID NO: 509969 - protein, 410 aa, unidentified
MEVIHPRCAGIDVSKRDAKVCVRVAGAGRRAASSTVTTWGAVTNQVLALRDHLIQAQVTLVVIEATGDYWKPFYFLLEDGLDVMLVNARHVKNMPGRKSDVSDAAWLADLGAHGLVRGSLVPPEPIRQLRDLTRTRTAVTRERGREVQRLEKLLEDAGVKLSSVASDINGVSGRAMLEAMIAGQRDPAVLADLAKRRLRSKIPALTEALTGRFSEHHAFLARVHLDLIDRHTTAIGELTDRIEVVVEPFRGFRELIATIPGISTLVADVITAETGADMSQFPTASHLASWAGTSPGSNESAGRVKSTKTRPGNPYLKGALGVAAMSAARTKNTYLGAKYRRIASRRGPVKAIVTIEHAMLTAIWNMATTGALYDDPGADFYTRRNPDKAKRRAIEQLRLMGYQVTLEPTG

SEQ ID NO: 509970 - protein, 355 aa, unidentified
MNKIKSNFEGQTIFVGMDVHKSSWNLGIHLNDLFVKNVHQKPNPYLMADYLKQHYPGAKYKAAYEAGKFGFWIQRQLTALGIECLVVNPADIPKSQKDSLQKTDPRDARNLGLRLQSGVLHGIHIPDEQQEADRVFFRHRKRIWKDLTRCKNRIKGLLAFSGIDIPEQYDNASWSHNFINWLKVLDCKQQSRRRSLDYMIAQMQYLRKELLQISNELRKMMREKRYKINYYLLRTIPGIGPLTAASILVEIGDVKRFETFYRLNSFVGLLPMEHSSGQVENKMSLTVRKHRQLRSDLVESAWTARRTDPAMAIYFQEQIKRKDSKIVIIKIARKLLNRIRFVLINQQPYEFGIVK

SEQ ID NO: 509971 - protein, 358 aa, unidentified
MNRKAGMSAGQVIGTVDGQQVFGLDIAKSVFQVHTVDMGSGEIVNQQLKRAKVLTYFANRTPCLIGIEACGGAHHWARKLTAQGHSVRLIHAKAVRPFVGGNKTDAADARAIWLAIQQPGTKFVGMKTLEQQATLVLHRQRELLMKMKAMQSNALRGLLYEFGATFARGKNALFAEIETALEALVGDIPQYVADSLREQVKRVKDLAKDILAIEGRLAQRLRDDKDMQRVAQMPGVGLLTATAAIATMGQASAFKSGREFCAWLGLVPRQSGTGGKVKLLEISKRGDTYLRTLLIHGARSVLTHTKEPGPWLEQLKARRPANVVIVAQAAKMARAIWAVTAKQEDYQRGYCSVKPKAA

SEQ ID NO: 509972 - protein, 458 aa, unidentified
MAKRPKKKTKNVKMLHVIKLNAAGIDIGATEIYIAVPDDRDNKPVRHFDTFTADLHAAAKWLKSCDIDSIAMESTGVYWIPVFQILESYGFDVVLVNARHVKNVPGRKTDVQDCQWLQYLHSVGLLRGSYRPPQEVCAVRSLLRHRDGLIKTASSHILHMQKALTQMNLQIHNVISDITGVTGLAIIDAVLSGERNPQKLAALKNRRIQATKDTIAKSLNGDYLPEHVFTLKQSLQVYRHYQKMIAECDQEIENHLNNFDSRIDVAKKPPPPATSTSRRGKGNEPNFDLRTHMYRILGTDLTQIEGISAVTAHVFFSEVGCEVSKFPKVGNFVSWLNLCPNNKITGGKVLSSRTLPGKNRLAKALQMSAMSLWRSQSYLGNYYRRKRAKNGAPSAITDTAHKLARIIYHLVKTGKQFDESVFYAQEEAHQKRTLKNLTKRAKRMGFQLIECETGSLVT

SEQ ID NO: 509973 - protein, 341 aa, unidentified
MSKGSTSVQATVFSGIDVSALTLVAAVRREGVAGFEQREFGNSAAGHRQLIVWLLKRGPTVRVSLEATGVYSLAVALALDGSDGIEVAVLNPKTVSRFAETLRRSKTDKADAVALAEYSLRMPFVAWQRPAGKALELRAIARHIGTLTEEHTRLNNRLHAAEGSGSTPRCVREDLKRSMAGLKKRIARLRREVVAVVRQDAQLARRFEQLVSIPGVAETSAVQLLSELAGLDPEMTVRQWVAHSGLDPAHQISGSSVHKPSRISRHGNRHLRRALYMPALVGVRFDPHMKAFYNMLQARHKTKLQALMAVARKLLHAIFGIFKTGTDYSGAKLFPNLIPTS

SEQ ID NO: 509974 - protein, 337 aa, unidentified
MKYCGIDLHSNNSVVIVSDDEDRIVLQKRLANDLGQIRAVLEPYRSELVGVVVESTYNWYWLVDGLMDAGYRVHLAHPSAIRKYEGLKHSGDVADAAYLAQLLRLGLLAEGYIYPREQRGVRDLARKRMQRVRYRTAQILSIENILIRQTGARMKGEAVKRLTAAQVDGFALAPDVALAMEANRAVSQALGQQIEALERRLKERVSLRAEYRLLQTMPGVGEILATTIMLETGCIDRFAQVGNFSSYCRCVDSLRESNGRKKGEGNTKNGNKYLAWAFIEAANFALRCCPQAKSFYERKKNKSNRVLALKALAHKLARACYHILRHQEPFDVDRCFG

SEQ ID NO: 509975 - protein, 336 aa, unidentified
MVYVGVDLHRKTAHVVALDQGGTAILSRRVATRPDELLRVFGELDHQPLEVAFEATFGWGWFADLLADAGIPAHMAHPLATKAISSARVKNDSVDAKTLAHLLRTNLLPEAWIAPPEAREARRLARMRTSLVRVRSQLRCQIHAVLAEHGVHADVSDVFGKAGRALLEDLALPPVSKARLDANLRLIDALTEEVAQAERELRALFRGDDRIKRLTAIPGVGLITAATVVTEVWDITRFPSADRLCSWAGLTPSEHSSGEHTRRGHISKQGSRWLRWVLVEAAARPQADPGLRAFVDRIASRRGTKIARVALARRLLTLSFYALRDERGCRAFPVAR

SEQ ID NO: 509976 - protein, 354 aa, unidentified
MSQTLKAAIAAVGIDIGKNSFHVVGLDQRGAIVLRQKWSRGQVEARFANMPPCLIGMEACVGAHHLSRKLKELGHDARLMPAKYVRPYSKGQKNDFRDAEAIAEAVQRPTMKFVATKTADQLDLQALHRVRERLVSQRTGIINQIRAFLLERGVAVRQGLRFLRAELPRILATPPDVLAPRMVRVIENLAGDWRRLDERVESLSSEIEAVARQDAGCERLMSVPGIGPIISSAMVAAIGTGDVFSKGRDFAAWLGLVPKQISTGDRTILGKISKRGNRYLRVLFVQAAWVVLIKPKTWERHGLKPWIEAAKKRLHHNVLAIALANKLARIAWSVLAHGRNFEARKIDEAAAQPV

SEQ ID NO: 509977 - protein, 351 aa, unidentified
MPRATSSTNVIATIGIDIGKNTFHVIGLDDKGAIILRHKLSRGQVYARFANIPPCLIGMEACVGAHHLGRELSALGHHTRLMPARYVRPYSKGQKNDFRDAEAIAEAVQRPTMKFVAIKTVEQLDLQGLHRIRERLVCQRTSVINQIRAFLLERGIAVRQGLRTLRTEMPIALAKTDKLSPRMIHMIEDLCTDWRHLDKRIETVSKEIETLSEQDDGAKRLMTVPGIGPIISTATVAAIGTGEVFSKGRDFGAWLGLVPKQMSTGGRTILGPISKRGNRYLRMLFVQAARAVLLRPQSWQKHGLKLWIEAAARRLNRFKLAIALANKIARIAWGVLHGGRNFEVRPMNQAA

SEQ ID NO: 509978 - protein, 338 aa, unidentified
MAWTVAIGVDTHKDAHVAVALDVLGVELDHCVVEATLAGYKRLLSWAALLGEPAFAVEGCGSYGAGLARFLETRGYLVCECERPRRGDRKRGKNDLIDAELAARRLLSGSGLSTPRGGGQREHLRVLLVERRGAIQARTAALNQLHALVVTAPDALRERLSGLPNARLVKTAARLRSSPDGLCEVLRRIGKRAECLSREIAEIDQALLRLITELAPQLLAECGVGAVCAAQLLVSSGDAKRMTSEASFAALAGTSPVDASSGKQQRHRLNRGGDRQLNWALHVIAIQRVRRDAETTAYYQRMLSSGKTTREAKRCLKRALARHFYHQLRQLPQTPLTT

SEQ ID NO: 509979 - protein, 338 aa, unidentified
MIVIGLDVHKQSVTAVAVDEAGRPLAEKVIPVGSDELLEWAAALDAERLWAVEDCRQLTRWLERQLLSVGEDLVRVPPKLTVPERRAGRTRGKSDPIDALAIARAALREPGLSRPQPGEQASREIKLLVDHRDDLVDQRRRTQQRLRWHLFQLDPTYVVPLRMLGRPSHLERVSRWLGRQEQELQVRLARELVTTCRALNRAIAALDQELEQRVRDTAPGLLELPGCAAVTAAKLLAEIGPIDRFRSDAQLARHGGVAPLEASSGRTQRHRLDRGGNRQLNAALYRIAITQARYHPDARAYLERKQTEGKSRREAVRCLKRLLARTVFNTLKASPALT

SEQ ID NO: 509980 - protein, 387 aa, unidentified
MPQPNDLSRSLVALDQDSTLIAVIEMGQASWLVAGIVPGVNRHPLKKIATDQEQLLQVLRRWAKEAETTGRMIKRIAVAYEAGRDGFWLARWLRARGVEAYVIHPSSVPVSREHRRAKTDRLDTELLKRAFLGWLRGEPDHCTMAAIPTLTEEDAKRPGRERESLVGERTRIINRIKGALARLGIREFKPMLRSAPQLLEALRTPEGAALPPNTLAELRRDMARLSFVKQQINEVERARLERLQRAPGERGNAMVHLLTRVVGVGVETADMLVQEIFSRNLRDRKAVARYAGLTGAPDESGKKRRERGLAKSGNARVRRGMLQLAWGFLVHQPDSVLAKWYRARTADARGVTRKTMIVALARKLLIALWRLAATGEVPEGLALRAAA

SEQ ID NO: 509981 - protein, 430 aa, unidentified
MKSNTQNAKIEAITEKTLVLGIDVGSETHYARAFDHRGMKYSKKPFKFSNTEAGFVIFKEWILDLKEKHEKDKVVPGMEPTGHYWFNLGKFLQDNEMKPVLVNPHHVKKSKELDDNNPTKNDRKDPKVIAGLVREGRYMIPYLPDGVYADLRTASNIRFQLQAELTRIQNRISRWFNIYFPEYKTVYGKPDAKSGMLILKQAPLPEDILTLGIDGVNQIWRDAKMRAVGKARAKTLIEAAEHSVGSKEGAISARMESRMLLEDYESRNIRLQEIMTLIEELVNQIPMAEKLLEIKGVGIKTVSGFLAEVGDISRFNNPKELQKLAGLALVENSSGKHKGRTTISRRGRKRLRYLLFEVAMSLVAKNPEFRELHTYYTTRRLNPLKKMQSLMAVAAKLIRVFYVMLTKGVDYDPKKMVGDIKRPAVYLQAA

SEQ ID NO: 509982 - protein, 312 aa, unidentified
MTQIICGVDVSGATLDARIGRDGVAERFAHTTAGIAALAAFCKAHGVGLVVMEATGGYERMPFALLWAEGVPVAIVNPRAVRRFADAMGRLEKTDRIDAGMIAWYAETKRIVPEPPASRTQDRLEALVTRLRQLTELRTAQTNQRRLIKEATVLDGFADLLGCIRRQIRSLEQQIAALIDDDPLWRKLDAVFRSIKGVADRTVARLMADMPEIGTLSNKAISKLAGLAPLAKDSGQRKGPRPVRGGRSQVRSILFVVAEIVRRYDPDFAAFHKRLKDAGKPRKVVRVALAHKLLVRLNAKARECRAQLAVAA

SEQ ID NO: 509983 - protein, 341 aa, unidentified
MSQIRYFIGIDIASEDLAASIFTMPEEPCVTQEKILNTPEGFRALERWLAKHKATPRNSVACMEATGVYGEALCYYLAAKGYQVAVEPPLKVKRAFDESGHKTDAADSRQIAEYAYRFVDELIFWQPNEDLVEQIRVLLNSREQFTTQLVANQNSLRTLKRKQVQTPIANQAFQEAIDRLKATIKSIDQEIKRLISEDPKYGQMISLLVGIPGVGMLMAANLMVLTKGFTRQMTANQLAAYVGICPYQHTSGKSVYRRARSRQYGPSQLRKLLYLAAMSNRNYNENYKMYFLRKVAEGKAKRLVLNNIANKLLKVICAMIRDQAPYIKDYRSINPALLKSA

SEQ ID NO: 509984 - protein, 346 aa, unidentified
MHYIGMDCHITTLEFAVVNEAGRLVKAHRVATSVNGFMEFVKKVPPPRTIYMEEGTLAAWALETCVRFREKLVITDAKKNHWIGSSGQKGDSIDALKLAQLARGGYIKEIHHPVGQRRRFRELMIAYHDTVRSTTRIKNKIKARFRQNGIQCTGTTVYSPIHREEWKGKLPQEVTLLLILDGLWRQLKQSEQAEEELLAAAKAQAKHYPEIKLFKDIPGIGFIHAATISAILETPYRFADKRKVWMYSGLGIMTRSSGGKTYSEKLSTDYNRLLKYTLKQAAEAAIQAKDNPFRRKYLDMTLLQGVAPHRAKLTIARDMLATMWAMWRKGEKYSPEIRKKAACKQD

SEQ ID NO: 509985 - protein, 346 aa, unidentified
MKYCKAKSEIKVLGIDLAKQSFQLHGVDESGQIVLRKKLSRNKLTAFIANLPPCLIGLEACDGAHHWVRTFTNFGHTVRMMAPQFVKPYVKSNKNDAVDAEAICEAVQRPSMRFVPAKRIEQQDIQSIHRIRSLLVVRRTAQANQIRGLLLEYGIIISKGIAYIRTRIPEILEDAENGLTSLFRELLSELYEEMVHLDQRIGTLEQKLQAISLQNKDCQRLLTIPGVGLLTATATVAAVSDITAFKNGRELAAWLGLVPRQHSTGGETTLLGISKRGDSYLRTLLIHGGRTVVRVAGKYQDKRNRWVSELDQRRGKNISAVGVANKNVRIAWALLSKKENYNTALA

SEQ ID NO: 509986 - protein, 355 aa, unidentified
MSQEKYIGMDVHQATISVAVMDAGGKLIMECLLETKAATIVEFIQGLQGTLSLTFEEGTSAAWLHDLLQPHVSRLVVCDPRKNALLKDGSKSDRIDARKLAELLRTNQLKPVYHGEHGVRTLKELGRSYLTLTKDVTRVMNRIKALYRSWAIPCSGTTVYAPRHRAEWLAKIVEPGVRVRAERLYQQLDVLQPVRQAARHDLLSESHKHPAVKLLRQMPSIGPIRAALLVALLQTPHRFRTKRQLWAYSGFAVETHDSGEYRWVRGKLQRNRERITVRGLNDNHNRDLKNLFKSAAISASTRPGPLRDFYLARLEKGMRPTMARLTLARKIVAITLTMWKKGVSFDPRQLHRQAA

SEQ ID NO: 509987 - protein, 347 aa, unidentified
MYKANRRDGLCERSLTMFPVGIDVSKNTLDLCILYDGIKGRIKTRNIQNNRHSVENILRWLRLQHCGPEDVHVVMEATGVYHERLATELHDAGFRVSLANPHRSREFARGMGIMTKTDKVDAYMLACYAFLKKPHHWEPPSPEIRYLAALLRRRDVLLGDALREENRLEKYLSTDTPADIISSCRRMAQLLREEVSNIERQIKAHIKASPALRRDYTLLNSIKSVGPQLGMHMLVVLRSHNFASAEQAAAFLGVVPIEKRSGTSVRSRPRMSKIGPPQLRAKLYMSALCGKIYNKRMRNIYDEMCLRGKPKMVAIGALMRKLVHWCYGVLKTGTVFNDEGLKQVLST

SEQ ID NO: 509988 - protein, 326 aa, unidentified
MVTSFSLSVVGIDVSKATLAVCYQVNGQLHHLEVSNTQVGFAQLVQACGTDSLFIMEATGTYYLALAYYLHGRATQVAVLNPLIIKRFIQMHLSKGKSDRKDAQWLMRYGQQQATACWQPEEPLLVECRQLEQVSEQLLKQKTMVGNSLEALTQQPVISPIALQQLKQTKQLLEDQLKTIENELLALLEKRYTQEMTLLRSIPGIGRKTAGMLLLFAGGFTSYTNHRQLIAKAGLSPREHTSGTSIRGKVRITKMGGGLIRSKLYVCSFSAKRANAACKALYDRLVAKGKNGKVALIAVCNKLLKQAFAIVKSGVPYQADFAKIAA

SEQ ID NO: 509989 - protein, 341 aa, unidentified
MTAIGIDTHKATLAACAVDELGVTLAERTFVNDPAGHAALWAWAETVAPDGRIGLEGSAGYGAAAARFLADHARVVREVPPQLSHRERLRTRRAGKSDPGDALAIARATAREPDLPPVRTADRTREIQLLVEARDDLVTEATRVRNRLHADLVVLVPGYGVRTANLVAARHRQTAGRLLRPLSGIQAELARSRLARLGRLMVEAKALEARLDRLVGDHALRRLPGAGVLVTAKLIGEAGDLGRFRSADAFAMLAGVAPIPASSGQTSRMRLNRGGNRQINRALHAIALAQAWHHPLAQAFIARKRSEGKTWREALRALKRHLARVVFRLLVSPSTVAQLVA

SEQ ID NO: 509990 - protein, 422 aa, unidentified
MLQEDPQGEEIVARVAALDIGKAELVCCVRVPHEAKPGRRLQEVATYSTMTRSLLAMSDHLRCLGVSRVVMEATSDYWKPVFYLLEAQGLDPWLVNARDVKHLPGRPKTDKLDAVWLCKVAERQMIRPSFVPPPEIRRLRDVTRYRIDLVGVRTAEKQRAEKLLEDAQIKLSVVASDIFGVSGRQMMAALIGGQTNPKALAQLARGRMRAKLDALEEAFTGHFTDHHALLLTKMLARVDALDTDIAELDTAIEEMIAPFAPTVERLDEIPGVGTTAARVIIAEVGMDMSRFPTAAHLASWARFAPGVKESAGRKKGSHTTGHGNRYLARALGEAAVAAGKTGTFLGERYRRIARRRGKKRAIVAIGRSILVIIWHLLSDPQARFHDLGPDFYDNRIGPERKKRNHIHQLEALGYKVTLEPAA

SEQ ID NO: 509991 - protein, 357 aa, unidentified
MRIGVDLHTRQQTIAMLDTETGELVEKTLQHDGDEVRRFYSALPGQVLVGMEASGSMHWFLELLDELGIDHQVGHPSEIRKAEARKQKHDRRDAVLLLKLQVENRFPSIWMPSTALRDLRTLLLHRHQWVRMRTRVQNALQAIALSRGLRRGKTLWSQGGQHSIESLSLPPNAAHRRTELQRLYRNLNEQIDERDKGVNDQALQRPGAKLLMTHPGVGPVTALATDVFLGAPARFEDGKAVVSYVGMIPSEYSSGGQQRLGGLSKQGNPFLRFLWCEAAVHAVRRDPELQRFYRRKLAQKGLGKARVAAARKLGIRLWIMLRDQIDYQEFCRRGQMRQKNGGACAGMPEVGHSPAMQ

SEQ ID NO: 509992 - protein, 428 aa, unidentified
MKYNTQNAKIKSITEKTLIVGIDVGSETHFARAFDWRNYEYSKKPLEFSNTEAGFMTLKAWMADLAEKYGKNVVIPGMEPTGHYWFNLGAYLQDNGMKPVHVNPHHVKKSKELDDNNPNKNDRKDPKTIAALVNEGRFSYPYIPTGIYAEIRSLSNLRLQTQEEITRIKNRIARWFSIYFPEIKDVYRNPDSVSGLMILKEAPLPQDIVKLGVDGINKIWRDAKLRAAGLKRAKTLVTAAEHSIGSQEAPDSARIELKNLLNDYEIYKNREEDLMSLTEEKLSEIPHIDKLLEIKGVGLKTVSGFVAEVGDITRFDNPKQLQKLAGYAIVECSSGKHKGESHISYRGRKRLRYVLYEAAISLIARNEEFKEVHRYYRTRKENPLKKMQSVIAVACKVLRIFYTILTKGVTYDGAKMMQDIKRPQMLAA

SEQ ID NO: 509993 - protein, 347 aa, unidentified
MVTLGTDSHKQSHTVVAVDENGRQLGELRVAATPAGHREALGWARQWQERRWAMENCRQLSRGLERDLLVAGEQVLQVSPKLMGRSRRSGRQLGKSDPIDAMAVARVALREPNLPVARLEGKSRELKLLVDHREDLVGERTRIQNRLLWHLHELEPGLQIAGGGLTRKVVLKEVKRRLEAHQGVVSEIARELVERLAELTMSVNQLQRRIEVLAGELAPSLVSLPGCAGLTAAKLLAETADVRRFHSSGAFAMHNGTAPIPVWSGNQQRHRLNRGGNRQLNAALHRIAITQMRLGGDAGAYVARRISLGNSKAEAIRSLRRQLSDEVYQRLRLDRLEQLAQPTGVAA

SEQ ID NO: 509994 - protein, 339 aa, unidentified
MRTYAGIDLHSSNNYIGVIDEKDKRLYKKRLPNRLDDILTALSPFKKTLEGVVVESTYNWYWVVDGLMENGYKVHLANPSAMKQYEGLKHTDDQSDAFWLAHMKRLGILKEGYIYPKGERAVRDLLRRRLLYVQHRTTHILSLQSMVTRNLGYKLSNNDIKKLKEENAKDLFESPNLVVMAENSIATIRFLTKVVKRIEKTVASQVKMRKEFETLITTPGIGLILGLTIMLEVGDIMRFPTVGDYSSYCRCVDSRKDSNGKKKGENNKKNGNKYLAWAYVEAANFAARYSKPAQRFYQRKMAEKNGIVAIKALSNKICRASYYMMRDHVPFNEAMLFRS

SEQ ID NO: 509995 - protein, 328 aa, unidentified
MIGLDEKGEIVLREKVSRNRIAARLVNVPPCLVGIEAGMATHYMARELVALGHVVKQVPPAFAKPFRQGHKNDFRDAHAVAEAVQRPSTRCVPIKTDDQLDLQALHRVRSRLVGDRTAVINQLRGFLLEHGIAVRQGHRFLRQQLAQILATRTDALSPRMIRIIGDLVEDWAHLDERIERVTDEIESLARTDSSCGRLMTVPGIGPIIASAMVAAIGNGAAFAKGRDFAAWLGLVPKQLSTGDRTILGRITKRGNRYLRMLFIQGARAIQLHPASWAKHSFGPWLTAAARRLHCNVLTVALANKLARIALTVLVQARNYETRIAPAAA

SEQ ID NO: 509996 - protein, 422 aa, unidentified
MVLKGVPMALKIVYQICCGIDVHKTFVVACIASTNKQGVTTYKRHRFSTFTQGLKELLQWLLDNHCKDVCMESTGKYWIPIYNVLEKDCNIVLAHPKYVKAIRGKKTDKKDAKWIADLFKHDLVAGSFMPPADIRQLRDLMRYRFKLTCFMSSEKNRLQNCLTVSNIQLASVVSDTFGKSSQRILDKILENPDDTSFDIEPLIHGSMKKKLPELELAIDGFITPEQAGKLKVIKKHFEDLESRKAELEKLILALASPYQQELDLILTAPSFKNKFTAIGIISEIGVNMEAFPSAKHLCSWAGLTPANNESAGKKKSVRVSKAGCYIKPLLVQCANAVVTSKKHPEIRNRYLRIKKRRGHKKAIIAIARMLLTALYHMLKNGENYNAELYRKSDLLSVDREITVEQAIIIARKQGYKIKSATA

SEQ ID NO: 509997 - protein, 320 aa, unidentified
MPECCSVGIDVAKATLDVASTVDQTERWQTTNDEAGWAALLTYVGTLRPDVIVLEATGGYEARVAGALVAAGWAVAIVNPRQVRDFAKALGLLEKTDALDAGVLALFGARVQPTVRPIADDLQADLQALVTRRRQLVDMLTAERNRLPLARGVVRTNLRAHIAWLEKQVGHTDHDLRTWIERSPVWRVRDQLLQSVPGIGPATSARLIASLPELGTLSHRQISKLVGVAPLPDDSGTRTGYRRIRGGRADVRKALYMATVVAITHNPRIRACYQRWRAAGKLPKVALVAAMHKLLVHLNALLKHHTPWCAMSARPSTAPA

SEQ ID NO: 509998 - protein, 373 aa, unidentified
MNACLTPKSTVVGVDVHKYSHTAVAMDCFGQEKARLDFSNERLNDYVLWLRELGDKEDIIVALEDVNGYGFHIVERLSKEKISMRYVPAILTERERKKSIHREKSDYEDAKRVGKVILTKFDETLPAKESIADDQERELSANLDLLTAERRILVQEKTILKNQLHAMLHQIYGDHYGEGFPKVFHKKAIKSFRQKLTKTKFDNPIRVALAGSSIRRFDRLALVEKQLKEIDGSINNIGQKSEAVLALSDNIHGCGIITAASIIAEVTTISRFCDKSRFARYSGIAPIDKSSGRHQRLYTSPFGNRKMNRALHTIALCQIACKGDDRGKIYFKKKLSEGKTKLWALRCLKRQISNKVFQALKEQKRRERTIQNG

SEQ ID NO: 509999 - protein, 344 aa, unidentified
MTTIQHKETAHEAKPDLFAGIDVGAEELILVIRKNGKPFDPQKFANTPADRDRLVKKLVKLPGIIVCLEATGVYHFDLSLALHDADVLLMVVNPKASHNFAKVLMKNSKTDAVDANTLAEYAARMDFVAWTRPSDETIALRSFARRINALTGQKAAAKNHLHALNATSETPKAVLKDAKLAITQLEKRIDRLTAEALVLIGKHPKLKRILALLIGIKGVGETSAIALMGELLLLPPDLTHREWVKFAGLDPRAFDSGKSVHKKTRISKAGNRHIRAALYFPALSAKQHDKHVKAYFQHLMDNGKTPLQGVCAVMRKLLHAIHGMLKKDESFDNTRFYAIPESTG

SEQ ID NO: 510000 - protein, 392 aa, unidentified
MVVSVGVDVSKDKHNCFIVSSEGEVLADVFTIPNTMDGFHYLLQRIRHCTAPQDKIKVGLEATGHYSYNLLGFLLDNGLTTYVLNPLHTNLYRKSLSLRKTKTDRVDARTIASMLLSDAGLKPYTDAAYHNEELKSLTRYRFDKVKERAKLKSSIARLVCILFPELEKLVPSLHIASVYALLEEFPGAKQVAAAHLTRLKALLETASNGHYKRDMALEIRNAAKNSIGSQMPAKSLELQHTIRLIRELDREIDEIEEQIQSIMDELHSPITTIPGLGFRMAAMILAEVGDFTRFDSPDKLLAYAGMSPSTYQSGQLKNCYPHMEKRGSRYLRYALYNATKYVCHWDPAFADYLAKKRAEGKHYNIAISHAAKKLVRLIFAMEKSRQPYCSAA

SEQ ID NO: 510001 - protein, 412 aa, unidentified
METLVERGCGLDVHQATVVACLLIVLKNGKAHKEIQAFGTTTRELLALREWLLSHGCTHVAMESTGVYWKPVYAILEGEGTFKIVVANAQHVKKVPGRKTDVKDAEWIAELLCHGLLRSSFVPPKPIRELRDLTRYRRKLVESQTAERNRLLKLLETANIKLASVAADVFGVSGQLMLRALIEGKATPQEMAELAKGLLRKKMPELELALEGKLEEHHRFLLRLQLKRLGAVEEDLAVLEQRIQEKLKPYEAQLTLLDEIPGVDWTGAAAIIAELGVDMSVFQNVLQAASWAGVSPGNHESAGKRKSSRIPKGNVYLKTALVEAATAATKAKGSYLRDKFYRLKARRGYKRAVVAVAHKILVAIYHMLSHRVCYNELGDLYLDKLNKHSLTRNLVHRLERLGYTVTLEQTAA

SEQ ID NO: 510002 - protein, 404 aa, unidentified
MERAQIKAYGVFVGIDVGKASNYVVALEGDDDKPFISREVPQEEAALREVLTEASARGKAIVVVDQCGTIGRLPVAVAKDMGLTSAHIPPRKFDQVAETYGEDKDDLIDAFIIADAARSNPRLVDPVGERAEALEKVKVLASARDDCVAERTRCYNRLHDLIHQVCPPLEKVFAKKKLHNELEIRLLERYGGPKGFKNAGEKRCSDWAGSLKYQCTRGPERVAQVFEALARQTVELPATDVIEQQVKRLAKRVIELNAEEEGLNSQIEELAAAVPEVGILRTISGVGRVYGAVIAAEIGDVSRFKDSAHLATYAGLSPVRRQSSASVNKKKKRKGGNRRLKNALIQSVDRARYHEPWAQEYYDRKRREGRKHKQALFALARRRVDVVYAMLSNGTYYEPRTKGA

SEQ ID NO: 510003 - protein, 342 aa, unidentified
MEHFAGLDVSVKETSVCIVDDTGKIVREVKVASEPDALLPVLTNPAYRFKRIGLEAGPLSQWLFSALAEAGLPVICVETRHMQAALKAQINKTDRNDARGIAQMMRVGLYRPVHVKTLRSQKLRMLLTHRKLLQSKAIAVENDLRATLRNFGLKVGMVGTVKFEARIKELVENLPDLAALVEPLLVVRRVLREQIGILHRRLLVIVRDDAVCRRLMTVPGVGPVVALTYRATVDVPARFRKSKAVGAAFGLTCFKYQSGEIDRSGRISRCGDEMMRVMLYEAAQSMLHSKKWSWLKAWAMQIARRRGKKKAIVALARRLAVIMHRIWVDGTEFRWARDAAAA

SEQ ID NO: 510004 - protein, 326 aa, unidentified
MFFIGIDVSKAKLDCSLLLDVASSKRRAKSVANSKAGISELLVWCVKQQVATHELHAILEGTGVYHEQAALALADAGATVSIVNPAQVKDFGRSLGVRTKTDGVDSLVLARFGAMLSPRPWTPPTQEARVLQALLSRREAIAQDLQRERNRLEKADATDTPALIRQSIVTSITFLEQQLAKFQQDIDEHINKYPHLKADRDLLISIPAVGPQVGNHLLVVMHTHQFQSAEQLAAYLGLVPVERQSGTSVLGRPRLSKAGPARIRAILYMAAVVGTQYNPHIKALYQRLQDRGKTKMSALGAAMRKLVHLCFGVLKTRRPYQANYAI

SEQ ID NO: 510005 - protein, 365 aa, unidentified
MEEKQKGLTRFVGIDIGKRTYELAIVGKGRKVTMSNGKTFETGRQRLYKQLRATDIVGLEAGNMAFIIAKELEAAVGCQVYVLNASHLPLIYGSMKKTDKEDALKLAHIVEYFPREQLPVVPLPSDQEIRRRKIVAYYRRTQQSRSRAINQLHGLFVSAGITTMKRSNFSTSENRLAAIQSLADIEREEADYLVASIEQYEHRIKALHLKIKQEAAGDEQIQRLQSIPGVGPITAFAFVSHVASERFENASQVSNYLGLVPRVSISGDTKKYGQITKRGNSYIRALLVQSSWALVLAKNDNKLKARYKYMTLEKSISKKKAIVAVARRLGELMYTLMRDKTWYMPKPFVLKMSKGEKIAHQAMSA

SEQ ID NO: 510006 - protein, 412 aa, unidentified
MQVQYPRCCGLDVHKATVVACLLQMDADGRRSTAIRTFGTTTDDLLALGDWLRANSATHVAMEASGSYWKPLFDLLDGQFTVWVVNAAHIKAVPGHKTDVHDAEWIADLLQHGLLKPSFIPDRFQRELRDLTRSRTIVVDERSAVVNRVQQVLEDANLKLAGVATDIMGVSGRAMLAAIVAGTTDSATLTDLAKGRLRSKREQLERALSGRVGAHHRILLGMHLTHIDFLDELVAQLTAEIAERLKPFEDELQRLDAIPGVGRSTAEVLLGEIGADMTRFPTAGHLASWAGMCPGNYESAGKRKKGKTRKGSKFLRRALTEAARAAARKRGCYPAAQYRRLVVRRGPGKAAVAVGHTLLVTAYYLLLRHDTYRDLDPSLLDERLRKRTRQRALAQLQALGYDVALTEHQPAA

SEQ ID NO: 510007 - protein, 464 aa, unidentified
MKMKKEKLPGTAEKPRRKRVDWKALEIVHPHAAGIDIGGREHWVAISPERDEDPVRRFDCFTADLEQMAKWLVEKGVRSVAMQSTGVYWMPVYEVLEQSGLEVYLVNARHTKNLPGRKSDIQECQWLLKLHTFGLLNNSFQPRDEIRVARTLWRHRSNLVAQASSAIQRMQKALTEMNVQIHNVLSDLSGVSGMAILKAILRGERDPWSLAALANPAVKASPADIAKSLHGNWREELLLVLRQEMELYQTYQDKIAECDHQLRRHLQSLAPKVDLQAQPLGPRPKGKKIPRGNAPKFDLRSELYRITGVDWAQVNGMDVQVAQTVITEVGVDLSCFPSEHHFTSWLGLCPMNEQSGSRILNRRTPKVVNRATVAFRLAAQGLLRSQSYLGAQYRRLRTRLGAPKAITAMARKLACLFYRLLRHGQPYVDKGAQYYETRYREQQIRSLVKRARKLGLELVQPETA

SEQ ID NO: 510008 - protein, 366 aa, unidentified
MDTIYIGVDFHARQQTICYLKTETGELVTCELKHQDKEVVRAFYAQFSGQVIVGLEASGYSPWFERMLEELGCQVWLGHATEIRRRARWRQKNDRRDAELILDLMLHNEFPRLHRPAVQSREVLRMLRYRQKLIKMRTMSKNSLQAIALQAGLAKGSRLFTKAGQQELGTAEMSPVLHWQREHWLQLMEPLNQQLLETMVWFKSQSKDDDRITRLRTHPGIGLLTSLCIVHTLQPVSRFRNTRKVAAYAGFDPIERSSAERKCFLGISKAGSRLLRYLLVEAAQTAVRKDEDLKRFYQRLADRRGRPKAKVAAARKLLIRAYIMMRDEIDYAEFRHRAVAARLARRSQGPANVPEVLIGQPASPEQ

SEQ ID NO: 510009 - protein, 407 aa, unidentified
MELVALYKRVIGLDIHQAQITACALIEEPDGAPRIEQRQFGAFKRDRRELADWVASLRPDEVVMESTGIYWKSPYAALEAVGIRAKVVNARHVKNVPGRKTDVGDAHWLATLARAGLLRGSFVPPSKLRELRLVARQRQKLVGQLASEKNRLHKVLTDSGIRLGVVVSDLHGQSARAMVKAIIAGQEPQEVLALASRRLKASREELFDALQGDLSASHRFVLDELLQHIEEIETRIARFDTRLLDELESERNTLALLQTIPGIDLIGAAMLLVEIGTDMNAFGSADRLASWIGICPGNNESAGKRKSGHVRKGNRYVRRLLCEFAHAASRTTSVFKSKFQSLVVRRGYKRAIIAIGHKILRTVFFMLKRREHYRDSATDYEALSVQRNAPRWIKALTKFGFIPPANA

SEQ ID NO: 510010 - protein, 344 aa, unidentified
MDSVMINVGLDYHPASVQVCILDADGKMLANQSCDNDWQQIVQLTQRHGIVRKAGIEACCGAADLAEELIAKANWAIELAHPGFVRRMKNSPDKHDHGDARILADLQRVGYLPKVWLAPACVRELRRLVRFRQQLADRRRDVKLRIGAILRELRISGSASRWSKPWMKWLSTAKLDESTRWILDEHLLELKQLTERIELAENRLEKKTADDPLVQRLLEQPGIGPVTAWVIRAEIGRFDRFGRGKQLSRFCGLTPCNASSGSRQSDCGLIQAGNPMLKSVLIEAAHRLARHDERWKRLYQHLRSVGKPTCVALAAVANRWIRKLFHQMKQMESTTELKTELQKS

SEQ ID NO: 510011 - protein, 345 aa, unidentified
MEPMYYIGLDVHKRKISYCVKDGAGKVYSEGSLAATRLDLDVWMKTLPQPWSAAMEATMFTGWIYDHLKPHAAALKVAHPLMLRAIAAAKKKNDRIDAGKICDCLRCDFLPECYMAPTAIRERRRTLRYRNLLVRQMVQMKIKISSLLMEAGVSYNKQRLHKAGYFRELLATNPDINEGLKPLLQLCRETVVRLQKTESAMVRSLERDSLLMDRMERLMTIPAVGPITALTWTLEVGDVQRFSSIKKAISYCGLCGAEKSSGSMMQRTPLSKQRNKHLQTTLIEAAKMAPRNSPELAMLYDKEKQKGNANGATLAVARKLVAYLVAVDRRQKEFLTVQRENRTAA

SEQ ID NO: 510012 - protein, 354 aa, unidentified
MPRKCKDTVAVLGIDIGKNVFHLIGLNNRGAIVLRQKVSRGQLEARLANMPPCLVGMEACVGAHHLSRRLQAFGHDPRLMPAKYVKAFLKGNKNDFRDAEAIAEAVQRPTMRFVATKTAEQLDLQALHRVRSRLVSERTAIANEIRAFLLDRGIAIAKGLHRLRTALPGILATRTDVLAPRLLHLIEDLISDWRRLEERIDNVSLEIGVLAQDDTGCERLMTVPGIGPIISSATVAAIGTGDVFCKGRDFGAWLGLVPKQISTGDRTILGRISKRGNKYLRTLFVQAARVVLLRPANWERYGLKPWIEAAVKRLHHNVLAIALANKLARIAWSVLHHGRNFEVRKMSEPKSQPA

SEQ ID NO: 510013 - protein, 394 aa, unidentified
MKLVGIDVGKNSHHFCVMDKETGELNVTPSSFSNNKEGFDFLINSLKPYSKKSILLGMEDTGHYHVALLKFLLSNGYTVALINPKTTDLTRKMEGGITKNDKLDTITICDVLDTPERKKQYRITKVDRFDLYEQRQLTRHHHNLKEELNVYCNRLQKSIDLVFPEFNTLFSSKYSIVYMNLLKTFGSAEAIASTDIRTIRKCFEIKGRGNRISLTPEKLKECAKNSIGISSEVETIQIKHLVSQITLIKEQIAEIDKKIEEFSITNNSPILSIPGISHFSGTSILAELGDIGNYSKPSQIIKFAGVAPYHYESSQYNAQHTGITKKGSKYLRKTLYQIILTVINNNPVFKKYYLLKISQGKGHRCAQGHCIRKLLRIIYHLLETGQSFDPALLR

SEQ ID NO: 510014 - protein, 392 aa, unidentified
MTYFIGLDLAKYKHDCFIMNESGEVIKDSFSFDNNKSGFNTLLNVLKSLDPNQEKRIGLESTGHYGSNLKIFLEDNNYTFMEFNPILISKFLKATTLRRTKTDKIDARVIAIYLSTVSYKPYPIKYYHLRNLKSLCKSRDSLVKERSLQMVRITNALDLIFPEFKPFFGKQAFKSASFVYLLTNYTLPSKISNMTIESYNKMKHKLKHPISYAKFLEVKKLAKETIGNEDPILTFEIETYLDLYKDLDSKINKFESLILEEYKTTNCHIHTIKGIGDITAASIYSEIGDISRFSSPDKLQAFAGLDPSRYQSGTSDVDGHMVKHGFSYLRKYLMNSAEMMLIHNPTLYDYYHKKIESGKSHRVALSHVAKRLIRIIYHLEKYNTNFDINKIR

SEQ ID NO: 510015 - protein, 377 aa, unidentified
MKRIKFVGLDVHAETIAVAVAEQEGEIRSLGVIPNREESVRKLVKKLGPVEQLRFCYEAGPTGYVLYWQLTKMGAACAVVAPTLVPVKAGDRVKTDRRDALKLARNYRAGELTAVWVPDAEHEALRDLVRAREAAKKDQLRARHRLSKFLLRHGRRPPVGVTPWTGMYLEWVKRDVHFAVKAQEATLLDYLHEVEHMTARITRLDDAIEEAVKVAPAKMRAVIEGLQALRGIAQISAVTIVAELGEVTRFSKARELMGYAGIVASENSSGERQRRGSITKTGNAHLRRVVVEAAWAYRHRPAIGFTLRKRQENLSEEVKEIAWKAQHRLHARYGKLMAKGKNKGVVVTAVGRELLGFIWAIGVQVEAQQKESLRQAA

SEQ ID NO: 510016 - protein, 357 aa, unidentified
MERILKQSLGIDVSKASLSLSFGTLYGNLKKEFVSHPDIGNDVSGFKSLRTWISKQVDRKEGFYVIMEATGVYHQRVCHYLYGLGYNVCVMQSGRVKRYAQSLDQRSKTDALDSRMLSMLGLERELRLWSPPSEELQQLKLLGRERSSLLKDRTTEINRQSAIDSSSCLGKRASKRHQRRLQLINEQIAAVEQEMRGLVKGDAVLRERIGHLESIPGVSFISAATVVGETLGFESISNAKQLTSYAGYDVVLKESGRFKGKTKISKKGNSHIRAVLHMPSMACVRFNPTLKLFYSRIKPNKAKPMVALVAVQRKLLVLMYTLWKKEEDYDAEFEKKKQQRPEVLAAQDSAQIKLSAS

SEQ ID NO: 510017 - protein, 350 aa, unidentified
MLIVGCDYHPGFQQIAFVDTETGEFQERRLQHRGEAEKFYRDLAARGVKVRVGMEASGHARWFERVLAELQFELWIGDAAEIRAKRVRKQKTDRQDAQHILTLLVQDRFPRIWVADWENRDLRQLLWHRHRMVQTRTRIMNQLQAVALNEGLRCKKRLWGKKGRQQLESLRLAPWATRRRRDLLELLDRLNPLIAELTQAIEQEVEKHPEAQRLITHPGVGALTALAFVLVIGTAERFQCGKQIASYLGLVPAEDSSGERRRLGHISKQGSAILRFFLVEAAQVTVRSVPEWRSKFFHLAMRRGRKIAKVAMARRLAVHLFWMWRKQWDYQQLKEFGPYAGKPGTGVGVH

SEQ ID NO: 510018 - protein, 378 aa, unidentified
MTQGLSDLLAKRGVLRLMRLPVTAGAGPASAIWPDQKPVRPTGGVTHHSLAKRIPHPGRQPIANPHEGGLRKMLADEVDSVIGVDTHRDTHTAQILAAKTGALGPSTTTGADSLGYRRMLSFAEKHAPGSRAWAIESTGSFGAGLTAHLRKQGERVVEIDRPKRPARRNGAKSDELDALRAAREGLGRNHLSEPRRRGEREAIRVVLRTRQSAVHARSVAICQLKSLIVTAPEGLRSSLRRLGDQDLASRCARLRITSAQPIDHQMTVRALRCTARRALALEAEAAELEAELQPLIKAICPQLIAERGVGTISAAELINAWSHPGRIRSEAAFAMLAGVAPIPASSGQTVRHRLNRSGDRQLKPGPAHDRDVTSPTRP

SEQ ID NO: 510019 - protein, 416 aa, unidentified
MNAVGIDVSSRKSTVAVLRPLGEVVCLPFDVTHDIAGLASLAEKLKALDGETRVVMEHTGRYYEAVEKALHEAGLFVCAVNPLLIKEYGANSLRRVKTDKADAVKIARYALDNWADLRDFTPMDAIRYDFKTLNRQFQLASKQRTASANNLIALLEQSFPGIRKCFDSPVRSDGTQKWVDFAHSFWHVDCVRKQPFAAFCERYRKWCKRHAYFFKLSNAEEVYALAKRAVVLTPKSKVVKVLVQEAANQLSSISRSVEVYRAEMDRLAAMLPEYPVVMAMYGVGKSYGPQLMAEIGDVRRFERKQALVAFAGIDPMPNQSGDKNVRSNKSSKRGSPYLRKTLFNVIRTYLQCAPQDEPVFQFLNRKRAEGKPFYVYMLAAANKFLRRYYAKLRDYFASPDTLQSVDPIPATLKASL

SEQ ID NO: 510020 - protein, 400 aa, unidentified
MSQMWAGVDVGKEHHWVVVVDDTGTVKLSRKLVNDEQPIRALVAEIDAMAERVSWTVDLTTVYASLLLTVLADAGKSVRYLAGRAVWQASGTYRGGEAKTDAKDARVIADQSRMRGTDLPVLHPHDDLITELRMLTAHRADLVADRTRTINRLRQQLVAVCPALERVAKLAQDRGWVVLLSRYQRPKAIRQSGLSRITKTLTEAGVRNASTIAEAAVTAVKTQTVRLPGEEVAAALVAELAQGVISLDDRIKATDADIEGRFRRHRLAEVITSIPGIGFRLGAEFLAAVGDPTLIGSADQLAAWAGLAAVARDSGKRTGRLHTPQRYSRRLRRVMYMSALTAIRCDPHSRTYYQRKRDEGKRPIQATICLARRRTNVLYALIRDNRTWQPDSPHITKSAA

SEQ ID NO: 510021 - protein, 343 aa, unidentified
MQTITTIGLDIAKSVFQVHGIDAEGNVVIRRQLKRRYVVAFFQKLPACLVGIEACASSHHWSRELQSLGHTVRLMPPAYVRPYVKRHKNDATDAEAICEAVTRPNMRFVATKTPEQQSCLTLHRTRHLFIRQQTSVINVIRAHLAEFGIVAPVGRNGVEQLLEVAADAGDKRLPDVARACVAALGAQLRMLRAQILQFDRMIMAWHRSSEASRRLDNIPGVGPVLATALVASVADPKMFRSGRDFSAWIGLVPKQNSSGGKDRLGHISKRGDRYLRSLFTTGALAVIRYAKIHGTGHRPWLTALLVRRPTKVAAIALANKIARMVWAIMARGERYKEPAALAA

SEQ ID NO: 510022 - protein, 414 aa, unidentified
MALKIVYQIACGIDVHKTFVVACIASTNSKGITTYKSHRFSTYTSGLKELLQWLLDRNCKDVCMESTGKYWIPVFNVLEKSCNIVLAHPKYVKAIRGKKTDKKDAKWIADLFKHDLVAGSFMPPADIRQLRDLMRYRFKLTCFQSSEKNRFQNCLTVSNIQLGNIVSDTFGKSSQQIINKILENPLDTSFDLNPLVHGSMKKKLPELELAIDGYITPEQAGKLKIIKSHFEDLETRKAELEELILVLAAPYQQELDIILTAPSFKNIFSAITVISEIGVNMEAFPSAKHLCSWAGLTPTNNESAGKKKSVRVSKAGCYIKPLLVQCANSVAKSEKHPEIRNRYLRLRKRRGHKKAIIAIARMLLTALYNMLKNKEPYNAELYRKSDVLPVDREITVEQAIIMAQFQGYRINFGS

SEQ ID NO: 510023 - protein, 262 aa, unidentified
MFPVGIDVSKNTLDLCMLYDGIKGRIKTRNIQNNRHSVENILRWLRLQHCGPEDVHVVMEATGVYHERLATELHDADFRVSLANPHRSREFARGMGIMTKTDKVDAYMLACYAFLKKPHRWEPPAPEIRYLGALLRRRDVLLGDALREENWLEKYLSTDTPADIISSCRRMAQLLREEVSNIERQIKAHIKACPALRRDYTLLTSIKSVGPQLGMHMLVVLRSHNFASAEQAAAFLGVVPIEKRSGTSVRSRPRMSKIGPLS

SEQ ID NO: 510024 - protein, 417 aa, unidentified
MESTAQTTLPDVPPNGVTCGIDWARDDHAVSIVDARGREVRRATVEHNAAGMRELLDLLSRTGAREVAIERPDGPVVDNLLQAGITVVVISPNQLKNLRGRYGSAGNKDDRFDAFVLADTLRTDRTRLRPLLPDTPATATLRRTCRARKDLVGHRVALANQLRAHLRVVFPGVVGLFAEIDSPISLAFLTRFDCQDRADWLSVKRLAAWLAAASYCGRVDPAVLHGRLTRAPRGAAGDEGAANAHVTRALATALTSVATQIRTLDAQIAEQLALHADAHIFTSLPRSGTVRAARLLAEIGDCRARFPTPESLTCLAGAAPSTRQSGKLRTVGFRWSCDKQLRDAVTDFANGSRDANPWAADLYDRARARGHDHSHAVRILARAWLHVIWHCWQDRAAYNPETHRALQRVLATQPEAA

SEQ ID NO: 510025 - protein, 400 aa, unidentified
MLSIGIDVSKGKSTVCGMKPGGEIVYAPFEVQHTREGMSELVSLLRSSGEEVRAVLESTGSYHCPVVAALLENGIFVSVVNSLRMKRFCSQSIRKVKTDRIDAMQIALYGLAYWQELQPTRLPEDTYRELQLLARQYYQMTSMLIKAKVDFNAICDQVLPGMQELMSDHAGRHKLSDFVLRYHHTTHILEMGETRFRKDYCKWAEKKGYRNCERMAVLIFATAQNGIPVLPNAPSTQIVITEAIRVLHTVEASRDAILTQMQALAKTLPEYSLVREMPCIGDTLAPRLIAEIGDVRRFHSKRALIAYAGIDAPPYQSGKFCANNRHISKRGNRYLRKTGYEVMQSYVMHKPANDPIFTFIEKKRGEGKSGKLAMVAGLNKFLRVYYGKVTELYRSLPTIE

SEQ ID NO: 510026 - protein, 335 aa, unidentified
MSDLKEKITVGIDVGCYKHRVAIADSAGHIIEEFNIDHDHLGFAHLLYKLYCYEKDYDSSVVVAMEGVNGYARPLDKMIISKGYKLLNVNNLKLSRFREMSSSPAKTDALDAREIIKLVLYSGNFKWGKDVIQEVETVPEEHNILKRLTRRRRQLVEDKVRIMNRMESDLQAVCPEILKLVKNKDSDCFLNLLTCRQSLKEIARIRRTTLLKIRGIGKKFADKVQEWQKEAHFSDEIDIVAPMVVLDASMIQELKKNIKELNLQIAEIVNSSRLGQLISSIPGFGLICTGEIVGEIGSMNRFDAEFSLAYYLGMAPLDNSSGKKQGTKIPRNINT

SEQ ID NO: 510027 - protein, 366 aa, unidentified
MKSPAGLEAQRGPAMEQSISSVIGIDLGDRVSHACVLSKKSGEIVERRRLATTRKGICDLLEKRERSLVAIEVGTHSAWVSRTISVLGHEVLVGDARRLAFIFKSNDKSDRSDAENLARVARLDRGLLYPIQHRAETAQVDLAVLRVRNGLVEVRTKLINQVRGLVKSHGSRLRSCSATSFLSKAAPSIPDELRAAVRPLLDVLQEVGKKIRQCDAKVKELCKEGYPETELLRQVVGVGPVTALAYVLVLGDPARFERSRDVGAFVGLTPRRDQSGSRDPQLRITKAGNPFLRRLLVQAAQYILGPFGPDSDLRRFGMAMTDRGGANAKKRAVVAVARKLAVLLHALWKTGSVYESLRAQEPAAVA

SEQ ID NO: 510028 - protein, 385 aa, unidentified
MMSSVIRGLHGNHDKLLLALLADAGDNAEDAIPVAVETSRGLLVACLRTTGRKVLAINPMAVSRYRDRHSVARKKSDAGDALVLANIPRTDMAAHRPLPADSGLAQAIAVPARAQQDAVWDRTCAHNKLRSLLREYYPALLETFTDERGGLLRPEARALLAAAPTPRAAAQLTTTQLTTLLHRAGRQRGIDTEATRIQAVLRGEYLHQLPLVEDAFGRQALALLRALDTASTNAEELAAATIDHFGKHPDAEIITSMPGRGSLTGARMYAEIGDDRSRFTTARALKAYAGSAPVTRASGKSRTVSHRRVKNQRLASVGYLCAFAALTASPGARAHYDRRKTTGDRHTAAQRNLFNRLLSCLHTQQHYNEHATFPTTHNNPTTAAA

SEQ ID NO: 510029 - protein, 362 aa, unidentified
MIGQRTSVGLDVHARSIVGRGLDVQTGEVLRARLTPAHEDVIGWLRSLPGPVKASYEAGPTGFGLARALQAAGIDCVVAAPSRLLRPSGERVKTDAKDALHLAQLLAVGQVTAVAVPDEETEAARDLVRARDDVRGDLMSARHRVTHLLLRQGIVYSGGTPWTREHENWLRTQRFTRPALQAAFDAALEALAATEGRRDRLDEAIAKLAAASRFTPVIDRLACLRGISTLTGFGLAVEIGDWARLSPTTIGAYLGLVPAEHSTGESRSQHGVTKTGNSHVRRLLVEAAWHHRPPYRPSTKLQRRWERAPGPVVAHAAKGNRRLHARWQSFDARRKRPVVANLAIARELAGWCHALAVMAPGG

SEQ ID NO: 510030 - protein, 346 aa, unidentified
MVIVGCDFHPSWQQIAWLDTETGETGECKLVHATDEAKEFYQQMAAPALIGMEATGNSQWFIELVEDLGHEIWIGDAAQIRASYVRKQKTDKRDAAHILKLVVEGRFPRLWTPDREQRDLRQLVLHRHKLVEIRSRVKNELQHLSMNKGMQKKRTLWSQAGQKMLRELPLKPWAGCRREDLLGLLAMLDQQVGKLDKAVQTAAEQHAQARLLMTQPGVGPNTALAFVLTIGDVSRFPRGKQVASYLGLIPREASSGGQQKLGAISKQGNRLVRSLLVEAAQIAVRYDEGLRKQYLHRCHQKPKGVAKVAAARKLAVRLYWMLRTQVAYPEIVRIESSPRVALVGAS

SEQ ID NO: 510031 - protein, 310 aa, unidentified
MPLIKYLGVDLCKLELVVDLAAEAKPRAFPNDVHGHAALIAVLPEGAHLVCESTGGYQRALVAALHAAQIPVSVVSPSRVRHFALAKGLRAKTDPIDARLLSVFGQAMSCVALPPPCAGALELQALVRARQVLHTQLNEESSHDEHCTVALLQEQALARRALFHEQIRAIERRLRALIAANPVWRARSQRVQEVSGIGEVNAWIVLAELPELGQLARGQPGALLGVAPDPDDSGPRHGPRHISGGRSHARKVLYMAALTASQHNPVLAPYYRHLTEHRHKPHRVALTAIMRKLVELLNRLLADPNFILAS

SEQ ID NO: 510032 - protein, 342 aa, unidentified
MTIQTIGLDLAKHIFHVHGVDATGQVAVSRALKRVDVSGFFANLPPCLVGMEACGGAHHWARTLMAFGHTVRLISPQFVKPYVKSNKSDKNDAEAICEAVSRPSMRFVPVKTDPQLDILAVHRLRSRLVANKIALVNQIRGLLAERGIIMAREVASLHRRLPEILETVDNGLSDNFRPLLAELYRQLVELETQIHQYDRQIRCIYTQHEACQRLGAIEGIGPLTATALYAAAGDARVFKNGRQFAAWLGLVPKQHSSGGKPRLLGISKRGDVYLRTLLIHGGRAALGRAGHKTDPRSQWLCALRARHHYNVAAVALANKNARIAWVLLARGETYRRAQPTAA

SEQ ID NO: 510033 - protein, 372 aa, unidentified
MEQNSSLFVGLDVSKLKISVAVADGERGGEVRFHGDIASDPASVSATVQKLAKRGATLHFCYEAGPTGYELYRQLIEMGHDCIVVAPSLIPKRPGDRVKTNRRDAVSLAKLHRAGELTAVWVPDRGHEAMRDLVRARESAMEAQRRARQHLQAFLLRHGHIYSGRKAWSLAHERWIARLKFEHPTHYVVLKEYCQTVEDSAVRLQRLTDLISETVDTWTMAPVVRAYQALRGVALLSAVVFVVEIGDVRRFENPRQLMAFLGLVPSESSTGEHVRRGSITKAGNRRARRVLIEGAWTYRFPARVGRTQQAQLEGLPREVREIAWKGQVRLCSRYRKMISAGKHKAITVTAIAREMGAFLWAIGQEVQPAPQA

SEQ ID NO: 510034 - protein, 450 aa, unidentified
MEILYTNCAGLDVHKKTVKVCLLTQPSNGQPHKEFRTYFTTTEELLKLGDWLKEQGCTHVAFEATGVYWKPVFNLLEGSFTVLVVNAQHIKAVPGRKTDVKDAEWIADLLQHGLLKASFIPSVPQRELRDLTRYRVRLTEEKAREVNRVQKTLEDTNLKLGDVGSSIMGKASRMILQAIADGESDAGRLAALAVGRVRADQGQLEAALKGNVTDHHRFLLQEHLTQIRHLEQAIERVTAEITRRFTAPAPPEETTPSQKEEGATQEISSDSASHLEAPSSEHPALSWAEAVVLLCSIPGISERTAIGILAEIGTNMQQFPTAGHMASWAGVCPGNHESAGKRLSGKTRKGNPWLRCLFVQAAHSASHQKQCYLAEQYRRIAKRRGAKRAAIAAHSILVIIYHLLSQQTTYQEKGETFFEEQERQGAEKRLVRQLSRLGYHVELQPAALAG

SEQ ID NO: 510035 - protein, 358 aa, unidentified
MIEEDGIRHVVGGVDTHKDLHVAAVVDERDLVLGTRCFATTRQGYRQMLGWMRSFGELRRVGIESTGSYGAGLLRFAQQAGIDVLEVTTPDNQDRRRRGKNDDLDAQNAAHAAFAGKRTVTPRSRDGMVESLRVLAACRKTAVAARRVALQMIQNTVVCAPDGLRDTLRAMTRMQLIRTLAAWRPDLSAYRDVEAAYRISLKSLARRYLELHDEIADLDAMIGAIVDELAPDLIARNSIGHTGAAQLLLTAGDNPERLRSEASFAALCGVSPIPASSGKTVRHRLNRGGDRHANSALHIIAIGRLRTDPKTKAYVAKRVAEGHSKLDAIRALKRYLAREVFGLIARRQKEINQTRIAA

SEQ ID NO: 510036 - protein, 497 aa, unidentified
MVKKHAPRSTMDFPVINANASGCDVGSEWVYIAVPPDRSDTEVRRFRTFTQDLREAVQWMLACGITTVAMESTSVYWIPFTQLLEESRIQVFLVNPRHVKNVPAAFKTDNRDSRWLRNLHAVGLLSASFRPEQAVCKVRSLARHRDNLTKQASRCVLHMQKALSQMNILLHEVIADVTGVSGLAVLDAILAGNRSPEHLARLFSPRVKATDEEIKKALVGDWRDEHLFTLRQSLASWRHFQSQIAECDTEISRLLSEFGDPPDPPDPPDPTDTFVQAAAPEAPVQTEAPLEGDTSATCMASAESDASSKPKRKKPGRPANPTGTRAQERKKRDLLIRLFGIDITQIPGIGVGCAELFFTELGRDLSRFHSAQHLASWLGLAPNNNESGGKILSRKVRRMKNRLATQLRLCANTLGSTNTYLGAYLRKMKSRLGAPKGITATAHKLAVILYTVITRRTPYDETVFARQEERHREKRLNYLKQQAAAMGFDFVPRECVS

SEQ ID NO: 510037 - protein, 419 aa, unidentified
MCKKIGNMIDQITVGIDVGCHQHRVAIADPGGHIIEEFDLPHEHLGFVHFFYQLLIHEQNYGLPIVIAMEGVNGYARPLDQMILKKGYKLLNVNNLKLCRFREMFPSPAKTDTLDAREIIKLVISAPQFGWGKKVLQEVEATPPEHKVLKRLTRRRRQLVEEKVRLLNRMECDIQSVCPELLELVENKDSQCFLNLLTFKGSLTDIARIRRPTILKIYGIGKVFADKVQDWQKDAHFSEEIDIVGPMIMSDAGRIRELKTIISGLEKKIARLIGTSRLGQLIESIPGFGVTCTGELVAEIGNISRFTSENSLAYYVGMAPLDNSSGKRKSTKTPRNVNTRAKMAMMTAIAHHIRSVPESKIYYNRKRREGKKYNQAVRSLGRHMVRVIWSMIKHDQFYRIKDLENLKDVKKEGNIAMVA

SEQ ID NO: 510038 - protein, 349 aa, unidentified
MLADEVDYVVGVDTHRDQHVLAVVVASSGGVLAQRSIRSNARGYAEAMRFAGDHAPGARIWAVEGAGHYGAGFARYLSSRGETVHEVGSTVRGERRLQGKDDLLDATRVARSALASTARALPRSGERQEALRLLLLARRSAVDVRRIAIVQLRSVIVTAPESLRDELRRLPLGELLRRCSRFRRSSSRTPDQLATILVLRSLAQRIQAATREATELEREILAHVRALVPELLNEPGVGPIVAAQLIVTWSYRGRVTSEAAFARLAGVAPLPASSGLTTRHRLSRGGDRQLNRALHTVILHRRQHDPATRDYIARRTTEGKTTRDATRILKRYLARHLYRLMQNASPAMT

SEQ ID NO: 510039 - protein, 335 aa, unidentified
MAKNVIQVHGVDERGKTVLKRQLKRDQVASFFANMPACLVGMEACGSAHHWARKLQSLGHEVKLMAPQFVKPYVKTNKNDVADAEAICEAVARPNMRFVPIKTAEQQSVLSLHRARQAFVKARTAQGNQIRGLLNEYGIVIPQGIGHVTRRLAEIVEDGENELPGRFRRLLQRLADNLKEMDRQVGELEREIKTWHRESEASRKLEKIPGIGALTASALTASIGDASCFTSGRQMAAWLGLVPRQRSTGGKATLLGISKRGDTYLRMLLIHGARAVIRVCERKPDPDRWLKDLMGRRNKNVSAVALANKNARIAWALLRYDKEYASDYAPAFAAE

SEQ ID NO: 510040 - protein, 391 aa, unidentified
MIFVGIDVAKDTHYAAVSDDSGAVLVKPFAFQNNAEGFCLLLKKLSEFDRSKLLIGLESTGIYSENLICFLYESGFRLAVINPIQTATLRKTAIRKTKTDKVDTMLIIKSLMVNSYRLYSLRDADSLKLRTLCRFRQNLKKSKARLKIQLAGYVNLVFPEFGKFFKSGIHIAASYALLKKYSSPKEIAALRTSTLCTLLSKASHRRFGKDTAEALKSLAISSVGVKNPYISIQIAQTIAQIELLEQQINDLNSAIEEAMESLNSVLMTVPGIGAVNAACILGEIGDIKRFSKPCKLLAYAGLDPTVRQSGQFTAKSTRMSKRGSALLRFALINSAWQLTLNDTTFKAYYDLKCSQGLNHYGALGHVAHKLTRVIFKLLTSDTPFNPAKLVA

SEQ ID NO: 510041 - protein, 321 aa, unidentified
MQAILDNCCGLDVHKDSVVACILKTQSPLTLALGNNQEDVTKEIRVFKTFLNDLTQLRNWLETEGCCHVAMESTGVYWFPVYDALEDACDGKMELLVTNARHMRNVPGKKTDIKDAEWIATLLRAGLLRGSFIPPLDVRELRQLTRYRKNVVEDISTQKNRIEKTLQQAGFKLSTFLSDIFGVSGRNLIHVLIQKGKLTPIDVENATKRISPEKKNAIKLAINGLLSEQQRKFLQLQITMLDELLRHLTAIEQSISELSRPFMDEIDRLDTIPGIAVTAATAIIAEIGVDMSKFPTAEHFCSWAGVTPGDNQSAGKKKYPN

SEQ ID NO: 510042 - protein, 366 aa, unidentified
MKRKVYVGMDVHKETIQIAYLTSNSKEILKEQQIKHNEVQIKKFIKKLKLEWNEIHCCYEAGVTGYPLYRYLKSLGVNCILVAPGKIPRQNTDKIKTDKRDAIKLARLMRSGELESIHVPSEEDEAVRDYLRSRDSLRLDLGRNRQRLMKFLLRKDIKYSTTKYWTVSHYKWLNNLHFNNEILQETFNDYYSRVRVQEENLKSMDKKIQEIAESEPYREKVGILRCFRGVDYLTAMFLLCEVNDFKRFKTAGSFMSFLGLVPGEYSSGSKRKQTGITKTGSPRLRRILTEAAWQHRFPGTGSKIITARRSGQPALVVALSEKASLRLHKKFRNLQRKNSSSDDNGSFKRVIRISLGGNESCSLKLE

SEQ ID NO: 510043 - protein, 412 aa, unidentified
MEVLYQRCAGIDVHKKTVVAAVRLAEGGKVTTEVKTFATTTTGLLGVADWLAENDCTHVAMEATGVYWKPVWHVLSDGELQLVLANAAHVKNVPGRKTDVSDAAWLADLLAHGLIRASFVPDGPAQELRALLRTRKQLVREKTRHTQRIHKTLEDANIKLDAVLSNVLGKSGRAMLDAMIAGESDATRLARLAHPGVKCPPDQLCEALRGRLTRHHRFLLQLHLGQIDGLDAAIGAIDQEVAGSLAPFRTAAELVSTILGVSTLSAETIVSEIGTDMSRFPSAGHLLSWAGLCPRNNESAGKRRSRRLRKGSPWLKTALVQCAWAASRKRQSYLQALFLRLKARRGPQKAVCAVATSILVAIYHMLKDGTVYQDLGPDHFRRRSMTSHTQRLVKRLQQMGYAVEIKPILALA

SEQ ID NO: 510044 - protein, 370 aa, unidentified
MLTRTLDNEEIIERVAALDIGKAELMCCARVPDEDHRGRRLQEVAAYSTLTRSLHGMSDHLACLGVTRVVMEATADYWKPVFYLLESAGFQTWLVNAKDVKHLPGRPKTDKLDAVWLCKVAERQMLRPSFVPPPPIRRLRDLTRYRADLVAARTAEKQRVEKLLEDAQIKLSTVVTDIFGVSGRDMLAALAAGERNPKVLAQLARRSMRKKITVLEEAFTGHFTGHHAFLLTTMLSRVDAISADIAALDARIAEQAAPFADLVARLDEIPGISLASAHVILAEIGTDMTRFPTAGHLTSWARLAPASRNQPGRRKARAPPATATPTWPPSWATPPPAPPKLTPSSANGTGASPAAAAPNARSSPPAAPSS

SEQ ID NO: 510045 - protein, 400 aa, unidentified
MTPPRARAWAGIDAGKGHHWAAVVDDTGATLWSKKIDNDETAILTALGEILAVAEEVSFAVDISGTASALLLALLAAHGISAVYVPGRTVNRMSGAYRGEGKTDAKDAYIIAETSRHRNDFATIDVPAQLAADLALLTAHRTDLVADRVRMINRLRDVLTGVFPALERAFDYSAHKGALVLLTRYQTPAAIRRSGQTRLTAWLANRGVRSAETVAATAIAAAAAQQTTLPGEAVAAQIVAELAKAILDLDDRIKRLETQIRDTFHTHPQAETIESLPGIGPILGAELVVAAGDLASYADAGHLASAAGLVPVPRDSGRRTGNLHRPKRYSRRLRRVFYLSAQTSIIRDGPNRDFYLKKRSEGCLHVQAVIALARRRVSVLWALLRDDRVFTPAPPVALTA

SEQ ID NO: 510046 - protein, 339 aa, unidentified
MSIVNSARWFVGLDYHQDFVQVCVLDESGKIVRNSQVQNDWRKIAAAVPAGAAVQAALEACCGAADLADELVEQAGWSVGLAHAGFVNRMKQNPDKTDYSDARLLADLLRVGYLPKVWLAPAELRELRRLVRYRQQKVNERRDVKLRIRAILRDHRIKDLDGNPWTKKWLAALAALQQIGEDTEWILQRHLASLERLNREVRQVERRLEDRVAGDALVRKLREQKGIGLVTAATMRAEIGRFDRFQTGKQLARFCGLTPRNCSSGNKQADGGVILAGNPQLRAVIVEAVHRIMHCDERWMRLAQRLKQRGKHICVVVAAVANRYVRWLHHTLQPEALAA

SEQ ID NO: 510047 - protein, 336 aa, unidentified
MEHLAIDLGGRESQICVRSSDGQILEERRCRTGALAGYLARRPPSRVIVETCSEAFAIAEAALSVGHEVRVVPATLVRTLGVGARRLKTDRRDAQVLSEVSCRIDLPSVHVRSRQARERQTLCGMREALVGARTKLINSVRGWLRAEGRRPRGGDVATFTARVRALAVDAPFPSYVERQLRTVEALTIEIREADRELAAAAKADPIGRRLMTVPGVGAATAVRFVAALDEISRFPGAHAVESYLGLVPGEDSSADRKRRTSITKAGPTALRWCLVQAAWAARRARRKDPMHRWADEVEKRRGTRVAVLALARKLAGILFAIWRDGTVYEPRRSGAV

SEQ ID NO: 510048 - protein, 391 aa, unidentified
MSMYFVGIDISKYKHDCCIISAADQQIISKFTITNDKDGFEQLLTALNSLSNPEDIKIGFESTAHYALNLELFLENAHHSFMEVNPVLIKEYKKSTTLRRTKTDSVDCESIARWLMTVEYKPHSKGFYHAYSLKSLTRLRDRLIRQRSFYLVKITNVLDHTFPEFKPFFNERLSKTALYLLENYGSAEKMARMNSASYDKLRCISRGKFSIQQFLRLKELAANTVGVNNSIFDLELNTLLTLYKSLSDEINTLETEIIKLIEEVHPHYMSIPGIGPISAAVIYAEYGDISNFSNPGQMLAFAGIEPGINDSGTESHGGRMVKHGSSQLRYVLLNACLPLIRFDLTFATYYAKKRAEGKKHRVAITHVAKKLIRVIYALERQDVDFNAQKLR

SEQ ID NO: 510049 - protein, 348 aa, unidentified
MIIIGVDFHPEFQQIASVDTDTGEFQEKRLAHPEEAEKFYRALTGPKVRVGMEASGHARWFERLLAELHFELWIGDAAEIRAKRVRKQKTDRQDAQLILQLLLEERFPQIWVPSWENRDLRQLLWHRHRMVQARTRIMNQLQAVALNEGLRCKKRLWRERGREQLEAFRLAPWASRRRRDLLELLDRLNPIITELTHAIEQEVEQCPAAQRLMTHPGVGPLTALAFVLIIGKADRFQCGKPVASYLGLVPVEESSGNRRRLGHITKQGSSILRFLLVEAAQVTVRRVPEWRSQYFHLAMRRGRKIAKVAMARRLAVRLYWMMRQGWDYEQVKKFGSHAGQPGHRDGVQ

SEQ ID NO: 510050 - protein, 412 aa, unidentified
MFKIFRNNCCGLDVHKTWIYACIGITDANGRTEYKQARFSSFSKGLRDLAAWLANYSCFEVCLESSGKYWIPVFNILEKTCLVTLAHPKYTKPQKGNKTDVKDAKWICDLFMCDMIKPSFIPSPEIRQLRDLIRYRIKLTNMLTGEKNRAQNCLTVSNLKLDDVFSDVFGKSSRSITNHMLDHPGETFDVAPFVDARCQTPLDEIQAAVDGAISSEQAVKLRQCLAHIDELEAHRKEIEREILMIAEPFSAVLELLYTLPGLDKNPMTAIAILSEIGPDMSVFPSSKHLVSWAGCCPRNDQSNQKVKSRRISRAGCYLKPLLVQVANALIKSKKHPEFKERYRRIKSHRGHKKAIIAVCKMLLTAIWNMLSKLEPYNPDGFLEHRPVNEKRVLTKSQALELLRLRGYTITND

SEQ ID NO: 510051 - protein, 410 aa, unidentified
MNAVGIDVSKGKSMVAALRPLGEVAITPYEVPHTEAALECLAYRIIELGEDTRVVMEATGRYHEPVAATLHEMGIYVCILNPIVIKQSGGGSVRKVKTDKKDALKIAKYGLDNWVKLREHTPMDTIRQQLKLFSRQYNLYMKTAVSLQNNLISLLDKTFPGVNELFSSPARADGHQKWVDFTATFYHCDCITRVSLQAFTERYRKWCKRKGYSFSQEKALDVYAASAGHFPTLPKNDNTKLLITSAAAELTATTKVLMAVKAEVIRLATQLPEYETVLSMYGVGEITAAQLMAELGDVRRFSNRGSIVAFAGIDPEVNESGSYARVSNPSSKRGSPHLRKTLFQVVSTHLKRSPTDEPVYRFLDKKRAEGKPYYVYMTAAANKFLRIYHARVKACLNALDESGNTPCSNN

SEQ ID NO: 510052 - protein, 421 aa, unidentified
MQVIYERCAGVDVGKDVIAVAVRTPGTGKKDGRKTEKRTYRTFYGVLREMARWLASQGVTHVAMEATGTYSMPVYYALMESDFEEVLVCNAGHVKNVPGRKTDLADAEWLAQLLECGLLRGSFIPPADVKAVRDLVRYRAKVARQRVSEIARLGDVLQDAGIKIDSVASSVATKSGRAMIEALIDGERRSAVLADLAKGRMRSKIPDLSMALEGRFLDHHAVLCRLHLDHIGYLEKAIAEIEARIDAMMQPFRAARDLLVTIPGVGPLTAAAVLAEIGPSPRQYFPTAGHLASWAGLCPGNNESAGKRHPGKRRHGNPYLQSVLTEIAWAAVRHDGYLKSLYHRHVTRNGGYRSATAKGKAITTVAHAIPVIIWNILATGIPYDDLGAGYFDRRPDPDREARRLIARLEALGKHVTLDDAA

SEQ ID NO: 510053 - protein, 341 aa, unidentified
MSIVGAFDVHRRQLTFEYLDTGTGELNRGRVVPADREHLRQWLARFGGQDDVHFALEGCTGWRYVVEELAAAGIMPHLAEPADTAALRGRKRHAKTDKTDSRHLRSHLLAGDLPESWIPPGHVLEARAVVRLYKDLLDERGAWHQRIAATLFHQGVPVSASMATPAGRAAVAQMDLSAAGWQAVETGLRQVDRLTGELEPLRRQLQMISRRQPGCRALRATQFGVGAVTSVAIWAELGDVRRFGKSDDVIRHTGLDITVYSSDGKRSAGHLSRQGPQLLRWALYEAAKCAAKPASPDHGYYTATRDRRTGGLATLSVARKLARRCYHTLRELGEEAMAPAA

SEQ ID NO: 510054 - protein, 321 aa, unidentified
MTYVGIDVSKVTFVVAYSSVKTNKTRTFKNTVNGVHEFVQTISASEHNCVLEATGNYSALLVYLLSEAGITISLENPLKIKNFARVMLTVTKTDEIDARLIALYGEKMQPAPYKLRSDAILVLKQKRTVLRQLKKQLVATRNLKGSMEVLPFFDPKCKKTIEKTITFLEKQIKEMEEELASLAQGEYKKQMDLLTSIKGIGVTLAAPLIVATGRFSYFDNAKQLTRYLGLSPTYQQSGTSVNVKGHINRNGDSSLRSQLYVAAFSSLRCNTECKACFDRLRSNGKPGKVVVIAVANKLVRQAFAVVTQGKPYVDGFKSAKP

SEQ ID NO: 510055 - protein, 312 aa, unidentified
MVVIAGIDVSKDKLDIHVLPSNQTFVVGRDPRGLASLARRLRKAGVEQVALEASGDYERIVIEALEADGFVVQLLNPARVRAFAEAIGMLAKTDPIDARLIALYCQHFPDTGLTRRPEQARKLGEFLNMRAMLLKLAGEIRNSLEHVREPGLKALADTLSADIAAKLKDVDDRIAKVIAGDDATMRKARIIRSFTGAGPVLTSGLLARVPELGGVTRHAAARLCRAAPTDRQSGRTRHRSSIEGGRDQVRPVLHMAALAAIRSNPIIKAFAHRLSAAGKPKPLVIAACARKMVVILNAMLRDNTEWKYAKAA

SEQ ID NO: 510056 - protein, 427 aa, unidentified
MNSTQNDKISQITENTMVVGIDIGCFTHYARAFDWRGREISHLYHFLNCRDQFERFLRWMREVAHENGMKNILVGLEPTGHYWFALGQFLEEHHVTLCMVNPYHVKQTKELDDNNQTKNDQKDPKVIAKLVLAGRYSYPYVPKGVYADLRILSSMHLGLNKSLIQYKNQIARWFTIWFPEYREVFKDIRAKSSLLVLEKACTPDAILALGADGINAIWRGARIRAVGMKRANRLIEAAHRSIGQKEGRETAAFQMKMLLTDYRKAKEQEDEVIEKLEQLCKRIPATEQMLSIQGIGIKTVAGFLAEVGDIGRFQTPKQIQKLAGLALKENSSGKHKGATTISRRGRARLRTLLFNAAIALIGKNDAYRKLHQHYTQRSKNPLKKKQSVVAISCKLIRIFYALLSKDIAYDEEKMLKDIVWESENTVA

SEQ ID NO: 510057 - protein, 337 aa, unidentified
MAAVVDNHDRILGTSSFAATRQGYRQMLAWMRSLGQLQRVGIESTGSYGAGLLRFLQAAGIEVLEITAPDRQDRRRRGKNDDLDAQNAAHAALAGARTVTPRTRDGMVESLRVLKACRKTAVTARRVALQMIHNTIVCAPDILRDQLRHMTRMQLVRTLAAWRPDLTAYREVEAAYRISLKSLARRYIELHDEIADLDMMIKAIVEDLAPELVARNSIGHNGAAQLLLTAGDNPERLKSEASFAALCGASPVPASSGKTVRHRLNRGGDRAANSALHIIAIGRLRTDEKTKTYVARRIAEGHSKLEAIRSLKRYIAREVFGIIMRRQQDINRTRIAA

SEQ ID NO: 510058 - protein, 407 aa, unidentified
MRAVYERCCGIDIHKKVIVACLRVGRKEELREFGTVTNDLRMLVSWLTEQGCEMVAMESTGVYWKPVFNILELSGIPAMVVNAAHMKNVPGRKTDAKDAAWIADLLQHGLLRASYIPDKEQRELRDVVRYRKSLTEERAREINRLQKMLEGANIKLSSFVSSVVGVSSKKLLNQAMTDEGVTADNITSLLHASMTDKTNDILLAMDGILTLMQRQLVRAILNHIEDMTKRIAEMDDIVGGQMQKYEEQIARIDEIPGIGRHSAEVILAEIGLDMFRFPTASHLASWSGLCPGNNESAKKRKSGKTTKGNNYLKSTLIQCAQSAIKNTESFFYAQYQRLVVRRGANRAKVAVAHSMLIAIFQMLKNNTPFKDLGSDFYSKFNEQTKINYYMKKLKELGATVLLEVQSV

SEQ ID NO: 510059 - protein, 347 aa, unidentified
MLADELDYVVGVDTHRDAHALAAVHARNGAAVFEAEVAAGAHGYASALCLAERHAPGRRAWAIEGTGSYGAGLARFLTAQGERVLEVGRSKREQRSHAKTDALDAIRAARTVLGTTKLATPRAGGRREALRALMVAREGALTAKKAGLCQLRALLVTCPEPLRSELRSLTRARLLRRLAAVRPHRHQDAELRGSLTALRALARRVQALTAEERELKREIQALVAKLAQPLLDEQGVGPVSAAQALISWSHPGRVRNDAAFARLGAAAPIPASSGQTVRHRLDPGGDRQLNRALHTIIVSRRKSHAPTIAYIERKTREGKSIREAIRCLKRHLARHIYRVLERTAMTA

SEQ ID NO: 510060 - protein, 358 aa, unidentified
MESQEVKYVGVDCGKKSIEVVRINSENSLERRQFSTTESGINNLLQWLTLNDIVGLEAGSQSFRIAKSILNKGVQVIVLNPGNLATIYQSLKKTDKEDSLKIARLIQRHPIEELPTVPIPNDEEEDNRRLCSEHENWTKQLTQGKNRLHSLFTQAGLTQITKKHLRTKVSREASVTLLSDRYKKEAERILKVLDLVEQNLKLIEKEIQEALKKNKAYVQTIMSMPGIGMITSLANYESYMGDCKRFSSAKQAAYYAGLVPRVDISGDTVRYGRIINRGCHSIRRVIVQAAWSLVRCQHGGKVKEFYQRLYLKKGAKKSIIATSRKMIEVLYVMIRTGKLFDSMPENILNRKLTQYGLM

SEQ ID NO: 510061 - protein, 314 aa, unidentified
MDKQEYTTFIGIDVARDHLDIHTLPDGDAFCVGRDEQGLSVLIEHIGEYSAPLVCLEATGGYEMDVVSALADAGIAVVVMNPRQVRDFAKATGRLAKTDRLDAAVIAAFAQAVRPAVRSLPNDEERRLSALSRRRRQVVDMAAAEKKRLKRERQKDIRSRISAHIAILITERNELDAEMRTIVQSDAEWREKAHLLQSVPGIGETTAFILIADLPELGTLERNPIAALVGVAPINRDSGAMRGRRMIFGGRKHIRNALYMATISAVQFNPAIRNFRDRLKAKGKPPKLVLTACMHKLLSMLNAIIRDQKEWKIA

SEQ ID NO: 510062 - protein, 318 aa, unidentified
MASFLGIDLSKDTFHAHLLSDSAEAKKVFPNTPKGFEQLTTWLKNRHAGEVHFCMEATGSYWEALALYLHGLDQHVSVVNPARIKAFAQSELLRTKTDAVDAELIARFCKSQSPEPWVPPAPEIRVLQALMRHCDHLKKTRAQQSVYAQSSDSTIVTASIREVIATLDEQIAQVERKIRQHFDDNPDLKRRRDLLTSIPGIGETTAGSILSEIPHLDRFESAKAVAAFAGLSPRASQSGTSVHGRPRMCKTGNARIRKALYLPAMLALRFNPTLRLFGERLSVARKHKRLINGAVMRKLLVLAYGILRSGVPFDANYA

SEQ ID NO: 510063 - protein, 347 aa, unidentified
MLIIGCDYHPGFQQVAIFDNRTGEIEEKRLGHREEAERYYRGLRGQAVRVGMEACGHYPWFERLLEEMGFELWFGDAAQVRASVVRKQKTDRRDAEHLLQLLIEDRFPQIWVPSLEVRDVRQLLVHRHKQVQTRTRTKNQLQAMALSHGVQKKWKLWTKAGRVELEQLPLMPYAAERRKHLLAALDGLEVEIVELNRRVEEEVRKRPEAVRLMTHPGVGPVTALAMVLTLGPAERFGCGKDVGSYFGLIPREESSGGKQRLGRISKQGSSFLRFLLVEAGQTAARYDPQLKRFYRRLAVRKNRGVAKVAVARKLATRLYLMLREQWTYAQLCQAVLQVSPSHSVAGE

SEQ ID NO: 510064 - protein, 359 aa, unidentified
MASIPLIPALVTGGVDTHKDQHVAAVVDQDDHVVGTASFPTTRAGYRALSAWMGGFGPLERVGVEGTGCYGAGLARYLRSQGLEVLEVTRPDRADRRRRGKDDTLDACNAAHAARAGRRVITPKARDGMVESLHVLREVRASAVIAHREALQLLHAQVIAAPEELRDQIRDLTRMRLVRTCAAFRPDPAAFRDPYTATRIALRSLARRALALDEQIAELDALIEPLVRELAPSLLDAIGFGIHTAAQLLVTMGDNPQRVTSEARFAKFCGVAPLPASSGLITRHRLNRGGDRQANSALHLVVVCRLRYDERTRAYAERRTAEGKSKPEIIRCLKRYAAREAYYLIKHDHDHPQRSHTHT

SEQ ID NO: 510065 - protein, 428 aa, unidentified
MNDTSQIFPPDGLRDAIRGEVVGMDAHSRKLSLCHMRRENGRSVKVKCIATTLDALEGTCAKHFPADVPTVLEASTNSFHIAKRLAAIGRKAVVLASDVLAGAARKDRINDRIDAENLARVVLKRDDETLQVVSTPSERGAELREEHFACRDARKDATRAVNRIWSFCSRHGLDVDRKIGKKRCEDLLREGKVRGWSEATMMRAKGLVEEWRHAVEVCDGRERVLEKEVFGNPAMTRLQQVPGIRFIGAFALVAFVEEIRRFRTAKKLSSHIGLNPTVNRSGEEEGTGKLSKFGRRDLKAVFVEAAQSAMKTDSPLVRWAKHLLARGKPWNVAMAALARKLSVLCWHILMGHPVPDRERERATKRKLALLAGRVGQETVKAAGYGKKAEYVAAVAAKLYGHLPEATVCDSPEKSLKKRRKTPKARLGA

SEQ ID NO: 510066 - protein, 408 aa, unidentified
MQVLYTRCAGLDVHKDTIVACVRCVWPPMHQEVRSFGTTTAQLLELADWLAGHDCTHVAMEATGVYWRPVWHVLEAEFELVLANATHIRNVPGRKTDVNDAMWIADLLAHGLIRSSFVPPQAIQQLRDLTRTRKQLVREVSQHSLRIQKVLEDANLKLGRVLSDVLGKSGRAMLDAIVAGQTDPACLAALAQGTARIKTAELREALRGRITDHHRTMLRLHLQIVDALQRTLAELDAGVGKALAPIQQRTRLLTTMPGVSDLTASVVVAEIGVDMSRFPSAGHLVSWAGLCPRSDESAGKRRSTRTRKSGTWIKTTLVTAAWAAVRVKTSYLRAQFLRIKARRGAKKAILAVAASMLTAAFHMLRDGTEYNDLGSEHFDRQDKSKTIRRLLKRLQDLGCDVPEMLHTA

SEQ ID NO: 510067 - protein, 351 aa, unidentified
MPATAQTAVAVIGIDIGKNSFHIVGLDSRGAIVLRQKWSRGQVEARLANMSPCLIGMEACVGAHHLSRKLKALGHDARLMPAKYVRPYSKGQKNDFRDAEAIAEAVQRPTMKFVATKTAEQLDLQALHRVRERLVSQRTGVVNQIRAFLLERGVAVRQGLRFLRAELPRLLATPPDVLSPRMVRVIESLAEDWHRLDERIDHLSDEITALARQDAGCERLVSVPGIGPIISSAMVAAIGNGDAFSKGRDFAAWLGLVPKQISTGDRTILGKISKRGNRYLRVLFVQAAWVVLIKPQSWERHGLKPWIEAAKKRLHRNVLAIALANKLARIAWSVLARGRSFEARPAMASAA

SEQ ID NO: 510068 - protein, 430 aa, unidentified
MKSNTPNAKIEAITEKTLVLGIDVGSETHYARAFDYRGIEYSKKPFKFSNTEAGFVTFKEWILNLKERHEKDKVVPGMEPTGHYWFNLGKFLQDNEMKPVLVNPHHVKKSKELDDNNPTKNDRKDPKVIAGLVREGRYMIPYLPDGVYADLRTASNIRFQLQAELTRIQNRISRWFNIYFPEYKTVYGKPDAKSGMLILKAAPLPEDILTLGIDGVNQIWRDAKLRAVGKARAKILIEAAEHSVGSKEGAVSGKMEIRMLLEDYESRNTRLQEVMVLIEELVRKIPMTEKLLEIKGVGIRTVSGFLAEVGDISRFNNPKELQKLAGLALVENSSGKHKGETTISRRGRKRLRYLLFEVAMSLVSKNQEFRELHNYYTTRRLNPLKKMQSLMAIAAKLIRVFYAILTKGVDYDPKKMVSDIKRPAVYLQAA

SEQ ID NO: 510069 - protein, 407 aa, unidentified
MNITCGIDWAEAHHDVAVMDQDGHLLGRLKIDTGVGGFGQLMALLAEHSDDPVSVPVAIETDKNLIVVALQAAGLTVHAINPRAVARYRERHGQAGKKSDPGDAAMLADVLRTDRHQHRALPAISHSGQAVKVLARQHQEAIWALHQTTSRLRSVLLEFYPQALQAFPNLKHKAALTVLAAASTPELATKMTSRRLVGLLHRCGRRNDASLVTQILRDLKTPALRQPAQVEVALGHTVIALLGIIAAMHTAVEQLETALDAEFAPHPMASILRSAPGLGAVLGARVLAEVGDDRARFATASGLRAFAGTAPVTRASGRSRYVKARKVRNKRLADACHWWAFAALTKSPGAREHYDRRRAAGDHHNAALRNLANKLLGRLWWCLHNNQPWDEEAAWPRISTQTEAAAA

SEQ ID NO: 510070 - protein, 317 aa, unidentified
MTRIICGVDVSSISLEAFVGPAGPERSFANSMEGINELVAFCRKHGVELVALEASGGYEKQAFAGLWEQGVPVALLNPRAVRDFAKAMGLLEKTDRIDARVIARFAEVKGSAACTLLSAEQQHLRALVTRLRQVTQLHAMQRNQRQLVADRVVKNSITRLLKVLEAEKRKLAAKIAAVLEGDPLWAQLDQAFRQVKGVADRTVATLMADLPEIGTLSNKAVSKLAGLAPLARDSGKMHGKRVVRGGRRPLRAVLFMVASVVRRHNPDFAAFHERLRTAGKPPKVIRIALAHKLLVRLNAKAREVRRQFAAANAYQSA

SEQ ID NO: 510071 - protein, 437 aa, unidentified
MIKKEKIELTMKQDIFVGIDISGRKHRARFIDKMGREKAAPISFSNDVEGLKKMENHLKGIRGIGHNVMFGVEPSGDYWKPIAYYLKKEGYPVVLVNPYHLRSTKETIDNSQEKDDNKDSYLIADLIKQGKYFFPIMPEGIYGELRELSNIWEKTSKELAIKKCYLANFLAKYFPEYRENFTDVLGKTSFYILKHFPLPEDITKIGKKRFSRLIKRVSRGRIGQYKIEMIYEKAEKSIGIKEGSQVAKNFLKGILADIERLKERKEEIKKVMEYFLGQTGYKENLLSIPGVGIVTASIFLGQIGDVSNYRRSREIEKLAGLNLVENSSGGRKGDRKISKRGRNMLRYVGYLVATVGISKNPEIKSLYWYKVMECKKEKMKVLTSIAAKMLRIMFIVCKKKVYYDAEEIRKYFNNRGKIGGVRSGSLHQAPYSGDTGN

SEQ ID NO: 510072 - protein, 351 aa, unidentified
MQLGVDTHKSVHVLVALDDAGRQLGARTIPNTPAGWAAVLAWARGKQQQQRRWGIENGGSLGKGFAQFLLAQGEAAVHEVSPQRTAQYRRRGRTQDKTDQTDALAIARLLLAEGEHLPTIQQDDGSTELRLLSDHRDNQLIDRTRLINQLHAQMLQIDPGYQERSGALTTRRGLLYCRDLAFIEADGVTQTRLLIVRQLVGQILRLEEEIATTTAALGERVRASQTPILALCGVGEVIAARLLGELGTTLRVRSAAALAALAGIAPVAVSSGGRGGYRLNRGGNRQLNRVIHLMALSQRRCDPRAQAYYMKKRAEGKTRRAAMRCLKRRLVDVLYRCFTRGTVEQPVAVAV

SEQ ID NO: 510073 - protein, 475 aa, unidentified
MNIKGSKKKNQVLSVNIFEQQEIIAKADAIKAGLKASTWHELETKGKFDKNDKLSFVSDDMLILGCDIGSETHYVRAIDTRGRELSKSVFGFSNTAEGFESMLDWSTKLAAANDKKQIVLGLEPTGHYWFCLTTWLVAKGISVVQVNPYAVKQTKEVEDNSQLKDDKKDPKLIANLVKDGNFGMPYLPEKLYADIRRLSMFRDQLNEDRIRNLNRLHREMKIYFPEYKDAFGKIDGAFSLELLKEAPFPDGLAALGTEGMKQIWHEAKLRGRGYANASSILEYARKSVGIKDGSDAGRQAVKWFVSRIIELDEQLSDIENQLNQRCNEIPYAKNILAISGIGENILSGILAEMGDISRFDNVKEIQKLSGLGLVACSSGKHTGETKISHRGRKRLRYWLFQAAKSAVAHSEEFKELHVYYTTRKQNPLKKMQSLIVIACKILRVIFTILTKGTAYDPKKLLGDIVRPDQSIPQAA

SEQ ID NO: 510074 - protein, 358 aa, unidentified
MKDPTTSPIVVGGVDTHKELHVAAVVDAHGVVIGTESFSTTRAGYRALLRWMRTFGDIARVGVECTGSDGAGLMRHLDAAGIEVLEVTAGDKADRRKRGKDDTIDAEQAAHAAYARVRTVTPRAHDGMVESLRALKIARSSAISARRVALQLIHATIISAPEELRDQLRNLTRMQLIRTLASWRPDLAGYRDPVTATKISLKSLARRYLELHDEIADLLVPMHALVDQLAPDLLARVGIGYESAAQLLVTAGDNPDRLASEASFAMLCGAAPLPASCGMTTRHRLNRGGDRAANSALHMIAISRWRIDPNTQAYVARRKTEQHSNPEILRCLKRYIAREVYYLLRNQERAVRQVAPAA

SEQ ID NO: 510075 - protein, 371 aa, unidentified
MNSIVYVGMDVHKEQYTLCCYSYDTDKVEYKQTIPSDYKLVLKYMEQIRSKYEGEVSFVCGYEAGCLGYSLYHQLKDHAVDCKILAPSTMAITNTHHVKTDKRDAANIARCLAFHTYSEVYVPDNDDNDVKEYIRMRDDQKLYLKKVKQQILAFVLRQGKRFEGGKTYWTIAHLKWLKTLELSDLQREALDEYLLTYEYLTEKISRFDERIEELASVERYEEKVKHMSCLLGIKTHTALSMIVEVGDFERFEKAPKFASFLGLVPSEDSSDTRVNRYSITKAGNSHLRRLLVEAAQSYTRGNVGHKSVALKQRQKGNPPEVIAYADKANERLKRRFYKMTLNKGVNRNVAATAIARELACFIWGMMTEHVS

SEQ ID NO: 510076 - protein, 316 aa, unidentified
MSASPLFVGIDVAKAELVVALGPSRDLVVVPNDESGIRQVLEHLQAASPTLIVLEATGGYETAAVAALAAAGLPVVVANPRQVRAFAKAMGKLAKTDSIDAHVLALFAERVRPPIRPLPDEALRMFDALLTRRRQLIEMLVAERNRLARALPPVEKSLKQHIRWLERRLADVDSDLDQTVQQSPVWRAKEDLLRSVPGVGPIVSRTLLADLPELGALNRKQIAALVGVAPLTRDSGTLRGKRMVWGGRAPVRAALYMGALIASRHNPVIRDFYQRLVAAGKPKKVALTACMRKLLVILNTMVRNNTRWGERYALLA

SEQ ID NO: 510077 - protein, 315 aa, unidentified
MMSTQVFVGIDVSKAQLDLALRPEGRFSAPNDEAGFAQVLERLSAVRPTLVVLEATGGLEIPLTGVLAAAGVPVVVVNPRQVRDFAKATGRLAKTDALDAQTLAHFAEVIRPELRPLPDEQTQALAAILARRRQLVEMLTAEKNRLGSARKPVRKSLRTHIAWLERELSHTDGDLAQAIRESPVWREKDALLRSTPGVGPVLTTTLLANLPELGTLTGKQIAALVGVAPLNRDSGTLRGKRTVWGGRAQVRAVLYMGAIVAARFNPVIRAFYQRLCAAGKAKKVALTACMRKLLIILNAMLKHRTPWRTELVQCA

SEQ ID NO: 510078 - protein, 339 aa, unidentified
MNNSSVIGLDIAKNIFHLYTIGTDGKTFKRKLKRSELLSFFANYPVSLIGIEACGGSHHWAREITKLGHKVVLLNARYVKGFVVGNKNDFNDAQAIFDAVTRPNKREVRIKTLEQQDIQLLHNIRQGLVEKRTALVNQLRGLLSERGIVINQGINHVRKQLPLILEEGENHLTPLSRELFAEQYEKLKQLDSEIKAQDQRITRLCSQNPLSRRFLEVPGIGPMIATIIASDLGDGKGYASSRDYAASLGIVPRQHSSGDKPVYLGISKRGNRYIRTLLIHGARAVLKNCSDKTDKMSLWLQSLIERRGFNKAAVALANKNARILWVMASKGEAYQPAAA

SEQ ID NO: 510079 - protein, 340 aa, unidentified
MLYVGLDAHQSLYVGAILDSEGTSVKRFRVRGSVGDLQSRLRRLVADQPFELCFEASCDYGHLYDALSPLAKRVVVAHPAKLRLIWADRRKNDRGDAEKLAKLLFAGLVPPVYVPTVDTRSWRRLIEQRKKLVQKRTRTKTALRALLRGCGVEGQPKGSRLWSVNGLAWLEQVALPTENDEFQRTMRVLELRHFDLQIQQVTQRLDKQGQSHPGVRLLRTIPGVGPRTAEAVVAYIDRPDRFRRIKQIGAYFGLVPSQDQSGAKNRLGHITREGPATVRGLLVEAAWWGVKRDGRLRAYYERRIKKNGEGKKIAIVATAHYLARVMLSMLKSGEPWRALA

SEQ ID NO: 510080 - protein, 457 aa, unidentified
MIDFKISFYLHKCTCKFSIDTQANKNPVHMLTQGISLRFHILPLILHKKQNKNGGNMKKKTCGLDVHKDTIFCAIYDGKDFSEVKVFSTLTDSIYSMGEYIQSEGVKEIALESTGIYWIAIWNILEDMGFNVMLVNPYLIKQMPGCKSDSKDARWIAKLLHKGLLRGSLVPDKKIRELRTYSRKYVKLQQRQTSVLQNMEHILEMCSIRITSYVSNISGKSIINVIRKIVEGETDPEVLIKEIHGRIIKKHTEATIKASLKGFILEHQRFSLELSLEEYDMLVRQSKECLDKMEELCYKEYRREMGLLLTIPGINRISAMIIIAETGADMRAFENSRKFNGWTGLRPRNDESAGKYKSTATTKGNRHLRAVLVQCAWAATRIKGSYFKDKYNHLAIRKSGKKALIAIARKLSSIIWNILYYGEEYDAGKHIIYDPYKLKAKISYHQREVRRLENLLQ

SEQ ID NO: 510081 - protein, 346 aa, unidentified
MKNTIVGVDLAKKVIQVCKTINRTVRSNEEMTPDEFILFLANSKPMTVVFEASGTSSYWKQQALLYGHDAKLISAKLVASVRQSQKTDKNDALAIVQAALLPDVNFISGKSIEQQQLQSTMRLRELCSKQKTALSNQLIALLAEFNINSSNRNGGLRGAIESTLEDASNGFSHEFRKALDEAWKLYLTVAETLVTYDECLEASIETHPECKKLLKLEGVGPINAINLYIALGCAELGCFARGKDASACIGLTPLQYSSGGKSKLGSIGKHVKNTVIRSQLITGAAASVRHVIKREAKTCKEKWIQDLVDRRGIKCAAVALANKTVRTAFAMLTQGTEYKANMILTS

SEQ ID NO: 510082 - protein, 352 aa, unidentified
MQCIAFDSHKHYTWALVQDETGKVLREQRINHTRGALQSFLEAFEPGTPVAVETIGNWYWITDEIEAAGMVPLLVNARRAKVMSGSINKTDKLDARGLNRLQRSGTLPTVWIPPRDLRDARELPRTRMVLVRQRTKLKNRIHANLAKYGLRTDGATDLFGVRGRQILSQCLEELPVQTRFATESLLDELDHLNAKIGELEERMHELFGEIEALEHIKTLPGVGFILGVVILTEVGDVARFPSASHLASYAGMTPRVHASGGRVRYGRTRPDVNHYLKWVFAEAANVSRMHRRRHPQRHVSRLYTRVKSRRGHPKAIGAVGRHLAEATYWMLTKDEPYRDPAVEQTEESKREA

SEQ ID NO: 510083 - protein, 323 aa, unidentified
MNKNTEIFGIDISKDVFDVYSHQKGHQSFKNDAQGFKSFLKVITKDALVVMEATGYYHYLFAQFLHKKKVQVSVVNPLSVKRFIQMKLAKIKTDKSDAKAICEYGHMNEVTLYTALTDVQAECLQLFRLLDNYLKKRTQTKNKKHGEEVLGIPSKYVYGSLKRDLKHLDKEIGGIEARLLELVKQDQQHQLTLLKSIPGMGMKTALFLIVVTDGFSKFETASQLCSYVGITPTIRESGSSVRGRSRISKVGNKKLRNLLFLCAFSACKHNKACREIYERIVNKGKSKKLALIAVANKLLKQAFAIAKSGHPYDERYISVLASK

SEQ ID NO: 510084 - protein, 342 aa, unidentified
MDHFAGLDVSVKETSVCIVDDTGKIVREVKVASEPEALLRVLKNPAYHFKRIGLEAGPLSQWLFSALAEAELPVVCVETRHMQAVLKAQINKTDRNDARGIAQMMRVGLYRPVHVKTLRSQKLRMLLTHRKLLQSKAIAIENDLRGTLRNFGLKVGIVGKVKFEARIKELVENLPDLAVLVEPLLIVRRVLREQIVILHRRLLAIVRDDEVCRRLMTVPGVGPVVSLTYRATVDVPARFHKSKAVGAVFGLTCSKYQSGEVDWSGRISRCGDEMMRAMLYEAAQSMLRSKKWSWLKAWAMQIARRRGMKKAIVALARRLAVIMHRIWLDGTEFHWTREVAAA

SEQ ID NO: 510085 - protein, 265 aa, unidentified
MSITMIGLDTAKSVFQVHAVNESGKVEIKRKLQRSELLPFFEKQEARIVILEACGAAHHWARMLTGLGHNVKLIAPEAVRPFVKKGKKNDAADAAALCAAASRPDVKFVPAKSLEQQGVLALHSARSLLVKQQTMLANAIRSLATEFGLTVPKGIGRLRELMELVDADATFPIRARQAIRSLLDRCHELAESIETFEAEIVAHARHDKTAYRLATIPGVGPITASLIAATVADIGVFKSARQFAAWLGLVPRQHSTAPTASSVPE

SEQ ID NO: 510086 - protein, 407 aa, unidentified
MMTSTDRRVTGGFDTHADSNVGAVFDTATSRLLATETFPTTTAGYEAALSWLCGFGVIDAVGIESTGSYGAGLARHFAVSSVRVVEVNRPERLDRRLDGKDDFVDARAAARAVLSGRATAIPKAGDGPVEAIRVLEIVHDSAIGDRTEAINQFKALLVRAPAAFRDRHSPVTLRHQLATARRFRTGASDDMVTIELKMALKTLAQRIEFLEAQIAEIDDRLRPIIAKHFPAVLGLHAVGIHSAAQLLMAAGDNAERLSSDAAFAKLCAACPKPASSGKTIRYRLDRGGDRRANKALYRIVIVRMRFDPRTRDYVARRLAEGKTKREIIRCLKRFVAREIFHAITEPHDPIPTGNELRTQRKAAGISVVAAATGAGVSYPQLSQIERGITHNTDIANRVHNWLAQQTT

SEQ ID NO: 510087 - protein, 331 aa, unidentified
MKFKSIIGVDVSKSTLDAYLKINQCHAVFENNEKGYQELVEWVMENSGLILAEELLFGFESTGIYSSELALFLEKHSLPFYIISGLELKRSLGIRRGKSDKADSKDIAEYLYEKQEKIIPTVLPKKVIQDLKKLFNYRERLVKDRAAYITRIKEYEAVVSEIKLKVYQKSNTEVIACLDKQIQTVEKEIDKLLRKDELLMNQYKLINSIKGIGPQTAVALIVLTEGFTLFDSWRKFASYAGTAPFPNQSGTFRGKTKTSKLANKRIKTLLTLCAGTAIQYSTEMKTYYKRRIDEGKSKMSTLNIIRNKLLARAFAVVNRNSSYVDILKYAA

SEQ ID NO: 510088 - protein, 398 aa, unidentified
MTESSDYESVQVFIGVDVGKDTHHAVAINRSGKRLFDKALPNDENKLRSLISDLKQHGQILLVVDQPATIGALPVAVARSEGVLVGYLPGLAMRRIADLHAGEAKTDARDAAIIAEAARTLPHALRTLKLADEQIAELSMLCGFDDDLAAQTTQASNRIRGLLTQIHPALERVLGPRLDHPAVLDLLQRYPSPEKLASLGEKKLAAQLCKLAPRLGKRLAADIAQALAEQTVVVPGTNAAAVVLPRLALQLITLRKQRDEVALAVEQRVLAHPLYPVLTSMPGVGVRTAARLLTEVACRAFASVAHLAAYAGLAPVTRRSGSSIRGEHPSRRGNKALKRALFLSAFAALRDPLSRAYYTRKMSQEKRHNQALIALARRRCDVLFAMMRDGTFYTPQAS

SEQ ID NO: 510089 - protein, 395 aa, unidentified
MSGMRFVGIDIGAEVHMLAAVDEAEQVLIRPTKITEDADGYARLLELLGEPRETLVVMEATGHYWKNLFATLVARGFAVALVNPLRTARFASEELARTKTDAIDALGMARFGAQKRPAATRLPDGATDELRELVRLRDRLVQDFGDRVRQLHRLVDLGFPEFTRYVRSLDSELATAILHDYPTAAAFPGVSVRRLAALRYDGRHRVGDELAHALLDAAARSVGRHHGEAYRIQVRYACEDLDLLRRRIRTLEGDIERMLDRHEVGALLTTIDGIGPQTAARLVAELGDPANFHSAGALAAYVGVVPGLRQSGKRTGTRAPLTPIGHAALRAHLWMPVLTAVRKNPWLRDYYQRLLARGKLPKVALVAAMRKLLVAVYTVAKQRRPFVPVVAEVCP

SEQ ID NO: 510090 - protein, 329 aa, unidentified
MKVQHIIGADLSKKSIDLVCHLFKSHVQIDNTITGFKDLMQWLKEQKINASKTMIVMEHTGLYSYCFEKFLHQHQIPFCKVNALTIKRSIGLVRGKTDKLDAARIAAYGYEKKDRLAIDVPGSDALKRLQLLHSTRERLVRHRASLMCAIKEYKHIGISEKDIIMQTQLQLIKNFDKQIEKLMTEIETIIEKQETLRQNFRLLQSIRGVGKVVALVTIIKTHNFTRFANARKFACFCGTAPFPHNSGTSIRKKTRVSHLADKQMKSLLDLSAKSAIQYDKELREYYLKRTEGGKSKMSTINVVRNKILYRMFAVIKRQTPFLENYLQAA

SEQ ID NO: 510091 - protein, 386 aa, unidentified
MKDETFVPREYDVFAGLDVDKKSIAATFSSPQGFIRSLHMPYSVDYLLNHVRKHFGDQKVAFVYEAGPTGYGLYDGLVAQGYRCLVAAPSMIPRAPGQRVKTNRLDSRGLSESLRGGQLKSIHVPSPIYRELRHLTQLRDTVVREAAANKQRIKALLLLEGIGFPPATAGRPWTLRVKAQLRKLRCSRTVRFKLDQLLDSLEFCEKQVVSSTKEIRRFCKEDVELFQSIEYLMSIPGIGWIVASQLLARMGDWREIDNVRQLGSFLGLVPTENSTGDSVDRGSITRAGDGRLRSKMIQAAWSAIRQDGELREFYRSVCQRNPRGKGARIAIVAVARKLSTRIYAVLKKQRPYIVRKQVHSAPLTQEETSPQGTTRRCAEPGETDNS

SEQ ID NO: 510092 - protein, 345 aa, unidentified
MEPMYYIGLDVHKQKISYCVKEGGGKVFAEGWIPATRFDLDRWMKRLPQPWSAALEATMFSGWIYDHLKPHATALKVAHPLMLRAIAAAKKKNDRIDANKICDCLRCDFLPECYMAPTAMRERRRTLRYRSLLVRQMVQMKIKISTLLMEAGISYNKSKLHKAGYFRELLANNPDINESLRSLLRQCREMVVRLSKMETALIHSLQQDPLLAERVERLMSIPAIGPITALTWALEIGEVQRISSIKKAISYCGLCGDEQSSGNSAQRTPLSKQRNKHLQTTLIEAAKMAPRYSPTLAMLYDREKQKSNANRATLAVARKLVAYLMAVDRGQTHFLVIDQETRTAA

SEQ ID NO: 510093 - protein, 464 aa, unidentified
MALTLGVDVAVRAAHQATLARDGLTVWRGRKFWTRPADLERLWSDLGLADPGELTVVVEPTRNAWIVLAEWFRRRGARVVMVPTTQSADLRKYYSKHTKNDRIDSELLARLPLLHPEGLREYSGQGPADALRRLVKQRSTMVKRRTAVYARLDALVELLGPAWYAVLGSNYGLAALEFLARYADPNAVIRLGQARLARFLIARSRGAWREDHAAGLIAAARETLALWGQNGMDFAELAEDISHEAEQALFLTRQIKQIDERVANLYADADPDGIVASAPGVGPTISAVIAGRIGDPHRFTSLAAIRAYTGLVPKVSQSGLSKVESSITKAGDPLLREMLCTAADQARKVDPQIAAKYQRLMAGDRHHDSALCHLAALLVTRIATCMRNGEPYSLRDVDGTPITEAEGRAIVKERYQLEPRRRDNLRHKRMRERRKQAADRESQKSPSAPTSQPANTQTTSPQLA

SEQ ID NO: 510094 - protein, 342 aa, unidentified
MEYYAGIDVSLEYSSVCVVDGTGKIFREAKVASDPAALISWLKSLDYGLSRVGLEAGPLSQWLYAAIREAGLAVELLETRHVRKAFEAMPVKSDRNDARGIAQLMRLGWFRPVHCKSMDAQEVRAVLTARKLVQTKCQDVENSLRGILRGFGLKVGKTTDKSFAGRIRELVQGHPSLEAVGEALLSVRAVLLKEFNAFEKRVRAMVRSNAKARLLTSTPAVGPIVALTYASAIDDPARFKSSKDAGPHFGLTPKKYQSGETDYSGRISKIGDAAVREALYQAAHVMLTKPLKGCSQLKSWAMRIAKRAGMSKAKVALARKLAVILHRMLANGTPFNPAASAA

SEQ ID NO: 510095 - protein, 344 aa, unidentified
MDHFAGLDVSVNETSVCIVDDAGRIVREVKVASEPDALLPVLTSPAYHFKRIGLEAGPLSQWLFSALAEAELPVVCVETRHMQAVLKAQINKTDRNDARGIAQMMRVGLYRPVHVKTLRSQKLRMLLTHRKLLQSKAIAIENDLRATLRNFGLKVGMVGKMRFEERIKELVENLPDLAALVEPLLVVRRVLREQIVILHRRLLAIVRDDEVCRRLMTTPGVGPVVALTYRATVDVPARFRKSKAVGAVFGLTCSKYQSGEIDRSGRISRCGDEMMRVMLYEAAQSTLRSKKWSWLKAWAMQIARRRGMKKAIVALARRLAVILHRIWVDGTKFRWTREQATAAA

SEQ ID NO: 510096 - protein, 372 aa, unidentified
MSAEHITWVGMDAHKNSIKVAVLFPDRPEPVEWQEATTVEAIRRLARKLQRVALGEVRCCYEAGPTGYALQRQLRAAGISCTVIAPSLTPVKPGVRIKTDRRDARKLAELFRAGLLTEVHPPSESDEALRDLCRCRDDVRVDLLRARHRLSKFLLRRHCIYRQTKHHWGSRHGAWLEQLRFDDPMSQATFDSYLLAAQQLEERQRQLDAQLAEYGGQEPYREPVGWLRCFRGIDTVTAVCLVAELHDFRRFRSPRQLMAYVGLVPSECSSGERERRGSITKAGNRHVRRLLVEAAWHQRFRPALSAPLRRRREGQPARVLAIADRTQERLCARYRRMSFQGKASPKIIVAMARELTGYLWAVLHPAAAATRV

SEQ ID NO: 510097 - protein, 391 aa, unidentified
MIYIGIDVAKDKHDCFITNSDSEVLFKAFTIFNNLDGFNDLYQKIESVMDDVTKVKVGLEATGHYSYNLLGYLIDKGLPTYVINPLHTNLYRKSLSLRQTKTDKVDARTIASMLMSDVNLKSYSDTFYHNEELKSLTRYRFDKVKERAKLKTSVSRLVCILFPELEKLVPTLHIASVYALLSEFPSAKHVATAHLTRLTNLLSESSKGRYGKDTAITFRDAARASIGSNMPAKSLELKHTIKLIQELDSEIDEIENEIKIIMDEINSPILSIPGINYRMGAMIIAEIGDFNRFDSPDKILAYAGFSPSTYQSGQLDGAYAHMEKRGSRYLRYALYNATKYVCHWDPTFAAYLAKKRAEGKHYNVAISHAVKKLVRVIYHLEKTKQQYIKAA

SEQ ID NO: 510098 - protein, 361 aa, unidentified
MTSMTHDGQQITGGVDTHGLTHHAAVIDAVGRHLADREFAATVRGYRDLLEWMRSHGELTAVGVEGTGAYGAELARVLTAAGVTVVDVDRPDRKTRRMKGKSDPIDAYAAATAVLSGRATGIPKSRDGVVEAVRVLRIARRSAVKARTQAMNQIRNLLVSAPAMLREQVAELEKAVLIRTLARLRPGEDLSRPLAANRASLRRLARRHQALDAEIAELDAEIGPLVQQAAPALLQLFGVGPQTAGQLMASAGDNPERMRSEGAFAHLAGVAPIPASSGRTHRHRLNRGGDRAANNALHTIVLTRMRFDARTRDYVERRTKEGLNKKDIMRCLKRFVAREVYRALTSTPTEPNTQTDLAPAA

SEQ ID NO: 510099 - protein, 491 aa, unidentified
MSSIFQRANPAIEKVFREAGTPKKVMCIPIDYAKRQHTALVCNGKGEQLRGPFHIHNTPAGVEFVDDIVEGLCRKHSIRKAQVFFGGEDCSAIAFNFIHAMLQNGYLGIGLNAHDTANERENQIASTDKLDLLGIASMLVNKKRGRTLSTEYGEARILRELTHHRTALVKAHTASAYRIHHIVDQLFPGFLDEKQSGFTPFAKPSLWIMSQRFSPRQIRARKSSAMAEKLRLFMVRNPAKKVAQLKALAASVLPPPPGLVEALQLNLAHEVSVYEHLRDCTMDLNKNVARLLAATPGAMLTTVPGIGLISASALYAEIADPSRDRCMNKLTSYAGLAARLKQTGGPEKEAHTRGRSRRACVPLKRTIMGIALKMGQYGHEELKLDYHRRVHEGQDPRLTMGRRMLRICTHLIRHTDFFVPPSLLGEVPQQVRCDYYLRAWDKVLIKWRDAAAIQDAFAQDAPLEHWRTMLNELYDLNLSKASPQYDRSRSR

SEQ ID NO: 510100 - protein, 338 aa, unidentified
MAIVTVGIDLAKNVFAVHGVDESGKPALVRPEVPRAKLLELIANLPPCLIGMEACSGAHHWAREFARFGHTVRLMAPKFVAPYRMSGKRGKNDAADAAAICEAVTRPNMRFVPVKSIEQQSRLFVHRARQGYVEQRTALINRIRGLLSELGIVLPLKAATVRREAHKHLEDLPGWCNTVVGDALSELTRLDERIKQYDQHIDQAAKEDEQSRQLMQLAGIGPTTASAIVATVGKGHDFSCGRQFCAWLGLVPGQYSSGGKQRLGRITKAGDPYLRTLLIMGGKAVLAAAKNKTDPVSRWAISVQERRGYWRAVVAIAAKNARMCWAMLQQGDAFKLPA

SEQ ID NO: 510101 - protein, 399 aa, unidentified
MLSDTTTPFTASLTNDLVGASEIKKQILELNDSYSFERIVIGMEATSLYSFHPAMFFHEDSDLKALKVEVMVEQPNKIKKYREAFEENKNDTLDAFYIADYFRIERFSPAFLKEEKYMALQHLTRTRLQLIEQLTKTKQHFIENIYYKCNTLSTEIKNENLSTNLWSSTIISLMTEDYSLDELATIALEDLAEFLQKLGRGRFKAPEKLAKAIQAAIRGSYRLSKLQQDSVNVILGLLAREIRNLEQMIKDIDKAIEDMVEVIPEYQCLTSVPGVGKVYAAGIIAEIGQIERFKDHPQVAKYAGLNWKQYQSGNTNSQNTELVKRGNRYLRYYLVEAANSVRRHDSEYQTFYMKKYQEVPKHQHKRAIVLTARKFVRLVDALLRNRQLYTPPRRLMEDR

SEQ ID NO: 510102 - protein, 354 aa, unidentified
MEQRTTIGIDLAKEVFAMCVLSPGGAVVESRTMRRAAFERWLGGLQGELVVAMEACSSAHHWGRRLAAAGHTVRLMAPAFVVPFRKSGKNDANDAEAIAIAARQPTMRFVAVKTVEQQSILSWHRAREGWIAERTALINRLRGLLTEFGFSIAQSAFRLRKALPALSTDAAVPAPIRALLLEAGEQLRCLDARVARCDEQIAAHGRDNETARRLRGMLGIGPLTSSALVATVPDAAAFRNSRQFGAWIGLVPRQHSSGGKPHLGELTRRGDKYLRSLLVQGARSALQVALRVAPDKATRLQRWILALYSRKGYHKTLVAVANKHARIIWALMARGEHFDHNAWQRHPLQRAAAA

SEQ ID NO: 510103 - protein, 340 aa, unidentified
MDITTLGIDIAKSVFQLHGVDADGAVVVQKKLRRGAVLNFLGKVGPCLIGMEACATSHYWAREIAALGHEVRLIPPAYVKPYVKRQKNDAADAEAICEAVTRPNMRFVPIKTEEQQSVLVLHRARDLLMRQRTMILNAIRGHLAEFGIIAAQGPRQVMGMIARLRDDGDASLPEIARSALLALGAHLEALAGEIRALERQLMVWHRADPTSQRLETIPGVGLITATALAASVSDPSVFKSGREFAAFLGLVPRQNSSGGKDRLGRISKMGDRYLRKLLVVGATSVIRRAGSKSTKTGAWVRSLMERKPARVVTVAMANKTARIAWAVMTRGEAYRASPIA

SEQ ID NO: 510104 - protein, 386 aa, unidentified
MNYIGFDISKYKHDCFIATKTINHQFSFENSKSGFNELLSYFKPLSKTEMIIGLEATGHYGENLKSFLTLHGYSFMEINPFLMKKFSEAQSLRKTKTDKKDAQMISSYMRTVDYKAYHHQSYHISALKSLTRLRFKLISMRTKHYNMMTKVLDVIFPEYKPFMREQGYSETSLYILKHFSSPIRISKLRDTHYEALRKRSMGKFSYPKFVKLKNLALNTIGVTQDHQLFKLTTSIRYVEMINKDIDKTEEQIISLMKQFPTKIETIKGIGVISAATIISEYGDIKLFSNSAEMLSYAGLDSSIKQSGTMATTGKLVKRGSKYLRATLVNISMMVMIYNPIFYDYYTKKKLEGKHHRVALIHLAKKLIRIIHHLETTDEDFDSKKLK

SEQ ID NO: 510105 - protein, 350 aa, unidentified
MLIIGCDYHPGFQQIAFLDSESGEWNERRLGHREEAEQFYRDLKVRGVKVCVGMEASGHARWFEHLLGELQFELHIGDAAEIRSRRVRKQKTDRQDAQLLLTLLVEDRFPSIWVPNGENRDLRQLLWHRHRMVQMRTRIMNQLHVVALNEGVRLKKALWRPAGRAQLESLLLAPWASRRRQDLLELLDQLTPKIQELTRELEQEVEKRPVTRQLMTHPGVGPLTALAFELVIGTPERFGSGKQIASYVGLVPCEESSGDRRRLGHISKQGNSLLRFLLVEAAQITVRCDPDWRRQFLHLAMRRERRIAKVAMARKLAVRLYWMWRKGWDYEQLKKLGTHAGEPGNRQGVQ

SEQ ID NO: 510106 - protein, 350 aa, unidentified
MLIIGVDYHPSFQQIAFVNTETGELEEHRLQHREEAEKFYRDLATGGVQVRVGMEASGQARWFERLLAELNFELWIGDASEIRAKRVRKKKTDREDARHILRLLLEDRFPRIWVPSWDNRDVRQLLWHRHRMVQMRTRIMNQLQAVALNEGLRCKKRLWREKGRQQLENFPLAPWASRRRSDLLQLLDRLSPTIAELTQMVEQEVEKYPAAQRLMTHPGVGALTALAFVLIIGEVERFGCGKQIASYVGLVPAEDSSGERRRLGHISKQGSALLRFFLVEAAQVTVRSDPEWRSKFFHLAMRRGRKIAKVAMARRLAVRLYWMWRQQWDYEQWKKFGPHAGQPGTGVAVQ

SEQ ID NO: 510107 - protein, 317 aa, unidentified
MSKKKTFIGIDISKATLEVAVHQRDTRFAVANKESAFPELLAQLIVLRPKLIVLEATGGLELPVLSTLFGAGLPAVVVNPRQVRDFAKATGQLAKTDRLDATVLAHFAAAIQPQLRRVKNAAEQELDALVTRRRQLVEILAAEKTRLSSTATASMRTEVRVHIEWLEQRLADLDAQLRQRLSDSSAWRLKDDLLQSVPGIGPVTALTLVADVPELGQLNRHQVAKLVGVAPLNRDSGNLRGQRHIFGGRQAVRNILYMAIQSAVRHNPVIKAFYERLLASHKPKKVALVACMRKLLTIVNIMIKTNTSTSTGGSRIA

SEQ ID NO: 510108 - protein, 402 aa, unidentified
MNMNSNRRVAGLDVHKDSIYLCIMGHDENIILQKTYGVLTPELRQMREDMLFHGVTECAMESTAVYWIPVWNELYGSMELKLVNPYFIKQLPGRKSDVKDAQWIAECVLKNLIRGSFVPEPIIQDMRKLNRRIMDLNEDMTYNCNKLDAALQRCGFRLSNYVSSTKSKSYQSVLRSIIEGRSSPDELVGLVHGRTLNKHGRSSIKASVTASFSRTDMTIFKQLKETIDLIERQIDECQKELTELCKEHFPKQYGRLQTIPGVKERAATAIIAETGVDMKMFATAACLVGWCGLKPRNDVSNGRFKSRKVTHGNRYLRQILIEIAWAASRSRNCFFSHFSYIQTTLKKKGKMKIQVAIARKILVAVWHMITKEEDFIDIYLKRLEELKSTKERIRQFESCMAK

SEQ ID NO: 510109 - protein, 344 aa, unidentified
MPSIVGGLDIHRKQLTFDYLDTVTGQVTRGQVAPADREHFRSWLARFENPGEVAFAAEACTGWRYVTEELQRAGAEAHLAEPADTATQRGKKKRAKTDRADARLMRDLLAQGRLPGCWIPPSHVLECRALLELYHDLRTEHTAWVQRIHAVLFHQGAPAFHNLSRADAPAELSALASAHVSPAGQLQLAACLRMCGTLEAELAAVRRRLLSAARHLRGARALADSIYGVGPVTALALTCWLGGAGRFTSARKAVRFAGLDITVCSSDRKRPPGRLSRQGPPVLRWAVYEAGKTHARAVAPDHACYAAVKDRKDGKRAALSEARKIIRRACHILSELGDDALAMV

SEQ ID NO: 510110 - protein, 373 aa, unidentified
MPRYSTAFGMDVHLRSTTVCALDAETGEAVTRRFRGNPWGEVAEWMSGFPGPSLAAYESGYLGFAPQRELSGLGVDCVVAAVSKVPRSAADLSSKNDRSDAARMAKAILSHDVTPVWVPSPEIEGLRDLAGAHDAATARLAAAKQRLLAFLARRGYAYGGTTPAGNPRRYWTYDFLRWLDKVRPADDGGIRALAALRNEVEAAAETRDDLLAEYRAAVAAGPLSAEVEALQSIKGCGFALAAAFASEVGDFSRFRSGRQVTAYFGLAPKQRSSADSVRLGGISGAGNALVRRLAVEGSWRYAQAGHQPKLMPKGSGVPLEIRMHGRKGSERLLRRREEMLARGMPQAKANAATAAELVRWLWALGAMCREATE

SEQ ID NO: 510111 - protein, 340 aa, unidentified
MEIATIGLDLAKHWFQVHGVDAEGRAVVRKRLRRREVIPFFASLPRCLVGAEACATAHHWARELKDLGHEVRLMPPGYVKPFVRRQAKNDATDAAAICEAVTRPNMRFVSVKSPEQRGFLMLHRARGLLVRQRTMTACAIRAHLAEFGVVAGQGRQRVEGLIALLEDETAIALPAFAREALDALIAQLGNLDRQIDAIERRLAEIHRSHPISRLLASIPGVGPISATAFAATVPDPAMFRSGREFAAWLGLTPRQNSTGGKERLGRITKQGDAYLRHLLVIGARNVVRYPKARARVGSGWIDELLQRRRPMVVAVAVANKLARIIWAMMTTGELFRPATP

SEQ ID NO: 510112 - protein, 338 aa, unidentified
MSKITTIGLDLAKNVFHVVCCDARGKRVGKKVLRRGQLLPYFANLPPSLVGMESCASASYWARELQALGHTVKLIPPQYVKPYVRGNKNDYNDAQAIAEAVVQPQMRFATVKTVAQQDVQALHRLRERRLAERTALCNQLRGLLGEYGMVLPRGVASLRRRVPELLEAADNGLSALFRRLLGQAYRQLQELDVHIADYTRELKRQSAQQAACQRLQTIPGYGPILASVFYSVVGDGAAYRRGRDVSAGVGLVPRQHSSGGREQLLGISKRGDRYLRSLLVHGARAVVRQAAGKEDRLSRWVNRIRAQRGYNKAVVALANKLARIGWAVLAHNTTYQAA

SEQ ID NO: 510113 - protein, 427 aa, unidentified
MKYTQNEKILQVTEDTLIAGVDIAKESHYARAFDYRGVEYGKYLRFENNREGMTKFFRWAKELMERHKKNKLIVGIEPTGQYWLCFAQYLKDNNIKVVLVNPFHVKRSKELDDNSPTKSDKKDPKTIAMLVKDGRYVEPTIPEGVYAELRVAMDIKDRLNKQIGMTKNQITRWMDIYFPEFNTVFSDWEGKAALITLREFPTPEKIAKKSAEEIISIWKKEVQRGVGEKRAIKLIETAKESIGKKQGIKMAEYEIKTLIEQYEFLKKQIEEIEKKIEELIVEIPGVKELLEIKGIGVNTVAGFIAEVGDIEKYEHPKQIQKLGGLNLVENSSGKHKGETTISKRGRKRLRRVLFNAVMALVAKNEEFRELHKYYTTRAQNPLKKKQSLIVLCNKLIRVFYVILKKGVKYDPIKMMKDIKRPALQEAA

SEQ ID NO: 510114 - protein, 358 aa, unidentified
MSEITRVGVDLAKSVIQIHAVDAAGKLVTNRQLSRDKFLTWCAQQPVGCVVAMEGCGGAHHWARKLIALGLNAKIIAAHLVAPYRLQGKGGKNDANDAAAVCEAASRPNMNFVPVKTTVQQGVLCVHRLREGLKEERTACVNRIRGMLTEFGLVVSKSPEKLREKLTDLLEDASNDLSGLARLVIEEASGHWKEIDQRIKWCDERINAHVMDDAQAKAAKELMGVGPLTASAVVATVGDFKQFRNGAQFGAWLGLTPRQNSSGGKNSLGGITKRGDMYLRMLLIQGAKSAVMTAHKRDDPISNWLHQLREKSGWQKAAVAMANKNARILWAMMTKGCGFDPRYVSVKPAGGSHQRWHS

SEQ ID NO: 510115 - protein, 307 aa, unidentified
MWEKIYFGVDVCKESLAFCGPGVAGQVANNAPGQRRLLARLPKGAHLIIEASGGYERELVRMAQQSAVPVSVVNPRQVRDFARGVGRLAKTDPIDAEMLARFGATVNPPPDAVPTAAELALQELLSARQQLVEQRTVLLQQQAQHLNSIVRRLDRARLKLLQRQIAQLELAIGSILEEQSALKQKVERLQQVKGVGLITALTCVALCPELGSLSRGQTAALVGVAPYDDDSGARKGWRHIAGGRPRLRRALYMAAISAIRSNPILRRFYQQLRQRNKSSKVALVAVIRKLAILLNQLLRNPSFLPAS

SEQ ID NO: 510116 - protein, 378 aa, unidentified
MNRIIKIGMDVHTTNYTLCIFEPSFEHDGTVHCITQVKPEVKNIIRVIETFKKKHENEELNIVCGYEAGCLGYSLYHELKEKGIECVILAPTTMKTEKGGRKLKNDYRDAKMIAECLAYGGYSAVHVPTELDNSVKEFIRMRDDIKENLKSIKQQIIAFLTRNGKQFEGKSYWTRKHIDWINTVSFSEPLLQDTLKEYMIEYNHLCDRVETLDRQIEEISLKEEYVEKVQQLQCLIGIKTHTALSLIVETSDFNRFKKGNMYSAYLGLIPGDDSSGGHENKLGITKAGNSHLRRLLVEAAQGYTRGRVGFKSKDLKSRQEKCSSEVVAYADRANERLRRKYYRMTLRGKKYNVAKTAIARELACFVWGIMTDHIDLCS

SEQ ID NO: 510117 - protein, 355 aa, unidentified
MPSKTDTAVAHTIGIDTGKNTLHMIGLDEKGAIVLREKVSRTRIAARFVNVPPCLIGIEAGMASHHIARELAALGHKVKQVPPAYSKPFRQVHKNDFRDAHAVAEAVERPSTRCVPIKTDGQLDLQALHRVRSRLVGNRTAVINQIRGFLLEHGIPVRQGHRFLRQQLPQILATRADVLSPRMIRIIGDLIEDWRYLDERIERVTDEIEALARADEGCQQLITVPGVGPIISSAMVAAIGNGAAFCKGRDFAAWLGLVPKQMSTGDRTILGRITKRGNRYLRMLFIQGARAVLLRPASWVKHSFGSWLTAATRRLHRNVLAVALANKLARIAWTVLAQGRRYEARVEPRVEPAAA

SEQ ID NO: 510118 - protein, 427 aa, unidentified
MSEERSVELRVSVDVGYRRHSVAMGLSSGEVLEEFEIDHRPEGFQEFFSRIEKHQKAKSYTVAVAMEGYNGHARPLDSLVRQRGYRLYNLNNLKFARFKEIFPGAAKSDRIDARRGLELFQLSDHLPLAKEVLQEVRGTPKENEVLKRLTRRRRRLVNERVRVVNNLQADLQAVCPGLLEITSAASNQWFLNFLVSADSLSQLARLRKSSLLKIPAVGRKYAGLIQDWQKRAHFSEEAGWVSEMIQEDAKRCLELEEKIKTLETKIEQVAKDSKIAKILLSIPGFGPVCTSELAGEIGTVERFNKEGSLALYLGMSTLDNSSGNYQGTKAPKHVNTRAKAAMMIALDRHRKYVPESQRYYEKKRIQGKGHNQAIRALGRHLCRIIYKMLKEQREYQLRSKEGDTQARVRSRSCVKTKIRRSKISRRG

SEQ ID NO: 510119 - protein, 400 aa, unidentified
MFAGVDWAENNHVACVIDADGGVIERVTVGHDKAGIARLIAVLSAAEVAGVGIERGDGPLVTALLAAGLTVFVIAPSQVKNLRGRYGSAGNKDDRFDAFVLADVVRTDRRRLTPLVPDRLDTQSLRALVRARRDLVGHRLAVANQLRAHLLIVLPGVIGLFNELDAVTSRAFIADFGTQDAVDALSVERLQRWLTGRHYHVKPAEVLLQRLREAAPGITGAPGQVLAGITQAYLAALNTVMAQVEALETQIADALAAHPDAGIFTSLPRAGTVRAARLLAEIGDCRARFPTAASLAGLAGVTPSTRQSGHTRVVAFRWAVDKQLRDAVCNFAGDTRLSNPWAAELYQQARARGKNHNHAVRILARAWLTVIFKCWTTNTAYDPTQHRALQRLLTQHQPTG

SEQ ID NO: 510120 - protein, 369 aa, unidentified
MKKSIKYVGMDVHKKTIDVAIAEGDRDGEVRHYGTINHDPDSMAKLLRKLASTGGELRFVYEAGPCGYQLYRHLTGNGLRCTVVAPSLIPRKSGNRIKNDWRDAIALARLHRAGELTAVQVPAPEDEAMRDLTRAREDVKIAERKAKQLVSGFLLRHGFVFSGRTPWSNAYWRWIAEIKMGHPAQQIALQEYVHAVKACGEQVDRLTAQVHELLLQWHWAPVVKAFQAMRGVSVIVAVTAIAELGDLGRFETPSKLMAYLGLVPSEHSSGESRKRGGITKTGNGHVRRVLVEAAQAYRLPARISRTLLVRQQGVPPEVRKIAWEAQLRLCSRYQRLVGRGKPANLVVTAIARELAGFMWAIAREVPAVA

SEQ ID NO: 510121 - protein, 346 aa, unidentified
MLYAGLDLSRKRLDFHLLDREGATVEVGAAPPDADGLRGLSERLARHSEPVRAAIESMNGARFVHDRLELHGWVVEIADAQKVKGLAPLACKTDRIDAWVLAELSRRELVPAIWLPDPLVRAERERARWRLHLVRHRSSLKQRVHAVLLTHGKPCPVSDLFGVRGRQLLARLDLPDPWQGTIEASLRLIDELDREIGDCERELRRLGADHRYVPLLCTVPGIGSVLAYTIAAELGDINRFPTPRKLTGYSGLCPRVYQSGERDLRGPLAKQGPRYLRWALVEAATHACTHPAYRDRYQRTKARIGKQRGAKVAQIDLARRLTEAIWHMLTRDQPFAPKGATDPLAA

SEQ ID NO: 510122 - protein, 397 aa, unidentified
MSMFFVGVDVSKDYSSAQGLDGEGKRLFYLEFSMDGEGFSQFLEVLKTHCEDLSGVMVGMESTGCYHINLFAFLCSEGMVCVVINPLLISNFARLSLRKTKTDKKDALTIAQFLLAHGSELFQVSYCQSSQDLKDLARERESLAVMIAGLKNDVRRLLQMTFPELEHRCKLFTETMMRFLIKFPSARAIRTAKPREISKALIHAEGKRKRVFLSAEEIIKLAKVSVASESVAKEWILSEKIETLLYLEEKKARMTEALVEACRSVRVDELDIITSVDGISKVTGSTFLAELGDIKTFRSYKHVIAFAGLDPSLHQSGQYEGISRLSKRGNRHLRRVVFLMTLCAVRSQNIFREYFLKRKEEGLPPKKAILATAHKLLRVLFAMLTSKSYFRKEVVEA

SEQ ID NO: 510123 - protein, 362 aa, unidentified
MNDIHYIGFDVHKKSVSYCVKTASGEMVQEGQLAARREVLRAWAAAQPQPWRGAMEATLFSAWIYDTLQPYAQQLDMGHPARMKAITAGKKKSDRLDARTLADLLRCNLLPTCYVLSPEMRDLRRLLRYRQLVVGQSVRMQNKMAGLLMETGAPFVKAKLHGKKYFTQLLETLQEVPESVKDLLRMSRGAMEMFEASQKRLVKRLLTEPALQARVERLASIPGVGPITALTWALEIADPQRFPSIGDAVSYCGLTTAFRASAGQEQRGPISKQRNAWLQTALIEAAKLAPRWNPQLAAVHQHELQHGHRNRATLQVARKLVAYLMAVDKSGQPFRLRRSPEVAAAPPTRKKEKARRPALQLT

SEQ ID NO: 510124 - protein, 428 aa, unidentified
MSTQNYVAYIGIDWADRKHDIAFYDCASNTWQEYIIKTRPQDILDWVNQLRAHYGDGKIAVAMEQKRGPLLYALCQYDNLVLFPINPRTVANYRKAFQPSRAKSDPVDARLLVELMQKHSEKLVCWVPGCPQTRALRQWVESRRMLVGEKVRLTNRITASLKSYFPQVLDWFEDKDTLVFCSFMEQFPSVVDAQAATPEQLTQFFRSHQAGRKSAIVRRIQQIQEAGPPLTRDEAIVVPAQALTCALIALLKVVLTQLNDFNAKIVTLFESIPDAELFSSLPGAGPHLAPRLLVAFGAERDRFASAQAFMSYVGIAPVKEESGKKRWVHWRWSCPIFLRQTFVEWVNQSRRLSPWAQAFYLQQKQAGKTHQKAIRSLAYKWGRILWRCWQDNTPYDEQKYLAALARKKSPLIKLLGTHDSECQPLTEA

SEQ ID NO: 510125 - protein, 344 aa, unidentified
MQYIAFDVHRKYTWATVEDQSARVVRQGRIDHRRGALRGFLSACEAGLPVAVETVGNWYWVVDEIEDGGFEPKLVNARLAKLMIGQVNKTDKLDNRGLNRLQRAGTLPTVWIPPAEVRDARELPRTRMMLVGQRTQLKNRVHSTLAKYGLSLPEVSDLFGKAGRQALSRLMEQLPPNTAQATQAVLEQLDGLEQAISAVERRIAEVFDDAAENKLLRSLPGVGAILSVVIATEMGDCGRFGSAERFASYCGTVPRVHASGGKSYSGRIRMDVNSYLKWALVEAANAALLQGARYGHVRRLYDRLRARRGHGKAVVAVARHLAEATFWVLTKGEPYQEPRRSTRG

SEQ ID NO: 510126 - protein, 356 aa, unidentified
MSVYVGIDVHRKRSQVAVIDSGGEVLANRNVPNGTETILGVIGGLPPGTPTAFEAAFGWGWLLELLEDYGFDPHLVHPLQCKAIASARLKNDKVDAAILAQLLRADLLPEAWIAPPAVRQLRALLRHRAQLVRLRTLLRNRIHAVLADHGHDRPSGCWSGPGRGWLASLPLPAVSREVIEDDLALIDALQVPIDRLDWEVRQRARSDPRVKILTQLPGVGTFTALVILAEIGDVTRFGSARKLAAWTGLTPTVRGSDRTVRHGHISKQGSAWLRWILCEAAQTAKRHPDFAASYQAIARRRGKKIATTAIARKLLARAWHLLTDAERAADARVTTTSASPARDDAVTSREGSPSPG

SEQ ID NO: 510127 - protein, 354 aa, unidentified
MDYFAGLDISVKDTSVCIVDGTGKIVREVKVASEPDALLQVLGNPAYCFKRIGLEAGPLSQWLFSALGEANLPVICVETRHMRAVLKAQINKTDRNDARGIAQMMRVGLYRPVHVKTLRSQKLRMLLTRRKLLQSKAIAIENDLRGTLRNFGLKVGIAGWPRFEARIAELIENVPDLAVLIEPLLVVRRVVREQIAVLHRRLLAIVRDDEVCGRLMTIPGVGPVVALTYRATVDVPARFRRSKSVGAVFGLTCSRDQSGERDRPGAISRCGDEMMRTMLYEAAQSMLVRSTRWSWLKAWAMQIAKRRGMKRAIVALARRLAVIMHRIWVDGTEFRWTREVTAASDRPFSGHVAR

SEQ ID NO: 510128 - protein, 339 aa, unidentified
MKYIPVGVDIAKHLMQVHFVDEHTGEIIDKQVKREKFLEYFSNREPCLIGMEACGGSHHWARELQKLGHKVRLLKGRFVKAFVMGNKNDVMDARAIWLAVQQPVKSVAVKSEEQQATLGLHRMRQQLVKFRTAQINALHGLLLEFGETTHKGRAALAKEVPEALERLKERLPLYLINMLDEQYQRITELDEHLDHIEKQLQAVARQNETCQRLLNIPGVGPLIATAAVATMGDASAFKSGREFAAFIGLVPRQTGSGGKIHLLGISKRGDKYLRTLFIHGARAAALLTKEPGPWITELKKRRPASVAIVAMANKLARTVWAIAAHGRKYDKNHVSIRPD

SEQ ID NO: 510129 - protein, 449 aa, unidentified
MNNPQEIEDEEHEQVIERVAAIDVAKASGMVCVRVPHETRPGRRVSRVWEVPATTRAVTELGDHLVSEGIEKVTVESTSDYWRIWYYLLEAAGLDIQLVNARQARNLPGRPKTDKLDTVWQAKCTERGMLRPSFVPPAEIRQLRDYTRLRSDLTQERTRHWSRLEKLLEDALIKVTAVASTIDTQSVRAMIEALIAGERSPRVLADLAIGKMKAKRAALIEALTGRFDAHHGELARMLLDQIDALTTHIDALDGRIEALIAAIPAARGVDAAGTTGPGAGLGPDAAVRPAIDRLDEIPGIARHTAQVVLAEIGFDMTRFPTAGHLVSWAKLSPRTIQSGPKSRSGKTGKGNPYLKGVLGQAAAAAAKTDTFLGARYRRLVKRIGKLKALVAVARSILVIIWHLLSDPAARFCDLGSGYHDSRIDTGRKARNHIRQLEALGYTVTIAQAA

SEQ ID NO: 510130 - protein, 345 aa, unidentified
MTVIFCGIDFHKHTSTICYLFPDGKEEIKTILTSGLVKELSNRPLMRIAVEATGGSNHLAVEIKKLEHEIILIDTVKFKAIGLGGKKTDKRDAKALAHILKVDYVPSVFLKSLGARRIKSLIVSRELCVQDRVTATNHIRGILREYGLTMPQGVEEFHANVSEKIASLNFPYLEDALKFQLRRSVELKAKEKEIEQQLTELLAGDENVQILQSVPGVGLMTSAAFIAVIDDIARFKSSKELASYLGLVPRESSSGGKRRMGSITQSGSETLRRYFIHGARSVLMHTNDRSTEPLRKWALNVKKRGGMNKATVALAHRLARICFCLLKERRFYAKTYSPAEMKKIA

SEQ ID NO: 510131 - protein, 337 aa, unidentified
MKDVRIGLDIAQMVFQVHGVDEPGKSVLKKTLSRSELLNFFANTPASLIGIEACAGSHYWARELIKLGHDARLMSAQFVSPYRKSGKNDANDAEAICEAVGRPNMRLVPVKSEEAQAVLAVHRARALTVSERTALVNQVRGLLGEFGIVAGQGIAQAGRLLAEIGAGGRQLPLLARETVGELHDRLRTLDERILAYDRKISVLAKACEPARRLMAIEGVGPVTATALVASVGNASAFKSGRQFAAWLGLTPRQNSRGGKTKLGSISKRGDVTLRTLLIHGTRSVLRLTADKTDRKSRWAEALKERACANVAAVALAAKKARIIWAMRSRGTEYQVAS

SEQ ID NO: 510132 - protein, 466 aa, unidentified
MENNYILYVGMDVSKGKADAAILKVSDRRSVKPKFLRKKLSFKFVKSEVASFLESVRSYSDVNCTSICFALEVTGIYSTNVYDYIKANLYENESIKFINTDFVNQWRIAHNIAKSDPLDAQTISTIIGTDLDVQYVNDNVFENKNGYQDLKALVHRHYQIKKIYSQEINRLIAQCDCLFPELQYVFEPKSAAFIAVLSSYPTTHDIINASRVEVFDVVYEATKHRCSMDKVDKLFELCQDTLVPDDISSYGKSIILDLVENIKNIKGQLKSIERYIKDIASLNPAYKLLLTITGCGPITAATVIAETGNIRRFKNADCFVSYSGSSPRNKRSGTSVETMGKISKKGSRYLRHAIYMIAEFARRHNPVLKHQFERIKNGNKKRHKLANIAIANKIARYIYSIMKNKSSFVILHDHIMRLPEETRDTFFNSISLDFPKNTRKQIYQYSDINGELHRFVYIKTDEMIPA

SEQ ID NO: 510133 - protein, 345 aa, unidentified
MKITTVGIDLAKNVIQIHGVDERGKTVLRKPLKRAQVAAFFATLEPCLIGMEACGSAHHWARKLQGFGHAVRLMAPQFVKPYVKTNKNDVADAEAICEAVGRPNMRFVPLKTTAQQSVLALHRARQGFVKARTAQANAIRGLLGEFGIVMPQGMSPLAKRVPEILEDGENGLTGSFRQLLQRLMEHLKELDRQVGELEQEIQVWHRQNEASCKLAKVPGIGPITASALVASVGDAKNCANGRQMAAWLGLVPRQHSSGGRPTLLGISKRGDSYLRTLLVHGARSVVRYAEGKTNPAADWLRSLLSRRNTNVAVVALANKNARIAWALLAHDREFRSDYVPARAKA

SEQ ID NO: 510134 - protein, 353 aa, unidentified
MYYSGIDLHKDMSLITTINENGALLSQRKVPNHKAHIITYFNQVSPQGSDHKAVVESTSNWYWLSDLLSEQGIDLTLAHAKYLKAISYAKVKTDKVDSHTLANLLRLDMVPEAHQISQDLRPIRDLMRARLSLVVKKTSCRNSIHRLLAKYNLNLPQYPKASDFALLKSKLPPEPILQLSVLEEQLQLIIRQIKTLEQSIHPKLIPNPDIQRLLYIPGIGKILAFTIYLEVDGIERFASVNRFFSYCRLVPGADNSNRTVKHKSSKDGNKYLKMAFMEASVRAVQYFKEIKSFHQSKTRKKHKHIAKALVAQELARITYHVLESQTDFNHMFRGVALSRHKTTKWPRLASPGA

SEQ ID NO: 510135 - protein, 482 aa, unidentified
MKAKPPEKIQKATNPSTRGHWNEMNRKQRREMMRQIQSEDISLEVVHPDAAGIDIGNESHYVAVPPSRDNQPVRCFACTTAELKAMADWLKQCGIRTVAMQSTGVYWIALYDILEQAGLEVYLVNARETKNLPGRKSDVQESQWLMKLHTYGLLRNSFRPSQEIRTMRTYWRQRNDLVQSAGRHVQRMQKALTQMNIQLANVLSDVSGVTGQAIIKAILGGERDPHKLAEFRHPRVRASEEEIARSLEGHWQEDLLFVLQQEQDGYEFCQKQMAECDRQLNHYLEQREDRSQGAPLPEEERKGRRKKKSGNKPQFDLRTGLFRMSGTDLTRIDSIDVMTATTILGEVGWDMSKWETDDHFVSWLRLCPDNRISGNRIIGKGRLPTNNRVTIALKMAASSLRLSDTYWGAQFRRFRTRLGAPVAIKAMAAKLARLVYRMLRYGMKYVDKGAATYQAQHRQLQIKQLKWKAATLGYQLIGVPAA

SEQ ID NO: 510136 - protein, 416 aa, unidentified
MLFVGDDWAEDHHDLVVIDNNQKVLARARVPEGPAGITAFTDVIARAALKTVTSDDDLDDDAVEVMVGIELNHGPWVQALVAAGYQVFGVDPLQAKRFRESWSNSKTKSDSGDALGLAELVRSRHRTLTTVGADSEGSAAIRILAREHQRAVWDRTRQTNRLRSTLREYHPAIVTIAAKYDLPLHDKTILGLLTLAPTPTAGAAITVRQVLPLLARRHDKDAKAAWIVQALQQPQLPVGPEIVEAYAITVRAATRVISSASSHIAELEEQVNAHFSRHPDAEIYLSQPGIGQVIGARLCGEYGDDSTRFRTAKDRRNFAQTSPLTRQSGKLRIVCARKAGNDWALDAAILQANAAIMHDKYAHAYYRRQRDRGVKHNAALRQLANKLTGILHGCLARHHRYDPAIAWANADLEVPA

SEQ ID NO: 510137 - protein, 407 aa, unidentified
MNAVGIDVSKGKSMVAALRPMGEVALLPKEYSHSDVGLEQMACAIIALGEDTRVVMEATGRYHEPVAAALHEYGIYVTVLNPLFIQRSGGGSIRKVKTDKADAMKIAKYGLDNWVDLREYTPMEAVRQQLKLCSRQYNLYMKTIVALQNNLISLTDKTFPGVNELFSSPERADGHQKWVDFVLSFWHCECVCQISEKAFTERYRKWCKRKNYNFSEEKSLDLYADSCGHITTLPKNDNTKLLITTAAQQLLAAKTTLVAMRAEMLRLAKLLPEYEAVLAMYGVGEITAAQLMAEIGDVRRYPRRSSLVAFAGVDPAVNQSGKHEAQSNPTTKRGSPHLRKTLYQIVCTHLKKSPADEPVYQFIDKKRSEGKPYFVYMTAGANKFLRIYYARVKECLAALDRVDTIKN

SEQ ID NO: 510138 - protein, 364 aa, unidentified
MEKVITHAGLDVHMERIVIATFKGQAREATILDIPNDAKVIRRTFKRLAAEAYELRCCYEAGPCGYEVYRQLAAMGIACEVIAPALIPVRAGDRVKTDRRDASKLARLHRAGELTAITVPTEDQEAVRDLVRARDDVRKDLTAARHRLGKFLLRHGRAFHDGKNWTLKFWTWVGGQKFERVCERLTFEHYITEVKHLVSRREELDREIEQMAQTEPYAASVGKLTCLRGLSTLSAMALLSEIGDFRRFEHPRQLMAFVGLVPSEYSSGGKEKRGGITKTGNSHVRRILVEAGWAYRHRPATSPRARQAHIGQPATLVEYTKRAHHRLHRRYARLIGKGKKPQLAVTAVARELCGFVWGVMTMAA

SEQ ID NO: 510139 - protein, 379 aa, unidentified
MKKIINPKPARKGVSSEAIQKPADGGTADNEFHAVLGLDVGDRETHFCMLGPGGGFVAEGVVVTSENGLRSLLAGRPRSRVVLEAGTHSGWIGRLVETSGHELIVANPRHLALISQSDTKNDRNDARLLARMAVADPELLSPVRPRSAKTQQDLAWVRAREVAVEARTKIVNAVRGIVKSSGARLPKCSTAAFVAKAQANCPEGLKEALLPLLRSVEVLSREIQGYDNLVAKKAAREYPETTAIQTIDGVGPLTALTFVLVLDNDRTRFQRSRDVGCFIGLRPKQHDSGMRSPALGITKAGDPLLRRLATQCAQYILGPFGRDSALRRWGLGLVTRGGKRAKQRAVVAVARKLVILMHRLWVRQENYDPLHGVPAAAAA

SEQ ID NO: 510140 - protein, 386 aa, unidentified
METAVGKLAERSVASFPTAAGDRSFNPRSNKTVEKLDRRRFHEISPNSRKSRRGAGRRASSHSQGRDIVMDVAFTSFVGIDIAKRTLDVHVLPERRSLQHSNDSKGRRQLREQLPPPGLCLIVVEATGGYERALVAELIDAGYHVAVVNPRQARDFAKACGHLAKTDRIDAAVLARFGEAVELRIQAKIPEKQLELQDLVARRRQLVELRAGEMNRKEKVTSKLVRKSLQETIDLLTKQIRRFEKQIAALVQSDDEWKQKTQIVQSVPGVGSQVSACLLADVPELGQLNRQQIAALVGIAPFNCDSGPFRGRRTIRGGRISVRCALYMAALTARRFNPVIRAFADRLAALGKKPKVILTACMRKLLVILNTMVKNKTLWNPEISIT

SEQ ID NO: 510141 - protein, 467 aa, unidentified
MVMQSLKHIQGKNGSYWNRLMRNPEADRYCIVAVDAAKYVNAAMICTIYGDILKGPFEFDGSRTGFQVLQTAIKETREAYQLTDVILGIETTAHYYEDLVRVCMAQGYLVRILNAATTAKERETVLNYTKTDRVDLMAIIQSILHGRGATGLKKHQEFETLQTLTRAKRRLVNDRSRCINHLRLYSDHIFKEFQGKNERIDGKNQVVKIFDQFDSKSSLYLMRHHPHPEDLLSLGPVGLRKLSIQHNLKLREATIERLLSYARTSISKPKKDLYSELLLLRLKLDEYELLNRQVEELNEEIEALLLQTDGGILLSIPGVGVTIAAELTAEMGNLENFTSAGQLIKMAGTNPIVKQSGGKQASHYRISKQGRAPFRDIVYQLGKSTAQKNPEMNVHYQRLKDRGKMTGQAYIAIGNRMLRIAYAMRKKQILYQSQQPDYILQKVIAGKLRNKKKQALFYHRFVLSEPV

SEQ ID NO: 510142 - protein, 429 aa, unidentified
MRTESTPGARGPVFCGVDTHADSHWLCVLDWRGRRVLSRRFPADAAGYEALAGAIAAAGEPACVAMEGTSSYGAGLTRHLASLGMPVREALSPARMQRRRPGQGKCDESDAERAARAAMSGSKLGTPKSQDGWVDGVRCMLAARSGAVKARTSAINTARSLLTTAPEGLRSRFRGMAGPRLMEELPSVRAEGALGAALGALADLWAAARDAALDMERAIEASLEENCPALLAMYGCGPVSAAKLAVAAGDNPGRLRSEASFAAICGACPIPASSGKTVRHRLNRGGDRQANSALHEIARQRVMRDPETAEYAERARARGKSDREVMRCLKRYVAREAYRALMRPHEVRRPEDASGLVAARRAARVSQVRAASILGTSEKYISMLERGQRELKPIRRAYEAWVEAGLPLDWDRQAFEAERKMDSKKHLAK

SEQ ID NO: 510143 - protein, 412 aa, unidentified
MDLVYARCAGLDVHKATVVGCVRVPGVGRGERHTETRTLATTLRGLEELTTWLTGHGITHVAMESTGVYWRPVYAGLEGVVQVLLVNARHVQMVPGRKTDVRDCEWLAQLLECGLLRGSYVPPAAVRDLRDLTRLRKALIRERGHHVNRIEKTLELANIKLGIVVTDIMGKTGRAILEALSAGHDAPEQLTALAQGSIRTKKQAALREAVAGRLTPHYAFLLRQHLSLIEALDTHIGTLDARIETAMAPFAEAAALVQTMPGVATRAAQAILAETGVDMGPFPTAGHFASWARLCPGTHESAGKRRPTTTGQGAVWLRATLQEAAWAAARTKRSYYRALYHRLKGRRGAKKAIVAVQHAMLVALWHMLKRRVPHHDLGADYFDRRNTARLRHHHVRRLQQLGYQVVLVQEAA

SEQ ID NO: 510144 - protein, 388 aa, unidentified
MFFLGIDIGKNTHVASLLDEKAKIIFKAYSFANTLDAAEALLVKLEPYKDSLEIGMEATGHYWLSLYSFLAEHKFIVHVLNPIQTDGWRKGIEIRKRKTDVIDSVLIADLIRYGNFLETSLADEDILSLRNLSRFRVYLVNSVSDLKRKAIAVLDQIFPEYASVFSNVFGQTSKELLKSLSLPSDYENLSATKIEEALSNITQKKKASKTISTLSDKASRSFGISFCKDSFAFQLKLIIEQICFIEEQIASVELEIDQLMSKLGTNIKTIPGVGSVIGAVILGEIGDIERFDNPSKLVAYAGLDASVSQSGEYEASSGKLSKRGSPYLRKALYMAAQRAEFCDPVFHAYYEKKRNEGKHHLVATNAVARKLCHTIYAILKKDVPYEVQ

SEQ ID NO: 510145 - protein, 404 aa, unidentified
MFNAVGIDVSKGKSTVSVLQPGGTVVKKPFNVVHSSSSLNELSRFILHLDGQTRVVMECTGRYHEPILHALHDAGIFVSAVNPHLIKNFGSNSIRKVKSDPADSRKIARYALDNWASLRQYSDMDTTRTQLKTLNSQMDFFTKQKVAARTNLISLMDMTYPGVNFLFSSPARDDGSEKWLDYAESFWHVDCVRKIGLKAFTKRYQAFCKRNGYNFQPGKPEELYLASKELVAVYPKDKVYKDLIMTGIEQLKSTTQHVEHIRHEMDALASTLPEYETVLSMRGVGKTLGPQLMAEIGDITNYTHREALTAFAGVDPGVNESGSFRSKSNPASKCGSSRLRKTLFLIMTSLLQTSPADDRVYQFLDRKRSEGKPYLVYMTAGANKFLRIYYGKVKACIAAQSKSE

SEQ ID NO: 510146 - protein, 336 aa, unidentified
MKKSYGIFIGVDVSKAKLDYCMVDQATMQYDFGCLSNTAKGIATFLSTLSKKLKGKKEDILFCLENTGVYSMPICYWLQAGQFDYWVVPALEIRRSKGIVRGKTDKGDSRDIALYAMSHLHELKLSSLPEKDFVELRLLLAERDKVVKAINIFNMTNESRNFLPKDVLKVTLQHNKRMMEFLKKQLLQIEKSIENIVKLNPVFKQQDELLQSIPGVGKQTSVLLITYTQAFTLFKSHRQFACYAGVAPFEYSSGSSVRGRTKVSNLANKKLKTALNMAALTAKKFDTELKHYYDQKVAAGKNKMLVLNTIRCKIISRAFAVINRNSKFVDTLKAVA

SEQ ID NO: 510147 - protein, 359 aa, unidentified
MSTQSNKIDFKGQNIYVGFDVHLKDWKVTIMTEMLTHKTFSQPPKPEALYHYLIKTFPGGIYHSAYEAGFSGYWIHNKLCNFGINSIVVNPADIPTTGKETIMKDDTRDSIKIARSLRNGDLNPIYVPSLPTLEDRGLVRTRATLVKDLTRYKNRIKSFLYFHGIEFPESFRSPQTHWSNRFNKWLEDIAMTEPSGKASLNVLLAQSNYLRTSVLQTTKQIRELAKTGRYKTQHELLRSIPGIGLLTAMVILTEIETIERFGTFDQLCGFIGLVPSTHSSGDHEVIGNITPRGHSVLRTAIIESAWMAARLDPALNKCYHDYCKKMEPNKAIIRIARKLTSRIRFVLKNNQPYVCSVVK

SEQ ID NO: 510148 - protein, 354 aa, unidentified
MNTTQVFEKRKIAVAIGIDLAKDHCDVVAYNADNKICFTKSNWAYPQLMEWLANAQPAVVLMESCKGSMVRARDIADLGHDSRLVKGADVKALRNVTQKNDIRDADYIARLFYVPGTKYVFVKNQRQQSLQFLQNEYKSLQELRIRVGNQIHAGLEEFGCPGSKSKKFIQSRMMAHLEKNAELIPDEVMASFLRRRDMWLNLFEQEEQAKTRMEEIAMTDDDAKRIMTVPGVGAQTAVGMLVHIGGDIGRFKNSGQFAASIGLVPKQNSTGGNITLNGITKCGPKRLRANLVQCGQVIFMYADKLKGNFGDWVRKLRDSGKKRGVIACAIAAKIAKIIYRLMKDKVDYTPVPSR

SEQ ID NO: 510149 - protein, 353 aa, unidentified
MRRPNEKLIAGIDLHSNNVMIGVMNQDGKRVAHRKLDCDLKAVTEFLAPLKPQLQSMAVESTFNWYWLVDGLRAQGYPIDLANPAKIEPYRGIKHADDKDDAFHLAELQRLNILPKGHVYDPELRPVRDLLRRRLNLVHQRTALLLSFKSLHARTTGQQLDLAEAKKMEPKEAPKLYRHPANQLIAQVQAEHIQALAKSIARIEKAVLACAQEIPLYEKLLTLPGIGRILGMTITMEVGDIKRFKTDGDFASYCRVVDARRFSNGKRKADNNQKCGNKYLSFSFVEAANFARRYCEHCRRWYDRKAARTSKVLATKALACKLAKAAWHVMARQCNYDEKRMFPELATQPMNQD

SEQ ID NO: 510150 - protein, 429 aa, unidentified
MQNESIPDARGPVFCGVDTHADSHWLCVLDWRGRKVLSRQFPADAAGYEALAGAIAAAGEPACVAMEGTSSYGAGLTRHLASLGMPVREALSPARTQRRRPGQGKCDEADAERAARAAMSGSRLGTPKSQDGWVDGVRCMLAARSGAVKARTSAINTARSLLTTAPEGLRSRFRGMAGPRLMEELPSVRAEGALGAALGALADLWAAARDAALDMERAIEASLEENCPALLAMYGCGPVSAAKLAVAAGDNPGRLRSEASFAAICGACPIPASSGKTVRHRLNRGGDRQANSALHEIARQRVMRDPETAEYAERARGRGKSDREVMRCLKRYVAREAYRALMRPHEIRRPEDASELVAARRAAKVSQVRAASILGTSEKYISMLERGQRELKPIRRAYEAWVEAGLPLDWDRQAFEAERKMDSKKHLAK

SEQ ID NO: 510151 - protein, 407 aa, unidentified
MRLFVGDDWAEDHHDVELMDATGRVLARKRLPEGVAGMARLHELIGQQLGEDAEDAEVVIGIETDRSPWVAALVAAGYVVYAVNPLQASRYRERHGVSGAKSDTGDAHMLTDMVRTDSHQLRAVAGDSAGAEAVKVVARTHKTLIWERTRQVQRLRYQLREYFPAALAAFADLDAPDALELLARAPDPARAAKLTRAQVSAALKRARRRDISAKATAILAALRSAQLGQPPAVTAAYAVTVRSLIAVITVLNEQVKALQGQVEADFGRHPDAEIYLSQPGLGLVLGARVLGEFGDDPDRYASGKARKNYAATSPLTRASGKRKVVAARFIRNDRLTDALMAQAFAAMNASPGARALYDAERARGTEHNPALRKLANRLVGILHGCLKTRTLYDEATAWPHHENKLAA

SEQ ID NO: 510152 - protein, 339 aa, unidentified
MNEVTVIGIDLGKHSFHLHAQDAAGRMVFRKKLSRQQLLRTLANVPCCRVVMEACAGSHWLARQLAGMGHEPRLISPQFVRPFVVGNKNDFGDAQAICEAACRPSMRFVSPRNEAQQTVSAMHRLRERLVRERTATVNQIHGFLLEFGISLPRGAALMSRLPTVLDHETLPPRLVGLVVRLHAQVHYLEEQLRQVEQDLKASLREDDKSRRLLEIPGIGPITASALAVELGDARQFANARQFAASIGLVPRQYSTGGKPTLLGISKRGDRNLRRLLVQCARAVMQHTASRTDALSLWVKTLSTRRHSNVVACALANKLARIAWAVLARGTHYQARALTT

SEQ ID NO: 510153 - protein, 415 aa, unidentified
MKKVYDKCCGIDVHKKLMVACFIHGKEQEVREFGATTRELLELADWLIKGGCQMVAMESTASYWKPLYNILESSNLPAMVVNARHMKAVPGRKTDVKDAEWIADLLQHGLLQASYIPNKAQRELRELVGYRKSLVADRTRELNRLQKMLEGANIKLSGTVAEINGMSARVILNELLDGKTIDKARLQEMKEQKIIAHNLRASFDQIADDLNGVMSSLQKKMMKELLKHIDELNEHIKNLDDDIDNHMNDDEKKAVEAITEIGGIADASAKAIIAVIGTDMSRFPTDSHISSWAGLCPGNNESAKKRKSGKTNKGNNLLRTTLIICAHAAAKMKNTYFAAQFKRISAHRGKKRAYVAVAHSMLIAIYHILNDGVKYQDLGVDYYNQFNRERKINAYLKKLKELGWTESSTMVEQPA

SEQ ID NO: 510154 - protein, 434 aa, unidentified
MMRGNEQEPSLKEKRRCAMKMPPPAPSSEGAVIKYVCGIDIGSQCCVGCICRPDKSVVIKSITFANAREGWQIWEEKLKQLDAPAGEILIGMEATSRYGENLYQELEQRGYVLRLLHPGQTHHFHQQRGLRAKTDRLDAMTIARALLSGEARMGYVPDEQVATYRELVRLHTQLSDTAASYQNEIQALVVVLFPEFTQVKASPCLPTALAVLKAFPSAQALVEAGVEALVQVLRAQPAAHYGRPTAKKLVALANQSVSSGRARAGRSTSLRILCDQLEHTQANLARLNTEIEQLLNTDPGVKGLQQVPEFGPKTLAVLRAELGDVQRFSRIDEVIAYGGMDIEIKESGLWKGKAKLSKHGSGLLRRVLYMSALRCIHRKESAFGAYYQRLVQRGLKKGSALMAVMRKMLAVAAHLLMHEDEEYDRSLVCGSAAG

SEQ ID NO: 510155 - protein, 382 aa, unidentified
MQTVTRKETRFVGLDVHAETITVAIATKDGDVHSMGSISNRPESIKRLVKKLDAGGSWTACYEAGPTGYALYWQLAKLERSCEVIAPTLVPMKAGDRVKTDRRDAERLARCYRAGELTAVWVPDAAHEALRDLVRAREAAKQDQLRARHRLGKFLLRHGKRPPQNMRAWTQQYLEWMKREVQFEQCAQQATLEDYVNEVEHCALRIVRLEKTIDTAVEQAPESMREVIGALQALRGVAKVTAVTIVAEVGTLSRFEHARQLMGYSGAVSSEYSSGERTRRGGITKTGNAHLRRVIVEAAWSQRYKPLISRAARKRQEGLSAEVQEIATKARDRLHSRYVRLLGRGKSKQQVVTAVAREMLGFIWAIGVTVERSHVQKAKGAA

SEQ ID NO: 510156 - protein, 351 aa, unidentified
MLILGVEYHPSEQYSALADTETAECGERRLNHSAGEAEKFYRNLQQRAASVRVGMEATGYSRWFERLLAELGSELWIGDAAEIKTKRVRKQKTDPNHARLLLQLLLEDNFPRIWVPSPENRDLRQLLWHRHRMLQMRTRIRNPLQALAMNQGQRRKKKLWNEPGRAPLEKLPLAVWASRRSTDLLELLDRMNPPIEGLSAAIEREARKWPEVLRLMTHPSVGPLTALAFVLIIGTVERFKCGKQIGSYVGLIPCEDSSAGHQRLGHITKQGSSLLRFLLGEAAQAAARCDADWRRRYLHLALRRQRNIAKVAMARRLGVRLYWMWRKGWEYSEWVKFGSHAGQLGTGDGVQ

SEQ ID NO: 510157 - protein, 310 aa, unidentified
MDATYVGIDVSKEKLDVHLRPSAEAFAVARDGKGLHELVERLRGVAPELIVVEATGGFETIVTAALAAAALPVVVVNPAQVRHFAKALGQRAKSDPIDAAVIADFAAAVKPQLRPLPDAAARLLAELVGRRAQLVEMLAAERQREERVANARVRKSLKRHIAALAKELKTIEDDIDGLIRSSPLWREKEDLLKTFPGVGETLARVFLADLPELGQLNRRKIASLVGVAPFTQQSGQWKGKSMIAGGRAAVRSAVFMAAMSAIRCNDMLRAFYQHLLALGKPKMVALIAVARKLLTILNAMLRDQKPWQHA

SEQ ID NO: 510158 - protein, 357 aa, unidentified
MLAELLDAIVGVDTHRDTHEVEIALPNGIPIATCQISNDTAGYAELLAWIIDHAPGPRLAVSIEGTRSYGVGLARAATAAGLLVVECEQPNRKARRGKGKSDPIDAHLAVLAALRLDADRLPIPRADGDREALRILLGARQELTAISTAQTNRLRALLRDGDDTDLALARGLLNDAVLAAIARRREPRDASRQQSVRHAEIRRLALALRESGRTLRTNRAQLQAISNDLAPGLTDRRGLGPVTAAQAIVSFSHPGRCRSDAAFAALSGTSPLQASSGRTVRHRLNRGGDRALNSTIHTIAMVRMRSCSRTQAYVTRRTAEGKTPREIRRCLKRYIARELYRTLTATMTTTAGTPNAA

SEQ ID NO: 510159 - protein, 342 aa, unidentified
MGKLTRIGIDTSKSVLQLHGVDDDEQPALRRKLRRQDLPKFFGSLPRLRIGMEACGASHHWARELQALGHEVVLIPPQYTKPYVDRGKNDAADAEAICEAMSRPKVQRRFVPPKTLDQQALQMLLGVRNGLVKRRTQVGNAIRGHAAEFGLVSAKGLYRVEDLLAKVEQSQGMPELARALFKVLAGQYRHAEAQLGEIEATLMAQHRGNEVSQRLAAIPSVGPIGAMAMAAKIGDASRFRSGRDFAAFIGLTPKDHTTAGRKRPGSITRAGDEMLRTYPICGATAVIRQLKHGRGHNSPWLKDLVAHKPEKVAAVALANKTARIAWKLMISGERYCTEYAEA

SEQ ID NO: 510160 - protein, 288 aa, unidentified
MKYNAGLDVSQQTTSLCIVDEEGKIVAERKVASSPDAIAEALEPFAVTRAGLETGPMSVWLWNGLKERGVPIVCMDARHANAALKMMPAKTDRNDAIGLAQIIRTGWCKSVHVKSTASHEARALLTARSQFVQIRCDLENQIRGVLRTFGILFGKLVGGFAKRAEEIIDGELHASPTIQAVVEALMRARANILEQIRLLDAKVRSIARQNAVVRRLMSVPGVGVITALGFAATIDDPTRFKRSSSAGAYLGLTPRIYASGETMRSGRVSKRGDDFLRRSLYEAAPMRY

SEQ ID NO: 510161 - protein, 340 aa, unidentified
MTHIAMDVHRKRSVLAYQTPAVEEPKIARCYTTRAGLGKVLGALPRPWVVCVEATRQSPAVVRWLRELEVDDIQLVDPKGLKAFVRGKPKTDARDAKEMLVLLQMGRLPKAYLAPPAVQEVRALTRTRGYVRRASTSLRNQVRALLNQHGLEVPARDLCGVGGRRQLAECVAQLGPLGQIAADQLSPLLLGTEQALDVLDAQVREELAHQPVARALTALPGIGPVMALALAAELGEIERFEDVAHLWSYAGLAPRAHDSDDYQAERHLPQRCNKRLRHLAVQAAQAAARSRQPSPAQRTYQRLCRRGLHPNTAKVAAARDLLKDIFYTWHQEVAPSPAAA

SEQ ID NO: 510162 - protein, 420 aa, unidentified
MKEWKEITHYAGFDWARDHHLVVIVDQQGQIVADFQFEHSVEGWKSFHEKTAPFSHLAVAIETSQGGVVDQLLQGGYAVYPVNPTAAVSYRRRKAPSGTKTDQLDAWSLADALRVDGHGWKALQPMDELSLQLRLLCRDEVALIEQRTQLVNQLEQALVEYYPAALEAFDDWVNPSTWDFVIQFPTPECLVQAGKRKWEKFLHTHRLWRSETAEKRLAIFSRADQFKATAPITKAKSQLAVSLCRLLRTLQQQLDEYQNQIQELFKRHPDHNLFGSLPGAKTILAPRLLAAIGSDPDRYTTVEVLQCFAGSAPISFESGQIRKAKVRWACDKFLRHSVHLWANCFRRASAWGQAYYQKKRKDGMSHACALRCLAQRLLKIVFRMITDKKPYDAELHARNQVKHGSWVLGLVATPTAKTGE

SEQ ID NO: 510163 - protein, 333 aa, unidentified
MEKKWFIGIDISKKTLDVVIYVPTKKHADETNYERFLNKEEGYKSLLCWLKKKNMAKKRLVISMENTGIYSFDLCLFLEAASIDYCSFNPLHLKRSLGLVRGKNDRVDAERIAYFAYLHRDELSYSKLSGSSIIRLRDFAAERKRFVKQQAEYKGFLTDRKDCEMTSTIERAAHMVKILDEEIASVEEEMLQIINSDPSILRNYELLNSIKGIGMINAMNTIIHTNNFQAFETARQYACYLGIAPFEHSSGTSIKGKTRVYPTGAKLLKADLSQAANSAIVWDKEMKEYYERKRKEGKAYGVVLNAVKFKLVGRMFAVVKRGTPFVELMTYKK

SEQ ID NO: 510164 - protein, 304 aa, unidentified
MNKFKIVIGIDISKNKLDVCIIEDPTSKQRNYFIVSNDKKGIDDIFKELKKYKVSDSELVFCFENTGVYGMHLCYALQQRNVSYSIVPAIEIKRARGLTRGKSDKTDSLDIALYAITHEHKLSYRKLPEYDLMKLRLLLTEREKLIKSISLFDSTKENEDFLPKEITRNILKINKQTIIALKKQLLAVEKNILTIIKENETIKQQYALATSVPGVGQQTAINLLVATRCFSTFENWRQLACYAGVAPFKYASGTSVHGKTKVSHMANKKLKSLLNMAALSAKKHDKQLKEYYERKIREGKMECL

SEQ ID NO: 510165 - protein, 319 aa, unidentified
MEEGIKFFVGLDVHKESIAVALAEAGRAPGRQLGTIAHDVPKLLKMLKRYGDAGAIEVVYEAGPTGYGLQRRLAAAGFHCRVIAPSLVPKRAGERIKTDRRDGLRLAELARAGELRTVWVPEPEDEAIRDLVRAREDAVNSRTQARQQLKGFLLRHEIRYAGKTGWTKVFYRWLSTLNWGKPAAQTAFTEYWQAVSAADERVERLTKALVEAVKGWRFEPVVAALQALRGIDVVCAIGLVAEIGDIARFDHARKLMGYLGLVPSEHSSGERVRRGSITRAGNAHARRLLTEAAWNYRFKALTGFIWAIAQRTMIETKTV

SEQ ID NO: 510166 - protein, 340 aa, unidentified
MEQVYGAFDLHSTNNYLAISDHEDKRLYKKKLPNYPDVILAELEPFRERLVGIVVESTFNWYWLVDLLMNEGYTVHLANPAGIQKYKGLKYSDDNHDAFWLAHLLRLGILPEGYIYPQEDRPIRDLLRKRGHLVRLRTSLINSLQDIIQRNLGQKLSTNKLKQLTEDHVSPLFVSQEDLALSGTVSKEIIDHLTCRINRIETAVREKIKIRKPFDKLRTVPGIGIILALTIMLETGDIKRFSKVGNFTSYCRKVPTEWTSNGKKKGKGNRKNGNKYLAWAFSEAAEFARRFDEKARGYYNRKAARTQAIVARSALAHKLARAAYYIMRDEVEFDHQKLFV

SEQ ID NO: 510167 - protein, 319 aa, unidentified
MKTTKCTDIKMSETHIGIDIGKDALDICIYESDQYWQESNTEIGIRRLMKRLSKYCITRLLVEATGGYERALVEAAIEHSIPVIIVQPIQVRQFAKAQGVFAKTDKIDARKIAEYGAMLQPEVKRLPGDKVRRVRDLLARKRQLTEMRTQELNRSHRAQKITAASHRRLIKLLDKEVAEINVKLSNEVADISEWQRTYDIISSVPGLGDGVAFTLLGELPELGQLTNRQIAALCGLAPFNRDSGRLKGKRRIRGGRAPIRTVLYMAMLSAIRYNSIIKGFYQKLVAQGKHKKVAIIACMRKMMTILNAMIRDDREWLMN

SEQ ID NO: 510168 - protein, 421 aa, unidentified
MLILYQRCAAVDIGKDVIAVAVRLPGDGPEHRQTIKRTFKTFYGVLKHAARWLTEQQVTHVAMEATGIYSMPVYHALIEHGQFEKVLVCNAGHVRNVPGRKTDLSDAEWLVHLLECGLLRGSFIPPAQIKAARDVIRYRTKLTESRTSELQRLGNVLQDAGIKVDSVASKITTQSVRAMVEALIDGERRPLLLAELAKGKMRAKIPDLQRALEGRFDDHHALMCRLHLDHLDHLEEMIARLDTQIEDMMQPFRAQRELLTTIPGIGPFAAAAVISEAGADIAETFPSAGQFASWIGVCPGNHESAGKRHSGKPRKGNQHLQHVLVECAWAASRTPGYLQSLYRWHVRKFGGSRNPTAKNKAIVAVAHKLAIIIWHVLATGKPYTDLGADYLDRRLDPAKETRRLIARLQALGHTVTIEPAA

SEQ ID NO: 510169 - protein, 323 aa, unidentified
MSTKATKKRRSFIGIDVSKKLLEVGVHQSDYHFRCPNDPKNFPALITELISLRPARILLEATGGLERALLQALHAAGLPVVVVNPRQVRDFAKALGLLAKTDRLDARVLAHFAAAIQPAIRPVKAQQETELDALMGRRTQLSDMLVQEKNRRGSAATKDTRDDIEEHIEWLEERIQELDEKLKEQLKCSAVWQQKDKILQSVKGIGFVTSLALLADCPELGQLNRHQIAKLVGVAPLNRDSGQQRGARHIWGGRAQVRSKLYMATLAAIRFNPVLKSFYQRLLAKNKLKKIAIVACMRKLLTIINVMIRENKLWNVKAQPVSA

SEQ ID NO: 510170 - protein, 340 aa, unidentified
MKNTKYFIGLDVHKERTSYCERDRLGNILTEAEAAILYSELEPRLKPYLNTAKIGLEASTSYYTLYHMFLTNSCDISVANTIQLRQLTAKNDRLDARRLSEMLRLGAFPCSYIPDEKIQHLRSLVQVRHSLMEEKVRCNTRIQAFLDKNGVVMPSQEAFSKHWRQTLLEYLGTGTVSGEIQYEYDHFIFLEKKQGQVEREMKHYTRMNWRKEYLLIQSVTGFGPVLACYVIAHVCPIERFPSNRKLRRYAGVIPVTKQSGETISKGHIPKGSSRKQLRWALVQAANTAGKTDMPLGRYYRKKKKQKKIAAIAKITVASSMIDILYKVLTTKQPYQILPIN

SEQ ID NO: 510171 - protein, 312 aa, unidentified
MTQEALIVGIDVSMTTLDVVILPTGEAFSLPNAAEGWRRLVRRLGGKRLEVVAFEATGGYERGLLKALVEADLPASRVNAARVRAFAMASGTLAKNDKLDALVIARFAQALPPRLTLSDPVTDALAELVTARRQIVHDLTRTANQADHAVNPVLKRSFRRRLRGLEADLKLIDLEIAKAMAADQDLASRGQILRSAPGVGPVASATFLALLPELGKLENRQIAGLVGVAPYDHDSGKMRGQRSIWGGRKPVRDILYMAALGAIRSKQTIFKACYDRLIANGKKPKVAIVAIMRKLITTLNAMLRNNTAWSPA

SEQ ID NO: 510172 - protein, 284 aa, unidentified
MNFKEFIGIDVSKSHLDVFIRRPSLHAKFNNNEAGFKKMIAWIEQHIDCAVEEVLFAFEHTGLYSLPLSLFLNEHQYDFTLIPGLELKKSMGISRGKNDKQDAKRIAEYAYEKQEKIRLYQMPSDTILKLKRLLSYRERLVKERAAFKGRLKEYSTFLDQTENAFLFESHAKMLAHFNEEIKRVEKELYKLIKADEKLTQQFKLIKSIKGVGPQTALVMIVLTNGFTSFEQWRKFASYAGTAPFSNESGTFKGKTKISHLANKRIKTLLSCCATASAVRFRYTV

SEQ ID NO: 510173 - protein, 425 aa, unidentified
MSSDLEIAAFIGLDWADQQHVIRLRVAGSAPVESQLLDQKPETLRSWIGQLRQRFGGRPVAIALEQSRGSLLYALMNVDFLLLYPVNPQNLAQFRKAFYPSGAKDDPQDALLLLEMLEKHRDRLRVWVPDDADTRCLRLLAENRRKLVNRRTALTNQLTSLLKESFPQALDWAGPLDSVRACDFLEPWPSLPLLQKTSTSRLRKFYRDHTRLDSDALHLRLDQIRQAQPLTRDSAVLAAAELMIPALVRQLRCLIESIQQFDQQLKDRFLQHDDYTLFHSFPGAGPALGPRLLSAFGSNRNRFECAAEVQMLSGIAPVTERSGKSHWVHWRLACPKFLRQSFHEFAAQSILFSTWARAFYDQLRSRGTSHHAAVRTLAFKWIRILFRCWKNRTPYQEQIYLASLRRHGSPLCAALSPQLLELTCE

SEQ ID NO: 510174 - protein, 453 aa, unidentified
MEREASRLEQFWRLRKEIRGSGDYLIVGIDVGKDTHNAFMGTSQGKTLYRRLIFDNSMEGFEKLLLHVESVRVQHCVPEVVFGMEPTANYHKPLGEFLINQEKQVVLISPEAAKQNRPLLDGRWNKHDGKDCANIADLMCQGKCLYYEYPSLDLRDLRNLLSLNRKLKKLEQGLRLRIRNHLVAQYFPELDRYCHWGANEGLALVRWCLDPAVMSVLSDEELGKRLGTQGRTIAQRKRLSALKDKAQSSIGCNFGSSVEFEGQSVVKLLKEVRQTLASTQEQIEQVCLKFKEYSYLLSIPGFGPTLSAMVLGAIGNPWRFQSGAQVIKMVGLDLSASQSGKSQGAPIVSKKGKAEIRYALYQAAMVASSRDKHFVAYFTDQLRGREKEKGIKTKKRVKLAAKMLMIAWTLMKKQERFDPKYLSGQTPPIAAPKAVKTDNGGIPRVQPERDRGL

SEQ ID NO: 510175 - protein, 419 aa, unidentified
MKKIKAKTMMAVKQKVLIATIDGGKDIHYGYYRCPNGTEGKSLPFRNNGRGFQAFWERISSVANAQGFEEITIGFESTGPYMEPLVQFLRNKKAVRLVQVNPMHTKRLKELSGNSPLKTDRKDPKVIADIIELGHALTVVIPEGPAAELRRLTQGRERTIESRTRLFNQLQCLLVISFPEFLQVMTDVKTASAQHLLRHYPTAQDIVSLGEPALAAMLRKVSRGRLGEDRARALFEAASESVGVREGRSSMLLEIRLMLETIASYDRFIDGLEAEMLRHLEQIPYSRVILSLKGIGAVTVSGLIGEVGDFTKFGTISEVMKLAGLDLYEVSSGKHRGKLRISKRGRPLIRKLLYLAALSTIRRDGVMHEWYQRAVGRGMMKTKALVAVSRKLLGIIFALVRDHSVYVENYQKPVLQEAA

SEQ ID NO: 510176 - protein, 395 aa, unidentified
MYSLLVGIDVSKAGFSTAGINSEGQEAFSKAYAMDSNGFEELLKTVKSHCEDVSEVLIAMESTGCYHINLFSFLTSQGIRTMVVNPLLIANFAKLSLRKTKTDKKDATTIARFLLDHHEEISQLSISQDLQDLRDLSRERESLSHLISATKVEIKRVLRTTFPELETIGDIYTGVMLRLIQEYPSARLVGAGKLKAIAKLLKGPYVGNKLRFSAEDILRAAKTSIATVSPGKEIILQGKIATLLHLQERLEAITTLLTELCKATRVDDFEILRSIKGVGPKTAVPFLAEMGSVDNFLSYKKLIAFAGMDPSVSQSGQFVGMSRLSKRGNRHLRRAIYLMTASVVSKNAWFKAYFQKRKAEGLPPQKALFATAHKLIRVIFAMLSQRTYFQVKEAI

SEQ ID NO: 510177 - protein, 527 aa, unidentified
MAVRSKSSRRRKARPHVFQKPRGVLHPRVQAVGPEHFAIVCVDCAKARSKIMLADFYGRVLIEPTTVAHNQFDLDAGVRSVRDAMVQHELKDVIVVVERTGRYHKVVQRIFTKAGFEVRVVHPFATKQFRQPANPGNKTDDTDLYAIHRATVTGFGLSEPKPDPLFAHLKVLVRHRRSLVRSRVTIQLKMRDHLEACMPGYSDCVSDLFDSDVAMWVAKNLGSAEAITDAGVTGLVRRLSEAGVRKNVPVVEKIVAWARSAPTADEAASLHHRFFVELDEDQTSKRRMIEGLEAEIAEQLVLTPYVLLLAIAGISVVSAAQFAGEAGPMERYPSARAITGRAGLYPSRYQSDEVDRRDGKLIRCANRDLRYALTLIADNLLKCNEYFRVLAASWRLRDKDPRDVHVKVAGRFSRIAFQVVGGRQVYRHPCARQHDYILEKLSDFCIEHKIPPERHRRILNAAADQLPPAARPEEAIPLQEKLARVRKHRGAGPRSLGEILPEVLAKLGVTLVRSNESGESDLTTRPS

SEQ ID NO: 510178 - protein, 348 aa, unidentified
MIIIGVDSHKRTHTAVAADEVGRKRAEKTVVATSAGHLELVRWAARFETRTFALEDCRQLSRRLSTDLLRAGAAVIRVPPKLMAGARRSSRERGKSDPIDALAVARAALREDLPAATLDGPDREVRLLVDHREDLVAERTRAQNRLRWHLHELDPGNEPAARSLDRTVVLAALEVDLATAPGTVGRLARELVGRIRALTVTINELEREIGRLVGGLSPSLLALEGCGGLTAAKLVGESAGVGRFRSAAAFARHNGTAPLPVWSGNTVRHRLSRSGNRQLNVAIHRIAITQMQREGPSRTSIEHRRAMGDTKTEAIRALRRRISDEVFRRMRHDDAARVAARAPLAAAA

SEQ ID NO: 510179 - protein, 404 aa, unidentified
MIFVGIDWAEAHHDVCVLDQEGRVLAKGRMPDGVQGVGRLHAMVAEHAEDPGEVVVGIELDRGLLVGALVGAGYRVYAINPFAASRYRDRHATSGAKSDPGDAKVLADLVRTDRQNHREVAGDTDLAEAIKVLARAHQSLVWTRQRQVNQLRSTLREFYPGALAALKGDLSSHEACSVLGMAPTPQWGRRLTRSRIRRSLAASGRTRNLDRRTDQIYEALHAPQLQASPVLAEAYGQVVGSIVVVIDGLTHQIGQLEEQLEERFEGHPDAEILRSLPGLGLILGARVLAEFGDDPTRYADARARRCYSGSAPITRASGTRLVVLARVARNRRLADACYLWAFSAMNASPGARRYYDARRARGATHHQALRALSNRLVGILHGCLRNRRAYREDVAWSHSLQAVA

SEQ ID NO: 510180 - protein, 467 aa, unidentified
MPRVRAHFQRQGGEVTLPRELQQINLNAAGVDIGAASHYVAVPEGRDPDGQTVRTFGAFTPDLAALADWLTRCGIETVAMESTGVYWIPLFELLTTRGFEVKLVDPRQLKHVPGRKTDVLDCQWIQQLHTFGLLAAAFRPTDQICVLRSYLRQRAMLVSYAAQHIQHMQKALEQMNLKLAHVVSDIAGLTGLAIIRAIIAGERDPRALARLRDRRCKADEATIARALEGTWRQEHLFELRQAVELRDFYHQQVAACDAEIEAQLGRFEDKSGGQPLAGPARRPQGGRRAPSFDARPPLHRLTGIDLTRIDGIDGPTALKVIAEIGLDMTRWPTEKHFASWLGLAPGSKVSGGKRLSGRTKPSASRAAAALRLAASSLHHSRSALGAFYRRLRGRLGAPKAITATAHKLARLIYAMLRFGTEYVDRGQDYYEQRYQSRVISHLMRRAQELGYTLTKNEGLSPAASSLA

SEQ ID NO: 510181 - protein, 370 aa, unidentified
MKQYSEAFVGFDTAKKKHAVAIADVGREGEIRYLGEIDSSSAAVERMIRKLAGRYEELHFCYEAGPTGYGLCRQVRGLGHPCTVVAPSLIPKKSGERIKTNRRDAVTLARLFRAGELTSVWVPDTVHEAVRDLVRAREAASQDLRRKRQQLLSFVLRHGRIFSGRQHWSRAHLRWLAQQKFDHSAQQIVFQDAVDAIDDAATRLRRLDEQVVAIVPSWSMAPVVAAYQAMRGVSFVVAVTFVAEIGDLRRFDNPRQLMAFLGLVPSERSTGERVRRAGLTLAGNKRARRVLIEGAWSYRYPARVSQTLQARLEGLPKAVRAIAWKAQIRLCARYRRLNAAGKKLPVVIAAIAREMAAFLWAIARHVAPAV

SEQ ID NO: 510182 - protein, 385 aa, unidentified
MIYFGIDVSKYKHDCYILSDLGEVLNEGFTFGNNAEGFGQLQKELELCGKGNARVGFEATGNYGINLKLFLERIGFDYMGINPLLVKEYIRSNTLRRTVTDKLSAKAIANYLNDKAYRPHQTAFYPKFALKQLTRLRSSLVTGRSRYLIQLTNVLDCIFPEFKPIFGNKFSVTALYIIANYPSPEAISNMNSRSFDILRRISRGKFSMDKFIKLKTLAKNTVGVFDECYRIELETLIDLFSQIDSKIDELESEITNIIEMLNPPTLSIKGVGAISAAVIVSEFGDFSRFENPNKMLSFAGLEPGYFQSGTSEHNGRMVKRGSSPLRCTLMNCARAIKLHNEVFGAYYRKKINEGKPHCVAINHVAKKLIRLIFALETKGVRYVRP

SEQ ID NO: 510183 - protein, 319 aa, unidentified
MNNIILGIDISKKTFDVALLNNHKVNTKKFSNDSKGFSTLKQWLVSKSIHDAHACMEATGGYEVSLAEYLYGNHFKVSVVNPACVKGFSMSRLSRVKTDKADCKLIAYFCQAIQPDLWQPVPSHVQELQQWVRRLDSLITNKHQETRRLEGACNIISANIRIHIDFLDKQIEEIEELIFSHIKKHQDLNDRNTLLASIPGIGEKTIGVILAFLNVENFNSAKQLAAFVGLNPKPRQSGSSLRGVGRISKTGDANLRKAFYMPALTAMRFNPIIKNFSERLSNTGKSKMVIVIAAMRKLLHIIYGVLKNKTPFNRDIKTI

SEQ ID NO: 510184 - protein, 350 aa, unidentified
MEYIAFDAHKHYTLASVVTPDGQLVREERIEHERGAVRDFLKRCERGSPVAVETIGNWYWIVDEIEAAGCLPRLVNARKAKLMMGEINKTDKLDVRGLNRLQRSGTLPTVWIPPGELRDQRDLPRTRMVFVRQRTQLKNRIHAALAKYALHDLAVSDCFGVRGRALLRERFELPPPHTAYASQQLLGQVEELGRQVHAFEERIQATFKSTPAIQRLRTLPGVGYTLAVAIALEVGDVGRFASAERLAAYAGTTPRVHASGGKSRFGPSRPDVNRYLKWAFVEAANAICLHRGRAADRHVSRLYERLARRKGHAKAIGAVARHLAEATYWMLSKEEAYREPQSVGRVVHGG

SEQ ID NO: 510185 - protein, 449 aa, unidentified
MMIGGARDSGSRRKGIDVKQKSNSLTKGDQVGKTTKTTNARGPVQRDAREVMAELVVKLSQKLEPQSTRKNEEDPREAGMPGPNRDRLTVGVDLGDKWSNFCILGLDGEKLTEGEVRTTPQDFAEFFQAMAGARVVMEVGTHSAWARDVVARSGHEVLVANPRQMEGPKQRKRKNDRVDAHKLARVGRMDPQSLFAIEHRSVEVRQDLVALRARHAVVAVRKDLINTVRGLVKSMGTRLPKCSTESFAKKVEGALPTEVRDALLPLVRLVEALSSSIKGYDERIEKLATEKYPHTKLLRQVKGVGPLTSLAYVLTLQDPQRFVKSRDVGPYLGLVPKQEDSGDSQPQLRITKMGDMMVRQLLVGSAHYILGPFGPDTDLRRYGLRLSERGGKNAKKRAVVAVARKLAVLLHCLWVSGEVYEPLRHALPKAPRKKAERPPAAEASARAAA

SEQ ID NO: 510186 - protein, 414 aa, unidentified
MEKENEVKRYYVGVDWADEFHQVWVSNPEGKKVAEMKVEQNAKGISELGRWLHERQAEGIELWAAIEKPHGRIVDFLLDHGVVVYPINPKALDRARDRFRMSQSKSDSFDAYVLAEFVRTDHAHLRALEPSSEQAQELKLLSRDHHRLVRHKTRLINQIEVTLKEYYPRPLEVFSHLESKIALDFLEQYPTPQALSNLSRRQWNRFAKRQHHLGEARCKELWEKLSQPQLAIPEHVLRAKAQLLLVLVVQLRALAEAVDSYSDKVQRFFSSTPAAELVKTLPGGKSGTIVPMIWAELGDAKNRWQSFRHLQAEAGGVPVTKASGKSRVVQFRFACNKLLRYASYWVAFNSLNRCEWANKYYRDQRAKGHSHPQALRALGAKWLKILFVMWRDHKPYDENYHLANIARQAIRQQP

SEQ ID NO: 510187 - protein, 351 aa, unidentified
MTQYVGIDWAYRRAAWCARGDGGQVTQEGVVPAEEDGLARLVLELGTDIEACVEMMSGAVWVRDRLQAAGWKVQIADPRKVRAVAPLACKTDKVDARVLSELVARDLVPQLWIPSLDERALRERLRRRSHLVQLRTSAKNRIFGLQTQWGLRLALSDIPLEQVLERLAEHGMPDVWRRSVAEALGVIDSLDERLVPLERELRPLAQADPRVKLLRTIPGVGELLGLTIASEISDIARFSHAGKLVGYAGLAPRIKQSGQSSRTGPLSKAGSRTLRWAAVEAAQHAWRPSNPWHQLYLDLSKRAGKNPAKSAVARKILIASWHVLSRQEPFKAPRPRREAPVPASSISVLAA

SEQ ID NO: 510188 - protein, 347 aa, unidentified
MNYCGIDLAGVSSYAFVTDEKGNKLWSGPIATEKVAFERLVKKFAGGGLSIAIEAGNQTAWVHEELVKLGAEVTVVHPTKVKLIAESRRKTDKIDAKILCELLRLNALPHPVHMPGPEARELRGLLVARRQLVSARSKLSNVVRGMLRQTGVRLPAGGLSTLVGWKRLLAAGFEQEHLLLIVSAYYDSFRALTKSIRELDQQLAQHEKNEPRAQRLKTIPKVGRIASLTFLAAVDDVKRFSSSRKLVGYSGLAPTVRQSGERTEYGAISREGRSELRAVWVQIAHLVARDQTKATQPLRTWFSRVARKRGKKTALVALARRLLVIAYQLLRTEQDFDVGRLKKKRAA

SEQ ID NO: 510189 - protein, 344 aa, unidentified
MTTIDYIGFDIHKKTISFCAKAQDGTILEEGTIPALRKTLLAWAKARPRPWIGAMEATLFTGWIYDLLKPLARELKVAHPPMLKAIAAAKKKNDKVDARMIADLLRCHLLPECYMAPVAMRDLRRVLRYRNLVVRQATRMKNRIAGLLMETGTAYNKQRLHGKAYFSELLGSLQEVPRSVVELLQLSRGQLEFFAAIQRRLLKGLREHADLRERVLRLQTIPGVGEILALSWALEVGEVKRFASIGQAASYCGLTSAQHSSAGKEQREPISKQRNKHLQTMLIEAAKLAPRYNPQLAAVHEREVQRGNRNRATLAIARKLVAYLMAVDKSGQPFALRARTEVAA

SEQ ID NO: 510190 - protein, 338 aa, unidentified
MAIVCVGIDLAKNVFALHGVDEAGKAVLVRPLVPRAKLLECIAALPPCRIAMEACSGAHHWAREFHKLGHAVKLIAPKFVIPYRLSGKRGKNDAADAAAICEAAQRPSMRFVPAKSLEQQGQLCLHRVRQGFVEQRTALINRIRGLLSEFGIVLPLKADTVRRQALLHLEDLPGWANLAVGDCLSEVSRLDERIAQYDRHLAQVARQSDAARRLTRLSGLGDTTATALMAAIGNGHDFQCGRQFAAWLGLTPGQYSSGGKTRLGRITKAGDAYLRSLLVMGARAVLAAAPSKTDPISRWVLGVQERRGYWRAVVAMAAKNARLAWAVLAKGEAFKQPS

SEQ ID NO: 510191 - protein, 318 aa, unidentified
MSDSVFIGIDVSSQTLEVASSAQAKTWQASNDAHGIESLCRQLTALGPALVVLEATGGYEFEAACALQAAGLPTAVVNPRMARDFARAMGALAKTDALDAHMLAAFARVLHQHPERERFVKPLADAQLQQLQALVLRRRQIVQMLTGERQRLRISHAAARPSIERVIEFLKQELGDSDTEVAAHVQHHHAQLAQALTSVPGIGAASVAVLLAELPELGKLDRRRVAALVGVAPLNRDSGQMRGQRSIWGGRAQVRRTLYMATLTAVRYNPVLKPYYEHLLAAGKRKKVALVACMRKLLTMLNAIAKHGCIWNPNHHCA

SEQ ID NO: 510192 - protein, 337 aa, unidentified
MQLSVMGVDLAKDIIQVRGSQANGKKLFNKAIKQSAFFEFMAQKPSCLIGMEACGSAHYWARRLETLGHTVKLMHAAHVKPFVMGHKNDKNDANGCAVAVEQADMRFVPIKTIEQQDIQMVLRIQERMERQQTALINQTRGFLREYGIYISKGPANVFKAIPCILEDAENELTSEGRELIAQLGEELIHNREKLRGMDKRIAQMAKANVLCQALIQNIVGIGPMTALTLVKDIWEGDGFKNARHLSAWIGVVPRQYSSGGQTKLGGISKRGSPALRRLLFMCARSVMICAKNRDDKFSLWVQSIVERLPHRKAAIAVANKLARMAWAVLNAQKTQTA

SEQ ID NO: 510193 - protein, 346 aa, unidentified
MYVAGIDAHATYLVVVIVSNTGELVEGPTRMANAESERLVELLTRYEPIEAVVETSPAWPWLYELLSEHGIGFVLAHAKKLRAIAEAKYKSDEIDAEVLARMRVAGLIPEVHPKSADRREQATLVRHRTRLVRMRTAVAGRIHAALHSVGLRFPRGRLLTQKGRRGLHERAWPRFGLEQQRLIETHLALIDHLRPVIRALDARIEEVGRDDPAVGLLRTVPGIGPYRGLLIASEVMPIERFAKPANLVSYAGLAPRSKQSGLAPVRHGSIPAGVNRWLRGAYVQAIVTHIQKAPDSWLSQYYHTHKKRLGWPTARIAAARKLARATHAMLRTGEVWREDPRTDAQG

SEQ ID NO: 510194 - protein, 365 aa, unidentified
MEYYTAIGIDVSDKTSKICVMAKIAGERRIVEETTVATTKEAFSEYLATKDRKAAVTFETGAHCRWMAQLIHSMGFKVNVANPAKLRALTHSNSKNDRNDARELARYTLADVEMLHPVFLRPETHQQMIRLLEARLALVTTRTKLINEMRGFAKSMGFRIPKKDAAYFHLIDRTGWPRDLEAVCWPLMGVLKTIHMKIAAIEKQMRELADTPEFAADVERVRQVVGVGFLCSVAYVAVLGGNYARFAKARDVGPYLGLVPRQDQSGDIDKQLPITKAGSTLLRALLTEAAQVALRDGIRMTDLKLKGLRIAERGGKNARKRAVTATVRGLAVTMMALLKHPEREYMPLSDANQKVVEQMAAFKAE

SEQ ID NO: 510195 - protein, 405 aa, unidentified
MGKVFVGHDWAETHHDVYVEDGAGQRLGKARLDEGVSGVARFHELVSSFVVDPGEVTVATETDRGLFVGALVAAGYRVLAVNPMSAARYRERHSTSGAKSDPGDAFVLAELARTDGHHHRPVAADSELAEAVKVLARAHQSMIWTRQRQVNQLRSTLREFYPAALSAFDDLASSDALAVLALASTPSLGRGLSRSKIASALRRGGRQRRIDERAAEIQTILRADTLQAPGLIAEAMGASVRALVAVISEQVAQTARLEAELADHFELHPDAKIIRSLPGLGTILGARALGEFGDDPNRYTDAKSRKNYAGTSPITRASGKHHVVLARHARNRRLADVCYQWAFAALTASAGARAFYDQHRAAGDTHHQALRALANRLVGILHGCLRHRTPYDEHTAWGHRTAAAA

SEQ ID NO: 510196 - protein, 362 aa, unidentified
MTQYYLGIDLHKVFAYWHLTNTSGEVLWSGKVSANEKDTKTRLALLPVSLARTVAAIESVEHYGWYANILIECGVGEVKLANPYKLRLIAENPLKNDKKDAEIIASYLRSGTLPESYLAPADIRDLRELVRTRMYLAKGRTSAKIRIRNALSKHDLTCRYKDIDGERARAWLTNTVLPTESRREVESLLRLITSLDNEIADFEVAMKERAKHYPEVKTLKTIPGIADIRALIIMAEVGDFSRFPNTNKLAAFAGLVPRSYSSGGKERLGRITKRGSSLLRHAMVQAAQQAHPKWGELYIFYTNIKERTHTGAAKVALARKMLGICWHLVQKNEPFRARSPIEPASSVDKSMIVIPRVAHHLR

SEQ ID NO: 510197 - protein, 353 aa, unidentified
MGHKYVGLDVHQSSTVAAVHDEQGKSVMESILATEAEAIRDFLKGLRGTIHVTFEEGTQAAWLYEIVKPVVTEVIVCNPRMNKLLAVGNKADRVDAHKLAELLRCRQLKPVYHGTPGVRLLKELVHSYDSLVGDTTRVMNRVKAIYRGRAIRCAGRDVYYQRNREQWLEKLTEPGVSQRARFLYQQLDTLRGLRREAKKAMLRESRRHPAYTILKEIPVLGPIRIAQILAKVASPHRFRTKRQFWAYCGLAVVTRSSADYHFVEGRAEKRQRAPMTRGLNPNFNHRLKYVFKSAALDGTRQAPFEGYYARLIAKGIRPELARLTLARKIAAVTLTLWKRAERFDELKLSEQAA

SEQ ID NO: 510198 - protein, 416 aa, unidentified
MNAVGIDVSSRKSTVAVLRPLGEVVCLPFDVTHDIAGLASLAEKLKALDGETRVVMEHTGRYYEAVAKALHEAGLFVCAVNPLLIKEYGANSLRRVKTDKADAVKIARYALDNWADLRDFTPMDAIRYDLKTLNRQFQLASKQRTASANNLIALLEQSFPGIRKCFDSPVRSDGTQKWVDFAHSFWHVDCVRKQPFPAFCERYRKWCKRHAYLFKLSNAEEVYALAKRAVVLTPKSKVVKVLVQEAANQLISISRSVEVYRAEMDRLAAMLPEYPVVMAMYGVGKSYGPQLMAEIGDVRRFERKQALVAFAGIDPMPNQSGDKNVRSNKSSKRGSPYLRKTLFNVIRTYLQCAPQDEPVFQFLNRKQAEGKPFYVYMLAAANKFLRRYYAKLRDYFASLNPLQPVAPIPTILKATL

SEQ ID NO: 510199 - protein, 421 aa, unidentified
MTCLLTPDITGLQPYGVQGAGPGWLASPLAASGLANQERAHPAGTRRGVAQQRRDRSVSQVAHRGPFHRRSEERFQLLITIGIDPHKISLTAVAVGPDGQPHPPIRLVVDKSTPAALLTWATQWPERQWAVEGATGLGRGIAQQLISAGEFVLDVPAKLAARARLLGSSSARKTDVADAISVAAVALHNRRLNRVQVEDHTTIMRLLTERREDLVAEHTRWINRLHVLLRDLHPGGAEVRLDTIDAAALLAKIRPVTAADQQRKQIARDVVRDLKRHEASIKELEKQLRAAVAASGTTLTQIQGIGFLTAAKILALTGAIRRFPNQEHYASYTGTAPIDVSSGEQETHRLSRRGNRQLNAAIHVAAVTQARDPGPGRDHYRRKIAEHKTAKEARRSLKRRISNAVYRRILADQQRLQLEAA

SEQ ID NO: 510200 - protein, 335 aa, unidentified
MAIVTIGLDTAKNWFQVHGVDESGRVALRRKLARGKVLQFFAGLTPCVIGLEACGGAHFWARELIKLGHDARLMPARYVRAYVKTNKHDAADAEACCEAVQRPGMRFVPVKSEEQQSMLMVHRTRDLLVRQRTATVNALRGHLAEFGITAARGTAKARELMSLVGTDERVPAIAREALLQLVEQIRDIERKIEAFDKQLLSLARQNEVCRQLITIPGIGPIAATALVATVGNARSFTSGRHFAAWIGLVPKQHSTGGKERLGGISKRGDAYLRKLLIHGARAAVHRVRSHQVPGAWIAGLLARRPFNVATVALANKTARIAWAVMTNGSTYRAAA

SEQ ID NO: 510201 - protein, 318 aa, unidentified
MKTYHNFIGIDIGKFNFAVAVYNNKETREFENNPEGIAKFFECYNSKLRESLCVLETTGGYEIELLVALCNNNISVHRASTRKVKNFIRSFGNDAKTDILDAKALALYGAERKDKLQLFVPKTTNDIELYQLAMRKQDLIKMLIAEKTRLQGPNVEFTKASCKFMIDAISDQIKLIANQISSLIEGNMDLNSKKETLKTISGVGDNSASQLLILLPELGTLNRKQIASLTGLAPRSNDSGTYRGYRSIMNGRDNIKPILFMVAMAARRSKSEFKILYEKLISRGKKKMEALTALMRKIIVIANAKIRDLISQSKVVEI

SEQ ID NO: 510202 - protein, 343 aa, unidentified
MVAKNTLGIDYHLRSVRVCVLSEDGRKLGNRSLKNSVSEVLDYARRFGEVSVGAVEVSCGAAAFVDSLRAASGWDIRLCHPGYVNRMKSNPDKSDKADAELLADLCRVGYLPEVWLAPERIRDLRQLVRFRCQGVERRKSLKLRIRATLRHFRIRTPERFNLKAKKSRAWLVDAITNLPEHSRWVMERSIAELAYAEECIQKTEERLTAWANEDGLCSWLMKQRGIGVVIATLLRAEIGTVTRFRNGKQLARFCGLTPRNASSGERQAESGLIKAGNPQLKCAIMQAAHLLRRLDPHWRSVAARLSATGKHSNVCVAAIANRWIRRLYHQMREFELENLRLAA

SEQ ID NO: 510203 - protein, 322 aa, unidentified
MQGKMTSVRAGLAVYAGIDVCKAWLDVYVHPTGQSFRVPNSKKGCKHLALELTSANAGLIVMEATGKLHRLCHRELSAAGFAVAIVNPYRSRKLADAFGQLAKTDAIDARMLALYGEAISPAVTPVPAKTLAELQELVLARQAAKAQETALKNQYGAAESPVLKRLLKALLDAQARLIDGLKAAIAAILSKDAGLKRRFEILASIKGVGPVVAATLVACLSELGVLSGGKIALLAGVAPINCDSGEMRGQRHIKGGRAHVRSALYMAAVCAIRCNPDLKAFNDRLRAAGKAPKVALTAVMRKLVRLANTLITEDRFWTPKHA

SEQ ID NO: 510204 - protein, 320 aa, unidentified
MNSHCKIEQIQTETNHVGIDVSKQHLDISIAGSKNQRLANTPAGLRSLHQKLARLAHPRVTCEATGGYEKHLVASMLDAGIEVCVAAPGRVRYLANAEGLLAKTDSIDAELIRRFAEKIPLPLQIKPDPDAHKLRQMSDFRRMLSDDIVKTSNRLELAEGYLREHLQSQLTHLEGLKKKVEADLAAHIRHTAELARKAARLQELKGVGPVLAATLLAHVPELGKVSDKTLACLVGVAPHPKQSGNFKGKASIRGGRANVRHVLYMAAVTASRSNPVLAAFYQRLRTQSGKTAKVALVAVMRKMLGVLNKLIAQPNFSLAH

SEQ ID NO: 510205 - protein, 344 aa, unidentified
MEKDQYVGWDVHQASTSYAVLDSGGRLVEEGVLATDPERLAGWVSGLGSGVHLTFEEGPYAAWLYELIEPLVAELVVANARRHLGTGEGKSDRLDARNLAERLRGGFLVPVYHDRSRLRDLQHLVHGHRALVQDSVRLQNRCSALARSRGLSVNEVLTGSSLGSASALERFTWLTDELAAITALRKKAYKAVAQASRRSDACRLLQTVPGFGPIRSAIVVAKVRTPHRFRTKRQLWKYAGLAVVTHTSSDYVVGPQGLERRSWQRTRGLNRHYSRALKEAFKSAAVDASRRGVLRPAYEARLAAGQRPEMATLTMARKLAATCLALWKRGETFDAGKLTKISTG

SEQ ID NO: 510206 - protein, 410 aa, unidentified
MEVLYSHCAGLDVHKDSVVACVRHMAGGKVTSAVKTFKTTTAELMLLSDWLSAEGVTHIVMEATGVYWKPVWHILSDGEFELVLANAAHVKNVPGRKTDVNDAMWLADLIAHGLIRASFVPDEPTQQMRDLLRTRKQMVRERSSHIQRIQKTLEDANIKLDSVVTDILGLSGRRIIEALIAGQTMPQALATLAHRRIHASVDELEAALRGRVTKHHRFLLKLHLDQIDAFDAAIAAIDQEVNVNVEPFRAAIELLSSIPGIGNLAATVIVSEMGIDMSRFETAGHLISWAGLCPRNDESAGKRRSTKMKKGAPWLKTTLLQCAWAASRTNGSYLQGQYHRLRSRRGSKKAICAVAASMLTAAYHMLKNGTFYEDLGADHFDNRAKGKHVLRLVNRLQSLGYVVQITPQAA

SEQ ID NO: 510207 - protein, 313 aa, unidentified
MTHACAAGVDVGRDYLDVGLAPSGQVFRVANGSSGIEALIGKLRRAGAAKVALESIGGYGAGLVRALAEAGFEVGVIDPKRIRALRIAEGKRAKTDRLDAGLIARFALMMQDAARPVPSAKAFQIRALSARRRQLVEMIAKEKTRLKQALDEPIAASCRSMIALLGEERARLETQLEGELLAQEGAAHRRDLLQSIPGVGPAVCMTLMADLPELGALDRKSVANLAGLAPHPNQSGTRTGAAHIAGGRPCVRVALYLAAVNAVRSDNGFRQEYKAMRQAGKPAKVALIAVARRIAIAANSIVKNDHPWVKPSS

SEQ ID NO: 510208 - protein, 345 aa, unidentified
MQHYVGLDVSLSETAICVVDRDGIVIREGKVASEPEAITAWLIELDISVTRVGLEIGGLARWLYAELRAAGWPAICIDPRRLRGLTKTMPIKTDRNDARAIAQVMRVGWYNIVHIKSGVSQELRMLLTNRKTLLIKQIDIENEIRGTLRVFGLKLAGRITQVSFEERALDLVADRPRLAAMLRPMLAARSALSQQYAVLHKMLLEVVRVEPTCRRLMTIPGVGALTAVTYLTTIDDPARFQRSRDVGAHLGLTPRKYASGEIDRNGSISKCGDTLLRTTLYQAALALLTRTQRWSTLKAWGMAVAKRRGLRRAVVAVARKLAIVMHRGVWTDGSEFRWSREEAMA

SEQ ID NO: 510209 - protein, 317 aa, unidentified
MAFLHQQPSRCLGFDVAKDSITISEGSPKAAVTITNSRAAIRAFLKRGAYAGTVLIVCEPTGGHELVLLSEALRAGIACHRANTNKLKGFIRSFGTNGKTDAIDAAMLAAYGRERWRILALWRAPDAEEIRLRALVRRRQELVAMRVAENNRAKAPSNKALAGFFKSLIAVIERQIKAIETAMRALVNQAEALKQRAAVLTSMDGIGPISAMALIASLPELGSMTRRQAASLADLAPHPNDSGLKRGYRKMHGGRPDVRTILFMPALRAAAGHGQFAAFYSRLVGNGKKPIVAIAAVMRKIVITLNARLRDAQSPQS

SEQ ID NO: 510210 - protein, 475 aa, unidentified
MNIKGIKKKNQVVTANIFEQQELLKKSEVIKENLTASTWRELETNGKFDKNKKLSFISDDMLILGCDVGSETHYMRAIDTRGRELSKSAYSFNNNQEGFQSAKEWAVRIAAEHDKSQIVLGLEPTGHYWFCLATWMIANGISVVQVNPYAVKQTKEVEDNSQLKDDRKDPKLIANLVKDGNFGMPYLPEKIYAELRRLSMFRDQLNEDRIRTINRMHREMKIYFPEYKDALGKVDGAFSLELLKEAPFPDELTALGEEGIRQIWHAAKLRGRGYSRAREILQYAKASVGIKDGSIASKAAVKWFVQKIMELDVELAVIENQINQKCQEIPHTGNVLEISGIGENTLSGILAEMGDISRFDDVKEIQKLSGLGLVACSSGKHKGETKISHRGRKRLRYWLFQAAKSAVAHAEEFKELHMYYTTRADNPLKKMQSLIVIACKLLRIIYTILNTGTFYDPKKMLMDIRRLEKKEAIVA

SEQ ID NO: 510211 - protein, 403 aa, unidentified
MNKVVGIDVSKGKSMVSVLRPFGEVVAKPFSIGHTGSELKELADYLKSLDGETRVVMEHTGRYYEPVARFLHEEGVFVSAVNPKLIKDYGNNTLRKVKTDKADARKIARYGLDNWAELRQHTPMDTIRMQLKTLNRQQSLYAKTKTMMKNNLIALLDQTYPGVNALFDSPVREDGSQKWVDFATAFWHVDCVRNMSLTAFAERYRKWCKRHGYNFSQSKAVEVHTGAQDLIAMLPKDALTKTMVRQAIDALNAVSASLERLKAEMQALAAQLPEYPVVMAMHGVGDSLGPQLMAELGDVARFTHRNAITAFAGVDPGADQSGTHEAKSTRVSKSGPPELRRALFLVMDCLLKTQPQDDPVYRFMDKKRAEGKPYLVYMTAGANKFLRIYYGRVKEYLASLEEN

SEQ ID NO: 510212 - protein, 317 aa, unidentified
MEQHQSNTKVAGVDVSKRTLDAAVHGASELAHVDNGDAGYSELIGWLKAREVGLVGLEATGGYERGVRQALEAAGLQVVVHQPLEVKLFAQLKRRRAKNDRLDAQLIAAATAQVDTVRAAQDPRLQDLAERLTAYEQITDQAAEMKTFMEHITLKDVAALLRRQIDALEQLKGQLLADILARIKAHADLLARFRLLRSLPGHGPVVSASLLVRMPELGQLRRGQAASLLGVAPFDRDSGQYKGLRFIAGGRSRPRRMLYLAALSAKRCDPGLKAFAQQLLARGKPPKVAIVAVMRKLIEAANLVLSRGQPWVRQHAP

SEQ ID NO: 510213 - protein, 370 aa, unidentified
MDELIKFFFGLDVHKDTIAVAVAEAGRTPARLVGSIAHDVGKLVKLLSRYGEPRQVQVVYEAGPTGYGLQRALARRGYPCQVIAPSLIPKRAGDRVKTDRRDSLRLAELARAGELRAVWIPDPADEAIRDLARAREDAVNARTQARHQLKGFLLRHDLRYAGKSSWSKTYYRWLATLNFGLSGAQAAFTEYWQAVTAADERVTRLTDALVHSIAGWRFEPVVRALQALRGIDQISAIGLVAEIGDIGRFAHPRQLMGYLGLVPSESSSGEQVVRGSITKTGNAHARRLLTEAAWNYRFQARIGRRAQQRAEGLPQAIRDVAWKAQLRLTGRFARLRARGVQINKVCVAVARELAGFVWAIASTQAKLPQS

SEQ ID NO: 510214 - protein, 402 aa, unidentified
MNAVGIDVSKGKSMVAIMRPFGEIVSTPFEIKHTASDIHSLVELINSVEGESRIVMEHTGRYYEVLAHQLSEANLFVSAINPKLIKDFDNDSLRKVKSDKADAVKIARYALDKWQNLKQYNVMDELRNQLKTMNRQFGFYMKHKTAMKNNLIGILDQTYPGVNTYFDSPARSDGSQKWVDFASTYWHVDCVRKVSLNAFIDHYQNWCKRKKYNFSQSKAEEIYGKAKELVPVLPKNAITKLIIKQAVDQLNSASTTVESLRTLMNETASKLPEYPVVMAMKGVGTSLGPQLMAEIGDVSRFTHKSAITAFAGVDPGVNESGSYEQKSVPTSKRGSSDLRKTLFQVMDVLIKTHPQDDPVYQFLDKKRAQGKPYYVYMTAGANKFLRIYYGRVKEYLSSLPES

SEQ ID NO: 510215 - protein, 337 aa, unidentified
MEYFAGLDVSMDETHICVVDRDGSVVLETKTTTSPAAIASGLAKVAECKRIVLETGRMAPTLYHGLDALGLPVICIETRQAYQALKSLGTHKTDRNDARGLAHLARTGFFKPVHVKSLPAHAVRALIIARKKLVGQRVTLENQIRGLAVVFGVRLPRGLSPAFAKQAISGSEGIAGLSGAMRGLLAARNAVLKAIAAINGDLKHLARSSEACQRLMTIPGVGQLTALAFVAAIDEPERFRRSRDIGAYLGLVPRRYQSGEIDYTGSISKCGDRRVRTLLYEAANVMLTRYKPPLKLKDWALAIAKRSTMRKARIALARRLAIIMHAMLRHGTEFKTA

SEQ ID NO: 510216 - protein, 430 aa, unidentified
MEIVYPRVCGVDVHKSFIVAVICISESVKPRYLKKRFSTFHNSLVQFRSWLLDNDCQNVCMESTGKYYIPVYNVLEGFISNIVVANPKWVRAVKGEKDDDKDAKWIADLFKLGIVKGSFIPSKDIRILRELTRYKFKLTNIRSSEKNRYQNALTVGNCKLDMVFTDVFGKSSSNIANLILSDKEYTEEDILSKVHKSCKASNEDIINAVSGIDLTPVQKARIHVIQKHMDQVNENINEINKLIDIMAKPFEDDINFLCQIPGVKRDSAIVILSEIGNDMEQFKTARRITSWAGLTPMNNQSAGKKKSVKISRAGVYLKPCLVEVAHAAIKDKEHPYYANKFNKISKRRGKKRAYIAIARKILIAIYHMLLTGEVWNPRDLSDIETPVEQREKYLKNNLKSDIKQLLSIGLTVDDLNNFIQQNANISPIPQ

SEQ ID NO: 510217 - protein, 325 aa, unidentified
MNYQDAIIYIGVDISKLELEIHCYQSKELKLPSLIANDKLAIRKFITKIKKFNTHVVFEATGGYEKLLLKLLHQAHIKVSRATASNIRNFARAQGILTKTDSIDARVITDYAMILKPRLTEPLDPLLEEIQSLVKYRRHLNDKLKQEKMQLEHFPTKSVEKLVKAQVKHLKSKIEKVTKMMIELKEQCKELSSQVDLLTNTIGIADNSALSLLAAMPELGTITNNQATALAGLAPFNRDSGKFRGRRMIYGGRLDVRQALYMSALVATRYNPILKEFYQRLLAKGKPKKLALTAVMRKLLCHLNSTMKRHLQSIENQANLTPQIT

SEQ ID NO: 510218 - protein, 354 aa, unidentified
MSEKLNSVIAVIGIDIGKNSFHVVGLDGRGAIVLRQKWSRGQVETRLANMPACLIGMEACVGAHYLGRRLKLLGHDARLMPAKYVRAYSKGQKNDFRDAEAIAEAVQRPTMKFVATKSADQLDLQALHRVRERLVSQRTGVINQIRAFLLERGVAVRQGRHFLRAELPGILATGCAVLSARMVHLIEDLAGDWRRLDERIEGLSGEIAALARQDAGCERLMSVPGIGPIISSAMVAAIGAGDTFTKGRDFAAWLGLVPKQFSTGDRTVLGKISKRGNRYLRVLFVQAAWVVLIRSKNWERYGLKPWIEAAKKRLHRNVLAIALANKLARIAWSVLAHGRNFEASKVAEAAIQPA

SEQ ID NO: 510219 - protein, 346 aa, unidentified
MLYAGLDLSRKRVDVCLLDEDGKRIAVTAAPPDADGLRGLARRLAGHGQPIYAALESMNGARFVHDELERYGWHVELADAQKVKGLAPLAAKTDRIDAYVLAELARRDLVPAIWLPAPGVRAERELARFRLHLVRHRSALKARIHASLIAHGHPCPVSDLFGVRGRKLLDDFELPEAWRASTEASLRVIGHLEAEIDACERELRRQGADHPYVPLLMSAPGIGWVLAYTIAAEIGEIERFSGPKKLCGYTGLCPRVYQSGASDRRGPLAKNGPKYLRWALIEAATHAASHPCYAAHYQATKRRLGRQRGAKVARVEVARKLAEAIWYMLARSQTFAPQGPTLPLVA

SEQ ID NO: 510220 - protein, 389 aa, unidentified
MQASKVRTPIAKNGSTIFVAIELSQSSWLITMHCPDRDRISRHKLEGGDYAGLLRLFERMRERVTRALGAVPAIVSCYEAGYDGFWLHRLLTAAGVTNYVFDPSSIAVDQRARSAKTDRIDGEKMLRTLMAYLRGEPRVVRIVRVPSPEQEDVRRQTREHHRLVKEQTAHTNRIKALLRLLGMAIGNPRRKDWLAWLRTQRDWQGQAVPPQLLTEIGHEHARLMLVRDQLAELKKTPAAADPRPAATEITRRSGLLHRLKGLGPAFATTLTHEVFYKDFRNRREVASYFGLTPSPWQSGGTDREQGISKAGNPRARCAAIEMAWLWLRHQPDSSLAEDFRRRTLNASKRIKRIAIVALARKLIVALWRYLTTGLVPMGAKLKPVEASMI

SEQ ID NO: 510221 - protein, 285 aa, unidentified
MDHFAGLDVSVKETSVCILDDAGKILKEVKVASEPQALLKVLGNPAYRFKRIGLEAGPLSQWLFSALADAELPVICVETRHMQAVLKAQINKTDRNDARGIARMMRVGMYRPVHVKTLRSQKLRMLLTHRKLLQSKAIAIENDLRGTLRNFGLKVGMVGTVRFEARIQELVETIPDLAVLVEPMLVVRRALREQIVILHRRLLAIVRDDEVCRRLTTIPGVGPVVALTYRATVDVPARFRKSKSVGAVFGLTSSRYQSGEIDQTAELPHCAYMRVLPTRRVCTRR

SEQ ID NO: 510222 - protein, 403 aa, unidentified
MFCGWDWGSTQHGVCLIDDDGVVIKTWMVAHTKSQLTALFDELAQRVEAAEVGQVPVAIERGEGLVVGLIAGAGHPVLMVEPAAFKAARPRWGSAGAKSDLGDAFMLADYARTDGHRLRRVQPVAQATRELAALVRARTSLVEARTAASNQLWAILAEHWPGAAVVFQKLTSQVALAFLSDYPTPQAAALLGEGRMRQFCVRHSYRGGKSPAELVSRLRAAPASANPIAPKVLEAIVRGSTAQIKLLNSEISRLEHDLADALTAHPKTALITTLPRVATVSLAALIAEIGPLLERCENPEQVAAMCGAAPITRASGKSRTVTFRYTANKPARVAITSFADNSRHSSAWASDCYQRARARGARHPHAIRILARGWVRVIWVCWTTNTVYDPLRHRGERLLGTVT

SEQ ID NO: 510223 - protein, 346 aa, unidentified
MKITTIGIDLAKEVFQIHGVDEHGKIVLRKQLRRNKMTKFFANIAPCVIGMEACGSSHHWARKLGEFGHTIKLMSPQFVKPYVKTNKHDMADAEAICEAVSRPNMRFVPIKNVEQQAILSVHRARQGLVKARTAQANQIRGLLSEFGIVIPQGIHSIAKRVPDILEDAENDLSGTMRHLLKRLNDHLKELSRQVEELELQIKLWHKENESSKKLEAIPGIGPITASAIVATVGNATEYKNGRQLAAWLGLVPKQCSSGGKQILLGISKRGDTYLRTLLIHGARAVIRFAENKAGPESWLRKLITRRNKNIAAVALANKNARIIWALLVKGTTFHPDHASAASAAAA

SEQ ID NO: 510224 - protein, 351 aa, unidentified
MKIVAMDLGKSKTVVCIYDQKSGKHKYQTVRTSPQQIHDLLIEHKPDRVVFEICSAAGWVFDIAKCLGIEVQVANTNGQAWRWKNVRRKNDREDALKLAQLSAMNQLRTVHIPNRQVRQKRALIQYRQSLVARCVQIKNGIHSILDKEGLTMASGKSGWTKGSIEELEAMTLPLEKCNDDNLWRGSLRIELEMLAKVTELIKQVECKLDEMAKDDRQVRILRTIPGVGPRLAEAVVAYIDEPGRFTSSKQVGCYAGLTPRQYQSGNSNRVGRISGQGNKVLRALLVEVSWLGLRHNEWMRQTYQRILRGSNSRKKIAITAVARKLLIRCWAMLRDGTTWRKENKSALDIAA

SEQ ID NO: 510225 - protein, 364 aa, unidentified
MTVTIVETRAQARAITGGVDTHADVHVAAALDPIGGLLGVAEFPASPAGYARLLGWLGGFGTVCLAGVEGTGSYGAGLARYLAAAGVRVVEVDRSDRQDRRRAGKSDPLDAVSAARAALSGRASGAPRGRDGQVEAIRALMVAKRSARSVRTQTINQARALIVTGPDDVRGRLAAHGPAELVAELASLRPRPGSMVRYHTLLSLRELGRRAQFLDGQLTRLDELIVPLVTARAPGLLALYGVGPDTAAMLLVAAGDHPGRLRSEAAWAHLCATAPLSASSGKVTRYRLNPGGDRQANHALYRIVITRLSSHPPTRAYAGRRSKEGRSKKEIIRCLIGGLSVPRPGWPGCGSPVAPGDGLVAEPL

SEQ ID NO: 510226 - protein, 447 aa, unidentified
MANERDGFPVLRRDVAGMDIGSEEHWVCAPSRTGGGREVERFPATTPGLERMIVWLQDRGVRAVALESTGVYGIAPHEMLEQAGFEVLLVDTRELRRVPGRTKSDRRDCEWLQRLLSCGLLRSAFRPPDAVCLLRTLVRDRATLIAERADWLRRMQKALDQMNVRVHRAVADLDGATGMAIVRAIVEGERNPHRLAALRHHRCQKTVAEIAEQLSGHWRDDHLFSLQQGLKMYDAITDRLADYEHEILRQLAALAQTDDTPPPLTNVNKARTLKTRGEEPLRQALYRMSGVDLTTIDALGVETVNVILSEYGWDLSRFPTEKQFISHLRLAPHRAMSGGKPVRNQRKQHRGSARVTAALRMAATSLRRSQSALGAYYRRIAQRLGADVAVFATARKLAQWVYRVLRWGQAYVDEGAAVYEKRYRQARMKRFADSAKQLGYTLVPAEA

SEQ ID NO: 510227 - protein, 338 aa, unidentified
MAIVTVGIDLAKSVFAVHGVGVSGKPELVRPEVRRAKLLELIAKLPPCLIGMEACSGAHHWAREFQKLGHTVRIMAPKFVAPYRMSGKHGKNDAADAAAICEAVTRPNMRFVPIKTIEQQSQLFIHRAQQGYVSERTALVNRMRGLLSELGIVLPKSQTAFKQGVHQVLEDLPGPCNMVIGDMLSELSRLEERIALNERTIQQLARDDAQAQRLMQLRGIGPTTATAILASVGNGHDFESGRQFSAWLGLVPRQNSSGGKAKLGRITKAGDSYLRTLLVLGARAMLMTARNKEDPVSRWALQLKERRGYGKAVVAIAAKNARMCWAALRLGDGFKVPA

SEQ ID NO: 510228 - protein, 383 aa, unidentified
MKSVCGLDVHKDSVYLCILSEFGELIEKVFGVLTYELEEMRDLMLHHHVVEVSMESTSVYWIPIWRVLSPHFKLNLANPYFIKQLPGRKSDVKDAQWIAVCTMKELIRGSFVPPEIIQQLRQYDRRIFDLNEEIVRKLSKLDAVLQRCNIRLSNYVSNVDSKSYKAVVRAISQGITDPEELVKLIHGRIIKHHGMDVITASLKGVVSLAEIDMISQLRDELDMAEAHKEKCQARMLEICEREFPEELKRLQTIPGIKERAATSLIAEIGTDMNKFETANHLASWSGLKPRNDESNKKIKSRSITHGNVYLRKTIIECAWAASRTKDCFFSQFSFRQTQVRKKNKMKVLVAVARKMLVAIWHVLHDNTNYIDFTTDRKTSQTRG

SEQ ID NO: 510229 - protein, 397 aa, unidentified
MIAVGIDVSKSKSTVAILNGDGSIRAKPFDVHHVADELQALVDYIKRTSEPPTILMEPTSHYHYPLLKAFQEAEFPVCLINPYQMKKYGDTELRKAKTDKRDSLRIAQYALEKSYSLIPYTPQDQKYEDLRFLSRQYSQRISALTVAKVQLLSLLDETMPGITTILPLKSRDPDNCMLLRFIKRFKSFDVIRKMGKTRFLDSYQVLVKKTKDRFAGSKGLAIYELVLNSITTRGENPLSAMPQDQCVDLVSTAQKAADEINLQMRIIADTIPEYKVLRSMAGVGDRLGPIILGEIGDIRRFHSGKALNAYAGNDAPPYQSGQFESRNRHISKRGNPALRKACFEVMQALKLTKPHDDPVYLFLLKKEQEGKPYNVAKMAAVNKFLRIYYARAMELYK

SEQ ID NO: 510230 - protein, 340 aa, unidentified
MNHYAGIDVSLECSSVCVVDASGKIIGEGKVASEPEALILWLASLGMRLTRVGLEAGPLSQWLFAAMRQAGLAVELLETRHVRDAFKAMPVKTDRKDARGIAQLMRLGWFRPVHCKSLAAQETRAILSARKLVQAKLHDVEMSLRGILRGFGLKVGKTTVRQFEGRIKELVGGHPSLEEVAAALLAVRAVLRREFNALEKRVRSMAREDARARLLTSVPGVGAIVALTFASAIDDPARFKSSKSVGAHFGMTPKKYQSGETDVSGRISKIGDGGVRTVVYEAANVILTRPVKGCASLKSWAMKLAKRAGMQKAKVALARKLTVIMHRMLADGTTFANLPG

SEQ ID NO: 510231 - protein, 334 aa, unidentified
MEQITTVGIDLAKSVFSLHGVDAKGKTVLRRTVRRDRLVETVAGLSPCLIGMEACSGAHEWGRRFQGHGHTVRLMAPKFVAPYRKSEKNDGNDAEAICEAVTRPSMRFVPVKSVEQQALLALHRVRQGFVVERTAIINRLRGLMTEFGVVMALRSVTVRRQAATAAEALPELARGAIGDLLEQLRRLDERIEAYDQQIQAQARLSEPAKRLMQIRGIGATTALAIVATVGNAREFKNGRQFAAWIGLVPGQYSTGGRTRLGHISKRGDAYFRNLLVQGARSVLQTAAAHPDRLSRYALELQGRCGYYKTLVAIANKNARIAWALLARDQTLRQN

SEQ ID NO: 510232 - protein, 349 aa, unidentified
MIIIGADFHPEFQQIAYVDTSTGEYKERRLQHPEEAEKFYRDLAAQAISVRVGMEASGHARWFERLMAELGLELWVGDAAKIHAKRVRKQKTDRQDAQHILQLLLKDDFPKIWVPSWENRDLRQLLWHRHRMVQARTRIMNQLQAVALNEGLRCKKRLWRERGRQQLEAFRLAPWASRRRRDLLELMDRLNPMIADLSQEIERQASASAEVQRLKTHPGVGALTALAFVLIIGEAGRFHCGKQVASYIGLVPLEDSSGNRRRLGHITKQGSSMLRFLLVEAAQVTVRSDPRWRQQYFHVMMRRGRKIAKIAMARRLAIRLYWMSRRGWDYEQVSKFGSHAGQPGHRHGV

SEQ ID NO: 510233 - protein, 394 aa, unidentified
MKLIGIDIGKNKHFFCIMDKDSGEIVSQPASFSNDKEGFDFLLQKIKSYPKDSVLIGMEDTGHYHFALLKYLLDLQYTVALINPKTTDLNRKMQGGITKNDKLDTINICDVLDTPERKKQYRITKVNKFDLYEQKQLTRQHHNLKEELNVYKNRLQKSIDIVFPEFNSLFKSKYGTVYMNILKTFGSAENIANTDIRTIRKCFEIDGRGNRISLTPERLKERARSSIGISSLAEVIQIKHLSAQIDLIEEQLSEIDKKIEEFSIQNNSPILSIPGISHFSGTSILAELGDISNYSKPSQIIKFAGVAPLHYESSQFNAQHTAITKKGSKYLRKTLYQIILPVIRHNPVFNKYYQLKISQGKGHRCAQGHCVRKLLRIIYHLLKTNQQFDPQLLR

SEQ ID NO: 510234 - protein, 373 aa, unidentified
MPKYSTAFGMDVHLRSTTVCALDADTGEAVTRRFPGNPWGEIAGWMGGFPGPSLAAYESGYPGFAPQRELAGLGVECVVAAVSKIPRSAADSASKNDRNDAARMAKAILAHDISPVWVPSPEVEGIRDLAGAYDGATARLATAKQRLLAFLAKRGFAYGGTTPAGNPRKYWTYDFLRWLDKVRPEDDGGVRTLAALRSEVEAAAEARADLLSEYRAAVDASPIAAEAAALQSIKGCAFALAAAFSAEVGDFTRFRSGRQVTAYFGLAPSQRSSGDSVRLGGISGAGNALVRKLAVEGSWCYAAARHQPKLMPRDTGVPLEIRMHGRKGSERLLRRREEMLARGMPQAKANAATAAELVRWLWALGAMCREGAE

SEQ ID NO: 510235 - protein, 410 aa, unidentified
MALFLGDDWAEAHHDIELVDESGRRLARRRLPEGVDGLAALHALIADHLAEDAEPAEVVVGIETDRGPWVAALIAAGYTIYAVNPLQVARYRERHGTAGAKSDPGDAHVLAELVRLDRAHHRPVAGDSALAEHVKVLTRTHQSLIWSRQRQTNALRSMLREFYPAALVAFGEELASRDALAILSIAPTPEAGRRLSQSKINAALRRAGRQRNLEVTAERIQAALRAPQLEAHPGVVAAYAAAVRSLVAVIDALVTQVEVLRGEVEAGFGRHPDAEIYLSQPGLGSILGARVLAEFGDDPDRYAGPKARKNYSGMAPITRASGTRRTVLARHARNRRLADALYHQAFTALGVSPGARTYYDAQRARGASHHQALRALANRLVGILHGCLRHHTRYDEATAWHSKSLKATAA

SEQ ID NO: 510236 - protein, 335 aa, unidentified
MKHYAGIDLSMETSHVCVVDADGCKVAAQCVDSTPEAISALLERHGPVERVVIETGRMTPWIARGLHELGVAIVCIDARQAHQSLKAMKANKTDPHDAAGLAQLARTGFYKEVHVKSPTSHGVRSVITARAHLVEARVRLDNTIRGLCATFGIRPGAGQGERFLARVQAAIAVPGLGETVASLLRARTGLVDEIRRMDRELKAISIASPACQALMSIPGVGVQTSAAFAAAVDEAGRFKRSRTAGAYFGLVPRRHQSGELDWTGRITKQGDGTVRKLLYEAANSILTRTRQTFALKTWALKIAKRRGLKKARVALARRLAVIMHAMLRDGTLFEA

SEQ ID NO: 510237 - protein, 481 aa, unidentified
MGKRKKSTFERLTRGRLNRKQRRELERRLCSNDPGLEVVHANAAGIDVGNESHFVAVAPGRDPEPVREFGSWTMDLERLAHWLKSCGVETVALQATGVYWIALYDVLEQHGMQVYLVNARDTKNLPGRKSDVQESQWLLKLHTYGLLRNSFRPPDEIRCIRTIWRWRDRLVKDAGRHIQHMQKALTTMNVQLANVISDVSGVTGQAVIRAILKGERDPYRLADLRDTRVQASREEMARSLEGNWREDVLFELKQAVDAYDFAQKQIRECDQQLQKYLAILPTQSQAGTDGPKDNSAKRTSHRSRKPKGNMPRFDLQPELKRICGADLTSIDGMDVVTALTILSEIGTTVSQWTDEQHFVSWAGLTPNRDISGGKVIRQRRRPGNNRVGTALRLAASSLLRSQTYLGARFRALRTRLGAPKAIKAMARYLGCLVYRMLTHGQDWVDQGAQAFERKNHQRTISLLQRKAAALGFQLLPVPKNP

SEQ ID NO: 510238 - protein, 352 aa, unidentified
MEMVSGLDLHRSQITLRTVDLRTGEVQRGKIHPGARDRFREWLGRVEPGTDAHFALEGTTGWRFVVEEIERRGFTAHLADPAELSERRGPKRRAKTDHADCELMVNLLLEGRLPQSWIPPAHILELRTLVRSRKTLVDQRIEWQQRLQAQLFHQGVVPGLRLCNPEDRRRLGDAEVSGSGRQMIETGLIMLDHFDTQLNPLSAQLTGLARAQPGCRALQRELYGVGWLTAVAIVAELGDCRRFTSADQAVRSSGLDITVYESNGKRPGGHLARQGPQVLRWALFEAAQCAARKSSPDHAYYLKVRDRIDHNRACLSVARKICRRACHILKDLGDAAMAPPKAPSARRDPQAA

SEQ ID NO: 510239 - protein, 330 aa, unidentified
MNFCGIDVSAHELVVALRQSDHDHPQQGFPNTPTGHRRLLAWLRRQGPAVRISLEATGVYSLDLALFLSGCPAVELAVVNPKLIRRFAESLDERSKDDPLDAWVLLEYTARMPFRAWQPPTSAQLALRDITRHMLATTEVRTATRNRLHAARSTRSTPACVRHELERSLRQIAASLLRLQSQARAVVAQDPTLQSQFQLLLTVPGIAELSALQLLAEVALLGDRNVRQWVKHAGLDVRHYRSGSSVCRLPHLSKCGNRYLRRALFMPALVAARFDPTLRACYQQLLARGKRKRQALVALMRKLLHAIFGIFRHQQPYCGERLCPVLAQAA

SEQ ID NO: 510240 - protein, 431 aa, unidentified
MQAMLKAGEVAKAAQVVWEAVLERCCGLDVHQRIVTACLLIGALDQHPREFIRTFSTTTRGLLELRDWLEDNGCTHVAIESTGIYWRPVFHILEGAVTVLLVNAYHMKQVPGRKTDLKDAQWIARLLRWGLLKPSLVPPKPIRELRDLCRYRRKLTQEASAERNRVQKVLEDANIKLSSVATDVFGVSGRAMLEALLAAETDPKRIADLARGKLRQKMPQLVDALEGRVDEHHRFLISMHMQHLAYLEQAIAHLCDRIAEKIKPYQHQVDLIKTTPGFDTTAAQDVFVEIGGDVKVFPSESHIASWAKLCPGNNESAGKRKNGRTGKGNTWLRGILSQTAWAASRTKGTYFKAFYHRVAARRGKKRAAVALAHKQIGAIYWQLRENKPYQELGANFFDRLNQKALERRLLSRLEGLGYRVELHPEPVASVC

SEQ ID NO: 510241 - protein, 361 aa, unidentified
MSESMALVGLDVHLAQSVAAVLDPVTGELRVERLRGEPLVVVPAFLEGLGRPVRAVYEAGPTGFGLARAATAAGLDLRVIAPGSIPRSPGDRVKTDRRDAQRIVRLFAAGELSFAFVPSETDERFRDLVRCVEAARGDLMRARHRLSKFLLRRGLRFPARAWTQPHERWLQRLVFDDALSQAVLVDYLCAVDTLVGRRRTLIGLLEQAVPESGHAEAVARLRCFRGVNTLTAAGVCAEVGSFERFAKPSLLSGFLGIVPCEYTSDQKRVQGQITKAGSTLARRLLVEAAHHYRRRPRMSEELAARQRGQDPRVVQIAWRAQRRLYQRWAHLAGERGMHTGTVAVACARELAAFLWEAATLN

SEQ ID NO: 510242 - protein, 442 aa, unidentified
MLSVIFRLVAGLDVHKKTVVATRMRVTKDDRVEWETKTFDTTTPALLELLDWLLEWGITHVAMESTADFWKPVYNVLEGTFELLVVNAKHVKHVPGRKTDAKDSEWLAELMMHGLLKASFIPPEPQRALRDMTRYRTTLVQERARLVNRVQKLLEGANIKLSSVATDIMGVSARAMLNEIVAGQADTVQMAELAKGRMRNKIPELEKALTGRVRAHHRFLLAKQLAHVDFLDEQIEEISAEIGRHMEGMDGSSRHGADADGGEQPLDGEAPLAPLTWDEAVTLLDTIPGVNQRAAEVILAEIGVDMSRFPTADHLASWAGLAPGNHESGGKRYSGRRTKGNRSLCSIMTETAQAAARSKDTFLNARYHRLAGRRGKKRALGAVAHSMIVMIWHILTTRQPYRELGGDYFDERKKESKVNYYLRRLEQLTGAAVTIAFQPAAA

SEQ ID NO: 510243 - protein, 354 aa, unidentified
MELIIALDISMGKSYKVLYDGQTCLSEGEILHNKFGFQALLEEIHSLPEEPKIVFESTGIYSKPVETFCQKNNLTYFLLNPLEAKKQLEQGTLRSRKTDKHDAHKLAQIHPFVDRSEKVQQPEIYTELRDLSRFYQEIEGQIKHTRMYLHHALQVSFPELERFFSSRVTPYALTLIELFPHPELVLQTSRTKIKNLLMKTTHKKISENRAMEKAKLIIEYAQESYPAVSPDSVPTQKVQYYARQLLHLLEEKKMVSEQLIVKARQLSEFQLFTSFPGIGEISAALLIGEIGDLSRFSNHKKVNAFIGIDIRRYQSGKYAGQDHINKRGNPKGRKVLYLIVKNMIRQQKAAPNLD

SEQ ID NO: 510244 - protein, 359 aa, unidentified
MGHERTFVGLDVHARSVVACGIVGDTGEVVRARLTPDHEEIWSWLAGLEGPVAVAYEAGPTGFGLARFLGQRGVRCVVAAPSKISRAPGDRVKTDVRDAMLLARLLKLDDLTAVSVPSVEAEAARDLVRAREDCRGDLMSARHRLSKLLLRQGIVWSGGHAWTGAHDAWLRRQRFDQSARQLAFESAYESVAMTLARRDRLDDAIAAMAADSAFTPVVVRLGCLRGISTLTGFGLAVEIGDWHRFTGSTIGSYVGLVPSESSSGQSRSQGSITKTGNTHVRRLLVEAAWHHRRRNYAGAEMHRRWNLAPVEARQRGQEGNARLHARWQRFDARGKRVTVANVAVARELAGWCWSLAVMD

SEQ ID NO: 510245 - protein, 389 aa, unidentified
MLPNGDKHSNFSVANSHEGSTQLVKRILSALTSHSLDTVLIGLEATSVYGDNLVYFLREDATLAPFNRKIHVINPKQVKKFHDAYNDLPKNDYVDSFVIADCLRFGRINKEVYLGDYRYKALQNLTRARFFAVQNLVKEKQRFMNVLFKKYSTMTQEKVFSDTFSTTALAVYDEFESAEALANMDLHELTDFIIEKGKNRFPDPDAVAKAIQKAARSSYRLPKTVNDSVNQVLSISITSMKALESQIKEFDKAIKAQMELLPNVLISIPGIGPVYSAGIMAEIGDINRFNSQAALAKYAGLAWKQHQSGGFESEVTRLIPSGNRFLKYYLCEAAFSLVRCDKEYSDFYHLKYKEVNRCQHKRALALTARKFVRLVFRLLKDNRLYCPAK

SEQ ID NO: 510246 - protein, 387 aa, unidentified
MSQPNDLSRSLVALDQDSTIIAVVEMSQSSWLVGGVLPGIERQPRKKLEPSPERLLALLHRWRDESVRAGRTITRIAVAFEAGRDGFWLARWLEARGVEAHVIHPSSVAVSREHRRAKTDRLDTELLKRGFLGWLRGERGHCSMVRVPTIAEEDAKRPNRERECLVKERTRLVNRMKGTLARLGIRNFRPTLRNAAEHLAALSTPEGSPLPPNVAAELERDIERLRLVISQIKQLEEVRRQRLEEQPERGPHAMVRLLARVVGIGIETADMLVNEVLSRPLRDRRAVARYAGLTGAPDESGARRREQGLAKAGNARVRRGMIQLAWRFLRFQKNSALAQWYQARTADHRGATRKTMIVALARKLLIALWRFVTIGEPLDGVTLRPAS

SEQ ID NO: 510247 - protein, 335 aa, unidentified
MKTETYVGIDVSKEKLDFALVKNGNKIFHCQTTNDLSGIKSVIKKITKEYGCDHESTIFCMEHTGIYNQHLLDLFEKKKFMLWLESSMQIKKSLGMQRGKNDRIDALRIAMYAFRFRDNIKLWQPPRMIIRHLKNLSALRTRLMRAIKLLQLPLKEQASFFNKKAAKEISGHCNASLKSLKKDLEKVNKQIQDVILADEHLKKLFQLITSITCVGPVTTTEMIITTNEFKNFSEASQYACYAGVAPFEHSSGTSIRGKTRVSHMANKTIKTILHMAAVSSIHIEGEMKVYFERKIKEGKNKMSVLNAIRNKLIKRIFAVVKRNEPYEKNYQFVLV

SEQ ID NO: 510248 - protein, 410 aa, unidentified
MELLHRRCCGLDVHKDTVVACLRLVSDGKVTTEVRTFQTTTADLLRLSEWLAVNGCTHVAMEATGIYWKPVWHILDDGEFELVLANAAHVKNVPGRKTDVNDAMWLAELLAHGLIRASFVPDSQTQEMRSLLRTRKQLVREQSSHVLRVQKTLEDANIKLDSVLSDVMGKSGRAMIEALIAGETNPAKLASLADRRVKASPQELREALRGRVTKHHRFLLRLHLNQIDALDTAMTTVDAQVEANLGPFRTAVELIMSIPGIKTLSAHAIVAEIGIDMGRFPSAAHLISWACICPRNDESAGKRRSNRQRKGATWLKTTLVQCALAAAKKKGSYLQAQFHRIKARRGPKKAIMAVVASILTAIYHMLKDGTMYHDLGCDHFKRRSTDQQKKRLVKRLADLGYAVELKPLAA

SEQ ID NO: 510249 - protein, 401 aa, unidentified
MKRLSGGIDVGCESHHIIILDEEDNFLYNQKVAHKLNEFTENIKLFKQIEKKEGGKLSFALEGKNGYSNPLDRILLDQGFTLYNVDNLKLKRFREAFAGEWRDDERDSLMLSKMLKLKEYINSEREKVFIKIEKPSPLTESLKLLSRHQQTLIDEKVRLVNRLGKKLLEVCPQTLKLGKLKNKKIVAILAKYPDFSKYKRITLKSLLKIKGIGKKGAFFLLKRLNNIEYMPGLTDIYKTIILSYAKRIIELQKEIEDIDKKLDEIGEKSKEVNHLKTIPGVATKLASRLIGEIGDINRFPSEKQLAIYCGVACVDNNSGKVTKAKAVYKANKICKKTLITMAGGSIRFSFQCKAYYLKKRTEGKSHNHALRCLARQLIKVIYKMLTEDRDYIIRKELKKAA

SEQ ID NO: 510250 - protein, 415 aa, unidentified
MSQHYKQTYIYVGMDLHKAQHTAVIINCWNEHLGEIQIENKPSAFDELMKFVKKHTPRGLTPVYGLEDTGGNGRSIAVHLVENKQIVKEVNSALSYSERMSNATTQKSDSWDAYCIAKVLLARLNELPDANPQDIYWTLGQVVARRNSIVKHAAMLKNQLHQQLSYHYPSYKKFFCDIDGKAALAFWEKYPAPHHLESVGAEELAESLRKASHNTCSTRKAAAILELVKEDGATKRNLQEQRDFLVVNMVHDMRRSRELIKEIEEQLRHLLAMTDYKLESMDGISTVTAAQLMAEIGDINRFAHADKLACFAGIAPKFFGSGGKGKHEASGQGNRVLNCIFHNLAVQQIQVAKGSNKKQRNPLMYEFYQRKLVEGKTKKQALICVMRRLVNIIYSMMKNKTEYRAASPLTERQAS

SEQ ID NO: 510251 - protein, 348 aa, unidentified
MLADQLDYVIGVDPHRDSHALAIVEVVTGAVVFEATIAADSGGYQRALSLVEKHAHGRCVFAVEGTGSFGRGLTRFLEGQGVRVLEVGRLRRERRTGGKTDALDAIRAARSVLASERPATPRAGGERQALQALVAAREGAVDARRAGLCQLRDLLITTPEPLRSELRTLTPARLVRRLAATRPGGRRDPELRGSLLALRSIAHRVLQLTAEERELAREIETLTRTLAPQLLNQTGIGPHAAAQLVLSWSHQGRIHSEAAFARLAGAAPIPASSGQTIRYRLDRSGDRKLNRALHMILVTRKRTHPATIAYIERRLAEGKTRREANRCLKRYLARSLYRLLEHGPPITA

SEQ ID NO: 510252 - protein, 327 aa, unidentified
MKFIGVDVSKGKLDCAAVTEAGEVLDRSRSFKNTKEGICALLKWCRKISDSDGLRVVIEATAAYHEMVALHLSEANVFVAIVNPFHVRSLARGLAILGKTDALDAVVLGHYGRFAKLRKWVAPAADLVALKASLLRLDAIEADLLREQNRREQALVRQSSPAIIRSMDASIRFLKRQRKSMQRVIEVAVETAPDIAEDVARLRTIPGVGEKTANRMTAVLRLHDFKSARQASAFLGLVPVEHRSGTSVYRKPRLSKAGNPKIRAGLYMAAVVAMRVNPDIKALYERLVARGKPKMAALGACMRKLVHICFGVLRSRRQYEPQVRLAS

SEQ ID NO: 510253 - protein, 358 aa, unidentified
MNSQKYVALDVDSANIVAGVFDSKGKSMMECFVKTNSTAVRQFFKLLDGTVHVALEEGTQAAWLYEVIRPLVAEVIVCNPRRNKLLQSGNKSDRIDVKKLAKLLRLGDLHSVYHGEQSIESLKQLVHGYQTLVEDTTRSMNRLRAVYRSRGIKCNSTAYNQDKRQEWIEKLDIKTAQMRVGYLYKELDCLMKLRDEAETAMCRQARTDSAYKLIISVPGLGPVRTAQIIAVVGSPHRFRTKRQLWPYCGLAVVTRSSADYEWVGDRARRRNKPSQTRGLNNNFNRTLKAVFTGAALTAIGSNKEFKQCYQRLIAKGIRPEMARLTVARKLVAITLTLWKKGEKYDPERLNQAAGTGDQ

SEQ ID NO: 510254 - protein, 323 aa, unidentified
MPSVIGIDIAKRTFDIATQQPNGKYRTKAKLPNEVAGFEALQQWLLKHANAQAWIVMEATGAYHEALATWFHDKGYQVCVLNPAQVAYYARSQLQRVKTDKVDAKLIAEYGERHQGDLRAWQPEPPAVRRLKALVRRLEDLQEIQQMERNRLDLADASVQASIYSVLHHVERQIGEALRAIRDHIDDDPDLRNKRDLLTSIDGIGERSAALLLAELGDPLRFASSRAITAYAGLNPRLQESGSYKGQTRISRTGSSRLRAGLYMPAVCSLTHNPAISALRERLSAKGKSGKQIVCAAMRKLLHIAYGVLKSGQRFDPQLALAR

SEQ ID NO: 510255 - protein, 411 aa, unidentified
MEVLYSRCCGLDVHKKSVTACMLITEPGKPVRKEIRTFGTMTADLLALSAWLTENGVTHVAMESTGVYWMPIWNILEGSVVLLLVNARHIKMVPGRKTDVKDCEWIADLLRHGLLKGSFVPDQFQRDVRELTRYRTSLIEQRSSEVNRLQKTLEGANIKLSSVATDVMGVSGRQMLEALVAGQTDPVALAELARGKLRDKMPELQKALGGRFRTHQQFLVAQHLAHIDYLDEAIARLDAEIGEKLRPFEQTVIRLDAVPGIGRRIAEVLIAEIGVDMTRFPTARHLASWAGMCPGNNESAGKHRSGKARKGNRYVRRALTEAAHGASRTKNSRLAAKKARLAARRGNKKAIVAVGHLILTIVYHLLKHPDSVYHDLGRGYYDERNHAKNRRRLVKQLEAMGYEVSLRSKAA

SEQ ID NO: 510256 - protein, 349 aa, unidentified
MFVLGIDVSKAKLDCYLSSEVEEKPKHSSLFQIENALSGFDKMAARLSKKGLSIEALTVVLEPTNTYHIELIYWLHAQKANVCLANPKDVHHYAKSLGRDSKTDRLDCFALAQFGLTRKLHMWCPPSDAVRRLDALIRMRSSIIRDRVRAENRLNSLPSEEFGFVGNFLKQQIELLKHQETSINAEIQALITQNEALKPISTRLRSIPGIGPVVTALLVVLFSNRAFKNGEQAASFCGLIPKEYQSGSSIEGKPRMTKRGPSYIRASLRMAATAVLVTKKPSPLKAYYERLILSGKSKASALGALMHKLIVVAFAIWRDKTGYRYDKNKTCSQIQQAQRSVLEEGAWCI

SEQ ID NO: 510257 - protein, 329 aa, unidentified
MKKLFVGIDVSKDVFDFCVINENHQVLVSKGKFPNSIDGINDLCSVIDSFKDYEPWYCLEHTGHYGALLSSEFTKRNLCYSLINPLEIKLSIGIARGKNDVIDAYRIANYGVVNTFKLKKFILPTEHIQKLKALMTIRDGYSKILVQLKNSHKAFLILGETIDLKLQIIENELLIKNQVLAINKVEKEMNLIIKSNLELTEKYDKVTKVIGVGAITAIKCIIETENFTKFVDGRKFSCHCGLAPFEYSSGSSVRGKTRTSVLSNKSLKSIFYKAACTAIQHDPQLKNYYSRKLQEGKHKLSVINAVANKIVLRVFAVVKRNEPFVKFSA

SEQ ID NO: 510258 - protein, 363 aa, unidentified
MTIFCGVDLHTRQQLIKWCDTRDGEIKEERLFHDSLDDVRKFYSQFTGEVRIGIEACGYSEWFERMLYDLGHEVWVGDATKIRRRARSRQKTDRRDAELLIDLLLKDEFPRINRLSFESLEVLRHLRYRHRLVQMRTRMRNSLQAIALGSGIVLKSKLRTKRGRAKLNDLPLSPVLSQQRSGWLEMIEEVECRIAEVERELEKAAADDERVCRVRTHPGVGLLTGLALVHTLCPVDRFANSRKVTAYVGLEPREHSSGERKRMGHISKAGSRVLRFLLVEAGIKATHEDAELKKLYYRVMHRREQARAKVAVARHLLVHAFIMLRDEINYAEFKVRGAEMRSDARFIHRLNMPDHLIERPASA

SEQ ID NO: 510259 - protein, 349 aa, unidentified
MGEVITIGVDIAKSVFQIHGVDADGTVVIRKRVGRARVLELFADLPPCRVGMEACATAHQWARELTKLGHDTRLMPPTYVKAYVKRGKNDAADAAAICEAVTRPSMRFVPIKSVEQQSMLMLHRARDLLIRQRTQLTNALRAHLAELGLVAAKGREGLHQLATVVTECGVERLPSNARFACQAIVTQLHAVQIEISGLDKRITQIHRTNADSKRLDTIPGFGVILSTAVVATMTDPKVFRTGRDFAAWIGLVPRQNSTGGKERLGSISKQGDRYLRRLLVVGATSVINCARARPYKYPWVIELLGRRPTKVVAVALANKMARIAWAVLAKGERYRSPTRLSNPVIPAAA

SEQ ID NO: 510260 - protein, 416 aa, unidentified
MDQKINKVCGIDVHKLFVFAAIMIRGVEEPMTKRFPTDGKGLFELRNWLKENDVERVAMESTGIYWRIVYWALQDCFEMILANAKEIHDLRQVRRKTDKRDCIWIARLCLSNMITPSYVPTWDIQQLKDLFRARVNYVEMRTECKNIVHKHLDIMNIRIGTCLSNIFGKAGTQILNDLVKGCTIEQIMERITDRRILKKKEDIIQSLQGTLNSSSILIIKMHLESIQDIDAKISELDAKIDEMLQNLHAEELRILLSVPGVGSNAAANIISEIGDISLFETADQLTSWAGLAPSSNSSGGKVINGRIGKTGNRYLRRILIQVAHAAARTKGSVLGRFYRRVMKRRGAPIAIVALARKILAIVHHLWTNMEPYEEPGFKKKVRHQKVYECDEFGISGAFEILGEAEDKIVATGSGCG

SEQ ID NO: 510261 - protein, 408 aa, unidentified
MPNRIAGIDVHKRVLMVVVLDPEQAGIVGKRRFGATTAELTHLKAWLQEQTADEVVMESTAQYWKPVWLTLEGHFRLRLAQAWSNRAPRGKKTDFKDAERLARRHQAGELTLSFVPEAAQRQMRDLTRRRTQLTRDRVRIQNQVESLLEETRIKISSVLTDLFGSSGLRILTALAGGENDPATLAALADARVQKSPQELTDALTGTVNLVQRKLLAQHLEHLRLIDRQMEELSGLTAEALHDEQDAITRLTQIPGIRVQSAQQIVAEAGSKAESFHSAGQFSSWVGVCPGKQESAEKNQSSRSTKGNSYLRRVLCQAAQAAVRTNNSFFQQKFRRLLPRLGYVKAIWAIARHLSVVIWKILHDGATYKEFGGPPTPQAAKRRLQRLKKELRAMGYSDELQPMPSAHPA

SEQ ID NO: 510262 - protein, 418 aa, unidentified
MKGTKDTSGQEKRYIGLDVHKHYITVGGMNVRQELVLRLRNVEMERFKRWAEENLRQTDEVVLETTTNTWDIYDTIAPLVERVVVANPAEVKQIANARVKTDNQDVVRLLRLLIAGMIPEVWVPPVEVRELRALISYRWRLVKMATAIQNRMHSLLHRHNLQAPEGKVDTGENREWWEQVQVSSLERLRLNQELKTLRLVRKHIEEVEAELGCLSTSERWAKQAVHIMQLPGVGIIVTMTVLSAIGDIQRFPSARKLVGYAGFGAGVEDSGEKHYEKGITKSGRKELRWAMVEAAWQAIRSNARLRAEYDQLCKRKHPNQAIVAIARKLLVILWCLLNRQESYNLATDEDLAYKMLTWAWHMDKSALRGMTNQQFAKYGLIQLGKGEHLTKIVKGGRPRRIAPKEEVLALMPELSLKP

SEQ ID NO: 510263 - protein, 426 aa, unidentified
MWDAQRRVLKIKSLKHGIIQDKRGNVMRAVFGIDVSKTSSEVAILVNGEKVHGYTILNDAFGFNRLLGDLKTVHNPEIIFEATGVYSRRLQAFLEEYGYAYIRLNPLEAKKQLDSLRVRKTDKIDAEKLAKSQLVHNRKPTYVQEEVYQHLRDLSRFYQNLTEDLVRAKNRLHKVLQITFPELENLLSTPTGEQYWNLVMAFPCKEFVLRLSQSDLCEIIRQSTSKRISEKRIAYLTDKLIKLAKQSFCAVKKTSPMLEEVRYYAQELLRLSERRQVVLNDMVTLAQPLPEYDILRSIPGIAETTATSIIGELGDIRRFQSTNQINAFIGIDLRHYESGKFLAKEHITKRGNPYARKILFKCIHNIASASHTNPCHIADFYEKRKRLSTIASTKPHAIASIHRLIRTMYYLITHNKLYDYSLTQNR

SEQ ID NO: 510264 - protein, 343 aa, unidentified
MSSFNPNSCKGVRARTSKEGNRRMTQDGRIVGIDVSKAKVDGFIRSLRIGLSRPGTLEGQEQMIAWLRENGVAAAVMEASGGYERRWAKALRAAGIAVRVVDPKRVRHFAKSAGRLAKNDPIDAAMIAWFAETFPAAPSQLDDPDREALDLLVTARAALVKLLTQVGNYGEHRQPRTVQKAHGAITKTVRAQLAKLEAAITDAIAASETFAARAEIIESVPGLARQTAAGLIAWMPELGRVDGKVAAALVGAAPYDDDSGTHKGERHIKGGRQEIRTLLYMATLGAATRHNPIVKAYYQRLRAKGKPAKVALIACMRKLIVILNTMLARGQIWNPSPCPTAVV

SEQ ID NO: 510265 - protein, 351 aa, unidentified
MPRTSTVHAVTAIGIDMGKNTLHMVGLDSRGAIVLREKVSRGRIALRLANLPPCLIGIEAGLATHYVAREIAALGHDVRQVPPTYAKPFRQGHKNDFRDAQAVAEAVQRPTTRFVPAKTDDQLDLQALHRVRSRLVSERTAVINQMRGFLLERGIIVRQGLRFLRQGLPDILAKRTDVLSPRMVRIIADLASDWRQLDERIEAVTDEIETLAKSDDSCRRVMTVPGIGPIISSAMVAAIGSGAAFAKGRDFSAWIGLVPKQMSTGDRTILGRISKRGNGYLRMLFIQAARVILLRPASWPKHGFGVWLVRAAQRLHPNVLAAALANKLARIAWTVLAQERSYEARVTKATA

SEQ ID NO: 510266 - protein, 310 aa, unidentified
MGQIYVGIDVSKDRLDVHVRPTGEAFAVARNGEGLAELNERLRGLKVTLVAVEATGGFETVVAASLAGAGLPVVIVNPAQVRAFAQALGKRAKSDPIDAEMIARFAEATKPQVRPLPDEQTQALADLVARRRQIIQMMVGERQREKRSKVRRVQRSIQRVLAALEKALNELDQELHDTVRGSPAWREKEDLLASVPGVGPTTARTLLAELPELGTLDRRQAAALAGLAPWTRQSGQWKGRSCIGAGRAPVRCALFMAALVASRHNPALKAFHQRLIAAGKPKMVAIIAVARKLLTILNAILRDKHQWQPA

SEQ ID NO: 510267 - protein, 400 aa, unidentified
MNAVGIDVSKGKSTVAVLRPFGEVVASPFDVIHNDNDLKRLVELIRSLPGESKVVMEYTGTYFEPIAQFLHNNGIFVSVVNALLVHDYGGNSLRKVKTDKKDALKLASYALDRWMELDEYVPADEQRKTLKLLNRQYNQSIKIQTMMKNNLISLTDSVFPGINRLFTSLERQSDGHEKWVDFLHAFPHKDCVAKLYLSAFKAKYKSWCSRNKYRYSESKAEKIHSYAKSVIAVLPLNESVKLIVTQVVSQLNTILETAFSIRTEMNRIASSLPEYDTVMSMFGVGKVYGPQLIAEIGDTRRFRNRRAITAFAGLDAPPYQSGQLDVSSRHISKRGSAALRKVLFQITEIFILSKPENEPVYQFIIKKRSEGKHYYSYRIAAANKFLRIYYAKVNQILNAT

SEQ ID NO: 510268 - protein, 351 aa, unidentified
MNTQNTALPKLYIGIDIHKRSWKVHCATDLFGGKSFSMNPDPEQLRDYVAKHFKGYEVSSAYEAGCCGYSAHRYFESYGWCSLVVNPADIHRKGKEKHTKTDKIDAQLIARELKDGRLESIHVPDVDREELRSLFRRRNDLVKDFRRIKSYIKMQLLYFGIKEPEEFDNDHWSHKYRKWLDDMVFKNPTAKATLDSRMRFFRFVDQELRDVSTQLRRYCKTHHKKDYLLLRSIPGIGGIVACGILCELGDLRRFNNIKHLAGYVGLAPGVHQSGSNYKTLGITPRAHRLIRSYFVEAAWQAIRADPIMQSYYRKHQGRNVKSIIIKVARKLLSRTLAVIKSETPYAIGVIE

SEQ ID NO: 510269 - protein, 343 aa, unidentified
MKLIRVGVDLAKNVFQVHGVDRNEKVVWRRKLARESWIKVLLETAAPGCAIGMEACGGAHHWARRLQAHGFKVRLVAPQFVKPYVKSNKNDANDAEAICEAMSRPHMRFVSVKTVEQQDIQAVHRIRAELTKQRTAKANQIRGLVAEYGLVAPKELMHLRRALPCWLEDAENGLSVRFRRLLNGLWGDLRTLDERIAELDREIAMIAQNDPTAKRLQQLRGVGPIIATALVAAVGNGEQFANGRQMSAAFGLTPRQHSSGGKERLLGISKRGDAYLRVLLIHGARSVIHHSKGKDDRLSQWVTRLAARSHTNVAAVAMANKTARMAWAMLRNGTDYQPAMVTG

SEQ ID NO: 510270 - protein, 370 aa, unidentified
MLNATTFIGLDVHARSIKAFGFNVITGEEFSSSFGYDHVAVSDWISSLPQPAKCVYESGVTGFDLQKKLTQDGIDCVIGAVSKMIKPAADKKKKNDRNDAKFLARMLSVGNITEVWIPDDECEAARDLVRALEDATEEVKRSKQLLSKFLLRHGLIFNEYSPTGQRKKNWTLAYWRWIKEIHFKEKTDQKTFEYYIDRVKASLEEKKRLEDLVKELACLPRWKKRIDSIRCIKGIDIISAANLVFEADEFSRFKNARAFASWLGLTPSEYSSGESVIRGGITKAGNKHLRRILVESSWHYLYASPSAKDLAKGQSPDPLARRHANKGTRRLTERRRYLLERGVQKNKANIATARELAGWVWAVGKIVEDN

SEQ ID NO: 510271 - protein, 387 aa, unidentified
MQASTVDTPTAGHCGTIFVAIELSQKSWLVTLHSPDKGKMSRHKLEGGDHAALLALIGQVRERAARALGAVPAVVSCYEAGYDGFWLHRLLLAAGITNYVFDPASIAVDQRARRVKTDRIDGEKMLRTLMAYLRGEPQVVRIVRAPAPEQEDARRTSRERGRLIKEQTAHTTRIKALLRLLGMAVGNPRRRDWLSWLSAQRDWQGQAVPPRMLSEIRHEHARLMLVRERLEELAQASAQADPAPAAAQMTERSELLLRLKCLGPAFATTLTSEVFYKDFRNRREVASYFGLTPSPWQSGGTDRDQGISKAGNPRARCAAIELAWLWLRHQPESALTRWFRSRTHNNASKRNKRIAIVALARKLMVALWRYLTTGMVPEGAVLKAAKA

SEQ ID NO: 510272 - protein, 358 aa, unidentified
MKYVGIDVHKKMCQVAVLEEDGNLLDEQRFPNTPEGIEEYAAKLTSYNDEVKAVVESTGNLWIQIHDRLEKHGFTVALSNPGKTRLIAEAKVKTDKVDARTLAALLRADMLPTCYVPGEELRSRRELLRHRMNLVKNRTMVKNRIHGLLDKHGLRMPGAYPFSRGNIEWLRGLCLGFMDDAILRSDLALLEALSGQVDAIEAKIAALAVEDKRTRLLMTMTGVGYFTAMLILSEVGDIGRFRSEKAFASWMGLAPMVRQSGERTWIGGVPRQSNGRLKSALVECAQTAVRFDPRFRGLHERVSRRRGAGCATVAVAHEMARIMFFMLSRGEAYRGVDVGLVGRKLKDMDRKALVGLRS

SEQ ID NO: 510273 - protein, 412 aa, unidentified
MKHVIAFDVSMGKSTMVVYDHNQHCRYEGELEHTQTGFQSLKERIDSLTEQDGQVPEIVFEATGVYSQALEKFLQEHQYPYSRLNPLEAKLQTASMRRQKTDIGDAHELARSHFRIDRPETYIQEDYYEQMRALGYEDIEKELGQHSNRLHAFLQLSFPMLEKVFSKSSILFLNIVQLFPHPAYLGGLSKDELRDQIKRATRKNLSAKQAEEKATLLLAAVENSYSAIGPKDVRCQHLKQYAKRIQELRVQKKEIIKQMVDLSKERVEFQVLKSFPGIGENTAVQILGELGDIRRFQNSKQINAYAGIDIQRYQSGKLQHQDKINKRGNRRLRKILFQMVRSMISLRAKTQNTIVDYYDKLKKQPNGKLHKVAMIACMNKFLKVAFHLIQNGILYRYESAVSRDRIPLTIAQ

SEQ ID NO: 510274 - protein, 355 aa, unidentified
MDKIKYIGLDVHRDTISAAVLNESGRLLQQSVLMTRTVAILDFIGGVRGSLHVTFEEGTHSAWLYDLLSRRVDKLVVCNPRKNALLKSGNKGDAIDARKLADLLRAGLLSPVYHGETSALEVQQLARSYLMLTEDTTRAMGRLKAVFRGQAISCTGRKLYGPKHRGEYLAALGGCALRRRAERLYQQLDALQQLRRDARHDLIVECRKHVEAKWLQTVPFLGPLRAAVLIGRVQTPHRFRTKRQFWTYCGLALETRDSAEYRVIDGQLERKRRPAQVRGLNWNYNHELKNVFKGAANAASTGQGVFREFYLGLLTKGMRPEMARLTLARKIAAIALKIWKKGESFDAEHLKSKAA

SEQ ID NO: 510275 - protein, 400 aa, unidentified
MPMLSIGIDVSKGKSTVCGMKPGGEIVYTPFEVQHTREGMSELVSLLRSSGEEVRAVLESTGSYHCPVVAALLENGIFVSVVNSLRMKRFCSQSIRKVKTDRIDAMQIALYGLAYWQELQPTKLPEDTYRELQLLARQYYQMTSMLIKAKVDFNALCDQVLPGMQELMNDHAGRHKLSDFVLRYHHTTHILEMGETRFRKDYCKWAEKKGYRNCERMAVLIFATAQNGIPVLPNAPSTQIVITEAIRVLHTVEASRDAILTQMQALAKTLPEYSLVREMPCIGDTLAPRLIAEIGDVRRFHSKRALIAYAGIDAPPYQSGKFCANNRHISKRGNRYLRKTGYEVMQSYVMHKPANDPIFTFIEKKRGEGKSGKLAMVAGLNKFLRVYYGKVTELYRSLPQ

SEQ ID NO: 510276 - protein, 440 aa, unidentified
MSKVTVFETVHESAAGIDIGAAKIFVSPDGIEVRSFDTFTTGYYECVEYLQEKGVREVAMEATGIYWMALYSMLESCGLKVHLVNPKETRQVKGRKTDVKDCRWIQKLFSAGILRSSFIPEGKYMEIRLLVRERLDIIEMGGTYVNKMQKCLELMNVKLTEVISQVQGASGIKMIKAIISGCRDKEYLLSLCDKRIRNNKADVVLKALEGNYNETYLFMLAVNMSSWEDHQKKLQIIDSRIEELLKSLCEVNGMKEVDSSPKRVRHHEPKVANLHQMLVNLYGVNISSVSGINDYTLLRLLGETGVDMKRFPSAKHFTSWCGLSPKNNQTGKTNKKVKGAHCNKAGQIFKGCAQSLMNSKHVAIGSFIRKLKAKKDSGIAIKAGARKLAEAYYNAITKGIAYVEQGVKKYENQLKQKELSMLKKLAAKHNMQITEQQCLT

SEQ ID NO: 510277 - protein, 379 aa, unidentified
MKKNSKSPTKKEPKAKRAKAQRPVQRETKEVLSELVEKLRGKLELKPTPASPVKAGQRPERSPNLDQLTVGVDLGDQWSRYCILGLQGETLSEGPLQTRQAELAEFFQAFPPARVVIEVGTHSAWVQEVIAAEGHEVLVANPRLMEGSKRRKRKNDRIDAHKLARLGRVDPQSLHPITHRSREARQDLVLLRAREALVEARTELINATRGLVKSLGTRLPQCSSRSFGHKVGDAIPAEAREALLPLVQLADGMSACIKDYDRRIEELASEKYGHTKLLRQVKGVGPITSLAYVLTLEKPERFPKSRDVGPYVGLVPKQEDSGESQPQLGISKAGDTMLRKLLVGSAHYILGPFGPDTDLRRYGLRLCERGGKTRRRERR

SEQ ID NO: 510278 - protein, 341 aa, unidentified
MSEVSTIGLDIAKQVFQAHGADASGNALFRKRLTRAKLLEFFRSQPRCLVALEACGGAHYWGREIAKLGHTVRLIPPAYVKPFVKRQKNDAADAEAICEAAQRPSMRFVAVKDEAQQASGVVFRARDVLVRQRTQCINALRGHLTEYGWVVAKGATHVPTLIDQIEDPNCHLPESARAIFKVLIATLRSLEENIAVLDAEIRRRSKEDPIARRLMTIPGVGPITATAIVALAPPVETFRTGRDFAAWLGLTPLQKSTGGKQRLGATSKMGERTIRRLLIIGGSAVVRQACMRGAPEGSWLARMLGRKPRMLVSVALANKTARIVWALLSKGEVYRAPVVAA

SEQ ID NO: 510279 - protein, 424 aa, unidentified
MNCNQNFKISQVTEGTLVLGIDVGSNTHYARAFDWSGLELSKVFKFKNSFEGFQSFVLWVNDLCCKYNKSKVIAGLEPTGHYWFSLGELLKENNITIAIVNPYHVKQSKELDDNLQTKNDSKDPKVIAKLVIDGRYSFPYIPEGIYGELRVADKLKNDITQQIISIKNKIHRWLSIYFPEYEKIYSLIDSKSGFLLLKETPLPKDIVELGSEGIVERWKQTKLRAVGLDKAKKLEEAAKKSIVCKNITSSARFEIKLLIEDYEYKQNQLNSITEELNKLCEKIPMIKEIAEIKGIGIATAISFVAEVGDIRRFKSAKQVQKYAGLALKENSSGKHKGLTRISKRGRKKLRTILFRATIPLIGFNKEFSSIYNYYIERKDNPLKKKQALTAICCKMIRIFFTILSKGIKYDETKMLHDIKRPVAA

SEQ ID NO: 510280 - protein, 411 aa, unidentified
MIEQQNLIYVGVDLHKQHHTAVIIDCWSKKLGEVKFDNKPSAFPLLLKELKKYTKKGLSVVYGLEDVGGYGRGLAVYLKDNHCWVKEVNAKLANARRQSHVTVQKTDSWDAECVAKVLRDELERLPDAKPIDLYWAISQLVTQRRWLAKILTETVKKLHQQISYSYPSYKKFFSEVEGKTALAFWETYPSPYTLKDVSEEALAAFLRKYSNNGLSHKKANQILTLIDADGETYRDYQQSRDSVVVSQVESARFFQEQLVSIEDEIDFLLKRLGFQLESMTGIDVVTAAQLVAEIGDIYRFSSPDKLARFAGIAPVTVGSGNKSRNYKSKQGNRELHDIIKSLAIRQIGVTRTKREPKNAYFHSYYERKIAEGKTKQQAVVCLMRKLVNIIYAMMKKKSAYVMPNITVRQAG

SEQ ID NO: 510281 - protein, 387 aa, unidentified
MPQPNDLSRSLVALDQDSTIIAVVEMSQSSWLVAGMLPGIERQPRKKLEPSAERLLGLLHRWRDEAVKAGRKITRIALAFEAGRDGFWLARWLRAHGVEAHVIHPSSVAVSREHRRAKTDRLDTELLKRGFLGWLRGERGHCTMARIPTIAEEDAKRPNRERECLVRERTRIVNRMKGTLARLGIRNFKPTLRKAAERVTTLHTPEGSALPPNVSAELQRNMARLGFVVSQIKEIEAARQKRLEQEPETEPHAMVRHLARIVGLGVETADILVNEVLSRPMRDRKAVARYAGLTGSPDESGAKRREQGLAKAGNARVRRGMIQLAWRFLRFQKESALALWYRARTADSRVGTRKTMIVALARKLLIALWRFVTTGETLEGVVLRPAG

SEQ ID NO: 510282 - protein, 345 aa, unidentified
MTIVKTRAITGGVDTHADMHVAAALDPIGGLLGVQEFPATSGGYAGLLGWLGGFGTVALVGIEGTGSYGAGLARHVTAAGIRVVEVDRSDRQDRRRQGKSDPLDAVSAARAAQSGRARGAPKGRDGAVEAIRALMVAKRSARSERVQTINQARALVVTGPDDLRTRFARHTAAGLVSGLASLRPRPGDVVGYATRIALRELGRRAEFLDAQLERLDELIAPLVAARAPGLLALHGVGPDTAALLLVAAGDHPERLRSEAAWAHLCAVVPIPASSGKVTRHRLNPGGDRQANHALWRIVLTRMSAHPPTLIYAGRRTKEGLPEKEIIRCLKRYVAREVYRHLRAAG

SEQ ID NO: 510283 - protein, 369 aa, unidentified
MQKTIKNIGLDVHKNSISIAIADDGRDGEVRYYGKIDNDMNQLDKVIRKLISKGATLRFVYEAGPCGYCIYRYLTNNGMDCAVVAPSKIPQQSGNRLKNDRRDCLSLAKLHRAGELTPVYVPTEADEALRDLVRAREDATRALRTAKQQLGGFLLRHDTVYSGKSKWTKAHFNWLSTIAMPHPAQQIVFQEYIDTVVDCSNRVQRLTEQIRQQSMQSRLHGLIKALQSMRGISLIVAATIAAELGDLTRFENPGKLMAFLGLIPSEHSSGDRVKKGAITKTGNGHVRRALVEAAHAYRFSARKSREIRKRQEDLPKEVLDISWKAQCRLCTRYQYLMAKGKKSNVAKTAIAREIAGFSWAIAQVLPKTA

SEQ ID NO: 510284 - protein, 320 aa, unidentified
MMTKPTPPYVGLDVSKKVLELAIHESDYRHCYPNNPSGFAELIAELIILEPALIVIEATGGLEKPAVAALNTAGLPIAVINPRQVRHFAKALGQLAKTDRLDARVLAHYAAAIKPPLRPIKSVPEQDLDALVGRRGQLVGMLIAEKNRRATAPNDRVRAEIEEHIEWLEGRIAALDRQLKELMKSSATWKHTNQILRSVPGFGPVVSFTMLADLPELGKLNRQQISKLVGLAPLNRDSGQKHGTRHIYGGRTSVRSILYMATLTAIRHNPVIKAFYERLIANHKVLKVAITACMRKLLSIVNLMVRNGTTWKPADALVSA

SEQ ID NO: 510285 - protein, 373 aa, unidentified
MVHSSEAFVGIDTSKLRHAVAIADGGRTGEVRFLGEIENTAAATAKLVRKLAAKYQRLTFCYEAGPTGYGLHRQIKSLGHECVVVAPSLIPKRPGDRVKTNRRDAVGLARLLRANELTAVWVPDGRHEAMRDLTRARETAMLDLRSKRQQVSALLLRQGRSYPESKKTWSKAHLSWLASQKFDYPEQRLVFEEMMLAVRQAQERLERLEQAIRAAVPDWSLAEVVTGLMAMRGLDLISAATFLAEIGDLSRFRTPQQLMAYLGLVPSEESTGDTIRRGSITKAGNRRARRMLVECSWSYQHPPRVGAVKQHKVDAAPPAVREIAWKAQCRLYRRYRALIRKGKLKTVAITAIARELAGFIWAISREIAPAAAQ

SEQ ID NO: 510286 - protein, 341 aa, unidentified
MEITTVGLDIAKRVFQLHGVDAAGKAVLRRKLQRSEVLAFFKALPPCLVGIEACGTAHYWAREIRELGHEVRLMPPSYVAPYVKRGKTDAADAAAICEAVTRPTMRFVPIKTAEQQAVLMLHRTRDLLVRQRTMLVNALRGHMAELGIIAPQGIARVADLMAVLLGEDKTNVPALARQALRGLAAELEALDRRVKEIEGAIVRWHKDNEASRRLAAIPGVGPITASAIVSTITDPFQFHSARHLAAWIGLVPRQHSSGGKPRQGGISKQGDRYLRRLLVLGATAVIRYSRSKSTAEAGWLKSLLERRPARLVSVAQANKTARIVWALLVRGEAYRMPSGVA

SEQ ID NO: 510287 - protein, 436 aa, unidentified
MRGCRCSMIMGFTKPIEHFNLQRKEVNTMNTLYVGIDVSSRSNVVYLMLPNGNKHSNFSVANSHEGSVQLVKRIHSALTSHSLDTVLIGLEATSVYGDNLVYFLREDTTLAPFNRKIHVLNPKQVKKFHDAYNDLPKNDYVDSFVIADCLRFGRINKEVYLGDYRYKALQNLTRARYFAVQNLTKEKQRFINVLFKKYSTLTQEKVFSNTFSTTALAVYDEFESAEALANMDLHELTAFIIEKGKNRFSNPDAVAKAIQKAARSSYRLPKTVNDSVNQVLSISITSMKTLEAQIKEFDKAIKSQMELLSNVLISVPGIGPVYSAGIMAEIGDINRFNNQAALAKYAGLAWKQHQSGGFEAETTRLIPSGNRFLKYYLCEAAFSLVRCDKEYSDFYHLKYKEVNRYQHKRALALTARKFVRLVFRLLKDNRLYCLAK

SEQ ID NO: 510288 - protein, 343 aa, unidentified
MQVVRIGLDLAKYVFEVHGVDGQGNVVIRKTLRRGSVSTFFANLPPCLVGMEASNGAHYWARVLTELGHKVRLISPQFVAPYVKSNKNDRNDAEAICEAVGRPTMRFVPPKSSEQLAIQALHRIRQRLVQSRTRLVNQIRGILAEQGIVIARDIWRLRRALAEITGHATDNLNKLVRVLILETQAELMELDRRIASCDRRIRELYRTSELCQRLGEIEGIGPVTATALVAAVGDRSCFKNGRQFAAWLGLVPKHRSSGGRHRLFGISKRGDRYLRTLMIHGARAALGKAGGKQDPRSRWLASLRQRRHANVAAVALANKNARIVWAMLAGNLSYEPERSVQAA

SEQ ID NO: 510289 - protein, 337 aa, unidentified
MEYFAGLDVSMKETHICVVDRDGKVVLEVTAASLPETIAVALGKGPGCHRVVLETGRMAPMLYHGLDALGVPVICIESRQAYQALRSLATHKTDRNDARGLAHLARTGFFKPVHVKSLAAHAVRALIIARKKLVGQRVTLENQIRGLAVVFGIRLPRGLSPAFAEQVTNGSQGVAGLTTAIAGLLAARNAVLAAITAIDRDMKRLARASEGCRRLMTIPGVGQLTALAFVAAMDEPERFRRSRDVGAYLGLVPRRYQSGEIDYSGSISKCGDRRVRTLLYEAANVMLTRYRGKLALKEWALAIGRRSTMRKARIALARRLAIIMHAMLRHGTEFRAA

SEQ ID NO: 510290 - protein, 348 aa, unidentified
MALTIVETRAITGGVDTHADVHVAAALDPIGGLLGVQEFAATTAGYSRLLGWLGGFGTVCLVGIEGTGSYGAGLARHVTAAGVRVVEVDRSDRQDRRRQGKSDPLDAVSAARAAQSGRARGAPQGRDGTVEAVRVLMVAKRSARSGRTQTINQARALVLTGPDDLRARFARHTPASLVTELASLRPRPGDAVGYATRIALRELGRRAEFPGGQLGRLDKLIVPLVTAHAPGLLALCGIGPNTAALLLIAVGDHPERLRSEAAWAHLCAAAPIPASSGKTVRHRLNPGGDRQASHALWRIVFTRMGSDPATRAYVQRRTAEGKSKAEIIRCLKRYVAREVYPHLRTAAG

SEQ ID NO: 510291 - protein, 438 aa, unidentified
MERGWEIAVYRKSAAHRISMSNGKRKVCGIDVHKGFLVATILDRDGTCETRRIPQNIESLLAFRDWIRSENCDSVAFESTADYWRSLYLVLEGHVPVTVANAYHIKHVPGRKTDVTDSRWIAQLELNSLIEPSRIFSGEKYDLRSLTRSRELLVQNRTELKNKIHHLLDSASIRLSSVLSDLFGKSGMIILNGLVQNEPLEEIIKSLPKKMRGSVDIISSTVPASIPQVTLVLLQSYLKLVEDLDQEIKLLEGRIRESLASKSREIQILTSIPGIGFIGASTLIAEIGNVRDFKDADKLTKWAGLTPSVYQSANVTRTGSITKQGSRHIRWILVELAHVAIRSPGRLKSFFERLMPKKGYKKSIIAVARKMLRIVWHLLVYDEVFIDVVPRSKHVKMPKLPKKIQAVGLNRIIELLSKASEVIIKDRNQEIFRIGLSE

SEQ ID NO: 510292 - protein, 419 aa, unidentified
MLTARWFVGIDWATKAHEVCVLDPEGQVCDRRSVAHSATALQAFVDALLERAHGDASTVAIGIEVPRGALVDVCVERGFGVYAINPKQLDRFRDRFTAAGAKDDRRDAHVIGDSLRTDPQAFRRVRLDHPLVIQLREWSRVDEDLAGDLTRMTNQLRDLVYRIAPGLLTLCPAADERWLWTLLRDAPTPADQRRLSLRRLERLLRDHRVRRLEAAQVREVLQKPSVYTAPGVVDAVAAHIQLLLPRVDLLAGQRRDAEKQLERLLDALDAQEPAAGDQREHSDVAIVRSMPGIGTRVAARMLAEASQPLVERAYHVLRATMGVAPITKQSGRRRTVSMRYACNARLREAGYHWARTGAQKDPASRAYYAQLRARGHSHGRALRSVADRLLRVLMTLLNHGQLFDLTHGQHAPAAIGAGA

SEQ ID NO: 510293 - protein, 410 aa, unidentified
MVKENFIYVGIDLHKETHTAVMIDCYNQKLGEITFPNRPADFPKLVTKVKKCNTDGKEVVYGLENAYGYGRALAVWLIDKGYLVKDVNTAISHRQAKHRGAMYRKSDSDDAEAIALATLNMLDKLPDAYPNDAYWSLGQLVHRRDNIMKQRTRLVNQLHEQLCIAYPSYKQFFNDISRPTALYFWEHYPSRKYLKGKSVEDLRAELVPVSHNKCSTKTCEKILYAVASDKVKNNAYQDARDMVTLSIVSDLQYYDKQLAEVDKMLEQMYKMLGCTLTTIPGVNVITAVKILAEIGDIKRFSNANKLAQFAGIAPLHLSSSGKGKDVATKQGNRRLQATIYFLAIQMVQVSSKGTPRNSVVRAYYEKRKAEGKTSQQALICISRRLISIIYGMLKHGTEYRMPVVESAGEK

SEQ ID NO: 510294 - protein, 315 aa, unidentified
MSTPLFVGLDVCKTHIDLDLFPAPAPCQFENQPPGLRRLVKHVQKLQPQLVVVEATGGWEAAAVMALHDAGLAVRVVNPRQARDFAKSQGKLAKTDRIDAAALAHFASTLQAGAQDMPSAQMLELRALVTRRGQIQEMITAERNRLQLVTPAIRKQIQKTIDFLTKQLQQLDKDADDLLRSSPLWVEQAALLQSVPGIGPGVTRTLLAQLPELGTLDRRQIAALVGLAPLNRDSGHHRGTRSIWGGRSAVRSALYMATLCATRFNPAIKVFYRRLRDAGKPAKVALVAAMRKLLTILNAIIANNTPWNYQQPQIA

SEQ ID NO: 510295 - protein, 327 aa, unidentified
MDKEIQMNSTGMSEACGGIDVSKDRLDVGIWPSKEKFSDSNDRKGRERLAQRLSTMKLRLVVLESTGGLEVPMALELQEHNVPYRVVNPRQVRDFAKATGKLAKTDRIDSVMAGHFAAALGIEPKALPDAARRELKDLVMRRAQLIETKIAEQNRLRSDTVKTVRNSLAKSIAWLDREIAALEGTIDRTIKGNPEFSALSEAVQSVPGVGAQTARMLTAALPELGALNRKQIAALAGIAPLNRDSGKHQGKRFCWGGRAEVRCALYMATLVGVQHNPVLKAMYDRLRAKGKLAKVALMACMRKLLTILNAMVRDGTAWRQTSPAAAA

SEQ ID NO: 510296 - protein, 359 aa, unidentified
MEYIAFDAHKRYTLASVAQADGQLLREEQIEHERGALQAFLARCERGSPVAVETVGNWYWIVDEIEAAGCRPKLVHARKAKLMMGQINKTDKLDARGLNQLQRNGTLPTVWIPPGELRDQRDLPRTRMVLVRQRTRLKNRIHATLAKYALRCDEVTDLFGVQGRALLRRHLEALPPHTAFTTRVLLEQVESLDRQVRALEDRMRSVFEPTPMVQWLMTLPGVGFILAVVITLELGDIRRFPDAERFASYAGTTPRVHASAGKTRYGALRPDVNRYLKGAFMEAANVINLHRRYYPRRHVTRLYVRLARRKGHPKAIGAVARHLAEATYWMVTKQEGYHEPIASRPSRLGRSRGASAVSP

SEQ ID NO: 510297 - protein, 428 aa, unidentified
MEQQDGIRLEQFRQLKREVRSSDGYLIVGIDVSKDRHHACFRAASGRILLKRLVFENSYEGFERLLNQADVLRLENGLREVVFGMEPTGNYHKPLGEFLIRKLALVVLVSNVAAKENRKSLDGRWDKHDEKDAANVADLVSQGKFLFYEYPEPRIKELRVLLALKRRLKRQEHGYRVRIRNHLVAKYFPELDRYFDQSEKYSLAIVRWCLDPRSLSGYEFEEFVRMVAPQMRSGQQSGRLRTILQRAQHSIGCEMGPGAEFEARVMVEGLRQIRIVIGDTDKQIQERCLEFSEYEYLLSIPGFGPDVSAKVLGAIGDPFRFQNGSQVIKMAGLDLNAERSGKGSEWARPRISKKGKADLRYALYQAAFIASTKNRYFLVYYSNQLRGREREPGIKTKMRVKLAAKLLVIAWTLMKKKEPFNPDYLKLD

SEQ ID NO: 510298 - protein, 416 aa, unidentified
MNYNPCITIDVSQGKSHIQGFIGYNNKNRKPDNITQPKVMRHSKQGFNKIIELISIIKSKTNLIPIVIFEFTGVYHKTLEKFLQKNNIKYHIVAPLRAAKSRQNDIRSVKTDKRDCLSLARMFYDIKKDSLGKFDSESESYESMKQLNRFYENIKLRQQELKVNFREYLAIIYPNYEITKSNLDGAFKNVYSKESLGFLKEFPHPELVVKKTVQEIEETIIKYLGKIHSKYSFSIASRLLDYCKDLVSGCSFDQPLVDNMQFYISQIELYENTLNDTLDKLITLAENASLYHLLLTIPCVKENLASRFVAEIGDINRFNSYKAIISFVGNDPKIYQSGDDLGLHKKITKKGNKHLRTIFYLIAQQMTKAKNIESSIKDFYKKKTQQGLPKLAALIACSNKLIRIIYYMNKTGCAFV

SEQ ID NO: 510299 - protein, 351 aa, unidentified
MSLAELVDHVIGVDPDRDRITAAVVCARTQGEIASKSFATTARGYGQAMRWAKDHTTDGRRAWSIESTGSYGAGLASALATRGEFVIEFDHPATRPSKDGAKSDSLDAVRAAREILGRKTWATPRSRGAREGLRTLVTARDSAKLARVAAINVLKALVVTAPIDLREELRGRPLMDLVGRCQRLRPDTAIDPEHAATKLSLRSTANRVRHLSDECRELELAMIPLVRAMAPALLDEPGIGVLMAAQILVSWSHPGRCRDEAAFARLGGVAPLEATSGQTQTRHRLSRGGDRQLNRALHTVILARAKHHQPTKEYIARRITEGKTKREAMRCLKRYYARHLFRLLEAAPMTA

SEQ ID NO: 510300 - protein, 356 aa, unidentified
MEPIKTDCIGCDAHRRYSVFVVMDERGYTGKETRVEHSRELYRHFLSTLPPGSPIALESIGNWYWMIEEMERAGHQPILAHAKKAKLMMGLTNKTDKLDARGLALLLRNGTLPSVWIPPGELRDQRELPRMRMVFARIRTMLKNRIQSTLAKYGIQIDQVSDLFGVTGRGLLQNRLNELPQETQRSIQEHLKLLDGVLEQIEGTEKRIKELIKETPQMQLLMSLPGVGPILAIVIILEIGDIERFPGAPKLASYAGTVPQVKSSGGKTYYGKVRPDVNRYLKWAFIEAANSIVVNQRRMPNRHVIQLYHRIMKRKGHPKAIVAVARHLAEATYWMLTKNEAYREPTSSRWISPTQK

SEQ ID NO: 510301 - protein, 480 aa, unidentified
MRPHISLKEDAMDNSKNRKRKNKKHRKVDISNLEQLNLNAAGIDIGAEFHYVAVPNGRDPEGQDVRHFATFTADLHQLADWLRQCKIDTVAMESTGIYWIPVFEILDSQGFDVRLVNPRNIKTAPGRKTDVLDCQWIQQLHTYGLLQSSFRPKNQICELRAYVRQRAMLVSFASHHIQHMQKALEQMNIKLTEVISDITGVTGMKIIRAIISGERNPVKLASMRNARCNNSETIIAKALEGNWRSEHIFALQQAVELYDFYEKQIIACEFEIQHHLESFDDRSNGTPLEKPRRKSRGSSNQYHFDARRYLHRMTGVDVTRIEGIEAPTALTIIGEIGIDMSSWPNAKHFTSWLGLCPGSKITGGKVLSSKTKPSANRAAHAFRLAAYSLQRSKSAIGAFLRRKKAQKGAPKAITATAHKIARIFYNMLKYGTEYVDLGQEYYEQRYQDRVIANLKRKAKQFGFELVNIKEHKLLTGLPAN

SEQ ID NO: 510302 - protein, 313 aa, unidentified
MDRVVGIDVSKARLDVYDLAGDRRLAAGNDEAGIAVLVDQLGLGAEHLVVMEASGGYERQPQRLLSARGLRVAIVNAARVRDFARASGRLAKTDRVDAEVIARYGAFARPLPTALVTGARQVLAELLAYRRQLTTEITARSQQLGHLVTPALRQRAGAALEGLRAERREVTRLIGQTITADRSLADAATLLQSMPGVGPVLVATLLALLPELGTLDRRQIASLVGVAPIARDSGTRQGRRLIRGGRRQVRPPLYMAALVASRSNPTLSATYARLLDHGKPPKLALVALMRKILITLNAMLRNDTSWQHLPHTA

SEQ ID NO: 510303 - protein, 419 aa, unidentified
MAFKILRKNCCGLDIHKTWIFACIGITDSNGRTEYKQARFSSFSNGLRDLADWLAKYSCSDVCMESTGKYWIPVFNILEKTCWVTLAHPKYTKPQKGNKTDRKDAKWICDLYMCGMVKPSFIPPPDIRQLRDLMRYRVKLTNMLTGEKNRAQNCLTVSNLKLDDVFSDVFGKSSRSIIQCILEHPGEQFDVTPFIHRRCKHPVEEIQAAVDGVVSREQAAKLKECLLHIDQLNAHRERIEAEILRLAEPYPYQLELIRTVPGFAAAPLTAVALISEIGVDMSVFPSAKHLASWAGCCPRNDQSNKKVKSTRISRAGCYLKPLLVQIANAVIKSDRHPECRERYRRIKARRGHKKAIIAVCRMLLTAIWNVLSKLEPYSAKGYLADKLTEHSVVISKAEGLALLRKRGYIFKDELAVESG

SEQ ID NO: 510304 - protein, 344 aa, unidentified
MTTKLMAGIDLHSNNLFCAIVDMNGKRVFEKKLPCDLESVLQALKPFKKRLEKVAVESTYNWYWLVDGLQDDGYPVVLANPAAMQQYDGLKHADDKSDGFFLAEMLRLDILPTGHICDRQVRPVRDLLRRRMGLVHKRTSLILSLKSLHTRMTGRDLGTGRIKAMEPAEAEKLFEHPADQLITRLDLQLVEQLGRSIQQIESAILARVKSLPHYRVLQTMPGVGKVLGLTITLETVDPRRFASPGDYASYCRCVDSRRMSNGKKKGENNGKCGNKYLAWAFVEAANFAQRHDAACRKFYDRKKAQVNGVVATKALACKLAKAAWHMMSGNKPYDTARIFPAARK

SEQ ID NO: 510305 - protein, 318 aa, unidentified
MLNESFVGIDVSKDWLDVGWEPAGQSERLAHDEVAMVGLCERLARERPCLVVLEATGGLETHLASALAAAGLPVAVVNPRQVRDYARACGRLAKTDRIDALVLAAFARAIRPQVRAPRDDETLELGALLARRRQLIDMRVQEKLRLERASPVQRDSIKEHIAWLTERIARLDTDLMHRLRSSSLWRDKEDLLKAIPGVGTITRVTLIALLPELGKLNRREIAALVGLAPFNRDSGQHRGERVIWGGRAQVRRVLYMASVAAIRSNPVIRAFYQRLRAQGKPGKVALVACMRKLLTIMNAMLKRNTPWNPNALDLEHSC

SEQ ID NO: 510306 - protein, 348 aa, unidentified
MKATTIGFDLAKTEFQVHGVDAAGKPVVRKQLRRAQVLPFFARLAPCTIGIEACGSAHHWARKLTVLGHTAKLMAPHFVKPYVKANKTDAADAEAICEAVGRPNMRFVPVKSVEQQAILAVHRVRSGLVAERTAQLNRLRGLLSEFGLIAPRGRRALMERLPVLLADETLPGVARTLFERQSVRIRQLETDISAEEAVILAWHRSNELSKRLDAVAGVGPITATALVASFGEGREFDNGRQMAACLGLVPRQHSSGGKTRLLGISKRGDTYLRMLLIHGARAVIRTLERRAKGGGNPTDRWLAKLLARRNPNVAAVALANKTVRVIWALLAHGRTYDRNWSGQAVAAA

SEQ ID NO: 510307 - protein, 319 aa, unidentified
MSSKELNELFVGIDVSKNRLDICLHSNQKKKSFENNEAGLESLVSFLAPEKPTLVVLEATGGLEINLASTLGAKKIPVAIVNPRQVRDFAKATGKLAKTDSIDSAIIAHFGAAIRPEARPLKAPEARALDAFNARRGQLVEMLTMEKNRLTSAPESTIEDIKAHIAWLEKRLSKTNDDISRCIRDSPLWREKDEIYQSVKGVGPVTSLTLLADLPELGTLNRKKIAALVGVAPLNRDSGQMRGKRTIWGGRSRVRSVLYMSALVASKHNPVIKAFYQRLLKAGKCKKVALTACMRKLLTILNAMAKTGTAWQEPAQKTA

SEQ ID NO: 510308 - protein, 417 aa, unidentified
MSEYAALVAIDWADQQHAVCLLDPSTGEREQTIVKHTPAALQEWALSLRQRFAGQPIAVCLEQSRGPLIYALLQYDFFVLYPINPATLAKYRQAFSTARGKDDPTDADYLLDLLEHHRNRLRPWHPDDEKTRTLRLLVEQRRRLINDRTRLSNRLTALLKGYFPQVLDWFEDIRTRLVCDFLERWPQLSLLQQSRPATVDKFLRSHHSTSKATNQRRLSEIKTAIPLTTDAAVMISSVINAKVLVAQMKTIIAAISEYDRHLEALCQTHDDYHLFAALPGAGPVHAARLTAALGSDRSRWTTADELVRFSGIAPIIERSGKQFRIRWRYFCPKFFRQTFHEFAAQSIQDSFWARAYYSMQRAKGKDHHAAVRALAFKWIRIIWKCWQTRTPYNEVIYLESLRKKGSSLLKFAADNPA

SEQ ID NO: 510309 - protein, 318 aa, unidentified
MKFSGIDLHSNNSVVVVSDEEDRIVYQRRLPNDLQQILLALVPHREELAGVVIESTFNWYWLVDGLMAAGYRVHLANTTAIKKYEGLKYSGDFADALYLAQLLRLGLLPEGYIYPREERAARDLSRKRMQLVRCRTAQILSIENIMARETGGRMSSNQIKGLSSAQADALGLPPDVTLALKANLAVCETLRQQIEVLEKRLKERVSLRQEYGLLKSVPGIGQTLATTIMLEMGTVERFAKVGNFSSYCRCVDSLRESNGKKKGEGNTKNGNKYLAWAFIEAANFAVRFCPEAKRFYERKKRKTYIPHFVDRLGRELHC

SEQ ID NO: 510310 - protein, 337 aa, unidentified
MKFCGIDLHSNNSVVVVTDEADRVLISRRCPNELKPILSLLEPHRDELVGVVVESTYNWYWLVDGLMAVGLDVKLANPVAMKRYDGLKHSDDKDDAAFLAHLLRLGILPTGYIHPPHERALRDLARKRIQLVRTRTQHILAVENIAARQLGHSFSCNEVKGFSATSVDRLGLSTDVALAMKANVAVIQALEVQIAGLESRLLQQVKLRPEYSLLKTMPGVGEVLATVIMLETGDIGRFAQVGNFASYARCVESAHYSNGKKKGEGNAKNGNAYLIWSFIEAANFARRFSEDAKRFFEKKKAKTNGVVATKALAHKLARASYHILKEKQPFDAKRCFA

SEQ ID NO: 510311 - protein, 346 aa, unidentified
MNCIGLDVHQTSTFGSVVREGREVFRFEVETQTESLQERIGQIKGAKRVAVEEGNLSDWCKRTLEGIVKEVIICDPRWNRLISEGEDKVDPVDAYRLGLLLWLGQLRPVYHANLELQQLKEAVISYWQSSADLTRAKNRLKSQFARRGLAIKDGSLYRAEGFERARQQLEESWGQTQIVDSLFEQLSFFRQQQAERLRHLRQQQRSHLPILKQLRSIPGVGPIVAVTFFSFIGDPWRFPNKRKLWKYCGLAVKQALSAGRRKGYPRRSQQYNRKLKHVLGIAAQAALRCQDGNLLTETGRILVQQGSDASCVRRTLSRKIAVIGWSIMKDPQPYREEVHEKTNSIS

SEQ ID NO: 510312 - protein, 519 aa, unidentified
MSRARSASRRSRKTVLVQKPNGVLSGRVQAVGPQCFGIVGIDVAKQRMKMMLCDFFGKCLIPPTEFDQTNGGLRTAIDAVRRAQQQAGLKDLVIAIERTGEYHRPVQRAFRQAGFEVRLVHPLATKQFRQVADPGDKTDDTDLAGIHRAAVNGFGLIEPELPPDYLQLQMLIRHRRDLVRKNSALCCQLREHLHAAMPGYTACFDDIWLSQTAWVVAHATGCANAVCTAGIAGLQRFVDQAGVRCKQNTLHKILAWADTAPPCHPQIESLRRIIRDLDDDRTAKTRQILALERSSAHLLVRTPYIRLLVIPGINVVSAADLAGEMGPIAHYASANAITGRAGLVPSRYQSDLVDHANGSLIRSGNRRLRTALLQIADNLVMCNHYFHAKADLWRVRGKDPRWMRVKVAKSFSRIAYAIVAGNGPFAHRCLQDRHYVLHKLQAFHREHDTPMATLLADLQAAIGQLPKVEYVNEAKPLQEELDSLPRRRGPQPLSEIIPIVLARLGMGTVQSTPEGQDLS

SEQ ID NO: 510313 - protein, 359 aa, unidentified
MQKRLTKKDQFFNNINLTVDDDVYVGIDVHKKSCHVAIWLNDAIALTFVTPTDNLAIAQMLQKLTPGLKQIVYEAGPTGFSLARTLRAASLPVAVIAPSKTPRPAAQQSKSDRLDCRKLAEFAAKDLLVEVAIPGKQQEADRQIVRLRNQLGDKRIRIKQQIKSMLLQHYIKEPHGLTRWTKQSVIQLGTIELRPEIRFTLDIMLDELSYLESQIKRVELQLKNTFGKNRHAREIEILQSHPGVGPITARQFRAEVFSPDRFSKSTQLTRYLGLCPRVSQSGQKRIDGRLMKAGQIKLRANLVEAAWAWVRVDPAAKETFRRLLSNTGEPNKAITAMARRLAVHLWKMLSDGKLYRKAV

SEQ ID NO: 510314 - protein, 370 aa, unidentified
MDEIKFYVGLDVHKDSIAIAFARAHSRDDPQFVGTTRYSVISLTKALSKLGKPSELSICHEAGPCGYGLVRALRKQGYHCEVIAPSRVARRPADRIKTDRRDALLLARLHRAGELVPVAVPEPQDEAIRDLVRAREDAVNDQRRVRQRLKSFLLRHGHAYTGTRWGPKHELFLSKIKFEDSAQHIVFTEYRMAVRFATELVERLTQSLRAHAEIWRWLPMVKGLMTLRSIDLISALTIVAELGDLRRFPHPREFMGYLGLVPSEHSSGNTKQRGRLTKAGNSHVRRILVEAAWNYRLPARIGESLQPRLEGQPKHIVDIAWKAQLRLCHRFRRLRARGLHQNKTCAAIARELCGFIWDIGTRLQPSCALV

SEQ ID NO: 510315 - protein, 321 aa, unidentified
MHLGIDVSKHRLDYCLLLNNGKMAEITIDNDLEGYVRLRKWLQAHDAEDDLNICMEYTGIYYEQAAEYFSRFYTVSVVNPYWIKSFGMAVFKRSKTDKQDAKLIAQYSKMVQPEPWQPLTEKQRQLRDLNRYLIRLKRQRAAEETKRQTAPDYLQGYLNQNIAHLDEQVKAVNWQIKQLPKQDKEHSDKIKRLQTIPGIGLTSATILFTLLQDGRFSKASELVAYLGLDPRHQQSGSSLNKLSRISKFGQNDLRAALFMPAMVAYRDNAFPAFIARLRQKRKPPKVIIVALMRKLAVIAFHLVKTGQDFEPKRYQAGINSE

SEQ ID NO: 510316 - protein, 369 aa, unidentified
MKHSTIFVGLDVHKDSIDIALADDGRNGEIRFYGTIGGDLDSLDKAIRKFRRAGTELRFVYEAGPCGYEIYRHLTAQGFHCDVIAPSMTPKKSGDRVKTDRRDAVTLARLFRAGELTPVYVPREDDEAMRDLVRSREDAVNATRKARQRLSVFVLRHGFRYSGRNAWSVAHLRWLADITMPHPAQQIALQEYIHSIEECSERVDRLTEQIWNLISTWRMAPIVTAFQSLRGVAPIVATTMVVEIGDLRRFDNPRQLMAYLGLVPSENSSGQTTKRGGITKTGNCHARRALIEAAQAYSFPARVSRVLRKRHENLPREIKEISWKAQVRLCGRFRKLMAKGKNRNRTVTAIARERSGFMWAIAKEVPMSA

SEQ ID NO: 510317 - protein, 407 aa, unidentified
MDIVHPKCAGLDVHAQTVVACARLGSGKAVTYDRRTFGTTTPELLALSDWLTAHGCTHVAMESSGVYWKPVWHVLDGHVELVLANAMHIRNIPGRKSDVNDATWIADLLAHGLIRGSFVPPGPVQELRDLTRTRKQLVRAIAQHTLRIQKTLETANVKLTSVLADVLGVSGRAILAALVAGESQPERLAALASDKVKASRAELTAALHGRVTAHHRFMLKLHLGQIEALEAAVRDVEARLGEALAPFRAAVDHLITMPGVSETVARVIVAEIGFDMTRFPSAAHLVSWAGLCPRLHESAGKRLSTRTRSSNPWLKTTLVQAAWSAARKKDSYLRAQFLRIKSRRGPKKAVLAVAASMLTAAYYMLRDGADYRDLGADHFDRRDKAKLAQRLIARLHDLGLVVDVRAA

SEQ ID NO: 510318 - protein, 295 aa, unidentified
MEKSSTAFVGMDVHKESIDIAIADGKEARAYGRVGGDAAAVDRAVRKLRSVHRDPVFVYEAGPCGFWIYRRLRAQGLSCMVVSPSMTPRRAGDRVKTDRRDAMALARLARAGELEPIYVPDARDEAVRDLVRAREDAVCMQRQARQRLQALLLRNEIRYVGKSSWTQAHRRWISHLKLPDPAQQIAFEEYVQAVEEAGARLERLAAAIGAQLEHWRWRPVIEALQALRGISAIHAVRIVAELGDFNRFEAPRKLMGYLGMIPSEDSSGPRRRQGSITIPCNLPGTCSCHNTPPSC

SEQ ID NO: 510319 - protein, 344 aa, unidentified
MAEANTLTVGIDLGDQFSQVCVLDREGQVIEEGKIGTTEEAFRGRMAGMDPCLTVMEVGTHSPWVSRLLRSMGHECLVANPASLHRRGRKKSDRIDAEKLARWARSDPEMLGPVQHPSADIQADMAVVHSRRALVEARTKLINRTRGLVKSWGTRLPRCDADYFCQRAAAHVPPELRTAAEPLLEIIASLTAQIGVLDRQIETLAVNKYGEVTRRLTQVKGVGTITALTYVLTVREPERFPKSRQAGPYLGLTPRLDQSGESDIEHSISKAGNAYMRILLVQAAHHVLERGPDTDIKRWGLRKAEGGKRAKRRAVVAVARKLAVLLHHLWRSGEDYQPLRQATA

SEQ ID NO: 510320 - protein, 367 aa, unidentified
MKKNSTVKQSPKRAGVLARGPITIGLDLGDKTSRYCVLDENGEVEAEGSVATTKKGMAAKFGCLGRCRMALEVGTHSPWLSRLLSSLGHEVIVANARQVRLISASSRKDDRIDAQTLARLARVDPQLLRPIRHRGEKAQRDLLVIRVRSALVEARTSLVNAARGLAKAMGERLPCCDAGSLGVERLESLPEKLREPLRPLLQEVESLTEKIQELDRKVEQIARTEYPETQLLRQVCGVGPLIALTFVLTLEDPSRFEKSRDVGCYVGLRPKRSESGESQPQLRITKEGDIYLRKLLVQGAHCLLSRRGPDTDLKRWGLKLAERGGKNAKKRAVVAVARKLAVLLHRLWVTGEVYEPLRNSAAKKAAA

SEQ ID NO: 510321 - protein, 374 aa, unidentified
MEKDSTAYVALDTSKLRNAVAIAAEGRDGEVRYLGEIDNTPTATGKLVRKLAKRHPAVTFCYEAGPTGYGLYRQIKSLGHDCMVVAPSLIPQKPGDRVKTNRRDALSMARQLRAGDLTAVWVPDPHHEAVRDLTRARGAAVRDLRSKRQQVSALLLRLGQPYPGKTTWGKTHLAWLSSRKLDHLEQRIALEEMLHAVGQATDRIGRLEQAIRAAVPDWSLASTASALMALRGIDLIAATSLLAEIGDLTRFASPRELMAWLGMVPSEHSTGPRVRRGAITKAGNRRARSMLVECAWSYRHPPRVGADKLAKVAAAPPAVRDIAWKAQTRLSARYRALRRAGKPDNVAITAVARELAAFIWSVGLAVASGATPQA

SEQ ID NO: 510322 - protein, 338 aa, unidentified
MAIVNVGIDLAKNVFALHGVNEIGQMDLRRPSVPRAKLHELVAVLPPCTIGMEACSGAHHWARLFVQHGHTVKLMAPKFVTPYRMSGKRGKTDAADAAAICEAVQRPNMRFVPVKTVEQQSRLMVHRTRQGFVEARTAIINRIRGLLAEFGIVLPQKAQVVRREAARHMDSLPGLGKIVIEDLLDEIRHLDERTKAYDAHVRSMARDCTAAQQLMQIIGIGEVTATAIVAMVGNAREFSSSRQFAAWLGLVPGQYSSGGKTRLGRITKAGDAYLRGLLVMGARAVLNAAGAKDDNVSRWAKNIALRRGYWKAVVAVAAKNARLAWAALTKGESFTMPV

SEQ ID NO: 510323 - protein, 392 aa, unidentified
MVILPGPAPAVAAGPLPPKRKDPAAVTIVAQAHPFVVGVDTHARTHALSILATPHGEVVDDGEFPATSAGMARAIEWAGRRTGGDLEVLWVIECAATYGAQLARAVSAAGYQVVEAARMNAKANRGIGKSDPLDARRIAAAVLPVQVDRQRHLRKDDGVRAGLRILMAARDHMTSERTATINALTALLRVLDLGIDARKPLTSKQIAEIAKWRTRTEDIQAVMARAEAVRLAKRTLDLDDELAANVKTTTALLKDSPARVLLDKPGIGPVTAAVALTAWSHVGRLHSEAAFASLAGVSPIPASSGNTVRHRLNRGGDRRLNKALHMAVIVRMTHDAGTKAYVERRVAEGLTKREIRRVLKRYLARQIHRALTAASRADDIAEDTIAGTPLSD

SEQ ID NO: 510324 - protein, 333 aa, unidentified
MSPLMDTNVVCASVGIDVAKATLDVVVHLAEQRSHRVFANTAAGCAALHCWLAALPAQQVRICLEATGSYSDALADYLYTHGYLLSVLNPAVLVAYRKSEQGHSKTDKLDAELLARSAQEKQPRLWHPLPADVLALRHLVRYRADVLPMLGQERTRLAANRLTDWSRAQIQQHVTHLHQLLLAAERQLKAHLKASEQLAPLWLRLQTIPGIGWVTAAFLLALLGDVARFPRGGALVSLAGLALKQHDSGSSVHRRACIDRQGHGELRQLLYWCAITAMRTDPQFQAFAQRLRERGKPTKVIIVAVMRKLLHIVSGVWKSQSDSDPSKVLGPVG

SEQ ID NO: 510325 - protein, 383 aa, unidentified
MSQVIMVGCDLHDRSMLLRMAAGSGEPEERSFANDGPGRVAMLEYLFAFARRHGSRRIVFVYEASGQGYGLYDLLTEQGIDCHVLSPSHLPKSAKRKKQKTDSKDAQMLLEQVRAHVLAGNSLPTVWTPPQALRNDRELVRARLETAEAQTRVKLQIFAMLKRFNVELPDWFRTNRSWTKRFVQWLRGQAQRLASVVIPVLEGQIVRFEMFQRQLVDFDRHLRHLSRSPLYRDACKALRELPGVGLLTAMTFLTEMGDMTRFDNRRQVAAYLGLCPSSSESGDADDRKGHITHQGPGRVRKVLCQAAWSAVRTDDVTRATWERIKRGSPKRGKKAIVAVMRQMAIRLWHVALSHGTPAEWLTPPLKPPRWLESSPAAAGTNAA

SEQ ID NO: 510326 - protein, 424 aa, unidentified
MLAHSLSPGGSRPQPRQPKEADKEMTNEAPRTALPPNASYFAGADVHNKTCDIALVDPEGKVVRRWHLKTCPAALDLFARELRKECGTTSVALGLEASTAGKAVFLHLRKLGLDVHMAHPRKLESIRSSESKTDRNDAEELARLLQSRHFPEAYVPTEEMDLLRSWVRVREEQVEKLRRVKTQVRSLLVKHHLQHEASKYSDIFGVQALHWLKGLELTNPADRRQLEILLEEGALLTEQVERLTKELAREALGHKEVELLQSIPGIDYVLALTILAEVGDVKRFPNRKKFAAYCGVVPKNRDSGGRVAAHASVRHGNPRLKWALDIAVQAHALRIRKGRLFTMFEALKARVGVPKALTAVAHRLAFVIYGIWKSGKSYDEGNPTSFDRKREKMKEKAEAKIEQPTIATSIGKLLSGTAPSGVAV

SEQ ID NO: 510327 - protein, 350 aa, unidentified
MPQLNVPRSAAVYGIDIGKNIFHVVGLGSDGVPVQKVRFRRDTLLQFFERAAPAIVGMESCAGSQWIARKIKALGHKVRLIPAQFVKPYVKSNKTDIIDAEAIAEAATRPTMRFAALKSEEQSDLQALHRVRDQMIGTRTRLINQMRAFCLEYGIALRQGAGLFKLDLPQVLEDKSNDLSSAMRKLLADLFADLRQLEQRIGDVTREIEAIASREDVARRLMTIPGIGALGATALLAAIGNGRQFQKARDLAAWLGLVPREYSTGGKQKLLGISKRGNRYVRKLLVHGARSCFRHLDRTRDRLGNWLDGLQARMHPNKAVVALAAKMARIVWVVLTKPGALYERRDPAFT

SEQ ID NO: 510328 - protein, 409 aa, unidentified
MRGRRCIGLDVHRDFCEVAIWEDGKVRSAGRVAARPEALAEYAAALRPTDWVALEATSGARQVAEILGPHVARVVIANTHRLAAISESKKKTDRNDARTLAQLLAAGVLEGAWLPDEPTRALRRRVSRRHNVVVARTRAKNEVMAVLHRNLSERPPMSDPFGVAGRRWLGSLELPDDEVETLSAALRQIDFLNQEIATLERELARFVSASVEARRLMTVPGVAMITAATFLAQIGEIDRFSSPKQLVGYLGLDPRVRQSGNGAAFTGRISKEGSVLVRHVMVESAHSATRTPGPLRAFYQRVRSRRGHAIAIVATARKMVTLFWHLLTRSEDYQHAIELPTTKKLRKVELLAGGPRRRAGGPAKGPNREQRLATDRAKAQHAEDQYRQLVANRTPPGRDQPQNQDQLRT

SEQ ID NO: 510329 - protein, 320 aa, unidentified
MAKIICGVDISSKVLDVFLNQSFHRFPNTVAGIADLLVLCQQHQVDLVAVEASGGYERRLYLQLWAAGLPVAICNARAVRDYAKSMGRLEKTDALDAAVIAEYAAAKKKLVAHPPQPGEHQQLRALVARLRQLTEVRASQLQQRLLVTDDEALATFTRLIGFLNSEIRQLEQRITQLIDADPLWQNLDRAFRSIKGVADRTVACLMAELPEIGTLSHKAISKLVGLAPLADDSGKRRGPRSIRGGRSTVRHLLFIVASVVRRYHPDFAEFSQRLAAKGKAKKVILVALAHKLLIRLNAKARDARQFLEMASPALTTTLSS

SEQ ID NO: 510330 - protein, 373 aa, unidentified
MPRYSTAFGMGVHLRSTTVCALDAETGEAVTRRFRGNPWGEVAEWMSGFPGPSLAAYESGYLGFAPQRELSALGVDCVVAAVSKVPRSAADLSSKNDRNDAARMAKAILSHDVTPVWVPSPEIEGLRDLAAAHDAATARLAAAKQRLLAFLARRGYVYGGTTPAGNPRRYWTYGFLRWLDGIRPADDGGIRALAALRNEVEAADETREALLAEYRAAVAAGPLSAEVEALQSIKGCGFALAAAFASEVGDFSRFRSGRQVTAYFGLAPKQRSSADSVRLGGISGAGNALVRRLAVEGSWSYVQASHQPKLMPKGSGVPLEVRMHGRKGSERLLRRREEMLERGMPQAKANAATAAELVRWLWALGAMCREAGE

SEQ ID NO: 510331 - protein, 411 aa, unidentified
MDKVYDKCCGIDVHKKLIVACFKKGNTQEIREFGATTRELLEMADWLKDGGCEMVAMESTASYWKPLYNIFESSDLNAIVVNARHMKAVPGRKTDVKDAEWIADLLTHGLLQASYIPDKDQRELRELVRYRKSLVGERNRELNRLQKMLEGANIKISGTITDINGKSARNILEHILSGKQIDSAEYDILYEKKVIAHNLKASKEQIIDDLNGVMSDIQRKMMRLLLKHLDELNAIIKELDDDIDSFMKPQEKQAAKVIQDIPGIANTSAQAIISVLGTDMERFPSDRHLASWAGLCPGDNESAKKRKSGKTRKGNALLRETLVICAHSAVRNKMSYFYAQFMRISAHRGKKRAYVAIAHTILIAIYHILKEGVTFKDLGADYYNQFNKERKINAYLKKLKALGWEAPVVAA

SEQ ID NO: 510332 - protein, 321 aa, unidentified
MNKYKEIYGIDISKDVFDVYGSKSGHNQFKNEAKGFVCFLKDLEKDVLIVMEATGYYHYRLAQFLYKSGVQVSVVNPLSVKRFIQMKLAKVKTDKSDAKAISEYGEMNDVPLYTALTDVQSECLQLFRLLDSYIKHRTATKNKLKGEEVLGIPSRFVYRSLTRNLKHLNKEVLALESRLLELVKQDQQHQLTLLKSIPGMGVKTALFLIVVTDGFKKFENASQLCSYVGITPTIRKSGSSVRGRSRISKVGNKKLRNLLFLCSFSACKHNKACREIYERLVAKGKSKKLALIAVGNKLLKQAFAIVKSGRPYDENFVSKLA

SEQ ID NO: 510333 - protein, 424 aa, unidentified
MKITFQTCCGVDVHKSFLVATIIKTSSGIEPSYQKRRFSTFNNSILEFKKWLLENECLYVCMESTGKYWIPVFNLLEDEINVTIANPKWVKAVKGNKDDTKDSKWIGDLFRLGLVRGSYIPCKKIRILREFTRYRYKLVSCRSSEKNRYQNALTVCNVALDSVVSDIFGKSSTSIIDYLLEQSGTSIDHEVIASKLLKRLKAKEDAVIESIEGYQMTDSQKYRMHLVRAHMDYITAAINDVDSEIESLIASDPDYENAVELLCTIPGVKYDSAITIISEIGIDMSQFCSSKRLCCWAGLTPGSNESAGKKKSVRITRAGVYLKPALVQCAHAAVKSDKSPYYKKKYESLVKRRGKKRAIIAIARMILTAIFQMLTTGETWNPCDLYKIDMPEALLEKQKQKAIKQAQKLLIREGLLPPTEPIAS

SEQ ID NO: 510334 - protein, 396 aa, unidentified
MCIRVSGAGRRRRKEVRTFSTMTTDLLGMRDWLLAERVSVVGMQATGAYWKPVFYLLEHDIECWLLNAWHMKAVPGRKTDVKDAQWIAELVEHGLVRPSFVPPEPIRQLRDLTRYRTEIIRERTREVQRLEKFLEDAGIKLSVVVSDLTGKSARAMLEALIAGQRDPQVLAELALGSMRGKRPVLAQALTGRFTAHHAFLTRAMLDRIDACVAMEQRLSVQIEQAMAPFRHQLDLITTIPGVSTRTAEVILAEIGADPGPFRTAADLASWAGMCPGNNQSGAATKPSPTRHGDPWLKAALGQAAVAASRTKGTYLATRYRRIATRRGKKRALVAVGHSILIAVWTMLTRDLPYHELGAEHFIERLGPHGKARQARRLIDQLHQLGYQVSLHPAQAA

SEQ ID NO: 510335 - protein, 425 aa, unidentified
MNSNRNQKINQVSEKRLVIGIDIAKRTHYACAVDERGRVLHKSFPFSQTREGFDAFYERLLALRATHEKSEILVGFEPTGHYWMNLAAYLQAHGIPFIMVNPHHVNRSKELDDNLQTKNDQKDALVIARLMRDGRFSYPRILEGVEAELRNGTTLRAKIQEDVNALQNRMIRWLDRFFPEFTQVFKNFGKMAYAALEKTPLPMDIQGKTPEELLFLYRQVDGMKSPQLPKAKQLVEVAQSSIGLTEGLVMARIEIATLLSQYQLMQAQLDELTVQLIELAKQMTDYAYLASVPGIGDVTIVELLSEVGSLTQYEHPRQLIKLAGLTLRENSSGQHKGQKRISKRGRRKLRALLFRVMIPLIRHNEAFKQLHDYYTTRTINPLRKKQSIVVLCGKLLKILHTLCKKKVHFDVSQMMKDLYCLGEAA

SEQ ID NO: 510336 - protein, 422 aa, unidentified
MLEETNDTEQIIQRVAALDIGKAQLVCCARVPSPDTPGKRLQEVKSYQTMTRSLLVLADRLAELGVTRVVMEATSDYWKSPFYLLEAYGFETWLVNARDVKHLPGRPKTDRLDAVWLAKVAERQMLRPSFVPPPPIRRLRDLTRYRADLVAVRTAEKNRVEKLLEDAQIKLSVVASDIFGVSGREMMAALIAGERDPKVLAQLARRRLRAKLSLLEEAFVGHFSNHHAFLLETMLSRIDQASADIAELDRKIEEQIAPFQAAADRLDEITGVGRAAAQVIIAEIGTDMSRFPTPGHLVSWARLAPGVKESAGKQKGKATTGHGNRYLARVLGEAAVAAGRTDTFLGERYRRIARRRGAKRAIVAVGRSILIIIWHLLSDPDARFHDLGPGFYQTRIDTERRKRNHIRQLEALGYTVTLQPAA

SEQ ID NO: 510337 - protein, 321 aa, unidentified
MEQPTFVGIDVSKDSLSIFVWGQPEVVEIANQANAIMQWLSSLPSQALIGLESTNTYHRLVAGLCVSTCRTVYLLQPRDMQSYRRTVSPRGKTDSIDAQVLARYIRHEHDSLRPWKPPTREQELLDGYLATRAFCAGQRASLGQVRKSNSAVAKILKDVEIAMDKAVKALDQVIQATAKRTPELMKGYTRMQSIDGIGPLNAAALGNMFSKYDFETVDAVVAYVGLDPRPLESGKFKGRRKLTKRGPSEIRRLLYNAAMAGAKPGKAWEATKEAYHKRELPNIAVGCIIARKILRIAWILWKREGETFEPSRIVAPMLKAA

SEQ ID NO: 510338 - protein, 406 aa, unidentified
MRVVYKHCCGLDVHKKNVTACILTPKGKEIRTFGTMSDDLMQMADWIKSRRCTHVAMESTGVYWKPIYNLLELEDLQVMVVNAQHIKAVPGRKTDVKDAEWIANLLRHGLLQGSFIPNREQRELRELVRYRRSLIDERSREVSRIQKVLEGANIKLSSVATDTLGVSGRAMIEAMIQGIEDPKELSELAKKRLKNKKDDLQRALQGQIGPHQKLMLEAQLKHIDFLDEQISKLDEEVKVRMLPFEQDLERLDTIPGVGRRNAEQILAEIGTDVKNQFPSAAHLCSWAGMAPGNNESAGKRKSGRTRKGNKKLRHALVEAARSAARTKNTFLSAQYHRIAARRGANRAAVAVGHTILTIIYYLLIRKQDYIELGAEFYDQRRKDIIIKQSIKRLESLGVKVSIQHSA

SEQ ID NO: 510339 - protein, 383 aa, unidentified
MPEHIRYLGLDVHKETIAVAIAEGEQAARSHGTINHRPEAVAKLIRKLGPVENLRCCYEAGPTGYGLYRQLVRMGVACIVVAPSLIPVKVGDQVKTDRRDAEKLARLLRSGELTAVWVPDEAHEALRDFTRLRESAKQDLHRVRQQLGKFLLRLSVVPPTRLSRWSKGYRAWLSSLQLPQALEQETLEAYLDHLDASGACLAKLNARLEELAVSHEQARLIQALACLHGVGLVTAITLVAELGDLSRFPTARALMGYVGLGPREHSSGGRVRRGGISKRGNSHARRVAVEASWHYRHAPGVGPALQRRRRHQPAGVLAIADKAHARLHRRYRKLLGRGKLPQQAVVAVARELLGFIWAIGRELAASRAAAPVEQAVPAAEEAA

SEQ ID NO: 510340 - protein, 341 aa, unidentified
MRKFIRIGVDLAKNVFQLHGIEREDGSPFQRKLTRVKFREFFSRLTPCRVGMEACGSAHYWARVLAAMGHEVVLIAPAYAKPYVKRGKNDAADAAAICEAMSRPDMRFVPVKSADQQAVLMLHKTRDLLVKQRTMSVNALRGHLQEFGLIAAKGIHRVEELVALAQADEGLPEEAKQAVALLAWQNEQLAMKIDGLEKTIAAASAKRPESRLLQEIPAIGPLIASAMAVSLPDPSVFKSGRHFAASLGLTPSQRSSGGKERLGAITKKGNRYLRKMLVVGCTSVLRVAHKRKGALAEWIVALKARKPERVAAVALANKLARICWAILSTGESFRKELYARG

SEQ ID NO: 510341 - protein, 482 aa, unidentified
MVVPNEQPKKPAKPKTAAKPKTSAKPRKSRGRSLPVPVPVSAAALNVINPDAAGIDVHSDMHMVCVPADRDPNPVRQFGANTADLQEIVAWLKKCRVRTVALESTGVYWIPLFELLESEGFEVKLVEPGQLSRCGARPKTDVLDAQWIQRLHSYGLLRGSFRPPDSVLALRAYWRQRQMQVRYAASHVQHMQKALEQMNIKLTEVVSSITGVTGMLIILAILSGERDPLKLAKLRDRRCFSSEDQIALALQGTWRPEHLFELRQAYDLYQFHHRQITECDNQIQAELAKFPNRAGEKTRTAQPRRNGRKSNDLRFDATGILFQALGVDLTLIEGIDVATALVILAEIGADVSRFPTEKHFASWLRLCPPQDESNNTKKRRGRNKNTNRVAMALRLAARAAGKTMTPIGLFYRRIRSRIGGLGAVKATAHKLACLIYRMLKYGQDYVVQSMEEYEGKIKINLLKSLERKAAALGYQLTPKPTP

SEQ ID NO: 510342 - protein, 350 aa, unidentified
MTTMTETRRQITGGVDTHRDVHVVAALDERGGLLDTNTFPATAEGYHDLLVWLGWFGPVDKVGVEGTGTYGAGLTRHLLDHDIEVIEVDRPNRQRRRRAGKSDTTDAISAARAALSGEASTTAKTRDGNVEKLRVLRVARRSIRQDRIRSLNQLRSLIVTAPPELRDQLGSLSSISVAQAVAKFRVADPTTSMGALKYAMRSLGRRAEALRWEGKEIDKIMRTIIEDTAPALIDQGGIGVDAAGALLVAAGDNPQRLHSEAAFVRLCGAAPLEASSGMVTRHRLSRAGNREANAALYRIIVNRMSNDDRTRAYAKRRRAEGKSNLEIIRALKRYVAREVYPLLGNNPLTT

SEQ ID NO: 510343 - protein, 442 aa, unidentified
MRFIGLDIHRDFCEVAIAAEGEVRSAGRIETAPAALELFAQSLGANDQVALEATGNALAIARILEPHVGRVVIANARALRALSSLKAKTDRLDARTLAELLAAGLLPAVWAGDEETRALRRRISRRAQLVKQRSRAKNEIHAVLTRNLKQRPPVSDLFGKGGRRWLATLELPLDERQTVDGCLRQVDFLDGELALIDRAIAEHALGSREIRRLMTIPGVDVTVAAAFMACVGDIARFPTPRHLVSYLGLDPKVRQSGIEPARHGRISKQGSSQARCMLVEAAWLAVRTPGPLRAFGERIRNRRGPQVATVAVARKLVVLAWHMLTSEQDYAFARPSLTRFKLRRLELRTGAERLTGRRPSVRIVPTPQQTAAEREVAAQAEATYRRLVKDWQQQAKSGAGAAPGRASLAARQGQAPDPALSLAVARAASDSRKGARNRPATT

SEQ ID NO: 510344 - protein, 389 aa, unidentified
MLLDHRSDEPTAIRTQFGAIFVSLELSRSTWLITSLSPGKGEKMSRHSIRAGDVAGLLTLFAELKRKAAIRTGQSYPIITIQEAGLDGFWLHRVLQQEGIESHVVDAASIATPRRQRRPKTDRLDGETLLRALLAYKRGEPRVCAMVVAPSPEEEDRRRLCRERQTLIAERITHVNRLKGLLFAQGVSDYAPLRRDRRARLEALRTGDGRELPSHLKMQISRELERLELLLDQIKAVEAEQAALLAAASQAAGQGKPGTPEAMLLAVKGIGPNFTDVLCSEGLHRQFANRRQVAAYAGLAATPWRSGALMHEQGVSKAGNPRLRTTMIQLAWLWLKHQPQSALTRWFKAQAGRGRKRTIVALARKLLVALWKYVAHGIVIEGAVMKQAA

SEQ ID NO: 510345 - protein, 345 aa, unidentified
MKITTIGIDLAKNVFQVHGVDEHGRAVFNKPLKREQMAAFFVNLPACLIGMEACGSAHHWARKLQGMGHTVRLMAPQFVKPYVKTNKSDAADAQAICEAVTRPSMRFVPIKNVEQQGVLALHRVRQGFVKARTAQANQIRGLLAEFGLIVPQGIGHISERVPELIEDACNELPGAFRRLVPRLLEHLKELDRQVQELEAQIVAWHRQSDLSRKLEQIPGIGPITACALVASLGDAKSFKDGRQVAAWLGLVPRQHSSGGKQNLLGISKRGDTYLRTLLIHGARSVIYHAQNKAADNPQCCWINGVVQRRNKNVAAAALANKNARIVWALLAHERSYEPGYVREPA

SEQ ID NO: 510346 - protein, 373 aa, unidentified
MYYTTLFVGMDVHKENFTVCCYDMIQDKIFYTQKLEPDYNQILKYLTFVRKAFRKDVDFVCGYEAGCLGFTLYHQLTQHGVSCVILAPTTMMKPAGKKKIKTDKRDAALIARCLVSNNFSPVHVPTTQDEEVKEFLRMRDDHRLALKKVKQQILAFCLRHGYSYTATKNHWTGAHIAWLRSLKPEGLYSEILSEYLLTFQALSDKLERLDQRIEELAAMKAYSEGVKKLSCFLGIKPHTALATMVEVGDFHRFASANQFASYIGLVPGEDSSSESVNRLGITKAGNAHVRTLLVEAAQSYTKGQVGYKSAALKKRQAGNTSEVIAYADRANERLRRKYYKMILSKSKRTNVAKTAVARELACFIWGMMTDRIA

SEQ ID NO: 510347 - protein, 446 aa, unidentified
MEVVFPYCAGLDVHKKRVTACRLVSDSTGQAPEGVAELQTFGTMTHELLALADWLVEAGVTHVAMESTGEYWKPVYNLLEGIVTIFLVNASHVKNVPGRKTDPADARWLAKLMRYGLLQASFIPPIAQRDLRDLTRYRTKLVQERAREVNRVQGVLERANIKLASVASDVLGVSGRAMLEALIAGQADPATMAALAKRRMRSKIPALEQALTGTVRDHHRCLLAMQLRHIDFLDEQIAALNSAIAQCVTTLSQEAVVSPAPPSSTTIDVPTPTEPPPPLTFTRAVELLDTIPGVNQRGAEMIIAEIGIDMARFGTAARLAAWSGVAPGNNESAGKQRSGKTRKGNQVLRAGLTQLAHGAVRTKGTYVSALYRRLAARRGKRRAILAVAHSIMGSVFHMLSRNEPYRELGASYFDERRRHYTVDRLTSRIEHLGYRVHLEPLPMAAA

SEQ ID NO: 510348 - protein, 358 aa, unidentified
MKYYISTTEFNCGIDLHARQMYVCVMDRAGTKLVHTNIQGNDFAYLLRRIEPYRHSLTIVCECTFNWYWLADACQREGLTFVLAHALYLKAIHGGKNKNDRIDSEKLAHLLRSNLIPPSYVYPGAKRPVRALLRQRLYYVWRRAELLARIQCHQLAEGHAPVKQSRPNRDPWAERLLAQCDNPLHKSALEIDLHMIRAYDEMLLRLERELLAATRQLASRDYALLNTVPGIGRSLALTILYEIDSIERFPTVKDFCSYCRLVKGSVASAGKLKGTRGAKLGNPYLRWAFGEAAVIGKRDHPLLRAYAQQLEAAHGKFRGNAILAHKLARAVYFMLKRGTGFDAEKLVATSTGGAMKAV

SEQ ID NO: 510349 - protein, 407 aa, unidentified
MNKLYIGIDVHLKQHVVSIVPIEVFQDNKTDWKKTKSITIGNNRHDFENLDRLIKSYRVSKDQVNIAIDHTGGHYSEPLSYYLKTKGYGVYFLGAASTKAAKEWLLGEENKTDKIDSATLSYLLYLRDFHENSLHLSVTSASFDSQSSLLRALLLQSNYYRKLAAQTTNRLRQYVHAVFPEAEERYFLQIVKVLQNHPTPGEIMSSPDVFKKSRIMQNSRKAILELAKQTVGIPGETYKYIIQDLAALRLLNMERMTAMDRNIRELVITHPYSSILMSFPCLKEKSAAIIISTVKDINNWSNKKKFKKGLGVYSTVRESGEKIIKFRRGMSGDRMCRHGLFMVCLANIHSKGDNDFKDFFDKQVLKGKPRIKALVATMGKLAEIIYHCLKFNEPYQYQLTNRSKHKN

SEQ ID NO: 510350 - protein, 413 aa, unidentified
MDVFCGIGWAEDHHDIALTDRDGRLLARRRISDDAAGLAVLLGLLAEHGDSAGDPVPVAIETPRGLLVACLRAAGRSVYPINPMAVARYRDRHSIAGRKSDHGDAVVLANILRTDLHAHRPLPADSELAQAIAVLARAQQDAVWDRTCAHNKLRSHLREYFPGFLAAFAEARGGIMRPEARTILAAAPDPATAARLTPTQLRALLRKAGRSRGVDPEATRLREAFRAPQMRQLPLVERAMGRQALALLRHLDAACASADDLEQSAVESFNQHPDAGIITSFPGLGALTGARVLAETGDDRSRFAGARGLKAYAGAAPITRASGKTLAVLHRRVKNQRLAAAGYLWAFSAITASPGARAHYDRRKADGDRHAAAQRNLFGRLLGCLHHCLATGQHYDEATAFPAPGEATRRAAA

SEQ ID NO: 510351 - protein, 343 aa, unidentified
MDQYIGLDVSLKDTAISIREDGKRIWRGNCPSDPKVLAQVIRKRAPHAKRVVFETGPLSTWFFHALTSEGVPAICIEARHAQKILNETLNKTDANDADGLAQLAEAGFYKAVRVKSFDAMLARTLVAARNQLLSISTQLSNQIRGLMKTFGLIVPKGTGRVFDNNVRELLDENDGLARIISPLLEAWRDIRKRAADLGRQLLVAARKSQATRLLMTIPGVGAVTAVSYVAAIEDPDNFRTSRAVGAWLGLTTRRYQSGEIDYGGHISRKGDNRLRGLLYETATVILTRTSARNESSLRSWGLKLRERVGFKRAAVAVARKVAVIMHSMLKTGEVFNTSAGATV

SEQ ID NO: 510352 - protein, 339 aa, unidentified
MQLYAGLDLHSRSTFVGILDQDLNRVFKKRIPNDLQRILADLEPFKKQLRGLVVESTYNWYWLVDGLMDAGFQKVCLANPSAIKQYEGIKYTDDQYDAFFLARLLILGILPQGYIYPKEDRAVRDLARKRMFLTQHRSAHMVSLKSLIERNCALRFTANQIRAMTVDQLRKLISDKHLLLNAKANLESVRFLSGQIRTIERAIVQQIKPKPSYDLLRTVPGIGTILAMTIMLEAGDIRRFPKVGNFTSYCRCVASQRLSAGKAKGSGNRKNGNRYLSWAFVEAAHLSRRFCNRFKRYYNRKAAQTNTSVATKALGNKLARICYYILRDQVPFREELIRG

SEQ ID NO: 510353 - protein, 346 aa, unidentified
MIIVGCDFHPSWQQVAIFDSLTGEIVESKLVNGNGEAERLYRSLPVPSLIGMESCGNSQWFIELVEQLGHTVWIGDAAQIRASYVRKQKTDRRDAAHILKLLMEGRFPRLWAPDAEVRDLRQLLIHRHKLVEIRTGVKNGLQHLALNRGLQRKTKLWSEAGQKALRELPLEGWAACRRKDLLRLRTVLDEQIGQLDEAVKHAADGNQQARLLMTQPGVGPITSLAFVLTIGDVARFKRGKQIASYLGLIPREHSSGGKQHLGAISKQGNRFTRTLLVEAAQSANRLDEGFRKQYQHRCHSKPKGVAKVAAARRLAVRLYWMLRSNMPYPEIVRIEGSSRSPMAGES

SEQ ID NO: 510354 - protein, 364 aa, unidentified
MKQKEKHNTIGLDLGERRHRFCVLDEAGEVVEQGSLSNERVALARLTQRYRGALVVMEAGTHSPWISRYLKELGSEVIVSNPRKVRAIYQHERKSDQRDAQMLARLGRMDRALLYPVRHCSEQAQQDLLRIKLRDSLVRARVGLINSVRFSLKSLGYTVRNSSSERFHKVVWETLPEAVRQMISPSVETLAELSARIKVLEREINLLAQSKYPQTLWLQQVPGVGALTALYFVLKIEDPQRFENVRDVGAYAGLCPRRDQSGGSDPQLRISKRGDPYLRRLLVSAAQYILGPFGPKSALRAYGLMLAADGGARAKKRAVVAVARKLAVLLLSLWKNRSHYEAFPHCQTIEDKRSGTIAIHRVEA

SEQ ID NO: 510355 - protein, 415 aa, unidentified
MNRLIERCAMLDIHKSQITACVRVPDGDGGRRQEIREFSTTTAGLLVLADWLRSYAVTVIGMESTGVYWRAVYYLLEDEFDCRLYNARHLRHVPGRKSDVQDAEWGCQLVEHGLVRPSFVPPRPLRELRDLVRYRKAKIQERVREVQRVEKTLQDAGIKLSSVASEVLGVSARRMLDALISGTNDPEILAELAKGALRKKIPALREALQGRFTGHHALLIGQMLAQIDFLDETIQTLSERIEELTRPFSRELELLDTIPGVDKRAAELILSEIGPDMSRFPTEHHLASWGGMCPGQRESGGKQHSAKTRKGSKWLRGTLTECAKGVVRTKGTYLSARYHRIKSRRGHAKATIATGHKILTAAYHVLNQGVPYHDLGEEFFYRRDTEATERYRRRLIKQLERLGHQVTLEPLPEAA

SEQ ID NO: 510356 - protein, 347 aa, unidentified
MLIIGCDFHPSFQQVAIFDNQSGEVQEKRLQHREEAEQFYRSLIGQKVRVGMEACGHYPWFERLLAECGHELWLGDAGAIRASVVRKQKTDRRDAEQVLDLLRQERFPRIWVPSLEERDVRQLLVHRHKQVQARTRIKNQLQAMALSQGVQKKRKLWAQAGRAELEQLELLPYAAQRRQQLLHELDQSESEIAQLNQQVEAEVRQRPAAMRLMTHPGVDPVTPLAMVLTLGPAERFRGGKEVASYFGLIPREHSSGGGQRLGHISKQGSSFLRFLLVEAGQSAARQDPQLGRFYRRLAVRKHRALAKVAVARKLAVRLYLMLREDWTYAQLCKAVVQVSPSHSVVES

SEQ ID NO: 510357 - protein, 362 aa, unidentified
MTETMTVAGLDVHARSTHAAAVHVPTGELVQIRFADGGVRGPIEWLGSLPGPVRACYEAGPTGFGLYRAAITAGIDMRVVAPGKTPRGRADRVKTDRKDAELLARLLLAGSLTTVVVPPPEVEAARELVRCHDAVRRDLMTARHRVSKHLLRHGRVYPGPSTWTIAHRTWLSGQQFEHTASELAFADEMAAIDGLSARKVALAERLSRVASDEQWWPTIARLRCFRGIDTLTALALHLELGGDWQRFPRAPALGSWLGLTPSLSQSGASSHSGQITKTGSTLARRLLVEAAWHYSRPPRIGATLANRQHGQPDHVLQIANRAQQRLHRVHRRMRARGKPGNVIVVACARELACFLWAAVTAD

SEQ ID NO: 510358 - protein, 408 aa, unidentified
MAQWAEETAMGDRKDIILAVDYHAQNIEYRWFNEATGEARRGRFPTSANAILVKIQEATGELSAGGKVVWIMESTTGWARVKDLIGERAKFILANVLQMPLPPKGRRRKTDKIDTGRILREYLNGELPTSFQPLSWWRQARRLVDCRQDLVERQTALRNWISSLLHQETWHDRKNLWSGKGLRRLQRIELACGDRELVQLKVEQLELLSRHQQLLEARMRELYDRWPEAQWVDEVRGIGMVSAVSILAHIGPIERFATAEDLISYAGLAPGLRQSDGTCHHGRIGGGGTDSHLRWLLIEASMWLCQIPRYHPTYQRVLAKKGKKIARIVVARMFLRSVHKMLQDQVRFDPLPAAPKNKDAFIASAPAGEVGQKRKARVQPGPFCRIGTGLALGSLASVALSSEPATTR

SEQ ID NO: 510359 - protein, 420 aa, unidentified
MTVDLERGYKHRELCGPKQYLNLLLRSILMIYVGIDVAKDKHDCFITNSDGEVLFQVFTIQNNREGFDGLFSRIQSVSHDMSNIKVGLEATGHYSYNLLGYLMDKGLTTFVINPLHTNLYRKSLSLRKTKTDKVDARTIALMLMSDVNLKSYSDTSYHNEELKSLTRYRFDKVQERARLKQSVSRLVTILFPELEKLVPTLHMASVYALLSELPSAGKIASCHLTHLTKLLEHASKGRYRREKAVEIREAARVSIGSNMPAKSLELKHTLKLIGELDSEISEIESEIKRIMDEIHSPILTIPGIGYRMGAMILAEIGDFSRFDSPDKILAYAGASPSTYQSGQLESSYSHMEKRGSRYLRFALINAAKYVCHWDETFGAYLQKKISEGKHYNVAITHVTKKLVRLIYAMEKSGKPYIKAE

SEQ ID NO: 510360 - protein, 429 aa, unidentified
MNSTQNKKIDQVKETTMIVGIDVGSEKHYFRAFNWRGIELTRKPVAFSNSMEGFNSFYNAIVELIQKSELEEALVGIEPTGHYWFDLGQFMGEKNIKFVMVNPHHVHKSKELDDNSPSKNDRKDPRVIAGLVRDGRYFYSYMPTGVYAELRNASNRRFVLVEEQTRAKNRLQKWIAVYFPEYKGIYTHIDAKGGLLVLKQAPTPEEIVRLGVEGIIKIWKDAKLRGNGHKKAMLILNAAMKSIGLKAGLTEARMEIQDLIEDYELQTKRLERVNDLIKELCQQVRYADKLLEIKGIGITTVAGFIAEVGDITRFDSTKELQKLAGLELVADSSGKHNGKTKISKRGRKRLRYLLFEAAISVVGKNEEFKEIHRYYTTREKNPLKKMQSLIVVACKLIRVFHAILTKGIRYDASKMLKDIRHPGEQLKAA

SEQ ID NO: 510361 - protein, 368 aa, unidentified
MRIIGCDLHARQQTLAMLDTRTGEVVKITLKHEGDSVREFYSRLPRPVRVGIEATGSMQWFLNLMEELEIECLVGHPAEIRAAEPRKQKHDRRDADLILKLLTENRFPAIWLPSKELQDLRSLLRHRHQWVRMRTRIQNALQSIALANGLRRGPSLWSRDGQSRIASLPLAPHTAYRRSELQAMYEKFEAEIEKLNQRVQEQACGRPGARLLMTHPGVGPVTALATDVFLGDPARFADSKALASYAGMIPREYSSGGRQRLGGLSKQGNPLLRFLWGEAGAHAVRRDPELQRFYRRKLVQKGLGKASVAVARKLGIRLWIMLRDQIEYHEFCRRGQKQQKSSGACAGMPETRYGAKSHRPVDKATRLP

SEQ ID NO: 510362 - protein, 468 aa, unidentified
MSRKGKRTKGSEQAHPFAGLSKVNPHAAGVDIGAEEIVVCVAANESTQLVRGFGNYTVDLHAIADWLSEHEVKTVAMESTGVYWIPLFEVLEGRGFECLLTLAPHASAGVSSRSLRRVSGRKSDITDAQWIQTLHSYGLLESSFRPQADLVGLRSLLRHRRSLIDHRSPHVLHMQKALLQMNIQLSQAVSDVTGVTGQAIMRAILAGVRDPQELAALREPGCKKSEEEIGKALTGTWREEHLFVLKQAVALYDFYTQQIQECDEEIERMYAETRPDWDGGELKPLPARKRNSHSKNRHHETEKIRGHLKRISGVDISLVDGMGVSLAQTVILECGTDMLKFPTEKHFGSWLGLAPKHEISGGKVLNNKTLKTKNRAGQAFRMAAQSVKQAECAFGVLYRRLRARLGPAQATVATAYAIARVVYRMLKYKVEYDPLSVNEYQQRYEEQQIKYMKKRAAKFGLQLVPVPA

SEQ ID NO: 510363 - protein, 344 aa, unidentified
MQITVLGIDLGKNSCSLIGLDEVGAVIKRRRMRPQSIAAFTRSLPACIVAMEACCGAHHLGRLLRSQGHKVRLMSPEYVRPYVKAQKNDDRDAEAIAEAATRPTMRFVELKSEEQLDMQTLHRARDRLVGERTALINQRRAILLERGSTVPQGRRRLEQYIAAMPGPERDVSLGPRIHRLIEDMRAEWLELDRRIAAFDNEFAACARNNADARRLATIPGIGVLNATALVAAVGNGQAFARGRDLAAWLGLVPRQVTTGGKARLVGITKRGNKYLRKLIIHGARSALPVLASNATPLGEWLRALIKRVHKNVAVVALANKLARIAWAVLRRGEEFDAAAVRVAV

SEQ ID NO: 510364 - protein, 347 aa, unidentified
MTIVENPDAVVGGVDTHADVHVAAVVNHLGGVLGVESFSTTSHGYRQLVSWLRSHGELVLVGVEGTGSYGVGVSRYLQREGVTVVEVDRPNRQTRHRKGKSDPVDALAAARAALSGSATGSPKSRNGNVEAIRVLMIARRSAVDTRIETLNQLRHVVFTATPEIRSKFTGLTAIGLVNKATALRPREGDDPVRYTTLVTLRALGHRVQYLREESKRLNRMLRPLIRQTAPTLLEVYGVGYDTAAKLLVAAGDNPERIRTEAAWANLCGAAPIPASSGKTKRHRLNRGGNRQANSALYHIVITRMRHDQKTRDYVARRLTEGKTMGEIARILKRYVAREVFKHLPHPA

SEQ ID NO: 510365 - protein, 348 aa, unidentified
MAMTIVEGPRTIVGGVDTHLDVHVAAALDPIGGVLGVESFVASPRGYRDLLEWLGGFGTVTKVGVEGTGAYGAGLGRFLHQAGVEVIEVDRPNRQMRRTTGKSDPADAVEAARAVLSGRATGAPKSRDGNVEAIRALLVAKRSAREGRLRAVHQMRQLSYTAPDQLRCRLKGLSTTEFVAEAASLRVRSETEPVIAATKAALASLGRRVHALEDEAATLDERLAELVTATGPALLELFGVGIDTAAMLLVAAGDNPERLRSEAAWAHLCGVAPIEASSGKVTRHRLNRGGDRNANQALWRIVMTRISFDPRTRAYMERRTKEGRSKREVIRVLKRYVAREVFKHLPRG

SEQ ID NO: 510366 - protein, 450 aa, unidentified
MSPSQAPSAPHPTSEFAALIGLDWADQKHCWKLLAAGSTEVESGLLLNTPEALQQWATGLYDRFAGRFVAIALEQSRGAVVFQLSKFPHVVVFPIHPTMAARYRQAFFSSGTKNDPLDSALLLELLVQHRDRLRRLTPDTPATRLLQLLVEHRRKLVDERTRQSNRLTAALKTFYPQALQWFDDIDSPLACAFLLRWPTLEAAQHSHPGTLRRFFTQRNCRSAERIRQRIEGIHQATPAVTDAALREAGTLIVSGILRVIHALNEAIAAVNTRLQSAAAEHPQAGIFAALPGAGEALLPRLIAAFGTQLERYASAAQLQCYSGIAPVRSQTGNTEMVSMRRACPKFLRQTFVEFAMQSVCKSVWARAFLDHQLAQKKSFNVAVRALAFKWIRILHACWRTQTPYDEQRYLQSLQKRNSPLARLLTASQPDPTGVEWNPVAGFQTLTLRKT

SEQ ID NO: 510367 - protein, 360 aa, unidentified
MGNGTFVGLDVHARSVVAGLIDEQSGEVRVKRVAHRTEELVSWLGDLDGPVRVAYEAGPTGFGLARACEAAGIACLVAAPSLIARSPAGRSRKSDASDAEHLARLLRAGELTPVRVPDPADEAARDLVRAREDARADLMRTRHRLSKLLLRHGLVYESGRAWTGAHDAWLRRQRLEHPGTRAAFDDYYAAVLGAGLRRERLDEQIAQMATDPRFAPVVGRLSCLRGVGTLTAFALAVEIGDFHRLSGATIGAYLGLTPSESQSGSRRVRGPITKAGNSHARRLLVEAAWHHRPPVRPSAVIERRRASQRPEVAARAEQAGLRLHHRRHQLERRRGLRSTVVATAVARELAGWCWSLALME

SEQ ID NO: 510368 - protein, 412 aa, unidentified
MLFVGDDWAEDHHDVEIVADDGRRLVTKRLPEGLEGITRLHGLIAGCMPQEWADLEPGEAAALVKVGIETDRGPWVAALVAAGYEVFAINPKSSAHYRELHTSSGAKSDRGDAHVLAEIVRLDRAHHRPVAADSANGESVKLVARAHQSMVWERTRHVLRLRSALREFFPAALAAYGDLDEPDTLQLLTIAPDPEVAARLSTAKISAVLARANRRNVAARAQQMQTVLRAPALRQPGPVQAAFAAIAASEVRMITALNTEIAVLGQVVADHFGRHRDADIYLSQPGLGVILASRVLGEFGDDPDRYADAKARRNYAGTSPITKASGTKKVVLARYARNTRIADATHQWAFGSLRGSPGARAYYDELKARKVGHRAALRQLSNRWVGILHGCLKTQTLYDEKTAWGHRNTTAA

SEQ ID NO: 510369 - protein, 376 aa, unidentified
MNYSTVYVGMDVHKETFSLCCFTNEKEEAEYPQKVKGHYSKVLNYIEAMRFHYGDNALFICGYEAGCLGFTLYHQLTAHGVKCIILAPTTMSQPKGKKKIKTDKRDAKLIARCLAHHDYSPVHIPTEQDEQIKEYIRMRDDHKLALKKVKQQILSFCLRHNYRFDGTSKHWTQTHLKWLNSLQPEGLYREILREYLLTYVQLVEKLERLDRRIEELASEETYKEKVSKLSCFIGVKTITALAVLTEVGDFKRFASAQQFSSYLGLTPGEDSTSDNQNRLSITKAGNRHVRLLLVEAAQSFARGQVGYKSRLLKIRQEGNLPEVIAYADKANERLRRRYYRMVLRNNKKPNVAKIAIARELACFIWGMLTGRITALP

SEQ ID NO: 510370 - protein, 418 aa, unidentified
MAIQPRPFGADTLVVGVDIAKSTQVAVAQDPDHTFSKAFTFTNSRSGFEAFAAWLEAAKAKAGTPMVVVALEPTGHYWKPLGEFLRGLGIEIRMVSTVLTKRAKYMLDGSPLKTDAKDARVIADLARMGKSRPQYVHGAAVQELRYLVELRERVVRDRTATVNRLHRLLDLLFPELLGMFSRIDCKALLALLEVAPTPTAALQAGAQKLAAVLDRASKNYHGAAKALEIVAAARSSIGCTEGAAPLVFEVLLAVPRIRELDAVLAAIEHELAEVLEQIDYGPLLLSIPGFGVVTASVVVAELGDLRLYRHSRQAIKMAGLNLFERSSGNNRGQKRITKRGRALLRKILYLAVLRQMRPQGIYFDFTKKHAPSKPKPRIVVAAMRRLLRLIFAIVRDGKAYQRPSTSPREDLVGLPQAA

SEQ ID NO: 510371 - protein, 436 aa, unidentified
MPESIPYLSVGLDVGADFTWMSIMLPNGILTGKPFKIIHSDPESRELAVKKIKEAQEMYSLESRCFLESTGIYHIPLLCFLRDQGFDCSVINPIITKNSTNMNIRKLHNDKFDSKKAAKVGLDASLKTSIVPDDAVIDLRNLVRDYYYFKDLQSAVVLKLHAELKMSFPAYLGVFSKVTTQTSLKLLEAYPLAVDMLAAPKDELVETIRSTARFGEKYALAKYDALCSAAKDAAVFGRALPSNALRIRMYIKIYREYQAHLDSILKELHKAVGKLEGTPVYERISLLQSLQGVGFLSAVVLIAEMGSFDLFSSPKKLYAYFGLDPAVKQSGKFNGDKVHMSKRGSSLARRILHMVALNNLKVDKGAKTPVNPVIHSYYASKCKSKKKNVAVGAVMHKICNIIFAMLRDNKPFELITPEEHCERYAAEHPESVNNAA

SEQ ID NO: 510372 - protein, 358 aa, unidentified
MKRNTKYVGLDVHQATTVASVREAGGRVIARSILATDGHAIREFFAGMRGTIHVAFEEGTQAQWLYDLLTPQVDRVLVCDRRGEKRTGNKADRVDADGISEQLRCGTLRSVYHGNRHQADLKELTRAYRSLVEDGTRVMLRLKALYRARAVRSRGTGVYQPSNREQWIGRLPERGARLRAETLYAELDLIRTLRAKTKAAMVAEARRDPAWSVLDSVPFFGPVRISLLIATIGTPWRFRTKRNLWAYAGLAVVTHSSADYEFVDGRPRRRTRRPLTRGLNRNYNRVLKGVLKGAATAATARPGPFQDFYHELLARGMREELARVTLTRKIAALTLRIWKTGERFDPTQLNQTQARTTR

SEQ ID NO: 510373 - protein, 341 aa, unidentified
MTEVSTIGLDLAKNVFQAHAASASGAILFRKKLRRDQVLAFFATQPRCLVAMEACASAHYWAREIAKLGHAVRLIAPTYVKPFVKRQKNNAADAEAICEAAQRPTMRFVAVKSEAKQASAVVFRTRDLLVGQRTQIINAIRGHLAEYGLIAPQGPSQIDQLIAQIEDPSSDIPDPARSCLAVLVETLRALQGKIAALDTEIAARAKRDDGARRLMSIPGIGPLIATAIEALAPPVETFRSGRDFAAWVGLTPLQRSTGAQERLGKISRMGERTLRRLLIIGASGVVRWARRKGVPAGSWLARMLARKPPMLVIVALANKMARIAWALIAKGGSYRAPAVAA

SEQ ID NO: 510374 - protein, 371 aa, unidentified
MKNHSIFIGMDVHKNSIDIAIAEQGREGRVRHYGKIDGTLAALDKVVRKLVSKGSQLHFVYEAGPCGYQIYRHLSAQGLDCAVVAPSRIPKQSGNQIKNDRRDALMLARSHRSGDLTAVYVPRAEDEAIRDLTRAREDAKSDERKSKQRLLAFLLRSGIRYTGGSPWSKAHMRWLSDIKMPHRSQQVVLQEYIDTVNQCKQRVERLTEQLQQILPEWQLFPIVQALQSMRGVSTIVAATTVAEVGDLKRFQTPSELMSYLGLVPSEHSSGQKTKRGSITKAGNGHVRRVLTEAAWSYHLPARVSRALLKRQEDLPESVCEIAWKAQLRLCSRYRRLWNKGKAKQVVVTAIARELCGFMWAIANEIETPANA

SEQ ID NO: 510375 - protein, 349 aa, unidentified
MIARSDAACFVGIDLHKDTLTACVVRRTDREVTYKKIACKCREQVREFFSSLPRPSVVAIETVGFYRWLWTELEPLVDQLVLCDARGARALAGRRIKTDREDALNVALLLADGRLPLAWAPPEQVQLLRNWTRHRNGLTRQHAKVLHHVKSTLHRLNFAGPVRLDAAALQRYLLASVERFCGDDLTMLWQHQRRLVEIEQDRAQSERRISELMRAAEFAGLRGILESVPGVGLVTSATVIAEIGDFSRFGDSKAIGRYAGLAPTVYASGNSNRLGHISKTGSPDLRWVLQQAAWTAIRCDAAFKKTWLRIAKTAGKKAAAVAIARKILVLMWTLVRKDEPYKAREPVAA

SEQ ID NO: 510376 - protein, 425 aa, unidentified
MEHERVDYAAWIGLDWGSYKHALCLKPADSSSVERCTLEQKPEALHQWFMNLRARFGERKVAVAIEQTRGAVINFLLGFDFVHVFRIHPKSLKNYRDALHPSGAKDDPTDAELLLQFVTLHQDKLKPWVPGEPEIRMLLRLVEFRRKIVGKRVRLTNELTQVLKEYFPGALDWAGELDKVMACDFLLKWPTLEKLQKSKPEAIRRFYQEHGSRRSKVIEDRLRQIRSALPLTRDEPVIETSVLMVKSLAPQLHSVFDAIAQFDERIKQVFQKHPDAQIFSSFPGAGPSLAPRLLAAMGSDRSRFNSSAEVAEYSGIAPVTERSGKANWVHRRFACSRFVRQSFHEFAGQSILQCGWARAYYDQKRTDGKRHHAALRALAYRWIRIIYRCWKDRVPYNEQTYMESLRRKRPSWLAPLVAVSESLKT

SEQ ID NO: 510377 - protein, 372 aa, unidentified
MSKIIRIGMDTSKSVFQLHGVDAAEQPVLRKKLRRIQVLTFFGKLEPTLIGLEACGGAHYWARELIALGHKAILLPPQYVKPYVKRNKNDTADAEAICEAMSRPTMRFVPVKTAEQQAALMLEGMRGSLIRRRTQLCNMIRGYAAEFGLAAAKGLDKMEPLLARIASEQTLPALAKELFATHRKEYERLEIAKIEAKLLAWHKDNELSRRLVKIPGIGPIGASLMAMKVADPGAYRSGRDFSAWIGLTPKDHSTAGKKRLGVITRAGDERLRSVLVVGATAVIKLARRGNGQASPWVLALLKRKPPKLAAVALASKNARVAWKLMVSGEHYNPARYGAVAAPAGVPGEGLGAALAGATRRAPRLACAAGLGR

SEQ ID NO: 510378 - protein, 384 aa, unidentified
MKVVCGLDVHKDSVFCCILCANGEKIQHKFGVLTEELVTLRDLMVSEGVEECAMESTSIYWIPIWRVLEGSVKLHLVNPYFIKQLPGKKSDVNDAEWIATCLSKELIASSFVPDDKIQRLRQYDRRIFDLNASISRNLVKLDQCIQRCNIRISNYISTTDSKGYRSIVKLISQGVTDAEVLVKELHGRTINRHGRETLVKALTGVVSETDIDIINQLVEEIELQQRHKDEAQEKMTALCMEWFPQEVENLQTIPGVKERSATSIIAEIGTDMTHFQTPKKLVSWVGLRPRNEESAGKIKARGITHGNRFVRKTMIECSWGAARMKESFFAEFSYRQCIERRKNKMKVQVAIARKILVAVWYVLSQGTQYIKPTDHYTAAHMTAV

SEQ ID NO: 510379 - protein, 321 aa, unidentified
METQEQRLVLGVDVSKQTLDCATWPATNVWQEGRDAAGIARLVQWAIEHAVRLVVLEATGGLEIDVAAELARAGVPVAVVNPRQTQRFAQALGILAKTDQVDAGVLARFGAMTGIEPRPLKDEVLRELDEVVARRRQLVEMLTMEKNRLASARDPRVCKNLKAHIAWLEKRQSDLDNELRQRIKDSPVWKAKDDLLQSVKGIGDVNAATLIAELPELGRLNRKQIAALVGVAPFNHDSGKHKGKRSIWGGRATVRHALYMATQSAQRYNPQIKAMSDRLTAKGKVPKVVIVACMRKLLTILNAVMRTKQPWNPQHIVIQTA

SEQ ID NO: 510380 - protein, 407 aa, unidentified
MNAVGIDVSKGKSMMAALRPMGEVALPPKEYSHTEVGLERMALDILALGEDTRALMEATGRYHEPVAAALHEYGIRVTVLNPLFIKQSGGGSIRKVKTDKADAVKIAKYALDNWVDLREYTPMEAVREQLKLCSRQYNLYMKNVVVLQNNLISLTDKVFPGVNELFTSPERADGSQKWIDFVTTFWHCECICLASETAFTERYRKWCKRKGYQFSAQKAAELYMDSMGHITTLPRNSNTKLLITTAAKELASAKATLAVLRAEMTRLAQQLPEYETVRAMYGVGETTAVQLMAEIGDVRRFPRRSSIVSFAGVDPAVDDSGKHISKSNPTTKRGSPHLRKTLYQVVRTYLRKAPVDEPVYQFLDKKRAEGKPYFVYMTAAQNKFLRIYYARVKECLIAADTKELSEN

SEQ ID NO: 510381 - protein, 343 aa, unidentified
MLTITTIGLDIAKSVFQVHGVDAGGQAIIRRQLKRRYVLTFFQKLSPCLVGIEACASAHHWSRELQALGHTVRLMPPAYVKPYVKRQKNDATDAEAICEAVTRANMRFVPTKTPEQQSGLVLHRTRHLFIRQQTSVINAIRAHLAEFGIVAPVGRRGVEELLNVVADPNDRRVPEIARACLSALGAQLRRMKEQILEFDRLIRAWHRSNEMSMRLEEAPGVGPVLATALVAAVADPKSFRSGRNFSAWIGMVPKQHSSGGKNRLGNISKQGDRYLRGLFVAGALSVIRYAKVHGTKHRPWLTALLTRRPTKVAAIALANKIARMVWAMMATGERYKEPVALAR

SEQ ID NO: 510382 - protein, 427 aa, unidentified
MLKIVRPICCGVDVHKRFIVATIGITDEHGVTTYKTQNFYTHNKDINSFKDWLISNDCHDVCMESTGKYWIPIFNILEDSFNVTIANPKYIKAVKGKKTDKKDSIWITDLFKHDLCPGSFIPPKSTRNLRELLRYRFKLVNMSSSEKNRIQNSLTISNITLDSVLTDLFGKSATLILDYILSLEKSEDFNEDYCKSLLQKSAKAKSDDIITSIQGFSIPDSTIVKLKSSRQHLVSIKNTINKIDDEIDRIIDSEYRTYVDLALTIPGISETSAKIVVSEIGIDMSHFSTSKKLCNWAGLTPQNNESAGKKKSTRVSRAGVYLKPTLVQCANAAIKSTKEPYFRNKYLKIKKRRGHKKAIIAIARMMLTCIYHMFQTGEIFNPVDINYSDIPEEVLESKREQIIDNAVKTLSKLGIDTSILNLTPANI

SEQ ID NO: 510383 - protein, 324 aa, unidentified
MSQYAGIDVSKDSLDVVLMDETGRTEYIQVVNDEGGYAKLRSWLKKQRGEGCRVCLEATGRYSEGIAEDLWAAGYGVSVVNPARIRGYADSQLRRNKTDKLDAWLIADFCRTQQPEVWTPPPPEIRQLQAMVRHLVNLEDAKQQANNRLRDKAALPELVVDQLSAQATLLGQHIQQLKQAIQDHIDQHPHLKQQRDLIDSIPGLGPLTAAKLIAECRSLTAFDDVRQLVAFAGLNPAHHQSGSSIRKKTTISKTGNAAIRAALYMPAVSAKRHNPILRAFAQRLLDKGLCPMAVITAVMRKLLHLIFGILKSGRPFDPNFHFAS

SEQ ID NO: 510384 - protein, 409 aa, unidentified
MEVVHEVCCGLDVHKKSVTACVLWASGRRRQTRAFGTFTRELLELGDWLRACGVTHVAMESTGVYWKPVWNLLEGQFEMLLVNAQHIKAVPGRKTDQKDSEWIADLLQHGLLRASFVPPTPIRELRDLTRYRASLAQEINRIANRIQKVLEDANIKLASVATDTLGASGRAMLEAIIQGEQDSQHLAEMAHGKLRNKIPELQEALQGRVTAHHRFLLRELLDHFYFVESKMQRIEQEVAERLGPFQSEVARLCTIPGVDRVTAWGLLAEIGMSMKQFPDAQHLASWAGLCPGSHESAGKRKSGKIRKGSLWLRRCLCQGAWAVSTKKNNYLSALYRRLAVRRGSKRATIAVAHKLLVIAYYILRDGTCYSDLGADYFDRLNPEGLRRRLTKRLEGLGFKVTVEPLAQVA

SEQ ID NO: 510385 - protein, 398 aa, unidentified
MGSRDNAVYIMMPDGSKHSSFSVQNTLGGAQTLSKRVVSALLVTDLNKVAIGMEATSVYGDNLMCFLREDGALARFERKLHVLNPKQVKKFKDVHPDLPKNDPVDAFVIADNLRFGRIANPVYLDDYRYKALQQLTRARFFAVQNLTREKQRFMNSLFMKCSGLAQDKVFSDNYGATALAVFEVFETPDDIVNMDIEDLTAFIAEQGKNRSPCPDEIAKAVQAAAKGSYRLPKTVNDSVHQVMSISISSMRAMKAQIKALEKEIDRQFVNIPNTLISIPGFGPVFSAGIIAEVGDINRFDGQAGLAKYAGLAWNQYQSGTFEGQNTRLIKSGNRFLKYYLCEAANSLVRCDTEYRRFYDLKYAEVNKYQHKRALALTARKLVRLVFRLLKDNRLYISV

SEQ ID NO: 510386 - protein, 352 aa, unidentified
MEKYIGIDVHSESCTIAVMNSAGRQLRQQVVDTQAKVLIEFLKGLAGNRYVCIEEGQLAEWLVETLEPYAKEIAVVQPKAHQGHKSDAADAWALAEQLRVRAKGVYVFKPTRQYRPLREAVRTHGIAVKDMTRAKNRFRSLLRARGVANFDSSIYEAEQRSAWIRKLPAAYRRRAEWLGKQIDSRVEAHGIAESWLKEEAEKCPEVERLQTLPGFGPIRAAQVVALVVTPHRFRTTRQFWNYCGLAIVTRASSEWKRDSSRDGWQHVRANVQTRGLNRNCCSQLKAVFKGAATTVIGKPNPLREHFEQLVANGTKVHLARLTIARRIAAATLAIWKKKEDYDPTKHQSIKPA

SEQ ID NO: 510387 - protein, 338 aa, unidentified
MTIEILGVDIAKNVFQLHGVNGKGSVVLKRRVMRDQLLEVLAQINRCTVVVEACTGAFYWARKFEALGHQVKIISPQYVKPFVRRQKNDSNDAEAICTAARQPHIPFVPKKTLEQQDIQALHRARQRMVNHRTAVVSQIRGLLLDRGFAMAKSITRARRLVPDILANSDNELTPMARDAIGELYDLFRDLDRRIASFDKKIEQVFRNSETCQRIATIKGVGPKTATAIIAAIGDGAEFKNGRHLAAWVGLVPRQFSSGDRKVLMGISKRGNQHLRSLLVHGARAVVRTAPDKTDLNNQWVNQLRDRRGFNRATIAVANKNARIIWAVLRTGEPYRAAF

SEQ ID NO: 510388 - protein, 369 aa, unidentified
MKKVGMDVGKKQSDCCVFDESGAVIERFQVRTTRSGLSAAFVHRERCLIGIESCRDAGWIDEHLKSLGHEVMVLDTTRSRAIGIGEGRRKSDRRDAEVIGRALVSGVAKPAHVLSAQRRRVRDALWGRDKLVSMRTRMVTMLRGQFQGRGLEAPQCKAEAFAARMRTCGSPLAEDPMVQSMVRVLDTLGAEIGVMNGHLAGLAQQDESFERLCSAPAVGLVTALAFAAAVDDAKRFEDAHAVEGYLGFGTSEYSTGGKRRTGRITRCGNPMARRMLVGAAQNLLRWHKTADDPLVVWAKQVAERRGKKRAVVGLARRLAGVLWAMMVDGTFYDPHGLARASWEGLTRRARRAQAEARAMKTTSEASAMA

SEQ ID NO: 510389 - protein, 482 aa, unidentified
MKKKTIFPYQSQELNTLFEEAGNNAKVMCIPIDYAKKEHVVMFCNGHGNILRKPFPIKNSPEGIEYLTQQVLSSCHHRGIDPRYAFFGGEDVGSYAENFINTLRSGGWVVAGVNAHDAKKQRANAQASTDALDLMGIASMLLNRRANCSPAQTGIYRNLRGLTRHRKKLVDMSTEEKNRIYTVVDQIFPGFLDEKNTGISPFSNSSLYLMADRFSPAQIRRRKRQKLIETLRKYGTVKPEVGADKLQLYAAHVLNTPTEYLSALQISLAQHIKHFKCLQESIEQLEKEMALWLAQTQGAFLTTLRGIGIVLAAGATAEIGDPTKQKPVANLVSYSGIIPRVKQTGGPEGQTRTGKVSKRCNRILKNYVVQSAHHIGLHGPEDLMADYKRRDANGQHADFGIGRRYIRTAMCLMRNSQIYIPKRLCSKGINPEERAGYFLMIWPSLRDKWAKLGALETAFTNDNPLGRWRNMVQELYEIKLKL

SEQ ID NO: 510390 - protein, 315 aa, unidentified
MSENQVEVFVGIDVSKSTLDVRIEPPGEAFQVANDDAGIRGLCTRLSELAPTLIVMEATGGLETRAAGELAARGLCLAVVNPRQVRDFAKASGQLAKTDRIDAHVLCGFARAIRPAARPMKEALTQELDALVSRRRQLVDMRVQEMLRLQGASTVPAKSVKAHIAWLDKRIKQIETDLGTRLRSCDAWRVKDDLLLSIPGVGEITSRSMLSRCPEIGQLSRREIAKLVGIAPLNNDSGKYRGQRHIWGGRADVRSVLYMAAVSAIRCNPVIKAFAAKLKSAGKAPKVVIVACMHKLLTIMNAMIKSNTPWTPKTP

SEQ ID NO: 510391 - protein, 401 aa, unidentified
MECIFGIDISKHTANVAVLIDRQVIKEFKLSSNREGFERLEDELNSFREPKIIFESTGIYSRPWRAFFHRNGWLYTEINPLKAKKVMDSFRIVKTDSVDAVGLAEAMSRNNFAPSFQEKPEYTELRDLHRIYQEHNDDVVRNKNRLHHELQLTFPEIEHFLSRTEGALYWHIVQIFPHPYLVLQHSSTELTSIILKATSKNMGPKRAQHLAEHLLELAKSSGPAVDIDSYALKRVTELAYEVERLDRSKESLIEEMAKIGTNLPEVAILTTIPGIALKSALCIIAELGDIRRFHSANAINAYIGIDLTTYQSGDYTAEQRIRKRGNPLARKVLYRTVINIISASSYRPTRFNDFYQMKKQSSQSKGTKKIAVAVMSRLNRTIFHLVLHNEVYEPTVSQPRQ

SEQ ID NO: 510392 - protein, 344 aa, unidentified
MPSIVGGLDIHRKQITFDYLDLATGEVGCGQVAPADRAHLRAWLARFEHPGEVAFAVEACTGWRYVTGELQRAGMEAHLAEPADTAAARGRKRRAKTDRADARLQRDLLIQDRLPECWIPPEHVLECRALLELYHDLRAEHTAWVQRVHAVLFHQGAPVFHDLSRAGAPAELAELAREHLSLAGQCQIGACLRMCDALEAELTAVRRRVIAAARHLRGAKVLAESVYGVGPVTALALTCWLGGAGRFSSARKAVRFAGLDITVYSSDGKRSPGHLSRQGPPVLRWAVYEAGKTHARSVAPDHGYYAAVKDRKDGKRAALSEARKIIRRACHILSELGDDALAVV

SEQ ID NO: 510393 - protein, 343 aa, unidentified
MTIVMIGIDLGKNSCSVAALDEQGAVVLRRRMRPASIASFAAKYMPCTVAMEACCGAHYLGRLLLAQGHTVKLMPPEYVRPYVKAQKNDDRDAEAIAEAATRPTMRFVELKSQEQLDIQSLHRVRSRLVRARTTLINQVRAVLLERGITAAQGRRKFEKALDEMLADDNLLVSSRLRDLLVDMRAEWAALDRRIDAQDQEFAQLARTDEVAKRLTTIPGIGALNATALVAAVGRAEAFGQARDLGAWLGLVPRQHTTGGKPRLLGISKRGNTYLRTLLIHGARAALPSLAKGDTALGEWLRGLQARCHHNTVVVALANKLARIVWVLMRRETVFLVQRAASVR

SEQ ID NO: 510394 - protein, 393 aa, unidentified
MYLVGIDIGKLKHSFCLLEKETGEILVEPVFFENNRDGFNALLSSFKHLPQKDILIGMEDTGHYNLALLKFLLDRNYQVALINPVATNLTRKMQGGISKNDKLDTLTICDVLSSNQRVKSYRISKYSSFDLYEQKQLTREHHNLKEEENQLSNRLQKCIDVVFPEFNSLFKSKYGIVYMNVLKEFGSADAIAHADIRTLRKCFDTGRGKHISLTAQELKEAARNSIGFPSSSEATQIKHLVARIELIKEQIAEIDKKIEEFSIQNNSPILSIPGISHFSGTSILAELGDIHNYSKPSQIIKFASVAPLTYESSQFTAQHTAITKKGCKYLRKTLYQIITPVIQYNPVFRKFYLLKIAQGKGHRCAQGHCVRKLMRVIYHLLSTGTQFDPALLR

SEQ ID NO: 510395 - protein, 348 aa, unidentified
MAHFVGLDVSVEETSVCVVDDVGKVLCERKVRTEPEDIAVLLTSIGGDYVRIGIEAGPLSQWLVNGLTEADLPVVCVETRHMKALLKAQQVNKSDRNDARGIAQMMRVGLFKPVHVKTLIAQEQRMLLTSRKLVQRKLMDIESDMRGTLRNFGLKVGAVSSIRYEARIRDLVEGFPRLAAIIEPLLTVRRVMRQQLAKLHKLLLNAVRVDPVCRRFMTVPGVGPIVALTYRASVDQPHRFIHSRAVGAHVGLTPKRHQSGEIDYDGGVSKCGDSMLRAMLYEAAQSMLTHSKKWSWLKAWGMRVAQRRGMGRAIVAVARRLAVILHRMWVDGTDFRWRNGSTAVVQVA

SEQ ID NO: 510396 - protein, 376 aa, unidentified
MEHNSEAFIGIDTSKLKNAVAIAEGGRDGEVRYLGEIETTDAATRKLLKKLATKYRKVTFCYEAGPTGYSLYRLIKSLGHDCSVVAPSLIPKKPGDRVKTNRRDAVGLAKNLRAGELTAVWVPDMRHEAMRDLSRAREAAVDDLKSKRQQISSLLLRLGLHYPGEKTWGKSHRNWLASLKLDQREQRIVLEELFGAERQAQERVDRLASAISDAVPEWSLAKIVTALMAVRGIDLVAAVTIMAELGDLSRFASPRELMAFLGLVPSESSTGDSVKRSGITKAGNRRARRILVESAWSYRYPPRISRDKLAKVAAAPEPARAIAWKAQTRLSSRFRALIKRGKRPTIVATAIARELCGFIWAIHRAVTAPGGRQLVS

SEQ ID NO: 510397 - protein, 412 aa, unidentified
MKQIRDRVGGLDVHRDVVVACARTQMPTGSVEVTKERFATTQTGLAELTAFLMDAGVTTVAMEATGIYWRTVYYALEGLFDELWLCNASHVKNVPGRKTDLSDAEWLADVAAHGMVRPSFVPPPEIRELRELTRYRKTQIDARGKEIQRLEKVLQDAGIKLTSVASSVWSKSSRAMVEALIAGERDPEVLAEMAKGVMRRKIDRLGVALEGNFGRHHALLCRQIIDHLDFLDRSIATLTEDICGRLVPFAPAVTLLTSIPGISETTAQVIVAETGADMSRFPTAGHLCAWAGVAPASHESAGKRRPAGTRHGAPHLRRTLIEAARAAARTKGSYYSALYSRIARRRGPNKAAVAVAHSILETAWHLLTNGALYEDPGADYFERRHDPAIEAKRLQRRIEALGFAVTLTEKAA

SEQ ID NO: 510398 - protein, 422 aa, unidentified
MSKKRNKVCGIDVHKRFLVASILDNEGNCETKRFEQDLDELISLKNWILDSGCESVAMESTAEYWRPAYGILNPEINITIGNAYHMKGIPGKKTDVLDSQWIAELELNNLITPSRVFTGDLYELRTLTRARNKMVNNSTVFKNKILHQLDVCSIRLCTVLKDVFGKSGYALLKGIVERKTQDEIIKALPAKTRKIAPVFFEQIPEYIPDSAIFLIDSMLKIYDNLQVEIKRIEERIKFYLKDKENELRILMSVPGIGIVIGSNLLAEIGDIRDFPTADKLAKWAGLTPSVYQSANTNYTGPITKQGSKYLRWALIEAAHSAIRRPGKLNDYFNGLLPRKGYKKAIVAVARKILRIVWHLLINNEIFEDGIPRVKTVKIPKFPEKIERVGIAKIIQLLSRGAEIIVQEEGKEIMRINGSSQLT

SEQ ID NO: 510399 - protein, 341 aa, unidentified
MSIITVGIDLAKNVFAVHGVDDNGKSVLVKPRVSREHLPGLIAQLPPCVIGMEACSGAHHWARLFRRHGHTVRLMAPKFVAPYRMSGRRGKNDAADAAAICEAVTRPKMRFVPIKEEHQQIILSLHRTRQGFVEERTATYNRLRGLISELGIVLPQKVAALRRDIVAHLEALPGWINQCVGDLLAHADALEARIAEYDRAIGQAAKDDARSRRLMQLPGIGPNTASALLASLGAGHDFRNGRQVAAWIGLTPGQYSSGGKARLGRITKAGDRYLRSLLVMGARAVLSGLGDKQDRFSRWARSLVERRGYWRAVVAIAAKNARLAWAVLKFGEDFRLYARAD

SEQ ID NO: 510400 - protein, 427 aa, unidentified
MPFAGLDVHKKEIEAVILDERGAVLLRDRFPSRREALQAFARRRLQDCRVALEATTNTWAVVGLLTPLVKEVVVSNPLRTRAIASAKIKTDKVDALVLAQLLRSDYLPRVWTPDEETRCMRQQTSERANLSADRTRLKNRIHAVLHQRLIEAPVKDLFSKAGLSWLCSLCLDAPGQRALEWHMRQLAQVETEFQLLDEELAAHAYQHPQIKLLMSLPGVDYPVAESLLAVLGDIARFPHPDKAAAYFGLAPSTHQSGSHCYHGRITKQGSAHGRWMLIQAAQHVARHPGPLGVFFRRLARKKNRNVAVVATARKLVTIAWHMLKDNQPYRYAQPKTVEAKYSRLRVRVTGKKRKTGCKGQKRPASYGSGKRTRAVAALDEIYAVEGLPPLPARFAAGEQAMLERHRVAEHAAYIRQAHRIARKSLTS

SEQ ID NO: 510401 - protein, 416 aa, unidentified
MDAIVERCAGLDVHLDTVVACVLYGKLDIKPKKEVKTFSTTTKGLLELLDFINQKECTHVAMESTGIYWKPVWNILESGAFDLIVANAKKIKNVPGRKTDVKDAEWIASLLRCGLIEKSFVPPERIRDLRDLTRLRKELLGEVNRNKNRIHKVLQDANIKISSVLSDVFGETGKSILNQIIGNQCITEEFIYSLYEGRGKSKLKSTPMEMYEALNGKIRGHHVILLGMHNSNIVFLEKQINELEKESDILLQKERDSLELLETIPGISKISASSIIAEIGTSMDVFKTEKHISSWAGLCPKNNESAGKKKRSGIKSWNNWLRSMLCECAWSATKKKDSRFKNKYWSMVPRMGRKKALIAIANMMLRLIYHLLKTKSTYKELEIQYFIDKDKRREDRIIKELKSKGYLVEKDSLQMA

SEQ ID NO: 510402 - protein, 354 aa, unidentified
MNKYSIKTFIGIDLGDIEDHICILDRNGEILERTSINNTVSGVNTFFDRFDSPKQVLVAVETGTHSPWISQLLKARGFRVLVGNSRKLRLIWDSSNKTDERDAEMLARIARFDPQLLSPIRHRSRTAHMDLSVIKGRDTLVRCRTNLINFVRGSCKTAGTRLPSCSADAFAKRVIEHIPKDLLAATVPCINTIMELTQKIRQFNSQIEALCDEAYPETMRLRQIKGVGPVTALAYVLTLEDPHRFRKSRDVGPYLGLVPKRDQSGCSDKPLSITKAGNIYLRRLLVNAAQYILGPFGPDCELRRHGLRIASRGGKVAKRKAVVAVARKLAVVMHHIWKNKTVYNSFHQTYLKAA

SEQ ID NO: 510403 - protein, 336 aa, unidentified
MDYYSAIDLHSNNSFLVVIDECDKIIYERRLPNDLDKILFVLACYKDHIRGIAVESTFNWYWLVDGLKAAGYALHLVNTTAVQTYSGLKYTDDKHDARWLAHLLRLEILPTGYIYPRETRPNRDLFRKRMQLVQQRTRNILSLKSLYARWLGASFSTNDFYRNPDEFLPKDKAISLIARPNIELFKLMTEQIITIEKMLLSKKFKQRELFLLIKTLPGIGDILAMTVLLEVGDITRFKSVGNFSSYSRCVESKKVSNFKKKGSGNRKCGNKYLSWAFHEAAHHARVFYPEVDKFYERKKRKTNRIVAIRAVAHKLARACYHVLDKQEAFDMSKAFN

SEQ ID NO: 510404 - protein, 323 aa, unidentified
MPSVIGIDIAKHTFDLATLQPNGKYRTKAKLANDKAGFAVLRDWLNKHSEPGAWVVMEATGIHHEALAEWLLEQGYRVCVLNPAQIAHYARSQLQRVKTDKVDAKLIAEYGERHQDELRPWQPEPRAVKRLKALVRRLGDLREIEQMERNRLEVADASVQASIQSVLEHVGQEIQETLKAIDDHIDNDPDLRGKRDLLTSIDGVADKTAALLLAELGDPLRFANSRAITAFAGLNPRLQEPGSYRGQTRISKMGSSRLRAGLYMPAISALTYNEAIRAMGERLRERGKTSKQIVCAAMRKLLSIAYGVLKSGQPFDAKLALAH

SEQ ID NO: 510405 - protein, 282 aa, unidentified
METTKFYLGIDVSKLWFDASLLTLVHHQKQPIITQRFDNSTDGMKTFKSWLKSNAVSYDENTLIVIENTGVYHRLIWSFCSKHNLNLHIGNAAHIKWSLGITRGKNDVIDSQRLCMYCYKQADELQATPPLNPIFIQLKDLMTSRTRLIAQLHSTKNYVKEIKSTNDIYLLNILEKSHKAAIDGIKKSITQIEAAIRKIVQEDEKIKANYELITSIPGIGEMTAIYIICCTTNFAAKISGKQLASYAGVVPFEHSSGTSIKGKNRVHKMANKELKRMLHMCA

SEQ ID NO: 510406 - protein, 390 aa, unidentified
MFYAGIDVAMDKHDCVVLDSDGDVVVEVFTFENSRDGFKTLKRVLQSCSKNPKKIKVGLEATGHYSDNLLVFLNKIGYDPVLFNPLHTNLFRKGLSLRKTKTDHVDAHTIATMLRTEDLKSYSQPSYHLSELKSLTRYRSNLVSDCSRCKVSLVRLCQILFPELKNIVPTLHMSSVYTLLSELPSADKIAKCNLTHLTALLSSASKGHYGRDKAVEIRELARTSIGIKSVVKELELQQTIDRIQVYLQQIEAVEEEINKIMEEMDSPITSIPGIANRMAAVILAETNNFQDFDRAEQVLAFAGLEPSVYQSGQLTSTHSKMVKRGSKYLRYAIFNATKYVCIWDPTFNAYLAKKRAEGKPYNVAVSHAAKKLTRVIFHLVKTNKEFVPQA

SEQ ID NO: 510407 - protein, 429 aa, unidentified
MGNTQAPTDKEEYAALIGMDWASEKHDVWIHDTDTGKDRHQVVNHTPEALAEWLGDLQARYPGRQIAVCLEQSRGALIYALMGYEFLTLYPMNPVTLARYREAFSPSRAKDDPSDAKLIAEILELHRDKLAVWKPDDEQTRSLGFLNESRRKAVDLRSKLELRLRAALKLYYPQAIEWVGVSLHTELASAWLLKWPTLEAVQKAKPEQIRSFYYKHNCRRPDYVQGCIAAVAAAKPLTRDAAVISVSSLNVQMLAQQIRLLNRAIKEYDQRIARLFKNHPNAFIFDSFPGAGPALAPRLVSAFGTDRDRLPSPKDMQTYSGIAPVIERSGKRTWTHWRWNSPKFLRQTFHEYAGNSIPYCAWARAYYERQKERGKGHHAAVRALAFKWIRILHRCWREGVPYDDERYMRTLQQRGSDLWTVMNRTPKEA

SEQ ID NO: 510408 - protein, 419 aa, unidentified
MESSRSKVCGIDVHKRFLVATILERNGPKKTEKFLNNLEHLLKLRAWIITEHCQAVAFESTGEYWVSLYDVLQGYVEIIVANSYHIKWIPGKKTDIIDSEWIAELALNDLISPSRILPKDMRDTRALTRLREKLVNERTDHKNRAHKVLDSACIRLSAYFTDLFGKSGLKILKCILSGVPPEEIARKLPKRLQARSDAILDAIRTQLSAHQLIQLQTSVTMIELLTGKIKELERTILNDLQKDRRKLQILMSIPGIGFVGATTILAEIGDVKDFSSPDKLTKWAGITPRVYQSADKLHTGSITKQGSKHLRWILVEVAHSCIRTKNTALRIFFDRIFNRSGYKKAIVALARKILKLVWHLLTNDELYEEKNTLLAKSCHLPIAIETGSFSVSAAIELLVKAGFQVIDGDDHPDKRVLGT

SEQ ID NO: 510409 - protein, 350 aa, unidentified
MDLRKQAIGIDISKQTFTACLGSLSQDSSIQLSPTETFDNSKRGFNRLLRWAKPMIAPDTPRVFLMESTGVYYQKLAHHLHRIGKTVHVVLPNKSAHYGKSLNVKTKTDSVDAQVLARFGLERSHKAWQPSSPVIAELRNLTRYYVQLQEQKTTVNNMVQSKQAAHHVQSFIISSNKQLIRQIDRQIQRCKQQIEQLITSDQGLSERVDQLASIKGVGRLTVAVILAETRMFEGIENIRQLASYAGYDVVERQSGTSVKGKTRISKKGNRYIRNALYFPAMVACRFNPDLKAFYQRVAQNKPSKMIAQVAVQRKLLVLMYSLYKNGTRYQPGYTKVASTQKDEATLDSTA

SEQ ID NO: 510410 - protein, 388 aa, unidentified
MIKQNLEGSNGGRTVVGIDPCSEFLQLAILAPRKKIKFKKLPLSPCITEEIAKSTDPATTQIAIESYGSYGKLFIYDLLKKGYDVREVNPHISKKLADLYSEEHSDQKDAESLAKALLFIPDLPRISITDKKQWLAKLTRTRRKLVKDLNGYLNRLHIALTESYGVVYKKLFRNLFAKKALKFFEDYPTINDSLSDRNARMKLREEKWTLLKQAGKWENEFYLETLKTEIRGLIEIIRSVNNTKLSIEEKIRETANQVEEMKILKTFPGIGGIAGATLLSEIGDIDRFEKESKLSAYCGVSPVIRQSGTGRIRTKRRKRYSRRLKGILYFISLSQIRINPESKAYYKRKKREGKTHRQAMNALSRQLIKIIYYMLKDKKPYVRPQIIN

SEQ ID NO: 510411 - protein, 351 aa, unidentified
MMIIGCDFHPRFQQISFLLEETGECGQRRLMHTAEAEQYYRSLCGTPVRVGLEATGSYGWFRRLLSELGHELLVGDATQIRASNPRRQKTDKRDAEHILGLLVEDRFPAIWQPPAENEQLRQLLLHRSRLVRLRTRVTNQLEGMAKNEGLLLPGGWSNKRRKAIEALPLPGWYGERRKDLLALLDRLEERIAPLDKAVSQAAANNAEACLLMTHPGVGPIVSLAYVLTIGNWQRFPRGKQVGSYLGLIPSEESSGDKRRLGHISKQGNTLVRWLLVEAATTAQRYDASWHRQYLRLSMTKHHGVAKVAIAHKLAVRLYWMLRSGEDYQHVRERGSTARQSECPGGRSRAAD

SEQ ID NO: 510412 - protein, 421 aa, unidentified
MTADEKCAYARRFPVHVGVDTAKRVHVLVARGPDGRRHRAHRVPVSRSGFAATDSYLTQLFPQTPREHMLIGIELAAHYAYTFAHFLAQKDYPVVNVLAAHTKRTKELEDNSPLKTDAKDAALICKLVGDGIFVRFPFLAPPYVELRVLVSYRHRLTVEATRFKNRLQALLDLAWPEFLTLFSSIRKETPRAILERWPLPEDLLAASRRTVGTYVRKVSRGKVTGDRVKALYQAARNTIALPHAAAARRMEIQDLLARWAMVRDQMATVDVQLEEILQALPAGQALLTVPEVNTVCAATILSELGTPEDFEHPRQILKLAGMNLVERSSGRSHGRKKQSKRGRPMLRRQLFLLAGRWCLRRGLYRADYEALLARNGGLRTKAVCAVARKLVPLLFAIVKHGQPFDIERWEAARHHSPGDHH

SEQ ID NO: 510413 - protein, 346 aa, unidentified
MQDVEDEPLFVQRVAGLDIAKAEVEVTIRVPSDTTPGRRQQETRTFGTTRRGLESLADWLRSWGVTKIGMEATGDYWKPVFFLLESRVFDCDLYNAAQVKALPGRPKTDRADSVWLARITERGMICSSFVPPEPIRRLRAHTRYRRHLTQARTAEKQRVEKLLDIHGVSGRDMLDAIAAGQRDPRALAALARGKMRGKIGRLEEALDCSFFTDEHAGVLAMMLVTIDHYTAQIGALTSKIEVLIEPYLRPVEKLDAVDGIGIICAQDIIAEIGVDMTVFPGAAHLVSWAKWSPQVRQSAGKRKGSNATGRGNPYLGAALGEAASIAGRTQSFLGAKYRRLARRMPK

SEQ ID NO: 510414 - protein, 370 aa, unidentified
MAKSTPLFVGLDVHKESIAVAHAAGGSTEPPVVVGTVGTRQADLHKLVRRLQAKTADLVFAYEAGPCGYGLYRDLTAQGFRCQVVAPSLIPKKPGDKVKTDRRDAVELARLLRSGDLTRVYVPSIEDEAIRDLCRARDAARLTLKNAKLRLKAFLLRLGLHYVGRADWTDAHRRYLAKVVCPTAAPQIVFQESLRAVDEQVDRLGRLEAELLERAPAWRLYPVVQALQALRGVQWLVAITVVAELGDLTRFDSPRQLAAFVGLIPSEYSSGPARRQGGITKAGNSRARRALIEGAWAYRHPAKVSEHIQRRIDTLPKPIQDLGWKAQVRLCRRFRRLVARGKHPNVAVTAIARELIAFMWAIAKVVPVPI

SEQ ID NO: 510415 - protein, 338 aa, unidentified
MKLYAGIDLHSSNNFIGVINEKDERLYQKKLSNELNQVLSALNPFKKELESIVVESTYNWYWLVDGLMENGYKVNLANPTAIQQYNGLKHTDDKWDSFWLAHMKRLDILPEGYIYPKDERHVRDALRRRQLFVQHRTSHILSFQSAITRNHGYKMSSREIKRLNESDASNLFNDPFLVMTARNNISVIRFLDNKIDEIESEVLSHTKLRPEFDKLLTIPGIGKILGLTIMLEVGDINRFSTVGNYSSYCRAVKSIRLSNNKKKGEGNKKNGNKYLSWAYVEAANIAKRSYPEITTFYERKKAKRNSIVAIKALSNKLARASYYVMRDKVSYNADKLFR

SEQ ID NO: 510416 - protein, 420 aa, unidentified
MKVVYPTCCGVDVHKSFLVATIIKTTSGVQPSYTKKRFSTFNSSILQFKQWLLENNCFDVCMESTGKYWIPVYNLLEDSVRITVANPKWVKAVKGNKDDTKDSKWIGDLFRLGLVPGSFIPEQGIRILREYTRYRFKMISCKSSEKNRFQNALTVCNVALDSVVSDMFGKSATAIIDYLIGQSGNSISHEEISARLFHSLKKKSCTVIESIEGYQMTDPQKYRLRLIRAHLDYITSVIEEIDGVLDSLALPYENAVKVLCTIPGVNRMSAITIISEIGIDMSQFSSSKRLCRWAGLTPGNNESAGKKKSVRITRAGVYLKPALVQCAHAAVKSDKSPYYKSKYERIVKRRGKKRAIIAIARMILTAAYHMLATGEIFNPCDLYKVDMPQHMVEKQKSKAIKQALKLLQREGIISGIPEAC

SEQ ID NO: 510417 - protein, 307 aa, unidentified
MNKAVVYVGVDVSKAYLDVAWAERSRRFANNKSGLNALMKWIRQSPVHLICEASGGYERGLLEAAEQNAIKLSLVQANRVRQYARAAGILAKTDKVDARVLCAFGTAMQPKPLASLSMQQKQLRELEAQRRHLSRMVVSEQNRLAQLKNKQLQRLTRSLLATLKRQMAAIDARIAAVIVQDQTLDEKAQKLTAIVGVGTRTAVLLLAQMPELGTLNRAQAAALAGLAPFNRDSGTLRGKRTIFGGRRALRCGLYMAALVAAHRNRILRDFYQRLRAKGKPHKVPLTAVMQKLLLALNHTLKPTPSCA

SEQ ID NO: 510418 - protein, 410 aa, unidentified
MEVLHPHCAGLDVHKETVVACVRHMVDGTIKREVRTFDTTTTSLLALADWLASEGCTVVAMEATGVYWKPVWHVLSDGDFELVLANAKQVKNVPGRKTDVNDATWLADLLAHGLIRASFVPDAPTQVLRNLLRTRKQLVRERSSHVQRLQKTLEDANIKLDSVVTDIIGMTGRAMLEALIAGETDPSKLAALAHPRIKAPPARLREALRGRIMKHHRFLLRLHLQQIDAIDTAVAEIDREVNERIEPFRITVELLTTIPGIGELGARIIAAEIGNDMSRFATAAHLVSWAGLCPRNDESAGKRRSTRMRHGAPWLKTTLIQCSWAAARKKGSYIQAQFHRIRSRRGAKKAIGAVAASILTAIYHMLKNGTCYQDLGPDHFDRRAKTAHTKRLVARLQNLGYAVQITPLAA

SEQ ID NO: 510419 - protein, 431 aa, unidentified
MNMNTNPRPQPATAPAAADPAPTPVAWIGLDWGHHTHAFALQDRSGPPAEGTLLHSAEALHTWLRDLEKRFGGRPVALAIEASRGAVIHALVQYPWLTVYPINPVTSARYRSAFTPSGASDDLPDARVLLELARDHAAKLRPLETQDAQTLKLTGLVEARRDTVDRRTQVLNQLTSLLRAYYPQALELVGGLDTELAVAFLSRWPDLITLKAVQPGVLKRFYYAHHLRRPELLTARLQFIQQAVALTTEDARVSVAVLQLRCLLDQLRAFRKHVAILDAEIKTTFAAHPEVALFRDLPGAGPALAPRLCVAFGTLRTLYPDPASLQKHAGVAPVREKSGQSLWTHWRWLAPVFLRQSWVEWAGQTVVHSAWAKRYYERMKAKGKGHHAILRALAFKWIRVLWKCWQTRTPYDETRYLKQLVHRKSPNAVPA

SEQ ID NO: 510420 - protein, 360 aa, unidentified
MYYVGIDVSMTESALCILDGKGKIVRETKLPTDPEIIARFIAATGLAIERIGLESGCTAAWLFAGLQRHGWPVICIDARHAAAALQAGFRNKNDRNDARGIADLMRVNKYRPVWVKSPEAQRHGRLLTARATLQSQLVGLENTIRGLLCQEGIGLTDRRTAFEAAVREAIDGDCLLQAALHPLLETRNAVLRHRAALDRQILRIVRADPVCRLLMTAPGVGALVSLAFKVAVDDPRRFSRSRDVGAHFGLTPREHSSGELSYQGRISKMGDREVRRLLYIAASRMLRRDAALWCPLKVWAVRLAQRIGIRKARVALARKLAVVLHAMWSDGQVSSGDVLRHWRKSLERLARVSPSPARRR

SEQ ID NO: 510421 - protein, 334 aa, unidentified
MWHIGIDLHRETVVIAAVNDNGEVIKPVTVRCEDTVTIVNVIKALGSFRAVIEASATYRWLYDLLQPYGTILLAHPFRLRAMVQRRTKTDKLDAQLLANLLRINQIPLAYVPPEPYQQLRELTRRRARLGRELAEAKIHLRALLARKNRQAPYRVPFGVRGLAWFRGQDFGWIENLVRDELLARLKHFGRQATIIDRHIERMSAAFPQTEALLDIHGIGLYSALLIVAEIGEPERFRAAKQVGAYAGLTSRVHQSGGHCYRGSISRQGSTWLRWILVEAAIKTIREDAALKNFYTRVRKRSSAKIARVAVARKLAEICWKRLLRWQREHASQAA

SEQ ID NO: 510422 - protein, 322 aa, unidentified
MSVSNQRCAGIDVSKGTLDIAISNIASQFTVPNGTDGFTQVLRELKRNETRLILMEATGGLESCVACYLQSEGFDVVVINPRQARDFARAMGYLAKTDRIDARVLLQMSEVINQHPERERYIRPLPDAHRQILAAMVVRRRQLTIMLTAERNRLHPSHPLSHASIRSIISALKGELARIEGEMAIHIKEHFSELSELLNAVKGVGSATVAVLLAEVPELGSLSRREISALIGVAPVNRDSGTMCGRRTVFGGRASVRTALYMSALVGTRHNPVIKEFYTRLVAAGKPKKVALTACIRKLLTILNAMLKKNEAWDPMYHQHAS

SEQ ID NO: 510423 - protein, 349 aa, unidentified
MTDQRIPYCGRIVYVGIDVHKETYTVTCVCNKQIVKTVTMQADPAALAASLPRRFPGATLYAVYEAGFSAFVLHRVLTKADITNIIVNPASVAVAANDKVKTDRRDSKKLAIDLADGRLRGISVPTEAEELARLLPRTRAQIVKHRATIARQIKAKLHQFGLIAPASRRLISSRYLREIAAWSLPQELSVSLTLLAEQWRFATRQLIEMRRLLRDQAQAQEEIEKVYRSVPGIGEVVARTLATELGDMTRFANERALFSSTGLTPSEYSSGASVRRGHISRQGSSRVRHVLVETAWRALPRDGVLKERFDRIAATRGKKRAIVAMARRLTGRIRACFRQGTTYAVGTYA

SEQ ID NO: 510424 - protein, 339 aa, unidentified
MQLYAGLDLHSRNTYIGIMDQEFKRLFGKRVLNKLPVILDTLAPFRDQLKGIVVESTFNWYWLIDGLMDAGYQCVHLANPSAMKQYEGIKHTDDQHDAFFLAQMLILGILPQGYIYPKEDRPVRDLARKRLFLVRHKTSHILSLQSLIARCCGQRVSANEIRKFTVEDLQRLLEQEYIVLSAQANFDTIVFLKQQIQQLEKAIQKKVKLNKAFQQLLTVPGIGLILAMTIMLEVGDIGRFPQVGNFASYSRCVPSNRLSDGKNKGHGNRKNGNRYLSWAFTEAAHLSRRYNESFRSYYNRKVAQANTSLATKALGNKLARICYYLMRDQVPFRQELLSQ

SEQ ID NO: 510425 - protein, 331 aa, unidentified
MFPVGIDVSKNTLDLCMLYDGIKGRIKTRNIQNNRHSVENILRWLRLQHCSPEDVHVVMEATGVYHERLATELHDAGFRVSLANPHRSREFARGMGIMTKTDKVDAYMLACYAFLKKPHRWEPPAPEIRYLGALLRRRDVLLGDALREENRLEKYLSTDTPADIISSCRRMAQLLREEVSNIERQIKAHIKASLALRRDYTLLTSIKSVGPQLGMHMLVVLRSHNFVSAEQAAAFLGVVPIEKRSGTSVRRRPRMSKIGPPQLRAKLYMSALCGKIYNKRMRNIYDEMCLRGKPKMVAIGALMRKLVHWCYGVLKTGTVFNDEDLKPVLST

SEQ ID NO: 510426 - protein, 357 aa, unidentified
MKKLFIGIDFSKEKLDATIILACGMNEIGSREYGCFPNNTTGYRKLCNWVKTNAWNTIAEEWLFCGEDTGSCSIGLSKWLYGKGYDIWIENAYAIKHSSGIQRVKNDKADSAIIAEYAWRQQDKVVPFEPLNESLAQLREIFLYRHKLVGQRVAMELRKEDKSQSNKSKAISFINRKSKHLIAEINKTIAECDKAIDSIIEADEELKENYAIITSIKGVARQNATCMLVYTNNFKKFGYDPRKIACYYGVAPFGKQSGTSVNTPAHTSHFANKLIKSLLGQAAHIAKIYNPEIRDYYQRLISKGKKPQVALNNVKNKLIRIIVALVRKKVPYDQNTYKYYEEREVIERKKNEMLIYC

SEQ ID NO: 510427 - protein, 411 aa, unidentified
MELLHQRCAGLDVHKKTVVACVRLAVEGKVIKDAKTFETTTQGLLELSDWLSEHECTHIAMEATGVYWKPIWHVLSDGDFELILANASHVKNVPGRKTDMNDAAWLAELLAHGLIRASFVPDGQTQELRALLRTRKQLVRERTRHTQRIHKTLEDANIKLDAMLSNVLGKSGRAILGAMVSGVSDPSQLAKLANAGVKCSQNELREALRGRVTRHHRFLLQLHLGQIDGINAAIATIDREVDEGLAPFRVAVDLVSTAPGVNMLSAQAIVSEIGTDMSRFPTAGHLLSWAGLCPRNDASAGKRRSTRLRKGAPWLKTTLIQCAWAASRTKGSYLQAQFQRLRARRGPQKAICAVAASLLTAIYHMLTNGTTYQDLGADHFQRRSKTTQAQRLVNRLRLLGYAVEIEALAAA

SEQ ID NO: 510428 - protein, 341 aa, unidentified
MSIITIGIDLAKNVFAVHGVDDNGKPVLVRPKVARVELLSLIAQIPPCLIGMEACSGAHHWARLFRQHGHTVKLIAPKFVTPYRMSGRHGKNDAADAAAICEAVTRPAMRFVPVKEEHQQIILTLHRTRQGFIEERTALYNRLRGLISEFGIVLPQKVACLRREIGAHLEDLPGYANCCVGDLLAHADRLDALIADYDRTIAQAAREDARSKRLMQLPGIGPTTASALVASLGGGHEFANGRQVAAWIGLVPGQYSSGGKSRLGRITKAGDHYLRSLLVMGARAILAGLGTKQDRFSRWARSLVERRGYWRAVVAIAAKNARLAWAVLKYGEDFRLHAAAA

SEQ ID NO: 510429 - protein, 381 aa, unidentified
MKLAVSKQVSYPKVVSLDHHDGNIYMYAVDIETGEVLADCNLPGSNSAVIKHLHKIHAIPGQTIVTYEAGAAGFSPYRAFTKAGYACKIIAPTSIPHRAKRHKTDRADAISNLEYYVSGLLKFVHVPSIEDEENRELLRLRYDLVYQITKLKQKILALLKRHDISYNLTKKNWTILHRRWLTTVAAPCTVRRVLDFMLGTFDALEAQLESLDKELDSVVSGNPRYAAISNLMQLIAGFGRVNAMTIAFEIQDFSRFAHPCALMNYTGLIPGKHSSGKSDPSLKITKAGNTFLRIAYVGAAKSYRDRRLVRSAAVLKKQPPPIREFIERLQDRLCNRYRHLMTNGKPSGKAKCAIARELCGFTWELATKIAPRMENSLPVAA

SEQ ID NO: 510430 - protein, 346 aa, unidentified
MLYAGLDLSRKRLDFCLLDELGEKVEVGAAPPDADGLRSLTTRVGRFSEPVFAAIESMNGARFVHDQLELAGWRVEIADAVKVKGLAPLACKTDRIDAWVLAELARRDLVPAIWLPDPAVRAERERARFRLHLVRHRTSLKQRVHAVLLAHGKPCPVSDLFGVAGRDLLERLALPEPWLGTVEATLQLIDELDKQIGDCERELQRLGAEHRYVPLLVTVPGIGWVLAYTIAAEIGDISRFATPTKLTGYTGLCPRVYQSGQSDRRGTLAKNGPRYLRWALIEATMHASRHPVYRDRYHHTKQRLGKQRGAKVAQIDLARRLAEAIWHMLTRDQSFAPAGAADPLAA

SEQ ID NO: 510431 - protein, 409 aa, unidentified
MVTVRVVHERCAGLDVHKSSVVACVLLPEGKELRTFGTLTRQLEQLAEWLRSLDVRVAAMESSGVYWKPVFNILETAGLELLVVNARHIKAVPGRKTDDKDAEWIADLLRHGLLKPSFIPTRDERELRELTRYRRTIIEERAHEVQRLQKVLEGANIKLEDVISNVVGSNGRRFLSALIAGDYDPAVVAATANYGLQRKRELLAQALHGTLGSHQRFLLDQLLSHIDFLEQRIAALDAEVASRTRPFEPLIARLDEIPGVGQRAGQEILAEIGTDMSRFPTSRHLASWAKVCPGNNESAGKRRSGYAGKGNRWLRTVLVECAWCATRKKDSYFKAQYHRLAARRGKKRALLAVGHSLLTVIYHLLRDGVVYQDLGGNHFDERDRSQVARQAVRRLERLGYHVSLTQGAA

SEQ ID NO: 510432 - protein, 411 aa, unidentified
MDIVNARCAGLDVHKATVVAAVRVPGGPSGERRGETKTFVTTTRGLRELTDWLRTHGVTHVAMESTGVYWRPVYAALEGALQVALVNARRVQMVPGRKTDVKDREWLAKVLECGLRRGSFIPPRAVRDLRDLTRLRKALIRERGHHVNRIEKTLELAQIKISGVVTDLMGKTGRAILQALSAGIADPDQLAEYAQGLLRKKRAALREALVGRLTPHYAFLLQQHLSLIDALDAHLATLETRIEMAMAPFAEPAALVQTMPGVATRAAQAILAETGVDMTAFPTAGHCASWARLCPGNHESAGKRQAASTGQGATWLRATLQEAAWAAVRSKKSYYRALYHRLKGRRGAKKAIVAVQHAMLVALWHMLKYRVAHHDLGVDSFDRRNIVRTRRPHIRRLERLGDDVVLVERAA

SEQ ID NO: 510433 - protein, 367 aa, unidentified
MEKSSTAFIGMDVHKESIDIAIADGKEARHFGRIGGEAAALDRAVRRLRAVHGRPMFVYEAGPCGFWIYRRLEAQGLPCMVVSPSMTPRNAADRVKTDRRDALKLARLARAGELEPIYIPDAADEAMRDLVRKREDAVSMQRQARQRLQALLLRNEIRYVGRSSWTQAHRRWISKLKLPNPAQQIAFEEYVQAVQEAQARLERLEKAILEQLAHWRWRPVAEALQALRGVSEIHSVRIVAELGDFQRFDSPRKLMAYLGLIPSENSSGARRRQGAITKAGNSSARRAMVEAAQAYTHPPRVSWIIARRQTRLAKTVCDTAWKAQLRLCARFRKLSARRVPRNKVIVAIARELSGFVWAIARQVKPLT

SEQ ID NO: 510434 - protein, 412 aa, unidentified
MSQMLVGIDVSLRSHHVHFMHGEGHTLADFSVRNDVEGADTLIQKIVRTAEKNQTNQLKIGMEATDQYSWHLAHYLKAQCKKVLPHLQTAIYMLNARKVARFKKGYDTLPKNDKMDAWVIADHLRFGRLPHEMQETLIYDALRRLTRTRFHLVHEIARNKTYMLNQLYLKFSGLRQDNPFSDTFGTTSIAVIEELDPGKIADMPLEELVEFLQEKGKNRFVEPEEIAKYLKQLARNSYRLDKMMADPVNLSLSVILSTIQHMESQVKRLDKEIERMMKGIPQTLTSIKGIGPVYAAGLIAEIGDIHRFDDHHALAKYAGLVWTQYQSGEFEAENTSRMRTGNKYLRYYLVQASDAIRKHDTEYKTFYQKKYHEVPKHQHKRALVLTARKLVRLVHSLLRTKQLYIPKEERRE

SEQ ID NO: 510435 - protein, 352 aa, unidentified
MALPTLPHPQVLVTLGVDTHADSHVAAALDQAGRLLGTRTTPTTPTGYAALYGWATTFGTVDRIGVEGTGSYGAGLARWLRAHRQLVIEVDRPDRAARRRQGKADDLDAQAAARAVQAGTATGQPKAGDGTVEMIGSLRLARRLAVKARTQAANQLKALLVTAPDVLRAQLRRLPPAELVTTAARLRPATKPATPTDAAKLALRSIARRWLQLTQEITALEVQLDRLVAAAAPALVAVNGVGTQTAAALLVAAGDNPERLRSEAAFAHLCGVAPIPASAGKTTRHRLNRGGNREANWALYLIAVGRMAWHEPTRAYLERRTKQGKSKPEIIRCLKRHIARELYGILVSRPAT

SEQ ID NO: 510436 - protein, 405 aa, unidentified
MMNAVGIDVSKGKSTVTVLQPGGVFIHKPYDVSHKSSDLHRFTQYIGSLEGDTKAVLECTGRYHEPILHALSDAGVFVSAVNPHLIKNYGNNSLRKVKTDPADSTKIARYTLDNWTELREYTGMDNTRTQLKTLNSQFDFFMKQKVAAKNNLIALLDQTYPGVDKLFSSPVKFDGTEKWVNYAYSFWHVDCVRKAGVKAFTERYKAFCERHGYNFQKDKPQELFDGSKELIAVLPKEPVYKELIQDSIQQLNLASKHVEELRAEMNRLASTLPEYETVMGMYGVGPTYGPQLIAEIGDISRFPRRESLTAYAGVDPGKNDSGKRVSKSVHASKCGPSRLRKTLFQIMSTILQLGDNDDPVYQFLDKKRSEGKDYLVYMTAGANKFLRIYYGKVKECLRERQQTAE

SEQ ID NO: 510437 - protein, 349 aa, unidentified
MRFYNRQHRFYCGIDLHARLLAICVLDQAGNIVLQTQIGADKQLLLETLAPFRPDVVIAVECLFAWYWVADLCAREGIPFVLGHALYMKAIHGGKTKDDDIDAEKISRLLRGGNIPVAYVYPKGLRETRDLLRRRNYLVHKRAELIAHIQITNAQYNLPPFGKKLVYARNRAELKVAEHFPDAHVRKNIELDLALVDHLDEQLADVELYLQRTVKVEDPHSYYLLQTIPGVGKILALVLLYEIHQIARFADVGDFLSYARLVRCVHRSAGKQVGTGGKKIGNAHLKWAFSEAVCLLIRSCPAVKAWQARHEKKHGKKKTLGILAAKLGRTVYHLLRKNVAFDVRRFLGQ

SEQ ID NO: 510438 - protein, 346 aa, unidentified
MKKIFIGIDFSKEKFDATLIKAEGLKECAPSMHEVYDNKTSGFRRLVRWVKTQSEGLPIDTWLFCGENTGAYSIGLSNYLYASGYDMCLECAYKIKHSAGILRVKNDKADSKAIAEYAMRNYDKVRLHKPQSGSLTCLREVFLYRHSLVRQKVALTVRRDEKRLTQEKSDARAFMSFTSKHLITEINKAIDKCDQKIKETIAADGELREIFDIITSMPGIGVQNATCLMVYTDNFQKFDMDSRKIACYYGIAPFGRQSGTSVNSRPKVSPFANRMIKSLLSQAALAAIKSDINIQNYYQRLIERGKHPLLIHNNIKNKMLHALVAMVRDRIKYNPDYVYQTNKSVA

SEQ ID NO: 510439 - protein, 325 aa, unidentified
MEVYGIDLSKEKFDVSFLDAGKEKKKIVRNNFKGVCNFLRQVQDGCILVAEHTGSYGDLLVHLCYRYGIKIALVSGYSIKHSLGLQRGKSDSKDAYRIRKYGERFAEELRFAEPKSESIKELKELYTLREQLSKNRTALLLGQKTRMIGPSQSIVAYRSCQRAIMHLENEISSVEKEIEKIVQSDSELKDNYKLVTSIKGIGPVIANNLIIKTENFKRISTAKKAAAFAGVCPYPNSSGKMALKARTSHMADKKLKSLLFLAAKTAVAHNKEYSLYAERKKLEGKPYFLIMNNVSNKMLRTVYGVIQSRKPYDMNHICNDPRQMN

SEQ ID NO: 510440 - protein, 352 aa, unidentified
MSTDVLFPNLTIGLDLGDKVSRTCEIDAAGKIVKTAAVATSSGAIERYFGGRPRCRVVLEVSTHSPWVSRQLEALGHEAVVANTSEVYGKGRRKRRNDKIDAEFLARQGRADVELLHPIRHRSAEAQQDLAVLRARDQLVQARTGLISHVRGAVKSLGGRINKCSAEAFTKQAARQLPEVLRPVLTPLLEVIADLTRRIGAMDAQVDQIAEAHPEAQRLQQIQGVGPLTAVAYVRAVEDPHRFSRSRQAGAFFGLVPKLDDSSDSSPQLRITKAGDALVRRYLVSAARYILGPHASDSDLRRYGEAIAARGGKNAKKRAAIAVARKLAVLLHHLWVSNATYESDWSQRRRAA

SEQ ID NO: 510441 - protein, 405 aa, unidentified
MWYVGIDWADDHHDAVVIDDAGTRVAATRVPHTSDGIAALVAFLHGIGDVDTQPAHLACVVETNRGLLIAALLDAGVPVYPANPTTVDRQRKPSGAKTDAIDAYLLARTGRSDLADLRRLTPDSPLVAELKLLTRDQDGLIQGQTRLVNQLTACLKAYYPVALELFGKLHQGATLAFLRAFPTPEEARTATMEQIAAVLTAARYATAEAKAQEIWERVRQPHLTADPVVTRAKARLMLTLAAQLQVLVAEIAAYDREISRVFAQHADSAAFASLPRAGKRLAPRLLAEWGDDRGRYADAASIQALAGTSPVVFQSGNYASVHKRYACSKPLRNALHQFAWQSTLQEDWANAYYRRKRREGKSHTKAVRALANQWVRIIYAVWHKRETYDPTIFVTAQQAHARRAA

SEQ ID NO: 510442 - protein, 345 aa, unidentified
MMVIGIDAHKRSHTAVTVDEMGRQGFVKTVGTTTQDHLRLLKWAVGLAGERLWAIEDCRHLTRRLERDLIAAGESVVRVSPKLMAHVRDSARSYGKSDPIDALAVARAALREPNLPTARLDGVERELRLLVDHREDLVGERTRIISRLRWHLHELDPGWTAPTKLQRQSAFDKVQAHLSRRDDDTMVRRLALRLVEHLRLLTDEIDELTAEITVRVTRIAPSLLAIVGCGALSAAKIIGETAHAGRFRSKDAFARHNGTAPLPVWSSNRQRHRLSRTGNRQLNAALHRIALTQARCYPAARELLERRTNGGDGGMEALRILKRRLSDVVYRAMLADETDPPTVAA

SEQ ID NO: 510443 - protein, 426 aa, unidentified
MKVMHDRAAAIDVHKDMVKVAVRVPGERRGTRKTDVLEFRTFYGVLEEMGRELRRRGVTHVVMEASGVYTEPVYYALAGLGFTEVMVINPAHAKALKGHKTDAKDAIRLLDLYECGLLSGSYIPAPDLKEVRDLARYRMKTVQARASEIQRLQKTLETAGIKLSSVVSDVTGVSATAMIEALIDGERRGAVLADLAQGRLRTAGKMADLSMALAGRFTDHHALMCRLHLDRIQALGEAVAGLDAKIAPLAARYSREAALLKTLPGFGDVIVAGWLGAIGPAPHQHFATAQRLASWATVCPGNYMSAKKSKGGRTGDGGNYIKPLLVQAAWAAVRVPGRLQARFHRLVRRFGGARNKGAVKRAIMAIAHTLLKIAYQVLKTGTPYTDLGAGFYASRETPQARQDYLIRQLQKLNPGCVITITPAEAA

SEQ ID NO: 510444 - protein, 338 aa, unidentified
MEHQQQYVGIDLHRRRSVIVRMTEDGEVLECVRIVNDPVALSLELAKAGPDPEVALEATYGWYWAADLLAADGAGVHLVHPLGLHWDARRVKNDERDATELAHRLRRGDLPESWIAPPEVRELRELIRYRAKLAALRTSAKAQIHAVMAKLGILPTMSDMFGPTGQALLDGMPFEGAYAIRVDSLRGLLERYEDELVVVEHQLHGRLAEHKGYTAIQALNGVGRITAAIMVAEIGDVTRFPDARHLCSWAGLTPTHRESDTKVHRGHITKQGSTLVRWAAIEAVARYHGGAPIAAAFRRIAKRRGVMIARVAAARKLLSLIFYGLRDGEIRCLAREAG

SEQ ID NO: 510445 - protein, 338 aa, unidentified
MKTYAGIDLHSSNSFIGVIDGQDRRLYKKRLPNDLDTILSALAPFRKNLAGVVVESTYNWYWLVDGLQENGYKVHLANPAAIKQYEGLKHTDDRWDSFWLAHMRRLNILSEGYIYPKDQRPVRDLLRRRLLFVKHSTAHILSLQSMIARNLGTRMSVNAIKKLTEADADDLFDSPHLGFAAKRNIEVITHLKKIVKSIEKEVLSQIKLHKEFKLLLTIPGIGNILALTIMLEVGDINRFPKVGNYSSYCRCVKSERLSNGKKKGENNKKNGNKYLSWAYVEAANFAIRFSPEAQRFYQRKKAKTNGVVAIKALANKIARASYYVMRDQVAYDVSKLFH

SEQ ID NO: 510446 - protein, 344 aa, unidentified
MDHVAIDLGSRLSQVCVRSEDGEIKREYQMATKALSKVMAQWPPSRVVVETAAGAFAMADAALGCGHQVRVVPATLVRSLGVGSRGIKTDRRDARILSEVSTRIDLPSVHVPSHHARECKSLCGMREALVESRTKLINTVRGWLRGRTEQIRRGAAKGFAQRVCDHFQRKGQLLPAYVQRQLDAIDQLSAHIHQADGQLKTLANSTDICRRLMSVPGVGPVTAVRYVAAIDDRERFCDAHQVESYIGLTPGEHASSLRKRRTGITKAGAPRLRWALLQAAWVLRRRRPLDPIVLWSRQIEKRRGKFIAVVALARKMAGVMYAMWRDGTCYDPQRAAQVSAAVAA

SEQ ID NO: 510447 - protein, 314 aa, unidentified
MSQPIFVGIDVAKDTVEVACSDASSHSFTNNEAGHAKVLRWLARKSVALLVLEATGGYEQACAVALAAAGLPVSVLNPRQARDFARAMGRLAKTDRIDAGVLAEFAAVLHARGHQPRALASVEQRELVALVARRRQLVVMLVSERQRLGVAHARAKPSIEAVIELLLKQLADIDDDLKRTLKDRHADLSALLQSVKGVGPTTTSTLIAELPELGSLTRKQITSLVGLAPLNRDSGTFRGQRHIFGGRASVRRVLYVAALVASRFNPAVKACYERLLAAGKPKKVALVACMRKLLITLNAIARTKTPWRSDFGST

SEQ ID NO: 510448 - protein, 370 aa, unidentified
MLDTTTFVGLDVHARSIKAVSLDVMTGEVRAATFGYDAGAVAEWVRSVDPRARCVYESGVTGFDLQKRLSGLGVGCVVGAVSKMIKPSADRRRKNDRNDAEFLARMLSVGNVVEVWVPDDECEAARDLTRALEDARDDLSRSKQRLSKFLLRHGLVFDERTPTGRRKGNWTRAHWSWIESIRFAEGADNDVLAYYVDAVRRAAEEKARLEGLVEAEARRPRWRKRVDSLRCLKGVDTASAADLVFEAGEFSRFRNARSFAAWVGLTPSEHSSGESDRRGAITKAGNKHLRKALVEAAWHYLTCSGRPKDLARGQAPDRVARRHAAKGVRRLVERREALLARGVHNNKANVATARELACWVWAVGLMAEEA

SEQ ID NO: 510449 - protein, 429 aa, unidentified
MSEAEFVKQEPQFAAFLAIDWADKKHVWCLQGAGSEKRESGELEHSPEAVEAWVGQLCQRFAHRPIAVALEQSRGALVFMLSKYEALHLFPVASTMAASMRQALYPSGAKDDPRDADLLLDLLLKHRDKLRRLVPDTEATRRVQNLVEERRKLVDEKTEQSNRLTSNLKIYFPQILDWFEQLDTELVCALLLRWPTLEELQKVPPAQLRRFFRKHHCRDQELIERRIVAIRQAIPAIRDRAVIEAKSTVVKVIVRLIRSLLEGIADLEEKIEEAAAGHPDFFIFDSLPGAGAVLAPRLLAAFGSQRERYGSAGEVQVYSGIAPVMEKSGKKKWVHCRIACPKFLRQSFHEWAGHSIAHSVWARSYYQQLRSRGKEHHPAVRALAFKWIRIVFRCWKDGVAYDENKYLATLARRGSPLAAVNVSIVRKTV

SEQ ID NO: 510450 - protein, 343 aa, unidentified
MQIHSFGIDLGKTTFHLVALSAAGTVLLKKKFTQKQLITFTANLQTSLIGMEACSGAQFLGRTLREQGHDVRLIPAQFVKPFVKSNKNDFLDAEAIAEAVDRQNMRFVPIKTDDQLDLQALHRVRDRLIARRTSVINQVRAFLLERGMTFARTPAKLKVAMPEILENADANLTPRMRNLISLLWSEWKDLEQQIATVNAEVEQIASSDAACLRLRQIPGIGPLIATAIVAAIGNGAAFHKGREFASWLGLVPRQHSTGGKARLSGISKRGNSYLRKILIHGARSAVVRMKRERAPLGAWLDALQTRAPLNVVVTATANKLARIAWAVLSTGKEYRALPSSSPA

SEQ ID NO: 510451 - protein, 353 aa, unidentified
MRTYYVGMDVHRATIAIVALNGAGKVVEQLVVETSATRVRNYLKQLRGRVYVTFEEGTQAQWLYDVVQPLVTEVLVCDPRHNKLLKAGNKSDRIDAQKLAALLRNGALQAVDHRDHGVRALKELVRNYDCLVSDTTRVMNRLKAMFRGRAIACGGHEVYRQDRREVWLSKLTERGAKERAGSLYRQLAALRALRQEAKLAMVREARRAAAYSWLMSVPRLGAVSVAQLLAVVGTPHRFRTKRQFWSYVGLAVVTSSTADMEVVEGVLRRSRRPVATRGLNRNHNHLLKRVFKNAATSACQSEPFKQHYERRLQQGMEPALARLTVARQLAAITLSLWKRGEKFQAERMKRPAV

SEQ ID NO: 510452 - protein, 390 aa, unidentified
MQNVANRPGASTAICTSLGAIFVSLELSRSTWLVTSLSPGGGERMSRHSVTGGDVAALLARLIDLQGKAQVRTGRCFPVVVIQEAGLDGFWIHRALRKEGVESHVVDPASIAVQRRRRRAKTDRIDGEALVRALLAYKRGEPRVCAMVKVPTPEEEDRRRLCRELKSLIGERIRHVNRLKGLFFAQGITGYEPRRHDRRERLEELCTGDGRSLPPHLKALALREIEVLELLTRQIDTVKAERNALLAAERTADTTPGRVEMLLRLKSIGPGIAGALWSEGLFRHFDNRRQVAAYAGLAPTPWQSGSIDHEQGVSKAGNPRLRATMVELAWLWLRHQPESALSRWFHERVRHNGGRLKKRTIVALARKLLVALWKYVTAGIVMEGAVMKPV

SEQ ID NO: 510453 - protein, 343 aa, unidentified
MQTVSTIGLDIAKSVFQVHGVDANGLVVIRRQLKRRYVLAFFEKLAPCLVGIEACASSHYWSRQLQALGHNVRLMPPAYVKPYVKRQKNDMADAEAICEAVTRTNMRFVPTKTPEQQSGLVLHRTRHLFIRQQTSVINAIRGHLAEFGVIAPVGRKGIEELLCVIADPSDKRVPDVVRACLAALGSQLLNLKKQILDFDRMILAWHRSDQTSKRLNCIPGVGPLLATALVASVADPKVFRSGRNFSAWIGLVPKQHSSGGRARLGSISKKGDRYLRGLFVAGALAVIRYAKLHGTNYRPWVAALLARRPTKVAAIALANKLARMAWAMMARGERYNYPAALRV

SEQ ID NO: 510454 - protein, 328 aa, unidentified
MCTLGIDVSKNKIDLCLLTAGPGGKKKHKVLTNEPAVARKVVDWLNAQKCVPESVTVVLEATGIYHENLAYGLHEAGVSVCMANPCRVREFAHGMDILNKNDAVDAFVLACYGELKSPAVWVPPSPEVRKLRALLRQRDALREDVQRTVNRLEKANSTSTPQEVIRSLERTKSWLNEELARIEKLITDHTDNDPGLKADLDLLKSIKGVKDQVGREMLALLKDGMFKSASQVAAYLGLTPVEKTSGSSVRGRPHMSKTGPSGVRAKLYVAALTASRWNIQAKAIYERLVAKGKAKKAALGAVMRKLVHLCFGVLKTRLPWDENYVATA

SEQ ID NO: 510455 - protein, 408 aa, unidentified
MLKIVYPNCCGIDVHKTFVLAVIAITDEHGVTQYFRHRFSTFTKGLGELKQWLEYYSCKDVCMESTGKYWIPVYNVLEDSCSICLAHPKYVKAIRGKKTDKKDAKWIADLFKHDLVAGSFIPPLPIRELRDLVRYHFKLTNFCSSEANRLQNSLTVSNITLSSVLTDVLGVSGSRIIDAILENPIGKIDLPALIHGRLKSKLSDLELAIDGKLTEEQAVKIRIIKSHYDALTLCKSDLEKAILEIAEPFKLQQELIQTVPGCAKQFTAIKILSEIGSDMSQFPTAGHLCSWAGLTPTNNESANKKKSVRISKAGQYLKPLLVQIANAIVKSEKYPEHRNKYLQLKKRRGHKKAIIAIARRLLTAIYHVLLKREPYDSSHYSIEIVRPSRTMTINEAVSFAKSHGFVVS

SEQ ID NO: 510456 - protein, 436 aa, unidentified
MTSHCQSYHYKLSGGCFLSFKILKHNCCGLDVHKTWIFACVAITDSLNRTEYKQARFSSFTKGLQELCDWLAKYNCIDVCMESTGKYWIPVFNILEKNNLWVTLSHPKYTKPQKGNKTDRKDAKWICDLYMCGMVKPSFIPPADIRELGDLVRYRFKLGCMITSEKNRAHNCLTVSNLKLDDVFSDIFGKSSRSITEQILQHPGETFDVTPFVDSRCKTPAEEIQAAVDGAISAEQAVKLRQCLSHIDELEKHKAEIEREIFRLSDKYGDALTLIRTVPGFDKNPLTAIQVLSEIGGDMSVFPTAKNLVSWAGCCPRNDQSNQKIKSTRISRAGSYFKPVLVQIANALIKSKKHPEFAARYRRIKARRGHKKAIIAICRMLLTAIWHILADLKPYTPEGFLEARPVKEAKVLTASQALHLLKQRGYIIKDEAVPVT

SEQ ID NO: 510457 - protein, 352 aa, unidentified
MRRSKHQLTSGEDLFVGIDLHKNRWHVTIRTFDVEVFSASISGNWEALQRILARYAGCQMQAVYEAGYFGFRLHDRLVAQGIPCLVTPPSLVPQEYGNRVKTDRRDSSKLAHLLAKGLLKRVWVPSEEELYHRQVIRRRRQLIRDRVRTQSRIKAELRFYGVHLEEPRGRWTQIYFETLRRLRFENRWMQESFNRLLEQYEFLSGQIDKQTQLLRELSETAQYRERVEILQSIPGIGVISAMEVLLELQDVSRFRRAEQLAAYVGLTPSQYSSADKVRMGRITGIGKNTLRAILVEASWKLITKDQVMRGKYDRIKIRSGGKRAIVAIARTLLLRMRRMLLDKQAYALDLAA

SEQ ID NO: 510458 - protein, 347 aa, unidentified
MLADELDYVIGVDAHRDTHALAVVDVRSGGVVFEATAVADGEGYACVLRLADQHAPGRRAFAVEGTGSFGAGLTRFLVGHEERVLEVGRLRRERLSGKSDALDAIRAARSVLGQTRPARPRAGGEREALRALSAAREGAVTARRAGLCQLRGLLVSAPEPLRAELRSLTRAQLLRRLAAVRPERRQDPELRGTLLALRALARRVKALTVEERELAREIETITRKLAPQLLEQPGVGPLAAAQVLISWSHRGRITSEAAFARLAGCAPIPASSGQTIRYRLDRGGDRRLNRALHMILVTRRRAHAPTIAYIERRIQEGKSRREAIRCLKRYLARNLYRLLENGSPLPT

SEQ ID NO: 510459 - protein, 346 aa, unidentified
MTKYIGMDAHSSTCTFCVMNEKGQEIDNTTLETNGRLLVKYLRNIEGKKKLTFEECELSHWLYGILNKEVDELMVCNPVANRQYKKAKTDKLDARNLAKLLRGGFLTGVFHDGSQRECFRRLMSGYQDLVEESVRLKNRYKSLFRKSGTRIKGESLYNDESLLDGLEHSDSRFIGRQTYHLLGKMEKSRQDYLKEIMLHSRHFKEIKYLKSIPGIGNIQAAKIVSQVVDPKRFANKYKYFSYCGLVRHQRESGEKSYGSTKIWGNRILKCVYKMAGHATLKGNSGLRKYYDLLRSRGTSHKNAYNAVCRKIAAISLSTWKNNRKYDDNLITQAVETGKTSCEESIR

SEQ ID NO: 510460 - protein, 399 aa, unidentified
MLEMIPLEVRVSIDIGCHQHRVAIGLSSGEVLEEFDIIHQAEGFEHFFSRLSSYEQDYACSVAVAMEGFNGYARPLDTMIRARDYRLYNINNLKLARFKEIFPGAAKSDALDARKGLELFQLRDHLPLAKDVLQEVAATPEENDILKRLTRRRRSLVREKGRVLNRLQSDLQAVCPGLLEITNDAGNLWFLRFLTSRAELTQLARLRHASLLKIRGVGATYAKAIQAWQKGAVFSHEVAWVGEMIQADATRILELLGQIKALEAKIDAVAQESSVASILESIPGFGRVCSAELAGEIGTIERFRSDASLGLYVGMSNLDNSSGKFQGSKAPKHVNTRAKAAMMIAVDKHRKCVPQSQQYYEKKRTEGKSHNQAIRALGRHLCRVIYKLLKEERAYEIRN

SEQ ID NO: 510461 - protein, 352 aa, unidentified
MDATTVAVDLAKDIFEVALANRTGRILERKRLTRRQFERFIDGLAPGTEVVMEGCGTAHYWGRRCQTRDLQVRLLPVQYVRPYVRRNKTDRTDTEALLEANRCGGIQPVPVKTIEQQTLQALHRVRTQWQAARTARINVVRGLLREQGLPIPVGARKVLTRVMSIVEDADAALPALLRHTVALVVEEIRALETRVAAIDRQLAHVARTHPVAVRLQQIPGVGVVTATALVGAVAHIHAFRRGRQFASWLGLTPRESSTGSRRFLGRISKRGDVYLRCLLTHGARAVLLTAQRTVRSTPHRATRFQHWAVTIATRRGHNKAAIAVANKLARMIWAVWHYDVDFRDNLPAVAAA

SEQ ID NO: 510462 - protein, 402 aa, unidentified
MNAVGIDVSKGKSMVAIMRPFGEIVSSPFEIKHTTSDINSLVELINSVEGESRIVMEHTGRYYEVLAHQLSEANLFVSAINPKLIKDFDNDSLRKVKSDKADAVKIARYALDKWQNLKQYNVMDELRNQLKTMNRQFGFYIKHKTAMKNNLIGILDQTYPGVNTYFDSPARSDGSQKWVDFASTYWHVDCVRKMSLNAFIDHYQNWCKRKKYNFSQSKAEEIYGKAKELVPVLPKDAITKLIIRQAVDQLNSASTTVESLRTLMNETASKLPEYPVVMAMKGVGTSLGPQLIAEIGDVSRFTHKSAITAFAGVDPGVNESGSYEQKSVPTSKRGSSDLRKTLFQVMDVLIKTHPQDDPVYQFLDKKRAQGKPYYVYMTAGANKFLRIYYGRVKEYLSSLPES

SEQ ID NO: 510463 - protein, 343 aa, unidentified
MDQYIGLDVSLKDTAVSIREDRKRIWRSKCPSDPKVLSQIIRKHAPRAKLVVFETGPLSTWFYHALTAEGIPAICIEARHAQKVLNETLNKTDTNDADGLAQLAEAGFYKVVRVKTFDNMLTRTLVAARSLLVSISKQLSNQIRGLLKTFGLIVPKGEGRVFDANVRELLNGNSGLAVVILPLLEAWREIRKRAANLDHQLLAASRQSRATKLLMTIPGVGAVTAVSYIAAIEDPENFPTSRSVGAWLGLTTRRYQSGNIDYDGHISRRGDGRLRGLLYEAATVLLTRTTAKTECSLKTWGLKLRERLGFKRAAVAVARKLAVIMHSMLKTGEAFNPLAGATA

SEQ ID NO: 510464 - protein, 423 aa, unidentified
MSTGPFQHFNNRPGGEKTVTKASARTTSARTTAAQAEKAEAKPSPAKAPRRRRGPANIFGADPHKHTLTATVLDCRGGVLGTRSFKVSGEGHRAMEEWALSFGPVERWGIEGASGLGRHTAIYLTGRGHDVRDCSPNRTNERRRARGQGKTDASDSLRIAREAQSDPAMPRAFKRAEGDAGPDETAELLGLWHKARRSVLKSRQHILNEAESLLCELPLEMRELLPATKDVKPRLAALARLERASTLDAPTRLRLELLDGYAKEVAELDAQEKLAVRQLARLTKAAGSTLDELCGLSTRSVAELLVEVGDPRRFAGEGGFARFDGTAPIPASSAEGDGEPVRYRLNRGGNRRVNAVLHIMAVTQLAHDPRARRIFDDARHRGHTKKEAMRVLKRHLSDVVYRRMLADLERRLAAQNTDLKRVA

SEQ ID NO: 510465 - protein, 340 aa, unidentified
MTITTVGIDLAKNVFAVHCVDQHGKTVLVKPKVSRAALPELIASLPPCVIGMEACSGAHYWARLFRQYGHEPRLMAAKFVSPYRMAGKSGKNDAADAQAICEAVRRPHMRFVPVKDESQQAMQCLHRIRQGFIEEKTATYNRLRGLISEFGVIAPQSTDALRHMVSEQKSSLPLQVQQCVNDLLEHIDRIEDNITEYDRILSRMAKTDHRSQRLMELKGIGPTTACALVASIGNAHDFKNGRQLAAWLGLTPSQYSSGGKSKLGRITKAGDSYLRTLLVQGARSVLIGAGKRTDLFSRWVCSLVDRRGYWRAVVAIAAKNARLCWASLHYGDDFRLYSAS

SEQ ID NO: 510466 - protein, 347 aa, unidentified
MNSVGIDLHRSRSHVAVLADDGTELLSRRIVNDPAIFLELLAEIDGESKIALEATYGWEWLADVLQDAGYELHLAHPLRTKAIASARVKTDAVDARTLAHLLRTELLPEAYIAPRELRELRDLLRHRVALTRMRSALKNRVGAILAKQGIQRPFSDMFGPAAMRFLAEVELRESPRRRLDSTLALIADFTREIDLTTREIEARAKDDAYVDVLCQIRGVGRYIAMLVIAEVGDVTRFRTARQLCSWAGMTPTVRSSDMRTRLGHISRQGSPALRWALVEAAQHASHGGGPLRQAFERISKRRGRQVAKVAVARKILTLCFYGLRDGEIRCLAPRAGARTLRTLAVTS

SEQ ID NO: 510467 - protein, 326 aa, unidentified
MTASHLSDNSFIGIDVGGASLDVAWHRGDSAHYANRPDAIAMLVERLQAQPEVTRIVLEPTGGYEKPLVKALRQAQLPVEVIHTTRFKAYRELVGVKAKSDTSDARLLAAYAAAPDDVRGRKADRVELPEDAIREALGELASRRDQIKHMIHAETCRLGTVRLTELRHAITAHLEVLRAEDKQVHQMMLALVRQRLDLRRDQRLLGTIKGIGVKSALALLASVPELGRIDNKAAAALVGVAPFVRKSGTMTAPARIHGGRAAVRSILYMAAVTASRHNPVLRPFYERLIAKGKPPKLALIAVLRRLVVFANAVLRSGQAWKGATTS

SEQ ID NO: 510468 - protein, 404 aa, unidentified
MALKIVYKICCGIDVHKNFVVACIAKTDKQGITTYERHHFSTYTKGLKQLLKWLLDRNCKDVCMESTGKYWIPVYNVLEHDCSIVLAHPKYVKAIRGKKTDKKDAKWIADLFKHDLVAGSFMPPADIRQLRDLMRYRFKLTCFKSSEKNRYQNCLTVSNIQLASVVSDTFGKSSQKIIAKILENPDNTSLDKLPELELAIDGYITPEQAAKLKIIKEHFDNLESRKAELEELILALANPYQQEISIILTAPGFKNTFTAIGIISEIGTNMEAFPSAKHLCSWAGLTPTNNESAGKKKSVRVSKAGCYIKPLLVQCANAAIKSKKHPEIRDRYLRIKKRRGHKKAIIAIARMLLTALYHMLKNGENYNSDLYQKSDILPTTREITVEQAILMAQFQGYRIKSATE

SEQ ID NO: 510469 - protein, 399 aa, unidentified
MKKHVSLELRVSVDVGCRNHNVAIGLSSGEILDEFSIAHEPEGFRHFFSRIEKQERKFGCPVAVAMEGFNGYARPLDTLVRARDYRLFNINNLKLARFKEIFPGAAKTDEIDARKGLELFQLRDHLPVAKDVLQEVYKTPQENDILKRLSRRRRRLVNERVRVLNNLQSDLQAVCPGLLEITGEADNLWFLRFLTSTDDLRKLARMREATIRKIPGIGVKYASVILQWQKRAQFSHDVEWVGEMIQEDAVRVMELHDKIQSLEAKIEDVAQGSDMAQTLATIPGFGAVCTAELAGEMGTIERFSNEGSLALYLGMANLDNSSGKQKGSKPPRQVNTRAKAAMMIAVDRHRKKVLESQRYYEKKRAEGKKHNQAVRALGRHLCRVIFKMLKMNRRYILSQ

SEQ ID NO: 510470 - protein, 388 aa, unidentified
MEPASIHPTAVRTDLGAIFVSLELSRSTWLITSLSPGSSEKMSKHVVAGGNVAELLDRFEQLQQKARLRTGKLFPIVTIQEAGLDGFWIHRVLEAHGVESYVVDAASIATSRRRRRAKTDKIDGEALTRTLLAFKRGEPRVCAMVRAPDPKDEDRRRICRERKVLIAERVRHVNRVKGLLFAQGVSGYQPLRKDRRQRLEELQTGDGRELPKHLKAQINRELDRLELLLEQIAAVESERNSLLSMDEQPAVEATSPAAMLLSLKGVGAEFATVLWTEALSRHFDNRRQIAAYAGLTPTPWMSGTIDHEQGVSKAGNPRLRTTMIQLSWLWLRNQPASALSRWFVDRVQSNGGRLKKAAIVALARKLLIALWKFVTAGVVIEGAVMKTA

SEQ ID NO: 510471 - protein, 343 aa, unidentified
MEKKRYLGIDLHRDCFTCCIRLETGRTYLSRWKVDELGKFVRKLRPSDEVAVEVTGNTRLFYQAVAPHVQRVVVVDANQFRVIAHSVKKTDPNDARNLALYLEKDLLPEVRMKDPQRAQIASLTQTRDTLVKLRTALKNKVNNLVSAQGINLSKESLASEKGLAAVLKFHFDPLVDLELKVIVEQIRSLNRSIAELEETIAREGQKLKGHSNLTSIKGIGKLSGSILLSIIGDVNDFAEEGKLAAYFGIVPRISHSNETEHSGRITKRGTKLGRTTLVQCALIAQRYSPYLKSYYEKIKRRRGTGKAIIALARKFLGIIYRTLKFKWTFADFPNFVLAEETTG

SEQ ID NO: 510472 - protein, 403 aa, unidentified
MIEEGPDLTSKNAPREQVVIAIDPHKASWTAAAVGLGLAPLATIRVAVSTEGYRQLRRFAARWPGAVWAIEGAFGLGAPLAMRLSGEGIDAVDVPAKLATRVRMLSRGHGRKNDDADAVSVGIAALTATGLRGVAIEEAMIALRALIEHRDDVVKTRTQTINRLHVLLTRLIPGGARSRLDADTAASLMRTVRPRASGPRTLRRLACELIAEVRHLDRRIATATTEISDALAASGSTLTQLRGIGELTAGKILARVGDINRFRSAAAFASYTGTAPIEVSSGDVVRHRLSRAGDRQLNYCLHIMALSQIQRDTPGRTYYQRKRAAGKSQKEAMRCLKRQLSDVVYRQLLRDATDQIATGPGGHQGATTNSSAAGSTPTTDSSDKSLPGPANPDPTTTHRDQLD

SEQ ID NO: 510473 - protein, 323 aa, unidentified
MKTIGIDISQDWFDAAFEASGRHRKSRFANTRKGFSEFHKWLKKNDIQKPHLFMEATGRYWEPLAMWCCSQGWPVTVLNPRHVRKFAESSGRYNKSDPLDSECLAEFGQTCRSEQARLWKPRSTAQAELREIHMEIEGVKRMITAERNRSKSCLRSIFVADVIRGNIEQLNAVRKELEKRALMIIKGSPELLPLYRALKMVKGFGDTSIIVLLAKIDFDQFKKGRQLVGFAGLAPRKWESGKSVHKKETISRIGHADLRAALYFPAITAMTHDPEMVEYKRHLQSLGKENKVIICAVMARMLRKAFAVVRDTKRAAQAAPVAA

SEQ ID NO: 510474 - protein, 404 aa, unidentified
MWFTGVDWADAHHDVLVIDETSRQVGSCRVTHTVEGLRQLQDFLLAITGPDRKEEMACIIETTHGLLIASLLEAGFPVYPVNPKTVDRRRSASGAKTDQIDAYLLAKHGRAEFADLRRLAPDRPLVQELKALTRDQDSLIQSQTRLVNQLTACLKAYYPVALHLFSKLQQRSTLLFLQTYPTPQEAMAASSDQLTEVLKNAGHPTAEQVAAKIFQTLHQPHLMADAITTRSKARLMQALLKQLLPLLEEIAAYDKEIERLFLTHEDNEVFSSLPRAGKRLAPRLLAEIGDNRARYAQTASLQALAGTSPVPYESGTYSRPHRRYACIKPLRNVLHQFAWQSTQTEAWARDYYLCLRKEGKSHSEAVRALANLWVRIIFAIWNKKEGYQTSTFEAAQQLHAKSVV

SEQ ID NO: 510475 - protein, 373 aa, unidentified
MDQHIRAFVGIDTSKLRNAVAVAEEGRGGDVRYLGEIDTTEAATRKLVTKLAAKYRQLTFCYEAGPTGYGLHRLIGKLGHDCIVAAPSLIPKKPGVRVKTNRRDAVGLAKLLRAGELTAVWVPDERHEAMRDLSRAREAARKDLRGKRQQVSSFMLRLGRHFPGKKTWGPAHMNWLMLQKLEHREQRIALEELLGAVRQEIERVERLEQAIRNAVPEWSLAEVVTALQAMRGIDLVAAVTVLAEIGDLSRFQNPRELMGYLGLVPSESSTGDTVNRGSITKAGNGRVRRILVESAWSYRYPPRVSREKQMKVAAAPRAVREIAWKAQMRLCGRFRSLTRKGKQPNVIAAAIARELSAFIWAINREVMAHATAS

SEQ ID NO: 510476 - protein, 368 aa, unidentified
MTTFSSAGNNCIMVGCDLHYESMVLKIAIDRDKPQTLSYANTFAGRKRLIADLTKRSLRAGRAKVHLVYEACGLGFTLCDELREAGFQCDVIAPTKVERSPKHKRTKSDEKDAERLLAVLRGHLLAGNDLPKVWIPCRQTRDDREVLRARLDAGDKLTKVKTQIQTLLKRKGIEKPKTAGSPWTVKYRQWLQQLTQCKGQLQGMAIALGSLLRQTKTLEDEVDQLDVQIASMSEEPRYKQPVDAMVAEKGVGRLTAMVFLTELGDLKRFSNHKQVSSYLGLVPSSNESGEKQDRKGHITREGPSRVRKVLCQAAWNWVRLDQRAKQHYTAMRERGKDKKKALVAMMRILGVRLWHLGLKGIQSQNLAA

SEQ ID NO: 510477 - protein, 334 aa, unidentified
MDKVWVFVGLDYHQDSVQVCVLDSGGKMLGNRVCDNDPRRVAEYVATHGRVRGAAMESCEGAADFAEGLIAAAGWSVDLAHPGYVHRLRQNPDKTDYSDARLLADLERVGYVPKVWLAPQAIRELRRLVRYRRQLVNERRNVKLRVRALLRSHRRGCAAPRWGVAWFRWMRVVELPEQSRWILDRHLDRLQQLNGEVQAVEERLDAATKDDPVVQKLMTLPGVGPVTAWVLRAEVGRFDRFRSGKQLARFCGLTPWNASSGSRQADAGLIRACNHDLRSVLIEAGHRLKRCDPRWSALANQLRQAGKPGSVIAAAVANRWMRWLYHEMTSAQAA

SEQ ID NO: 510478 - protein, 339 aa, unidentified
MQIHSVGIDLGKTTFHLVALGAAGKVLVKKKFTQKQLLAFTANMQTSLIGLEACSGAHFLGRALSRQGHDVRLIAAQFVKPFVKSNKNDFVDAEAIAEAVERKNMRFVPIKTDDQLDLQAIHRVRDRLISRRTAVINQLRAFLLERGMVFAQKPAKLKAAMADILENAEADLTPQMRNLIDMLWGEWKVVEQQIEELNDELERISARDAGCTRIRQIPGIGPVVATAIVAAIGNGAAFRKGREFAAWLGIVPRQYSTGGKAKLLGISKRGNVYLRKILIHGARAAVLRIKRDRAPIGAWLDALDARAPKNVVVVAMANKLARIAWAVLSSGNDYRPVAP

SEQ ID NO: 510479 - protein, 481 aa, unidentified
MGRRRTLRYETGLSFAPRRALENVGNVWYAQSARKLTWELPGPRNGAIEPAEQSREQDAPASAGASHKEGAMERVIERGCGLDVHKKTVTACVRRPGPRGEREQPVRTFGTTTAEVLALRDWLEAQGVTHVAMESTGVFWKPIFYVLEEAFVCVLANAAQIARVPGRKTDVEDCRWIAQLLEHGLIRSSFVPPAPIRELRDLTRYRKVLIQEHTRDANRLHKVLEDAGIKLASVASDVLGVSGRAMVEALVSGTTDPTVLAELARGTLRKKLPALRQALAGRFRPHHAFLVSQVLAHLDYLDEAIETVSARIDEAIAPFAAEVIRLDTIPGVNKRTAEVLIAEIGVDMGVFPSAGHLASWAGMCPSNNESAGKHRSGKTRKGNRWLRGALTEAALAAGPRTAKGALAARYRRVMRHRGHKKAVVAVAHAILVTAYHLLARKTTYQDLGRDYYDRRHAERARHHAIQALERQGYRVILEPAA

SEQ ID NO: 510480 - protein, 415 aa, unidentified
MERLYSCCCGLDVHKQTVVACLLRPAEGGQRRKEVRTFGTTTPALRSLADWLRAAGCTHVAMESSGVYWKPVYNILEGHCTVLLVNAQHIKNVAGRKTDVADSEWIADLLQHGLLRPSFVPDRAQRELRDLTRTRTTLIDERSAAVNRLQAVLEDANIKLAGVATDIMGVSGRDMLAALLGGESDPAVLAALARGKLRRKRAALEQALAGRMSDHHRRLVALHLEHIAFLDEAIARLSADIAERVRPCEEAIVLLDSIPGVDRRTAEIILAEIGVDMSRFPSAGHLASWAGMCPGQHESAGKRKKAPARKGNRALRRALTEAARAAARTKQAGRTRLAGQYRRLVVRCGKKKAAVAVGHTILRLVYHVLTHNEPYQEPDLSYLDERRRAQAQHRALTQLRALGYEVTITPKEPAA

SEQ ID NO: 510481 - protein, 390 aa, unidentified
MLYIGIDISKYKHDCIVVNDAGAIIRNAFSFDNSRSGFDQFTEMYRSLDPKEIKRIGFEATGHYQDNLKVYLERSGIGFMELNALLVHKFKNSQTLRGVKTDKTDARLIASYLSSIEFKPYPKISYHTLTLRSLCKRHFDLINERTKYLIRITNFLDRTFPEFKESINGNIKSKTAMYILHNYGIPAKIANINAQSYENIRKCSHGKFSVAKFNRLRELASNTVGFSYETDLLEIKSLLRVYDTLQDEISLVENEITTHLSKINSHIPSILGIGKVSAASIIAEIEDISRFDSPNKILAFAGLDPRIYQSGTQEFRGRMNKKGSVVLRRVLMNCAESVLMYNPAFYAYYRKKRDEGKSHRVAISHVARKLVRIIYKLETERIDFDLSIVK

SEQ ID NO: 510482 - protein, 403 aa, unidentified
MDTCFAGLDWASQTHAVCVIDAHGTVCERFEVAHDAKGLADLCRHLRHWHSPAIAIERPSGLVVDTLVEAGFTVVPIHPNAVKATRPRYRSHGAKSDASDAYLLADLLRTDGHRFKPLAPQSDDIRALRALVRGRDDLVATRVQLANQLRSLLESFWPGASVVFAEVDSPIALAFIERYPTPESAARLGPKRMAAFCAQHAYSGRRSPEELLARLHEAPTPVCAELEMQAKGELARSLATTLTRLVGQIRLLTSRTEHHIASLEDGRIMMSFPRAGRICAAQILAELGSVRERFDNVERLAAEAGVTPVTYASGKSKAVAFRWACNHRLRTAITCLADNSRHANAWAADIYTRARARGCDHPHAIRILARAWLRVIWRAWTDRKPYDPALHASAQLLLQTARG

SEQ ID NO: 510483 - protein, 319 aa, unidentified
MAEELYVGIDVSKAELVVAMRPSNERMTLANDRAGIKRLVGRLGELKPKLVVVEATGGLQRQMVAALWAAAIPVAAVNPSWVRSFAQGRGVRAKTDRKDAELLALYAEREQPDARPPADAETQALQELVMRREQLVEMLVAEKHRLSRAAATLRKELRHHIAYLEGRIKDLERDIDKTVRRSDAWRRKSEIVRSVPGFGKAFCAMVLAKVPELGTLNRKQIGALVGVAPMPDDSGPRHGRRVIGGGRFEVRNKLYMCAMVAARTNPVFKDFYLRLVARGKPKKLALVAVMRKLIVTLNAMFKTNSLWRQPCQMPSIAEN

SEQ ID NO: 510484 - protein, 322 aa, unidentified
MRYIGIDVSKATFVVAYSSDKGGGIRTFNNTTAGIRQFIGTLPKDGSIHCVMEATGNYSALLLYMLNVAGITVSMENPLKVKNFAKAMLSTVKTDKSDARLITLYGEKMNPRPFKVQGEAILRLRQKRTVIRQLTKQITAMSNLRGSLACLPVPDKGATHTVDETIKFLEKKRDRLQSELTDLVEVEFSRQLALLTTIKGIGITLATALIITTGGFTYFQNAKQVSRYLGICPTYEQSGTSVNIKGHINRNGDAYTRGLLYIAAWPASRFNAQCKETYTRLRQNGKSGKLAMIAVANKLVRQAFAVVAHDKEYVDGFVSNRP

SEQ ID NO: 510485 - protein, 369 aa, unidentified
MKQVTTYVGVDAHKKDLFIAMLVGDGSTPVTWTVPNEPNAVKRLVRKLERAAAGPVRMCYEAGPCGYALQRQVTTPRVSCQVIAPALIPRKPGDRIKTNRRDARKLAELFRAGLLTEVRPPTPEDEAVRDLCRARDDAREDLQRSRHRLGKLLLRRGLHYSGGRNWTQGHRRWIASLAWAQPAERVVVDDYLLAIDHLEARLIELDARLVEVAATEPYREHVGWLRCFRGIDTLTAILILAELHDFRRFPSPRALMAYVGLVPGEDSSGEKHRRGRITRTGNALVRRLLVETAWHYQHRPSIGIALTRRRKGQPGRVIAIADKAQQRLCRRFRRLMEHHKPAPKVAVAIARELAGFLWAALQPAPVPAS

SEQ ID NO: 510486 - protein, 309 aa, unidentified
MGTYIGIDVSKDRLDVHVLPQDEAFSVERNGKGLGELVERLKSFAPNLVAVEATGGFETTTAAAVAGAGLPLAVINPAQIRHYAQALGKRAKTDAIDAKVIARFAADVKPDIRPLADETARFLADLVTRRRQIVEMLQAERQREKRVTVRRLRKSIERLIKALEKELAELDGDIDDTLHASPVWREKEDLLASVPGVGPQTARTLIADMPELGTLDRKKIASLAGLAPYTRQSGRWKGKSMIGGGRKAVRCALFMAAMVAARHNPVLKLFRDRLIAAGKPKMVAIIAVARKLLTILNAIIRDNKPWQIA

SEQ ID NO: 510487 - protein, 431 aa, unidentified
MKNITKNRRLSEINTTTLIVAIDIGGYEHHARAFDWRGIEQQKKAFKFKNDRYGFESFLSWIERIQWMSGFTEVMVGLEPTGHYWFALFDYLLSRNLRLVITSPISVKQTKEAATTSASKSDPEDPKAIAHVMISGNYQEIYRPQGNYAELRKAYTLRNSVMEQKKATANRIHAWASTYFPEWHKVYSSVQRIGFLTLLRRAPLPSDIVKLGVHGILHHWHECQLLGGISRNRAERLVEEAKRSVGVTEASEMARVEIQMLLQHYDLQETQLVRLDKRLEELVEQYPGGKRLMQIPGIDLQIAAGFLAEVGDISRFPGAAQLQSYAGLDILRNSSGKRRGQSRISKRGRNKLRRIMFVAALCVVNHTSEFRAVHQYYKHRTKNPLKAMQSLIAVACKLLRVFHVMLTKDVDYDPNKVTCGLVVKSSEKQVA

SEQ ID NO: 510488 - protein, 338 aa, unidentified
MKIVTVGLDIAKQTFQAHGVDCKGKVVLRKRLRRVEVSSFFAQVEPCTIGLEASGGAHYWFRVLSRMGHTVRLIAPQFVKPYVKSQKNDANDAEAICEAVSRPSMRFVPAKKIEQQDLQCLHRVRSRLIGCRTQLVNQVRGLLAEYGIVLPQHVAQLRRHLPALLEDDGNELTISTRHLFRSLYEELVELETKIASADQRIERAFRENAECRRIAAVEGIGPVTATAVVAAISDAHAFRNGRQFAAWLGLVPRQHSSGGKTKLLGISKHGDPYLRTLLVHGARSVVYRAKTKIDCRSRWINDKQQRLGTARACVALANKNARILWSLIAKQQVYRPAV

SEQ ID NO: 510489 - protein, 352 aa, unidentified
MEKSNKLDFGGQHIYVGMDIHKKSWSVSIHTEQFEHKTFAQPPEIEKLTDYLQRTFPGATYHTVYEAGFSGFWLHDKLREKGIDCLVVNPADVPTKDKERAGKTDRVDCRKLARGLRNGEIKGIYVPSRVKVEDRSLVRTRQSMVRKQTRCKNQITSILFFYGIVIPEEGRWSRRFINWIESIRMERASGDFALKAHLEELKHLRQIIANLNRAILSLSRTEEYRADVLFLKSVPGISTLTAMILLTELADVSRFSSLDKLASYAGLVPDIRSSGETEYATGITFRRNAAIRALLIESSWIAVRKDPALTMAFNKLSTRMKKTKAIVHIARKLLNRIRFVLKNRQEYVPAVV

SEQ ID NO: 510490 - protein, 318 aa, unidentified
MNRKINQKEINIGVDTGKHQLDIYIRPLNIFFSVTNDEKGIKESINIIKQHNPTRIIIEATGRLEHAFIFACSKHKLPFVVANPVHVRRFAGAIGQLAKTDPLDAKLIAHYGEAIKPALSELKPESMRLMSDLLARRRQLMTMQTMEKNRIQIMPKEITGFIKPILTAIKNQIRKTDLKLIKLIESCGEYKIKNDIIQSMPGIGNVVAFNLLGNMPELGYITNKQAAALVGVAPINKESGTYTGKSKIRGGRHQVRTAMFMAMMSAMQCNPVFKEMYQRLLAKGKPKKTAIIACVRKMIVILNSMVRDGVYWSPEMSK

SEQ ID NO: 510491 - protein, 345 aa, unidentified
MNHPTTIAVDLSKSVFEVAVSRESGRVCERRRFSRSQLTRFFAQRPPATVLMEACGSSHHWARQIEGLGHRVLLLPPHHTRRYVLRDKTDRADATALLEAHRNEQIAPVPVKTLHQQTLAALHRIRSGWLATRTARLNAIRAVLRELGVGIPQGSRHVLPDLNVALSQPAGPVPEHLHAAVLSAASEIRQLEERIRAVERQLESMAGSLPAVRNLRTVPGIGLLTSTALVAFVGDPARFRSGRRFASYLGLVPRERSRGLQRHLGAITKRGDAYLRTLLIHGARSALYAAKRSQQPDRLRRWAIAVQQRRGHNRAAVALANKLARIAWALWTRNTVFHPATAQAG

SEQ ID NO: 510492 - protein, 337 aa, unidentified
MSLYCAIDLHSDNNVVVVIDDNDRILFRKRLANDLDVVLPHLAPFKEDLHAVAVESTFNWYWLVDGLAEAGYRLQLVNPCAVQQYQGLKQTDDESDAFWLAHLMRLNLLPLGYIYPKAERAVRDLLRKRLQLVRCRVTHLLSTQNQLWRSTGHKVDSKRIKQADDTLCELVVDPNIQRAIRANLTVIATLNTQIAKIEASVKSQMVTRPEFRSLLTINGIGDILGLTIALETGDIRRFPTVGRFASYCRCVRSQRLSNGKRKGENNRKNGNAYLAWAFVEAAHSIIRHHQAAHRFYQRKRAQKNGALATKALAHKLARAAYYVMRDRVAFDDQRLFG

SEQ ID NO: 510493 - protein, 332 aa, unidentified
MSYTAFIGIDVSKKTLDVAIVRKGEESIAHKKVSNDKVGIEDLLQWVHGQVGKRKRLYCMENTGVYSIELSSFLAVRKEAYCMENPLQIKRSMGITRIKNDKADAKMIARYASLHHSELRLSSLPEEGIIKLKALLAQRGRLIKGKHGFRTASNELKHYHCENVYELIVEQSNELVEMLEKQLKVVEKAIVELIHSEESLNKNYGLAKSVGGVGKTTAAYMLAYTNNFTLFSDWRKFGCYCGIAPFENKSGTSVKGRTKVSQMANRQLKGLLSTGACSAIQHDKELRLYYQRKLKEGKAPMTVINAVRNKIVSRVFAVIKRGTPYVETMTYA

SEQ ID NO: 510494 - protein, 351 aa, unidentified
MNVTKYIGMDVHRAMTVSAVLSATGKVVAEAIIETKGSVILDFIQSQRGTLWVTFEEGTQAAWLYDLIQPHVAKVVVCDPRKISTQGNKADRPDAKRLAELLRTNALTAVYHGERSTRALKELARSYSAIVGDSTRIKNRLKAVFRARGIDNSGGGIYTTEERECWTSKLEAGAVRLRVQRLWRELDTLDVLRAEAEKDMVVEARKHPSTRILQTVPGIGPVRAALILAFALTPHRFRSKRQFWGYSGLAVVSRITAEYELVKGRIRRTKKRPALRGLNPNCNRVLKDVFKGAAGTAANGPWRAYFESKVASGNKPELVLLTIARKIAAITLALWKKGERYDETKLTMHAV

SEQ ID NO: 510495 - protein, 317 aa, unidentified
MERCKLNTIIAGIDVGKGRLDVALYGRSETLVINNSPAGIGSLLDWLKSHGVTRVGLEATGGYERAVREAMGFAGLEVVMHQPLEVRLFARLKRMKAKNDRLDAALIAAATAQVDAVRAASDPRLSQLAERLTAYEQMSDQAAQMKTYLEHVTLKDIIRSYQARIRSLENLKARLLKDILALVAVHPDLAQRLALLRSLPGFGPVVAVAVLIRMPELGALEPGKAAALLGVAPFDSESGQHKGQRFIQGGRSRPRRLVYIAALAAKRVDTGFRAFAERLRSKGKPPKLVLVAIMRKLIEAANLILRQQRPWRTRPAQ

SEQ ID NO: 510496 - protein, 340 aa, unidentified
MKNVFVNYGVGVDMSKDSFHGCFSATTEQGNVKVIAQKKFKNNQTGHKQFKVWIEKNRKNKALNYQILLEVTGVYHEELLFFLHDNKMVACLELSKRVKKYLEVLGQKSKTDKLDGKGIAQMACERKFKTWRPASKQTLQLRTLLRHRKSLLQSKTRYSNQLHAIEHSALKSKEVIKSLKKMMKSLEKQIQEIEKIAINLAKKDEQFFEKITLIVESVKGLGMLSVLTTVAETNGFEGFESSKQLVSYAGYDVVENSSGKYNGKTRISKKGNANLRTTMYMPTLSVIRTKLKPFYDLYLRLLAKNGGLKKKAMVAVQRKLLVLIYTLWKKNEAFDISYYG

SEQ ID NO: 510497 - protein, 374 aa, unidentified
MKKSLQPVNRKIAYLGIDYHVATITVAVIIEGENDIDKTIRFANQDKMIKKYLKKISANYTVKACYEASGSGYVFQRKMESWGYHCDVIAPSLIPEKRGDRRKNDYRDAIKLAKNYANGMLTVIHQPTQAEESVRSLIRCRLALKETEKRTKQKINTFILSQGCRWPKSRWTQQHRQWLSKLEMYNRHSQTVLEEYLGHLNYLGTRIRHIDLEIEKIAKTEKYWPDVKKLRAFRGIDILSAMILLSEICDFRRFPNPRTLMAFLGLIPSEDSSSDKQKGGPITKTGNRRCRTQLIESAKHCVKKPCISLKMKENLKDVDAQSSNIAIKCMHRLHKRYWALVMKGKNRNKALTAAAREFAGFIWAMMRPDEVHSG

SEQ ID NO: 510498 - protein, 345 aa, unidentified
MAQQTIIGIDLAKHVFQVCMVTPTGTLKTNTAVARGKLLALIARQPPALIFMEACGGAHDWARRFGAMGHEVRLLAPQYVTPFRRGQKNDPNDALALTEAGQRPNLPTVPIKTVEQQDLQALHRVRERLVKHRTAVVNQVRGLLLEYGIVIPQGIARLRKRLPRVLEEADNGLSFLMRDLLQSLQSELSALDTRITDITGQLARLSHEREACQRLQEMEGIGPLSATALVAALGNGHDFQTGRQVAAWLGLVPRQHSSGGTTRLGGITKGGNAYVRRLLIHGARSVISHVRDKPDAKSAWIRQLVTRIGVNKACVAVANKMARVAWALLHTGEQYRKPVALPLEH

SEQ ID NO: 510499 - protein, 397 aa, unidentified
MYIVGIDIAKRKHEAAVIDGEGAVIIKPFSFTNNCSGYNRLLAMLAKAKLPLDEVSFAMEATGHYWLALFTRLQKEGFRVQVINPVQTNSIRSFYIRQAKTDPRDALLIAEVIRFGHFSESTLHPENIYELRELCRGRHAIVSMQADVKRKVVALLDQVFPEYETAFTNMFSDTSMAILQTCPTPKELSEMPLEDLCHLIEVSSRKRFRMAKAQELQELARNSFGFAMAGDVFSTMIRLYAKHLDFLKQQVREMDRKIAEIMDTLDTPITTITGIGPTLGAYILSEIGDISRFSSAAKLAAYAGIDPTMRQSGEYNGVRNRMSKRGSPYLRHAIWLAASSAVLHDPALKLYFQKKRDEGKPYMASVGHACRKMVSIIYAVMRDNKAYTPCIQNEISA

SEQ ID NO: 510500 - protein, 350 aa, unidentified
MVVVGADVHKRTHTFVAVDEVGRKVGEKVVAATTSGHRQVVRWARSQFGVELVWAIEDCRHLSARLERDLLSADQKVVRVPSKLMAQSRASARTRGKSDPIDALAVARAYLREPDLPVASHDEVSRELKLLVDRREDLVGQRTSTINRLLWRVHELDPGRAPKPASLDLSKHRRLLGDWLATQRGLVAELAREELADITRLTEAINALTKRIGERVRAIAPALLAMPGCGELTAAKIIGETAGVTRFKSEAAFARHTGVAPIPVWSGNTAGRVRMTRSGNRQLNAALHRIAVTQIRLDGLGRAYYRGRLAAGDSRPEALRCLKRRLARVVFHHLHTDHHNRIQPCQPAAA

SEQ ID NO: 510501 - protein, 482 aa, unidentified
MKKPNIYQNQSQQLLHLFEEAGSSEKVMCVPMDYAKNDHLVMFCNGHGDILRKPFSVKNTPEGIAYIDDQVTRSCRRRGIKKKHVFFGGEDANSFAKNFVSTLRSKGFVVANVNAHDAKKQRVNMQASTDRIDLMGIATMLLNCRANCCAAQSGIYRNLRTLVRHRRRLVQMLTEVKNRVHGIVDELFPGFLNENNSGIVPFTQSSLYLMQDRFSPKQIRRRKRQKLVEILKRLGTSKAEHTAAKLQQYAAKVLHAPVAYVDTMQLSLAQHVKHIRCLKESVAQMDKEIALNLAQTQGAFLTSVRGIGLVLAAGVTAEIGDPNEQKPLNNLASYCGIVPRVKQSGGLDGKTYTSPVAKRCNRILKDYVVKSAYHLGLHGPQDLMADYKRRDASGQHADFGIGRRYLRMAINLMRTSQVYLPPNLRKDDSTLQKRAGYYLMSWPYLKEKWKKVGALEAAFANNRPLGLWRQIVQELYDIKLKL

SEQ ID NO: 510502 - protein, 436 aa, unidentified
MSKSQNPTKEVIPIMKKRIYRRMPVNDFQPQSISPADLGGKLVFAIDVAKVDMVAAFAGADGRVLQTICWKAPEENPTVLSILRSFRAAGVTIEAVMEPSGTYGDVLRHQLEREAFPVFMVSGKRTFDAKEIFDGVPSLHDAKSAAIIARLHVDGLSTRLPEEVPERRQLKAALAIMDLHQERYQQLVHRLESWLARHWPELPALIELTSSSLMALLARIGGPADVAAAPDQATKLLRGISHRLIADDDVAAVIASANTSVGVPLVGLERDALMAIAADAYRAHRAFATARTKVAQLADTTPAATLVPVVGHTTAAAVFAEVGDARSFSCTRAFLKAMGMNLKEKSSGTVHGQIKITKRGPSRVRQLLWLAIFRWIQKDPIANAWYLRKKQKDGGRASRAAVALMRKLAKGLYHVGRGGTFDSSKLFDTRRLQVVA

SEQ ID NO: 510503 - protein, 391 aa, unidentified
MGYCRCPNGSEVKPFEFSNDRTGFQKLWDRICWTKMAHHLEEVVVGFESTGAYGEPLVHYLREKPVKLVQINPMHTKRMKDLEGNSPGKTDRKDPKVIADVIVLGHALSVVIPEGAAAELRRLTHARERSIQRRTALYNQLQDLVFILFPEFLEVMKDVKTRTAQYLLHHYPMPQELLKLGLDALGAVLRRISRGKLGKDRAQALYEAAKQTVGIEEGRIGILLEIQEILSQIAASECFVEKVEQEMSYYLQQIPYSHSMLSLKGIREVTAAGLIGEVGDFRQFHTLREVMKLAGLNLFEISSGKHKGNRHISKRGRPLLRKLLYFAAINTIRKGGVMHACYQRYLERGMLKTKALIAIARKLLGILFALVRDHSQYVENYSQKEALKLAA

SEQ ID NO: 510504 - protein, 356 aa, unidentified
MNKRSKLDFSGQPIYIGLDVHKKSWSVSIFTQHGEYKTFSQPPEAEILSQYLQHHFPGAQYRSVYEAGCCGFWIHDQLKDTGIQNIVANPADIPTRDKERKNKRDRVDCRKLARALRGDEIEGIYTPARWKLEDRSLIRTRLSMGRKQTRCKNQIKSMLLFYGVGIPERREMGHWSRRFIRWIEGIRMERTSGDMALQSHLEELCHLRQLIAKLNRAIVALARTEQYRSWISLLKTVPGISTLTAMIVLTELHEITRFGSIDPLCSYVGLIPDTQGSGEKEHVGGVTQRHHSQLRWLLIEASWIAVRKDPVMMEAFQEYCKRMRKTKAIIKIARKLLNRIRYVLKNQVEYVTGVIE

SEQ ID NO: 510505 - protein, 432 aa, unidentified
MMTIMKTINTSEFAATIGLDWADRKHDLWICPEGQAKAEHLRLDQTPEALHHWVAKLRERFPNRRVAIAVETSRGPVISALMAYDFIVLFPVNPKGLKDYRGAFCVSGAKDDRTDAMRLEELVRLHRDKLHALEPDTELTRKLAGLVENRRHLVDERTRLVNQQHSTLKTYFPLALDLLEDQMNTLLAAEFLTRWPSLAALQKEKPKVLRAFFYQHNSRNAQRIEQRIQAVPAAQPLTTDAAIIEPACALVSARAGMLRPLLKAIAHLDEAIQEAMDQHPDAPIFRSFPGAGPALAPRILVAFGTNRDRFASADEVAQFYGIAPVVEQSGNSKTVHVRYRCPKFGRQSFHENAACAFKKEPWARAYYDQHKKKHDDKHHPACRALAFKLIRIYFACWRDKRAYQSDLYVQALRKNGGPLHKTLKTQRAPSCE

SEQ ID NO: 510506 - protein, 357 aa, unidentified
MQTIACLVEEVLLGVDTHLDTHTAVVIDLLGRELDTRTFPTSRRGIDALIKWAQLRGTIRRAGVEGTGSYGAGLARCLVLEGIEVVEVTRPARRGTRHRGKTDDRDALAAARVVLSGEARAIPKTRDGIVESIRVLRNTRASAVKARTQTGQQLRSLVLTAPSELRESLRDLSTTKTVARCARWHRVHPTNATRSTRLAMRVLARRHEALDDEIAELDTHIKALTKTAAPRLLAQRGIGPETAARLLIVAGDNPDRLRNDSALAALCGASPVEASSGKTTRHRLNRGGDRQGNNALWTIANNRMIHDPETRAYAARRTKAGKSNKEIRRCLMRHVARGIYPLLIADLRDAETHVHLT

SEQ ID NO: 510507 - protein, 430 aa, unidentified
MKSNTQNAKIEAITEKTLVLGIDVGSETHYARAFDYRGIEYSKKPFKFSNTEAGFVTFKEWILDLKERHEKDKVVLGMEPTGHYWFNLGKFLQDNEMKPVLVNPHHVKKSKELDDNNPTKNDRKDPKVIAGLVREGRYMIPYLPDGVYADLRTASNIRFQLQAELTRIQNRISRWFNIYFPEYKTVYGNPDAKSGMLILKAAPLPEDILTLGIDGVNQIWRDAKLRAVGKARAKTLIEAAEHSVGSKEGAVAARMEIRMLLEDYESRSIRLQEVMTLIEGLVKQIPMAEKLLEIKGVGIRTVSGFLAEVGDISRFNNPKELQKLAGLALVENSSGKHKGETTISRRGRKRLRYLLFEVAMSLVAKNPEFRELHNYYTTRRLNPLKKMQSLMAIAAKLIRVFYVMLTKGVNYDPKKMVNDIKRPAVYLQTA

SEQ ID NO: 510508 - protein, 417 aa, unidentified
MKKHSNSLKQSEAPAKRRKLGVVVERKPQEVMAELIVKLAGQLDVEIVPAVEGKKDGRDAVRPNLDRLTVGVDLGDQWSNYCILGLGGETLVEGQFRTRKQEVAEFFQALAMSRVVVEVGTHSAWVREIMAGFGHEVLVANPRLMEGSKRRRRKSDRIDAEKLARLGRMDPKSLHPIEHRSTEVREDLVILRARDALVKSRTELINSVRGQVKSMGGRVTGCSSVAFSQKAIAEIPEEVHETLQPLLRLIATLSEEIKTFDQRIEKLAAEKYMQTQLLRQVSGVGPVTALAFVLTLETPLRFARSGDVGPYLGLVPKQEDSGDIQPQLGISKAGDRMLRKLLVGSAHYILGPFGPDTDLRRFGMRLCERGGKNAKKRAAVAVARKLAVLLHRLWASGEVYEPLGHGSVTRPAQAVAA

SEQ ID NO: 510509 - protein, 410 aa, unidentified
MGHHTEAFVGIDTSKSRNAVAIADSGRGGEVRYLGEFPATEAAIRKLVAKLAAKCCHLTFCYEAGPTGYGLYRLLKSLGHDCLVVAPSLVPKKAGDRVKTNRRDALSLAKLLRAGELTAVWVPDERHEAMRDLSRARLAVKKDLQGKRQQISSLMLRLGRIYPGKTTWGRAHMRWLMEQKFEHREQRIAFEELLEGIRQESERVERLENAIREAVPEWSLAEVVVALQAVRGIDLIAAVGVLAEIGDLSRFQNPRELMSYLGLVPTENSTGDKVKRGGITKAGNGRARRILVEAAWSYRYPPRVSRDKQPKVEAAPRRARDCVESANQTVRTLPLTRAERQAANGNRHGDCSRAIRLHLGDQSRALATSTGVTSLGAVDRSSREMRSTGPQPPLLQSGSGGQSQTLIVQR

SEQ ID NO: 510510 - protein, 413 aa, unidentified
MSIAPDPLHGRVTAGLDWAKDDHAVCVVGDQGEVTDRFTVRHDAAGLKQVARLLLRAGVEQVGIERGDGPVVDTLLAAGLTVFVIPPGQVKNLRSRYGSAGNKDDRFDAYVLADVVRTDARRLRPLLTDTAATTALRCSVRARRDLVGHRVAAANQLRAHLQIVFPAAATLFTDIDSAITLSFLDRFATQDAADQLTPQRLATWLKSVSYSGGVDPTLLHARILAAPRGATGAHASTHAGTTAALVALLRVLNTQIHALATSIGEQLATHPDAAIFTSLPRSGTIRAARLLAEIGDARGRFPTRESLTCLAGIAPSTRQSGKIKTVTFRWGANKQLRDALCDFAGDSRRANPWAANLYDQARTRGCDHPHAVRILARAWAHIIWRCWQDNLPYNPAHHRALQTLLNQDQPAAA

SEQ ID NO: 510511 - protein, 349 aa, unidentified
MSQNFNSAVAVIGIDIGKNSFHVVGLDDRGAIVLRQKWSRGQIEARLANLPPCLIGMEACVGAHHLSRKLKALGHDARLMPAKYVRPYSKGQKNDFRDAEAIAEAVQRPTMKFVATKTVEQLDLQALHRVRERLVSQRTGIINQIRAFLLERGVAIRQGLRFLRAELPRILATSPDVLSARMVRVIRDLAEDWRRLDERIDQLFGEIAVLARQDAGCERLMSVPGIGPIISSAMVAAIGTGEAFSKGRDFAAWLGLIPKQISTGDRTILGKISKRGNRYLRVLFVQAAWVVLIKPMSWERHGLRSWIEAAKKRLHRNVLAIALANKLARIAWGVLAGGRIFEASKLQAA

SEQ ID NO: 510512 - protein, 512 aa, unidentified
MPADADYSVGCEPVYEPGVGARPGRVTHCCFEHAGQTFGSLTDAPGQPARWKICGLGWRTSEVRMQPEEIPDDDHELVIERVCAIDVAKASGKVCVRTPHPNRPDRRTSRVWDVSATSRAVTELAEHLIGEGIERVTVESTSDYWRIWFYLLEAAGLDVQLVNAREVKNVPGRPKTDKLDAVWLAKLTEKGMLRPSFVPPVEVRQLRDYTRLRVDLTRERTRYWQRMEKLLEDALIKVSSVVSRLDSMSVRDMLEALIAGERDPRRLAELARGKMRPKRAALIEALTGRFDDHHAELARLLLSQIDALSSHIDTLTRRIDELLAILTDPRRGPDDGYRIGDDGAAPFVNGLQAAERLAEITGIGPVSAPVILAEIGTDMTRFPTAAHLVSWAKLSPRTIQSGATQRGGKTGKGNPYLKGVLGEAAAVAARTDTFLGERYRRIVKRRGKLKALVAVARSILVVVWNLLADPTARFHDLGADYHTRRADTDRRLRNHLAQLAALGYRVTVEPAA

SEQ ID NO: 510513 - protein, 366 aa, unidentified
MKKTSTVRVNRNLIFKGHKLTIGVDLGDHWSCYCVLDEAGKIILEQKVATTPEAMKQTFSKIPQGLIAMETGTHSPWVSRLLTELGHKVIVAHAQKVQLITKSNRKDDRHDARTLARLARIDAELLGPVRHRSAQAQIHLTVIRARAELVRARTALVNATRGLVKSYGQRLPKCGTRQVSRELGAGLHAELREVLEPLFKEIESLNERIQEYDARMEKIAKASYPQVELLKQVKGVGTQIALTYVLTLDDPHRFPKSREVGSFLGLRPGRRDSGESQPQMRISKEGDRYLRTMLVQGAHYILGPFGADSDLRRWGLKLAGRGGKNAKKRAVVAVARKLAVLLHRLWVSGEVYEPLRNSQKAMRVAA

SEQ ID NO: 510514 - protein, 416 aa, unidentified
MKTLHKRCAGIDVHKTEVVACLRVITHRKVEREVRRFPTTTHGLLELAEWLESARCTHVAMEATGVYWKPIWHILDGRFALILANAAHVKTVPGRKSDVNDATWLADLLAHGLIRPSFVPPAAIQELRDLTRSRKQLTREVAQHSQRIQAVLEEANVKLCSVITDILGASGRRMLKAMIAGEADAHKLAAMGSERLGCAPETLVEALTGRMREHHRFLLAQHLRTTEQLEKTIAAFDARIEEKLVPFRDTVERLKEVPGLGSTVTEFVIAEIGLDMSLFPSAGHLLSWAGFVPRLDESAGKSRSTRIRKGAPWLKPVLVQAAWGAARKKNSYFQAQFLRLKARHGAKKAAIAVAASILTTVYHMLRDGTCYQDLGPEYFTRRNRRNPRPDWPIASAISATTLKLGLLHEAPDRVSS

SEQ ID NO: 510515 - protein, 429 aa, unidentified
MQNESTPGARGPVFCGVDTHADSHWLYVLDWRGRKVLSRQFPADAAGYEALAGAIAAAGEPACVAMEGTSSYGAGLTRHLASLGMPVREALSPARMQRRRPGQGKCDEADAERAARAAMSGSRLGTPKSQDGWVDGVRCMLAARSGAVKARTSAINTARSLLTTAPEGLRSRFRGMGGPRLMEELPSVRAEGALGAALGALADLWAAARDAALDMERAIEASLEENCPALLAMYGCGPVSAAKLAVAAGDNPGRLRSEASFAAICGACPIPASSGKTVRHRLNRGGDRQANSALHEIARQRVMRDPETAEYAERARGRGKSDREVMRCLKRYVAREAYRALMRPHEIRRPEDASELVAARRAAKISQVRAASILGTSEKYISMLERGQRELKPIRRAYEAWVEAGLPLDWDRQAFEAERKMDSKKHLAK

SEQ ID NO: 510516 - protein, 351 aa, unidentified
MKYYTSTSEFNCGIDLHSKQMYVCIMDREGQVRVHQNIRGNDFEYFLKLAKPYLHDLTVVCECTFNWYWLADACFASGLEFVLAHALYLRHISGGKNKNDRIDSEKLAHLLRANLIPPAYVYPAERRPVRSLLRQRMSYVWRRSEILAQLTMKQMVQGRAPVAKGGHNREVWEERILEQVKHPLHRFSTTCDMEVVRVYDRQIQRLDQEVTRQAKKHEARDHQLLLTVPGVGRVLSLTILFEMDTVERFPSVKDFVSYCRLVKGSVASAGKVKGLCGGKMGNAYLRWAFGEAAIIAKRNHPLLKPYAERLVSKHGKYKGNSILASKLARAVYHMLQAGTVFDAEQVVSRSI

SEQ ID NO: 510517 - protein, 423 aa, unidentified
MRYSKVKQIRPNTLIVGIDIAKQTHWAQIMLQGRLIGKAFSIQNTREGFENLVRTLKAYQQKLGATNIVVGMEPTGHYFKPLAYYLHGTGMCEVVIVNPYHVNRSKELDDNSPSKNDRKDARLIAKLISQGTYFNLPLIFNTWAELRTANVSRMQLTQKRWQLKCQLITILDQYFPEFPDVFKNVLGKGAMYVLTHCPFPVDILELGEQTLCEGLRGATHNRVGQKRAQKLWEAAQNSIGIKEGAKGARLQLTHLVEELNLIHKQLEETEKMMSQLLKQTGLGDYLTSIPGVGMVTAAAFLAEIGNPDEYESYKQIQKKAGLNLKENSSGKHKGKTTISKRGRPSLRQLMYQIAYVSVAKNAEMKAFYEYLKNRKENPLAGKQALIAVAVKMMKVMLAVCKNRSHYDGSKVGNQNLVVRMQAA

SEQ ID NO: 510518 - protein, 394 aa, unidentified
MILVGIDIGKNKHTFSIIDKNSGEILLSPSDFSNNLKGFLFLIQKLSSYTKSELLIGMEDTGHYHFALLKYLLDRRYTVALINPTTTDLTRKLQGGITKNDPLDSLTICDVISSNHRNKPYRVTTLNRFDLYEQKQLTRHHHNLKEELNTYKNRLQKCIDIVFPEFNSLFHSKYGIVYMNILKAFSSAKAIANADIRSIRKCFEFKGQGKRISLSAEQLKLTAKSSIGIPSVAEEIQIRHLVSQIELLEKQLSEIDKRIEEFSLKNNSPILTIPGISHFSGTSIISELGDICNYTKASQIIKFAGVAPYHYESSQFTAQHTAITKKGSKYLRKTLYQIILPVISNNEVFYAYYTKKLNEGKGHRCAQGHCIRKLLRVIYHLLSTRQQFNPKLLV

SEQ ID NO: 510519 - protein, 395 aa, unidentified
MFIVGIDIAKRSHEAIIIAEDGQVVRKAFSFRNNCTGYNLLLEQVRKLTLVKSQIVFAMESTAHYWLALYARLLKDGYTVMVLNPIQSHSLRELYIRKAKTDARDSLIIADLVRFGRCKASNVPQDKILALRELCRSRAYLVDMAADLKRKLIALLDRIFPEYESLFDSVFSKASIAVLSKYSTPQKVKNANLRKLTDLLMESSNGHFGEWKAHQLKEAACSSFGIDDSGGVYSMLLGMFLEQILSLTAQADSLEKQISVFFQEFNNPLTSIPGVGTVLAATILSEIGDITRFSSADKLLAYAGLDPSVKQSGEFKSNQNRMSKRGSPYLRRAIWLASTVAVHRDPMFQTYYEKKISEGLHYMNVIGHVSRKMTAVIFAVLRDGQPYQPILQSAS

SEQ ID NO: 510520 - protein, 423 aa, unidentified
MELVHERTAGLDVHKDSVVACLRQMAGGKAKRECRSFATTTQELEALRDWLSVSECAVVAMEATGVYWMPIWKILSEGAFTLIVANAAHIKAVPGRKTDMNDATWIADLAAFGLIKASFVPDEDFQELRALMRTRKQLVREQTGHVQRIQKTLTEANIRLDSVISDIMGANGRRMIEAMIDGVRSPHKLAALGDRRLKATPKELYDALHGRLTENHRFLLKLHLGQYDALDGTIRIVDEEVQARVSRMDKEGAADKAPFSGLIDLLVAIPGVSRVSALTILSEIGRDMSRFATAGHLVAWAGLCPSQNESAGKRKRSRLRKGAPWLKAMLVQCAWAAKRTKSSYYKAQFFRLTARRGPQKAICAVAASLLTAIYHMLEDGVAHKDLGVAYFDKRKPEAKVERLVRQIKKLGYEAALKPIAKAA

SEQ ID NO: 510521 - protein, 410 aa, unidentified
MEVLFERVAGLDIGKESLCVCVRTPGPGGRRMSQTRTFKTTTRSLVVMREWLVESGVTIAAMESTSTYWKAPFYCLEEVMEVWLLNAAHMKAVPGRKTDIKDAEWIAQLLECGLLRPSFVPPPDIRRLRMLTRYREQLMGDRTREAMRLELMLEDASIKLSTVASSLTTVSARAMLTALIDGERDPRALADLAKGRMRVKIPDLTEALTGHFDAGHARLARSILDRLDAVEAALAELDAVIAEACAPWAHQLELLQTIPGVGEKVAQVIVAETGADMSRFPSAAHLAAWAGVAPAIHESAGKRTPAGLRHGNKWLSHMLVEAAGSVGRMKGKNYLSAQHARLTARRGMGRAQVAVAHSILVSAYYMLLRDEPYADLGADWLARRNTEAHTRRLVAQLEKLGHTVVLDPVA

SEQ ID NO: 510522 - protein, 418 aa, unidentified
MSTTLLPSSEEEVIKYVCGIDIGSRSCAGCICRPNKSVVVKPITFANAREGWQVWEEKLRQLDASPSQILIGIEATSRYAENLYQELEQRGYVLRLLHPRQTHQFHERQGLRAKTDRLDALTIAKVLLSGEARAGYVPSEQIATYREMVRLHMQLSDEAAGYQNEIQVLVVVLFPEFTQIFADPCLPNALRVLKTYPSAQAIVEAGVEPIVQVLQAPTQPSPRYGRPSVKKLVKLAQSSGSSGRAVAGRSISLRILCDQLEHTRANLTQLEAEIEQLLTDDPGVKGLQQIPEFGSKTVAVLRAELGDAQRFARTDEVIAYGGMDIEIKESGLWKGKAKLSKRGSGLLRRMLYLAALRSIHMKNSPFGAYYHRLVERGLKKGSALMAVMRKMLAVAAHLLLHEEEAYDPSKVCAGAAVR

SEQ ID NO: 510523 - protein, 430 aa, unidentified
MKSNTQNAKIEAITEKTLVLGIDVGSETHYARAFDYRGIEYSKKPFKFSNTEAGFATFKEWILDLKERHEKDKVVPGMEPTGHYWFNLGKFLQDNEMKPVLVNPHHVKKSKELDDNNPTKNDRKDPKVIAGLVREGRYMIPYLPDGVYADLRTASNIRFQLQAELTRIQNRISRWFNIYFPEYKTVYGKPDAKSGMLILKAAPLPEDILTLGIDGVNQIWRDAKLRAVGKARAKTLIEAAEHSVGSKEGAISARMEIRMLLEDYESRNIRLQEIMTLIEELVNQIPMAEKLLEIKGVGIKTVSGFLAEVGDISRFNNPKELQKLAGLALVENSSGKHKGRTTISRRGRKRLRYLLFEVAMSLVAKNPEFRELHNYYTTRRRNPLKKMQSLMAVAAKLIRVFYAMLTKGVDYDPKKMVSDIKRPAVYLQAA

SEQ ID NO: 510524 - protein, 346 aa, unidentified
MLYAGLDLSRKRLDFHLLDGEGATVERGATPPDADGLHRLSERVARHGAPVRAAIESMNGARFVHDRLQLAGWQVEIADAQKVKGLAPLACKTDRIDAWVLAELARRDLVPAIWLPDPLVRAERERARWRLHLVHHRSSLKQRVHAVLLTHGKPCPVSDLFGVRGRQLLARLGLPEPWQGTIEASLRLIDELDREISDCERELRRLGAEHRYVPLLLTVPGISWVLAYTIAAELGDINRFPTPRKLAGYTGLCPRVYQSGERDLRGPLAKQGPRYLRWALVEAATHACTHPIYRQRYTQTKARIGKQRGAKVAQIDLARRLSEAIWHMLSRNQPFAPKGATDPLAA

SEQ ID NO: 510525 - protein, 390 aa, unidentified
MIYVGIDIAKLNHFASAISSDGKELMKPFKFTNDGDGFQMLHSRLEELSRSGDSIIIGLESTAHYGDNLVRYLVACDYSVCVLNPIKTSVMRKDNIRKTKTDKVDTFLIARTLMVQDSYRFVSFYDLDLMDLKQLGRFRQKTIKQRTRLKIQLTSYVDQVFPELQYFFKSGLHQKAVYALLKEAPTPQDIASMHMTHLSHLLVAASHGHFKKEQAKELRVLARKSVGASDSALSIQITHSIAQIELLDSQLNSVEAEMTQIMKFNDPVIMTIPGIGYINGGMILGEIGDIHRFSSPNKLLAFAGLDPSVYQSGNYSAKRTRMSKRGSRVLRYALMNAAHNVVKNNATFKGYYDKKMAEGRTHYNALGHCAGKLVRVIWKMLTDEVEFNLD

SEQ ID NO: 510526 - protein, 413 aa, unidentified
MLKNALFCGIDTSLNQNTVCLLLLDGAYAKKLFNLANNRFGAESLTNTIEALLREHSLDTVLVGTEATSMYDWHLLEYLAESHLNINYHLKLYRFNPKWIKNFKKSLSPHGKTDPIDSYAIAERLRIGLLPAEYIPDYKYQPLRRLTRFRCHLMKSLMREKSYFLSNLFLKASSFNSLKPFSNTFGATSLTTILEFFSTDELASTPVEELIDFITKHGKARFKDPKQTVNLLKRASRESYRLRPEILPMVNLVLASTLNNIRCLKDNVKRVDEAIAKEIKAFKHTLESIPGIGPVYAAGILAEIGDIKRFHSQAAVAQFAGLTWPPYQSGGFEAEDKSLSKTGNDYLRYYLIEAAESVRKNDPVYQTFYQKKYQEATKHHHRRALVLTARKLVRLIWALLTKEKLYQPQFALL

SEQ ID NO: 510527 - protein, 370 aa, unidentified
MQTIHRSQMLFVGVDVHKDTHTAVGLTPFGEKVFEMTIGNEAADFISLVEKTKVEAEKSGLVPSFGLEDVHSWGERLSSFLVEVGMPVRAVAPILVDHRRQKATHPEKNDSLDAQGVAEVMIQRTDTLPTYTLSEEAQKAKQIRELSLEREWLVKERSRLKNQLHILLHRIHNTGYRMKFKDPFSKKALRYWMRSAPKDIDVILEQRMKRAVRRLLDLGEEIQEIEEELDALMKDNGQTLSTASGCGTVIAAEIVGEIGDIARFHSPGALAKYAGCAPREHSSGKTVRWRKTRSGNRRLNRAFHRMALSQISRSGNDAARAYFKRKISEGKTKAQALVCLRRQLVNVVCMMLKHKTEYRYPQEKVVDFSS

SEQ ID NO: 510528 - protein, 304 aa, unidentified
MFVGIDVAKNRLDVHVRPSGEAFTVARDGGGIDELAKRLGAAAPALVVLEATGGFETVVAAGLAAAGLPIAVVNPRQIRDFARATARLAKTDMLDAAVIAHFAEAVKPPVRPLADPQARLLGELMARRRQLIEMITAEGNRRRLLTARRTLKSVDRVLATLKAQLERIDDDIDTAVRGTPAWREAEDLLLSVPGIGPKIARTLIAEMPELGRLDRKEIASLTGVAPFNRDSGTLRGRRAISGGRPAVRSALYMSILVSIRRNLPLAQTYRHLRATGKPAIVACMRKLVTILNAILRDKKPWAIA

SEQ ID NO: 510529 - protein, 354 aa, unidentified
MLTTSTTNGTAVVFAGVDTHASTHHCAVVDDAGRVLGDKEFPATAAGHQDLAAFARSLGPLDRVGVELTGSYGMNLTRALQAAGIRVVEVNTTDKATRARRGKDDRTDAIAAADKARSGMASATPKDTAGTVEAIRVLKIARDSAVTARTQALNQIKDLRITAPQQLRTTLEGLTLPQIAKTARAFRPDPARRHDPVQATKSALKHLGTRIAALDAEITAADKDLTTLVQATAPTLIARPQIGTQTAATLLVCAGANITRIRSEAAFARITGTAPVPVSSGKTTRMRLHRGGNRQANAALHLIAVGRLKNHPATRAYRDRKLTQGHSNKDAIRSLKRYIAREVFHALTTDLTSA

SEQ ID NO: 510530 - protein, 356 aa, unidentified
MQTQVTKKIDFTGKDLFIGLDVHKKSWSVTILVDGMEHRTFTQPPDPEVLYKYLQRSFPGGNYSSAYEAGYCGYGIHRRLNDLGIKNIVINAADIPTTQKDKLHKRDPVDSRKLARGLEKNSLRGIHVFNRDHEELRSLNRTRFYLMRDLRRSKNRIKSFLLYYDIPLPGEFDNNQWSLKFISWLKQVKLHTIAGQESFSHLITSYEHHRQQLLILSRILRLRISQYDKELYNLLKTISGIGPLTASALITEIGDINRFPHIDDLGSYVGLVPRVRDSGETTHTGGITFRCNNFLRVLLVEASWQAIRQDPALMQYYHKHVINSKGHKVIIKIARKLLNRIRYVMKNKQPYITGVA

SEQ ID NO: 510531 - protein, 456 aa, unidentified
MFAGIDWAAESHDVCVVDSAGKIEGRATVAHSKDGFDELVKHLGRWARRGELLVGIERPEGRLVDRILEAGYPIVLIPTYAMKDLRRRYAVGGAKSDPGDAYVIADVVRTDGHRLRRLEPLSEQTRALRSVVRARDDLVDQRVALANQLRACLEAYWPGAAVIFADVASEICLAFLERYPTPEAAARLGELRLQSFLKKAGYSGRRSPAELLERLHGAPEGINGVEAEARADAVRAMVRVMRSLLRSIKDLDRAVVAHLGEHPDAEVFTSLPRSGQINAAQMLAEWGDCREAYPDPDSVAMLGGLCPVTHASGKHRDVSFRWACNKRLRLAVTTFADNSRHASPWAADIYRRAIARGCDHPHAVRILARAWTRVIWRCWQDHTAYNPAFTGPLPDSKPREVDMGSVRSARAGPEPKFARVRLVIARRTPAANGPAMGFSPAPLTRPPTDLPTPGAG

SEQ ID NO: 510532 - protein, 366 aa, unidentified
MKKQAKQAIRLKKLCNEVTRILNLGLDEHYWQVTVAMQEDGGRIKVVGKMSHEAFLDWVKKKVAEGWEIRSCYEAGACGYWLHRELEKLGVKNLVVTPRAMGKTGQQQKTDKRDAVELCDTLDRYLRGQHRALSVVKVPTPEEEAKRALIRHHRQIMKDRCRCEARGKGLLCAQGIRVRSCWWKDQSWQELSTDPRLKEWLKQQLAHWRSQILSAQEKQLSLREEIAALAPARLPKGVGAYSAAVLHYELRGFERFKNRRQISSITGLCPGVHQSNGHGKEGSINRCGIGAVRWVLVEMVWRLMIWQPQYPPVRRLAAGLVKSRRAKKRLVVEAARRLAIDLWRLSTGQTTPEKLGLIMQDHSQSH

SEQ ID NO: 510533 - protein, 381 aa, unidentified
MTGISATISNKQSIYAALELSKNSWLLAIQVPERDNPSLHTIKGGDTDGLMAKLDAARDRVVKLTGQTSTVTLCYEAGYDGFWLARFLEQRGLECLVMEPASLQVNRRARRVKTDRIDVENILHTLIAWSRGERHVCSMVVIPSIDEEDLRRSHRERDRLIRERTAHINRIKGLLFGQGIRGINVKSRYQTLTPAALVTGDGRPLPERLGREITREIERLALVQVQIAEIERERDKTPTSCEVTERKRHQLLCLKGMGPALSSTLTREVYYRRFANRRQVASYIGITPSAYDSGEGHRSQGISKAGNRLARVAIVEAAWLWLRHQPDSALSQWFHERTQGQKGRIRRVMIVALARKLAIALWRYLETGLIPEGASLKARQR

SEQ ID NO: 510534 - protein, 421 aa, unidentified
MTHPKMYYTYVGVDSHKNTHTAVFINCFFEKIGELNFRNYPSDFETFLKRAQAHKPEGGTLMFGMEDCASFGLMLTKFLVNKGQSVKHVNALLVARERKNRNISEKSDAIDAECAARVLLSKFGELPEAKPDDTYWVLRSLVARRLLLVRHRSATKNYLHSLLIHQYPNYRDYFENIDCKTSLAFLERYPSPATLVDTTADELAAFLEIPSNNRFSVPKAKEILANLPDISVQFQEVRDSVVQSAVRQVAFCAKEIDRIEESLTVFLKNFNCTLSSMAGIDTVTAAQLRSCIGDINRFATPAKLARYAGIAPVNYGSGKKDLQFANHRGNRELNSIFFWLAVRLSIPLGGNRHIVNSFFYHYYNRKLSEGKTKRQALKCVERRLVNIIWTMLTNSEEYVNPPVLELSKDGSQEYALNKTYP

SEQ ID NO: 510535 - protein, 367 aa, unidentified
MLYLGIDQHAKQLTISLRDEAGDIRLRRQVSTQPERCSEFFTKLNEKAAEEGGYIAIVEVCGFNDWLLAILPQYGCVQTVLIQPTKKLKVKTDRRDAHSLSELLWTNRNRLRDGLPIAGARQVVLPTKHYADCQRITLLRKDAGRMRTKATNRIKHILRRHNLQWQMPTKTFPSVKAIAWLKTLSLPPVQRQEMDWQLEELERWTKRMTDLEVIIIGRCQGDAMVDRIRTIPGCAHYSALSLVCRVGDPHRFPKGKSLAHYWGLTPGVNDSGEGTGRRGRITKAGSTMARWVLAQITLHCLRHDPVMKAWYKPIKNRRGSKIARVAVMRKLAVIIRNMMVHEQTYQECRDAMLNRRKRQLATNKSAA

SEQ ID NO: 510536 - protein, 347 aa, unidentified
MRFYTQSHRYYCGIDLHARWMYLCILDPQGEVLLHRNLRACPEAFLKAVEPYRQDLVVAVECIFSWYWLADLCAQEGIEFILGHALYMKAIHGGKAKNDRIDSQKIAVLLRGGMIPVAYVYPPQMRSTRDLLRRRTYLMRKRAELLVHVQNTNSQYNLPEIGKKIAYRANRSGVAERFSDPAVQTSIAADLSLIDFYDRLLNQLELFITSQAKQQDHHSFYLLRSVPGIGKILALTILYEIHDIARFPRVQEFVSYCRLVKCSRQSAGKNYGFSGKKIGNVHLKWAFSEAAVLFLRNNPEGQKLLARLERKHGKAKALTILAHKLARAVYFILRREKTFDLTQFLAA

SEQ ID NO: 510537 - protein, 365 aa, unidentified
MNTITIGVDLAKSVFSVCEVDGSGHVLRRLDLKRDAFAVWLAQVPAGTVVAMEACSGAHHWGRLCLEYGLQPRLMAAQFVTSFRKNRTAKNDRNDAEAIATAARQGNMRFVPVKTIDQQARLSWHRVREGYKVESLAIGNRLRGLLAEFGVVVAKSDHALRVALADLDQHTALPPEMRELLRDLSAHWAQVRTAVDACSARIDAHARADERCARMRAIIGIGAITADAVIATLGDAKEFRNGRQVSAWLGLVPTQHSSGGHARLGAISCRGDGYLRTLLIQGARSSLQRAKAVSVEKSTPEQVWIRQLACRMPFGKVLVAIANKHARQLWAMLADDETYDADAWLKHPMVQRPADKHSNTMSTVA

SEQ ID NO: 510538 - protein, 357 aa, unidentified
MKKLFIGIDFSKEKLDATIILACGMNEIGSREYGCFPNNTTGYRKLCNWVKTNAWNTIAEEWLFCGEDTGSCSIGLSKWLYGKGYDIWTENAYAIKHSSGIQRVKKDKADSAIIAEYAWRQQDKVVPFEPLNESLAQLREIFLYRHKLVGQRVAMELRKEDKSQSNKSKAISFINRKSKHLIAEINKTIAECDKAIDSIIEADEELKENYAIITSIKGVARQNATCMLVYTNNFKKFGYDPRKIACYYGVAPFGKQSGTSVNTPAHTSHFANKLIKSLLGQAAHIAKIYNPEIRDYYQRLISKGKKPQVALNNVKNKLIRIIVALVRKKVPYDQNTYKYYEEREVIERKKNEKLIYC

SEQ ID NO: 510539 - protein, 429 aa, unidentified
MDLVHPRCAGIDVSKRDAKVCVRVAGQGRAGATSTVTTWGAVTNQVLALRDHLIAAQVTLVVMEATSDYWKPFYYLLEDGPFEVMLVNARHVKNLPGRKSDVSDAAWLAQLGAHGLVRGSFVPPEPIRQLRDLTRTRTTIVRGRAREIQRLEKLLEDAGIKLSSVASDISGVSGRAMLEALIAGQRDPVVLADLAKRRLRSKIPGLTEALTGRFGAHHGFLAQLHLDLIDQHSHAIAELTARIEVVIEPFRRFRDLIITIPGISTAVADVVIAETGADMTRFPSAGHLASWAGTCPGSNESAGRVKSTHTRPGNPYLKGALGIAAMSAARSKDTYLSAKYRRIAARRGPIKAIVAVEHAILIAIWNMSTHDVGYVEPGGDYYLRRNPDKTKNRAIDQLHKMGYAVTLSPLQTGLLSVWLTLSVSGSQAA

SEQ ID NO: 510540 - protein, 341 aa, unidentified
MEHPKVVVGLDIGAETFAAAALRSAGETGEIKGSLANTPEGYDELALWMKEHGITKEKSVVCLEATGVYGESLCYYLISHGYRVAVESPLKVKRSFAQGAHKNDTVDARQIAEYGHRFYDELQWWTPPSEVLEQLHLLLSARDQFVTQRTANINALKMMQRKVVKTATGMKAYEQSIKHLTETIQELEREIKRLIKQDDSFNRLIKTLTSTPGIGLLLAASLAVTTKGFMKTGDHKHLASYAGISPIEHTSGTSVYRKPRSRCFGPPRLRKLLYLASMSVATHNIEFRRYYLRKVAEGKPKKLVLNNISNKLLKVVCALVRNQTPYIPNYQSINPMLVKSA

SEQ ID NO: 510541 - protein, 402 aa, unidentified
MQALNELHHLSYESVESRIRSLLYIERAPQDDNLELFDELKLNRKESPMKTYYVGMDVHRASISIVVLNGAGKLVMQSVIETGAERVRGYLKQLRGKVYVTFEEGTQATWLHDIVRSLVTEVVVCDPRHNKLLQSGNKNDRVDAQKLAELLRNGALKAVYHGDHGMRTIKELVRNYDCLVSDSTRVMLRLKAIYRGRAIPCAGHDIYRSDRRAQWLEKLREPGARQRASFLYAQLAALKPLRHEAKLVMVKEARRQAAYPWLMSVPQLGSVSVAQLMAVVGTPHRFRTKRQFWPYVGLAVVTRSSADHEIVNGVLRRSRRPIATRGLNRNHNHLLKKVFKSAASSACHSGPFKAGYDARVAQGMDPSLARLTIARQLAAITLAVWKRGEKFNMQMMKQQLAA

SEQ ID NO: 510542 - protein, 344 aa, unidentified
MNTITGVDLAKSEIQVCVCKHNQVQSNKDMTPNAFSAWLANSKPMLIVFEACSTSNYWKQVALSHGHDARLISAKLVSNVRQNQKTDKNDALAIVQAAQLPDISFINGKSQQQQELQTLARLRELAVKQKVASQNQLKAFLLEFNIRVSPQKGGLSGVVQSLLEDAENDFSDLFREAIYTAWQQLLSNIQLVKKYDSLLEKASNEHKACKSLQGIEGVGPLNALYLYLSLGCNDIGVFKKGRDASACIGLTPIQHSSGGKTQLGSIGKHTKNGKIRSCLVNGAMSAINHALRRKARTKKDAWIQSLVARRGKKCAAIALANKTVRTAFSMLKNNTEYKAELLPA

SEQ ID NO: 510543 - protein, 347 aa, unidentified
MSTNNPSVLGIDTHKYTHVAVILNAVGRHQGQLQFPATDGGAAQLLAWSREHGAPAIAGVEGTGSYGYQLTRSLQGADITVVEVNRPDRANRRRKGKSDPIDAEAAARAVLAGQATAVPKNREGAVEALRALTIARNSAVKATTTASNQIKALLVGAEQDLREQMLVKSLLQLATRCSQLAPSSGLNAALGSLGRRWLQLHDEVLQLDRMIRDLLRRTAPKLTERPGIGIHSAAQLLITAGANPERLHSDAAFAALCGASPVQASSGQRQRHRLSRGGDRAANNALWTIANNRMIHDARTRDFAEKRRQQGDSRKDTLRVLKRYIARETFALIRAALRSEQSLTEAA

SEQ ID NO: 510544 - protein, 385 aa, unidentified
MTRTDLSVPVPTAARPEESTLFAALELSGKSWLVATSAPGEAKISKRTVTAGDGLGLLALLSELCEKAERRLGWPVRVVVIQEAGLDGFWLHRLLEAKGLESHVVDPASIAVDRRQRRRKTDAIDVEGLLRTLMAWARGERRVCSMVRPPSPEDEDRRRLSREREALIAERIRHTNRIKGLLAGQGITGFEPLRPAHRDRLDALTTGDGRPLPPRLKDEIRRQLARLDAVIADIKAVEAERDALVGARPAVPEPAVLLLTLKGIGPEFATVLWLEALFRSFSNRRQIAAYAGLAPAPWQSGGFDRDQGIGKAGNPRLRKTMIQVAWLWLRHQPDSTLSRWFTARVGTARGRVRRIAIVAVARKLLVALWRFVTQGIVPEGAVLKA

SEQ ID NO: 510545 - protein, 387 aa, unidentified
MYYVGIDIAKLNHFASVVNSDGEVLVKPFKFTNDNDGFCRLLSAIGSFDRSSLIIGLESTAHYGDNLVEFLVSRRYQVCVINPIQTSTMRKNNIRKTKTDKVDTLLIAKTLMIQPHRFFSQEDIDMLHLKSLGRYRMKLIKERTRTKIQLTSYADRVFPELQYFFKSGLHQKAVYALLKEAPTPELVASMHLTHLTHLLEVSSHGHFGKEQARELRVLAQKSVGSSDKALSLQVTQSVEQIELLDRQVKDIETQMTEIMLGLDSVIMTIPGIGYVNGGMILGEIGDIHRFAKPKQLLAFAGLDPSVYQSGNFNASHTRMSKRGSKALRYALINAAHNVVKNNATFKAYYEAKRAEGRSHYNALGHCAGKLVRIIHKILMDDVAFNLE

SEQ ID NO: 510546 - protein, 319 aa, unidentified
MKRNKYSRKAAGIDTGKDKLDIAIHGSPDVSQVANDDAGHQQLVQWLGERKIKRVGIEASGGYEKVVVATLRRAGFQVIVFQPKQVRCLAGFKLQRAKNDCIDAALIAKCAAFCEEVREVPDPRLQDLAEPLTLIDQLGEDIARWKTRLEHVHQAEPRGWIEDEIKRLTRIVTIKRADLLRAVKSHEDLARRYSLIESVQGIGPPTALTLLIRMPELGSLTREQIASLAGLAPFDHDTGRFKGQRRIAGGRGRVRKALYAAAFPAAYRWNPLLIALYQSLIESKKTHKQALIACARKLLVMVNAVVARGTPWIKTETVL

SEQ ID NO: 510547 - protein, 345 aa, unidentified
MLTVGMDVHRDSITFDLFDPSVEPHRQHRTVTTPTTKDAIESVLKPLGGQCRVAFEVGTPAQWVASIVRPLAAEVQVANPSRMPWLFRDGRKNDKLDARKIATLLHLNQLPTVHLPRVEVSAWRALINHRRTLIKRRTMVKNGIRAILRAFNFRCPHKSLWTQIGQRWLDTLTFDAPRTLMLQSLRAELTFVDTQRLAVEQQLDATAATHPSVALLRTIPGIGPRSAEAVVAYTDDIRRFGRRKQFASYFGMTPTQDSSGRVDRHGHISKRGPSVVRWVLVEATHQAIRRCSVLRAFFDRICRGKPDRRKKAIVATGRKLLTIMFAMLRDNAAFAPGRVRPSAAA

SEQ ID NO: 510548 - protein, 343 aa, unidentified
MQIVSVGIDLGKTTFHLVALGVAGKVLARKKFTQRQLLTYTANMQTSLIGLEACSGAHFLGRALRKQGHDVRLIPAQFVKPFVKSNKNDFVDAEAIAEAVERKNMRFVPIKSDDQLDLQAIHRVRDRLISRRTAVINQLRAFLLERGLVFAKTPAKLRIALPDILENADLDLTTQMRNLIDLLWNEWKTVEGQIEGLSLELERISAADPGCTRIRQIPGIGPIVATAIVAAIGNGAAFRKGRDFAAWLGVVPRQYSTGGKARLLGISKRGNVYLRKILIHGARAAVLRIKRDRAPIGAWLDGLDARAPKNVVVVAMANKLARIAWAVLSSGEDYRPNSSMVTA

SEQ ID NO: 510549 - protein, 408 aa, unidentified
MTVVGIDVSKGKSMVAAMKPGGELVAAPYEVRHSDIELSRLALDVLCMEPDTRVVMEATGRYHEPVAALLHSEGIFVSILNPLLIKQSGAGSLRKVKSDPKDALKIAKYGLDNWSTLREYTPTEAIRQQLKLCERQCDLYSKNIVMLTNNLISLSDKTFPGVNELFSSPEKADGHLKWVDFYRTFWHCDCINRMSPDAFGERYKKWCKRKGYHFSTDATDALYAASCGLYATLPRDNNAKLLVTVAADQLIALRENQSKLEAEMLNLCKQLPEYETVMAMYGVGKSTGPHLMAELGDVRRFPHRSSIVAFAGVDPGVVGSGKMQLSSVTTSKRGSPQLRKALFQVVSTYVKCKPENEAVYQFYAKKRDEGKPFFVCTTAAANKFLRIYYARVKECLNAVESATQVEEG

SEQ ID NO: 510550 - protein, 376 aa, unidentified
MTQESLVSPEAVRQFSAGGVVRVITLGVDAHKEVHMAVALDENGRELSQWRGPNTQRGWEQVYRWACKLGEARQWGIEGAWGYGRRLAQYLVGRGDVVYEINSRWTAMSRRKARKLGKTDKLDARAVAVCVMRETGTLPQISQEDITTVLNLLSIEREAALAEATRLRNQIHAVLPQIDPEYRLHLPNMQTQAGLLALERYDSPDSNSIACHRAATIRRLARRLRLVLEQSEDIAHEIEQLASTYFLPLTRLCGINLLTAGALAGILGPGRRFASDAQLAAYAGVAPIEASSAGLVRHRLHRGGNRRLNAILYRIAITQARHLPEARCYLLRRTSEGKTRREAFRALKRYIVRAIWQLWQECLDYQTHSLTDNRAA

SEQ ID NO: 510551 - protein, 338 aa, unidentified
MSTYYIGADVHCNKTELAIERKNKIIRRFSVPTTIPAISEVLKSIPGRKHLTFEEGPMAGWLYQNLNNQVDTITVCDPRRNKLIASDGDKDDKIDAAKLACLLRGKYLRSLYHGTDDKIVELKRWTGLYLDRVKQATACINKIRSQARMYGIKIPRRVLRDVQYRQEWLCSLSKESVAKRLQILWIGYDASAQQTKLSKQQMSKLAGRYPIIRYWDRLPGVGLIRGTTIFAYLETPWRFKKKNKLWKYCGVGLVRQFSGGRAGRLKMNWSSNKRLKNAVMGAAISAIRHRDNIFRDDYERMVKDGITPSNARHAVARKLLTVMWGMWKNISRFDKSLC

SEQ ID NO: 510552 - protein, 365 aa, unidentified
MQPLRSVTQSRLDQRASARRFVYCEQTIKSVFQVHGVDDAGKPQLKRKLRREEVIPFFEQQERCTVVLEACGAGHHWARMLTQLGHEAKLLAPEAARPFVKKGKKNDAADAAALCPAASRPEATFVPVKSPEQQGVLALHSVRTLLVKQQTMLANAMRGLATEFGLVVAKGIHKLDELEAQVQAEASMPATAKQAFAELHGQSQAAATRIAGLEVQIVAHARQDATARRLATIPGIGPITASLITATVGDSIGSFKSARHFAAWLGLVPRQHSTGGKTRLGRITKAGNSEIRRLLVLGATSMVFRAGQWNSAAGAWLRGVLERRPVRLATVALANKMARIAWAVMTRGETYQAKGRAPAAAAAEA

SEQ ID NO: 510553 - protein, 343 aa, unidentified
MQTVTTIGLDIAKSVFQVHGVDADGQVVVRRQLKRRYVLAFFQKLPPCLVGIEACASSHHWSRELQTLGHTVRLMPPAYVKPYVKRHKNDAVDAEAICEAVTRANMRFVATKTPEQQSGLVLHRTRHLFIRQQTAVINAIRTHLAEFGIVAPVGRHGVEELLDVVADPNDKRVPAIARACLMAFGAQLRRLKEQILEFDRMIRAWQRSSEMSMRLDACPGVGPALATALVATVADPKAFRSGRNFSAWIGLVPKQHSSGGKDRLGSISKRGDRYLRGLFVAGALAVIRYARIHGTRHRPWLTALLARRPTKVAAIALANKIARMAWAMMAKGERYKEPVALAA

SEQ ID NO: 510554 - protein, 390 aa, unidentified
MEVLYQSCAGIDVHQANIVVCILHGPLTSTRPKREVATFDTTTKGLRACHDFLSQFHVEAVGMESTGVYWRPVWHALCDDFELILAQPAHMKAIPGQKTDKKDARWIAKLTRIGLLPRSFVPDETIQELRELTRQRKHYVESRNRETNRIHKILQSGGIKLTTYIEDIMGLSGRNLLQLLVDGTPITPRIVHQSVYTSLKKKVPQLLEALDGYFSDHHRFMLKQSLEIYDFYQKQIELLEERMNVYLSQYENHVEILDSIPGIDVITASVIISEVGVDMSQFPTSGHLASWAGLCPGNNESAGKKRSTKIRHGNSYLKKCLCQAAFAIKKQKGSPLADRFYQIKSRRGSQKATIAFAHQLLKIAYILLKEQITYPEFLAQKKTTRDELVA

SEQ ID NO: 510555 - protein, 363 aa, unidentified
MRDGICFAGLDVHARKTVGAAVWLGSGEVFRAQIAGSPTEAIGWLQTLPGPVRAVYEAGPTGFGLARAARAAGIEMMVCSPGAIPRQPGDRVKTDKHDALKLARLHAAGQLRAVLVPDLPLEGLRDLVRAREDLRGDLMACRHRISKLLLRRGLVWAGPGSTWSQRHLSWLSRVRFDDPLVELVFSEHLACHEVLLARRDRLERAIDERAEAGPWSGLVGRLRCLRGVDTLTAVGPVAEVGDFAAFDHPRRLASYVGLVPSESSTGTRRRQGAITKAGSGHARRLLIEAAWHYRRPPRVSLALRRRQHDQPPAVIDAAWRAQLRLHGRWAALDARRGKKRTTVAAAVARELACFVWEIANQPD

SEQ ID NO: 510556 - protein, 332 aa, unidentified
MKNNTVFIGIDVSKTTLDVCIVEQNEKKVFLTLKNKEKAIGSFCKKIAKKYATKCMKIAMENTGHYNWNTYAVLDKLDIELYVINPLHLKRSMGLVRGKNDKVDSERIADFLIKNNTLKPFKIPQKGIRKMQILVAQRNRLVNTKKSLLVAVKEVKYLDDKVFYKMLEKENRKLEKVLIEAIKETETQLQQIIEQDLELTKQYHLITSVPGVGKVVAWELLIKTNAFKSISDPRKLACYSGVVPFEYQSGTSVFKRPRVSVYADRKLKKLLHMAALRVIQIKGELQTYYLRKVAEGKNKMLVINALRNKIVQRVCAVIKNQTNYTDFSLQVS

SEQ ID NO: 510557 - protein, 372 aa, unidentified
MAHHSEAFIGIDTSKLRNAVAIAEGGRGGEVRFLGEFPATEAAVRKLVAKLAAKYRRLTFCYEAGPTGYWLYRLIKSLGHECIVVAPSLIPKKPGDRVKTNRRDAVSLAKLLRAGELTAVWVPDDRHEAVRDLSRARLAAKKDQQGKRQQISSLMLRLGRIYPGKKTWGPTHMKWLMAQKLEHREQRMVLEELLQGVRQEDERVERLEQAIREAVPGWSLAEVVTALQAMRGIDLIAAVGVLAEIGDLSRFQNPRELMGYLGLVPSESSTGDKVKRGGITKAGNGRARRILVEAAWSYRYPARVGREKQPKVAAAPRRVREIAWKAQTRLCGRFRALLRKGKLPTVAATAIARELSAFIWAINREVVAIRQP

SEQ ID NO: 510558 - protein, 339 aa, unidentified
MIVIGTDAHKRSHCCQAVVAATGELRSSEAVAATGAGNERLLAWARGADAERVWAIEDCRNVSGKLERFLLARGERVVRVPPSLMAGRRRAARTPGKSDPIDALSVARAAIEEGIENLPSASLQGPEREIKFLLDHREDLVAERTRTQNRLRWLLHDRWPELELPSGCLDRLVWLERISGRLQRAPQEADVRVMRAQLRRLRELKREADALERELGELVAAQQPKLLELPGIGVMGAAKLITEVAGIERFSSPAKLARMAGVAPVPASSGATHRHRLDRGGNRQLNAALHRMAITQVRCHRPAQDYVARKIASGKTKREAIRCLKRQLVRTVFKTMQPA

SEQ ID NO: 510559 - protein, 437 aa, unidentified
MISAAVERCAGIDVGKMFLAVCVMIGRLDGEPRVVKRRLGTTISELEGLCDWLKQEGITHVVMESTGSYWKPVFNVLEGSVKVYLANPQEVKNRKGHKTDDKDGWWLAHLLRHAMIHPSFIPPRPIRELRDLTRRRKRLLGDASAEKNRVQKVLEDANVKLGNVLSDVFGVSGQLMLDALLEGKARPEEIAQFAKRSAKKKIPGIIQALEGHRMSDHHRKMIRYSLKHLEFLEEQIGEMDRDIATQISEAGLDRQWQLLQTVPGIQDRSAAAILAETGAEMEQFPSSKHLSSWAGVCPGNNRSAGKNKSSHTTGGNPWLRCALTECAWAAAAKKNCFIKEKFWRITSKSGGKKAPAVVAVAHTLLELVYEVLRTQQPFQDRQAPPLDDRQRQRMIRHHIRRLGKLGISVPRYAVSVPLEEKTSQRCRPGRQKGSLPK

SEQ ID NO: 510560 - protein, 452 aa, unidentified
MGKKKIALDVVNPHAAGIDVGSRSHFVSIGQRDEDVKEFGVYNEDLLTLTQWLVDNQVKTVAMESTGTYWQSLFATLQAAGLEVILCNGKFTKNIKGKKTDVQDCQWIQKLHTLGLLTGSFLPDQATEELRTYCRHRANLQAQAADTSQKMQKYLRLLNLRLDVVVRDVTGLTGLSIIKAICNGEQDPEKLASFRHGNCRKSKEEIAKALQSNGRKDLLFALNHEYQLYLLFESKMVECDKQIEELLHRQINRDENKKQHYIEKKVHKRINKNNPDININLLAYQYFEGIDLLSIEGVSHSTVLTLMSEVGHGIHKFQTAKQFASWLRLAPNNKISGGRILSNKIPKGSNRLKIALRQAANVVGNLKDTELSNFFKRIAFRKGRTSAVSATARKLAVIIWNMVTKKIPYKTADQYEFLDQKRKRKVREMKKLIHKFDITPDDLGLQLNINNL

SEQ ID NO: 510561 - protein, 356 aa, unidentified
MLYVGVDAHSKTSWITVMDEKGKILKREQINSCRKDVQRSLGRYRQPVKAVVEASRSWGPIYDWLDEVADDVILAHPGKVRAIAEARIKTDKIDSETLAHLLRADLIPEAYAPSKGVRAIKRVLRQRMFFVRVRTMLKNRIKALLAQHSVQIPQVSDLYGKKGLQWLKALKLPEPDGELLNEDLNLLLVLNQRIAATENLISELSAGDDVVDWLLSLPGIGKFLSVLIRYEVDNIDRFSSAKKFTGYTGLVPSTYASGERMVHGRLTKRGNKWLRWAFIEAVTPAIRKSAMLRRYYDKIKSRRGCKDARVATARKLAELSWTVWTEQRMFIESGKKRLRRTKSYSRTPAALNSSWA

SEQ ID NO: 510562 - protein, 341 aa, unidentified
MRTYYYIGLDIHKKTISYCIKGIDGSLIGQGKIEANRKNLGERAKGLPEPWVGAMEATIFTGWVYDFLKPYALDLKVAHPEMLKAITAAKKKNDRADAEKIADLLRVNLLPECYMLSEELRELRRILRYRNMIVRTSVKMKNKISGLLMETGATYSKKRLHGKKYFGTLLERIEDVPTSVKDLLKLSRNNLEMFEAVQKKLVKTLREDKLIKERVERIMSIKGIGEVLALTWVLEIGEPSRFSSSNQAISYCGLCSAQRESAGKEQRGPISKKRNKHLQSILIEAAKLAPRWNPQLAMLHEKELARGNHNRATLAVARKLVEYMLAVERQQKNFILPKLAA

SEQ ID NO: 510563 - protein, 350 aa, unidentified
MIIIGCDYHPGFQQIAFVDTETGDYGEQRLEHSEGAERFYRDLGAQGKKVRVGMEASGHARWFERLLAELNFELWIGDASEIARKRERKQKTDRQDAQHILQLLMENRFPKIWVPSGENRDLRQLLWHRHRMVQMRTRIMNQLQAVALNEGLRCKKRLWRQHGREQLESFRLAPWASRRREDLLQLLDRLNPTISDLTQAIEQEVEKCPEARRLRTHPGVGALTALAFVLIIGRAERFQCGKQIAAYLGLVPLEDSSGNRRRLGHITKQGSSMLRFLLVEAAQVTARSIPEWRSKYFHLAMRRGRKIAKVAMARRLAIALYWMWRKGWNYEQSRKFGSHAGQLGTGDGVQ

SEQ ID NO: 510564 - protein, 350 aa, unidentified
MKLHTIGIDLGKTVFHLVGLDQSGEVIVRKKFSRTQLLRFTAIVQVDLIGMEACAGSHFLGRALREQRHDVRLMPAQYVKPFVKTNKNDFIDAEAIAEAVSRPTMRFVPIKTDEQLDMQSLHRVRERWIMRRTAIVNQIRGLLLERGITVRVGRCHLDAALPNILEDGSTSLSGALRFLLVELKQELGQLAGHIEQAEALIQRAAQQSEACRRLDAIPGIGPLTATALIAAIGNGGAFRKGREFAAWLGLVPREHSTGGKQKLLGISKRGNGYLRKLFVQGARAVLKYRDKQCSGLRHWLAELSSRSHCNVVGVALANKLARMAWAVLASGDAYRPPVLADMTGLQMAPA

SEQ ID NO: 510565 - protein, 367 aa, unidentified
MATESATVIGGVDTHKHTHYAAVLDELGRLLGHQEFPATDKGYHDLLTWMGSHGEIRAIGVESTGSFGAALTRALTAAGQRVVEVNRPNRLARRMDGKSDRLDSEQIARSVLGQTSTAVPKSKSGMVEVIRTLRVTRTSAVKARTQAFNTLWGVMIGAPSPLRDELVELSKRTLVNRCLQLRPETENLLELTHDPHRLLTAGIATSLHDLARRWKALDEEVKSLNRQITSLVSAAAPALLELHGVGVELAGQFLVTSGDNADRIRSEAAFAKLCGVAPQPASSGRTTGRHRLSRGGDRAANSALYIVTIVRMRHHQPTRDYVERRSAEGLSKREIIRCLKRYIAREIYAHLPRPAASAASGQLDPAA

SEQ ID NO: 510566 - protein, 355 aa, unidentified
MDNLRYIGLDVHRDTISAAVLNSEGQLIMQSVLPTRATELLDFLHGIRGTLHVTFEEGVHSAWLYDLLQPKVARVLVCDPRKTKLLKSGNKGDLIDARKLAELLRNNSLSPVYHGEMSALEVQQRTRCYTMLTEDTTRIMSRLKAVYRSQAIHYQGKSVFRPDRRESYLAQLPTAGLRLRAEFLYKELDAVHRLRLRAKREMLAECRKHPAIESLRSVPFLGKVRTAVLIGRVQTPHRFRTKRQFWSYCGLALETHDSAQYHVVHGQVERKPRSVQVRGLNWNHSHELKDVFKSAAIMAAHRDGIFREFYTGLLNKGMRPEMARLTLARKIAAITLKIWKEGGTFNAEYIKPQAA

SEQ ID NO: 510567 - protein, 371 aa, unidentified
MHLWAGIDAGKAHHHCVVIDADGNRLLSQRVPNDEPALLELIANVLKLAGRDEVIWATDLNHGGPALLIALLVGHGQNILYIPGRTVHHASRLYRGDGKTDAKDAAVIADQARMRKDLQPLRAGDEISTGLRILTARRADKSADRVRAINRLQAQLLEYFPALERAFDYSRSKAALLLLTKNRTPDGIRRAGQTRLHAWLKKHGARSSAAVATAAVEAAKSQHTTVPAQHLGELIVAALAQEIITLNEELAELDSLISEKVTEHRYTRTLLSMPGFGPVLAAEFLGATGGDLTVFETADQFAGVAGLASAPRDSGRITGNHHRPRRYDRRLLRVFSGLSALKSCPVSRVYDRKRGEGKTHIQAMLSWPGAA

SEQ ID NO: 510568 - protein, 366 aa, unidentified
MLSRRVENDEADLLKLINEALSFAGELVWAIDQPGGGAALLLALLWERGQRVLYVPGLVVDRARDAHRGESKTDRRDARLIAEQARMRGDFSELAPEESTLAELRLLLARRRDLVVDQTRAITRLREALVALFPALERALDLGAKGPLVLLTRYQTPAKIRWTGRKRLAAHLKGRGVKGADELARKALEAARTQSIELPAQEVASRICAELAAEILAFKERLASVDGQIASRFFERPEVRILSSLPGIGPILGAEFLVAVGDLSAFSSADQLAAYAGLVPAARDSGKRVGNNRRMRGGNKILKRVFFLSAFASLRCSPHSRAFYDRKRKEGKRRTQALIALARRRVNVLWAMLRDGTTFESPPLRA

SEQ ID NO: 510569 - protein, 413 aa, unidentified
MDKIYDICCGIDVHKKLIVACLNHKRKKELREFGATTRELMELAEWLQKNECEIVAMESTGSYWKPLYNIMESYGLHAIVVNPAHMKAVPGRKTDVKDAEWIAELLQHGLLQPSYIPSKDQRELRELVQYRKSLVGERTRELNRLQKMLEGANIKLSGTVTNINGKSARKILEYILSGNEIDEKKYDEMYEEKLIAHNLKASKEQILDDLKGFMSPLQRRMLKELLQHLDELNVHIENLNDEIDNFMKPEEKQASQVIQDVTGIGNTSAQTIIAVIRTDMERFPSDRHISSWAGLCPGDNVSAKKRKSGKIRKGNALLKSTLVLCAHAAVRHKSSYFHAQFKRISTHRGKKRAYVAVAHSILIAIYHILKDGVKYQDLGAEYYNQFNAERKIHAYLKKLKALGWEPPKEAVPA

SEQ ID NO: 510570 - protein, 403 aa, unidentified
MESNSVYTLGNRAQKEQSALKQKKGCSPKRSSDKALHYKTASKCQNKEQPMKYYAGLDVSMKETFICVVDRDGNIILEGQVQTEPEEIASFLKQADVPIKKVAIESGSLTHWLVTELQKHKIPAICVDARHMSSMLAMKVNKTDTNDARGIANALRGGYVREVNIKSQYHIEVGILLQSRGVLVQERTKLKNAIRGFLKAFGIKVSTSGFTSFIKEVRKSIEKRSIEVKKAIEALLNAIEAINEEIKGLEERVQQIGKDNKDAQLLMTIPGVGILTALHFVVAIGDYTRFNDSRKVAAYLGLTPRQYSSGESQRLGRISKCGSRETRSMLVEAATVMLTRTRSWCKPKAWAMKLQRKKGFKKATVALGRKLAVIMHRMLVTKEPFYFGEEPGKTTSKKLEKAA

SEQ ID NO: 510571 - protein, 345 aa, unidentified
MTEAYDGRQVVGMDLHRRRSVLVRMTEDGRKLETVRIENSPAALRAVIARAGDNPRVVVEATYGWYWAVDVLEAAGAEVHLAHPLGVKAFSYRRVKNDERDCADLADLLRLGRLPEAWIAPEPVRALREITRYRHKLVGQRTSCKDQVHAVLAKAGIPVTRSDIFGRGGGIWLDGLPLPQPYAGKIASLRALIAVLDGEIARLEEQAAAMLAGYRGYAAIRQLPGIGPVLGAVIAAEIGDITRFRNPGQLASWAGLTPRHYESDTRVIRGRVSKQGSRMLRWALVEAIQRQPAGTRPRQVKDAIIARRGADVRGIAKTAAARVMLTQVFYGMRDGHIRRAASQAA

SEQ ID NO: 510572 - protein, 353 aa, unidentified
MKKIVIGIDISKEKIDATAIDVRDSQLGVVKLDYQVYENRPMGYRRMLVWARHLIKGIGLEDVLFCCETTGGYDRCLCDYIYAKSLDIWRESALQIKRSMGVRKGKDDKADSLMIAEYAMRHIDKTVIYETPDEKVRELKALFLYRHSLVQERTKKKVRASELKATAAKSSSMRFIVRDAMKGVRSLDKSIRDCEKQILAIIDGDESLKRNYGHIESIPGISIVNATAFIAYSDNFRSITTANKAASYWGCASFRERSGTSIDKKAYVKCYSGSLLKATLTQAAECTIKEHGIYREYYLRLKAEGKPYGIIVNNVRNKLIHLVFSLVTNGMDYEKNHQFLRTPQKEGKDMTIN

SEQ ID NO: 510573 - protein, 410 aa, unidentified
MAYKVAGIDVHKKVLMVVVCDTEASKWEFQRKRFGTTTFDLQQLSAWLRERGVQQAVMESTAQYWKPVWYELEPHMHLALAQAFSNRAPRGRKHDFRDAERLVGRLVAGELILSFVPEPEQRTWRTITRMRVQLTRDVSRLRSQMECLLEEMRIKLGAVLSDLLGVSGVRILRALAQGETDPQKLAALGEESLHCSKKHLIQALTGHPEPSHRQLLGLYLDRYQLLREQMQRLDEMIAQAMKPHEEAVIRLAAAAGFGVESAQQVIAEVGAEASVFPTAAELAGWAGTCPGQEETAQENHSSRSPKGNKYLRRTLNQCAHAAVKTKGSHFQVVFRRLLPRLGYNGAIWAVAHRLCRLAWKILHDKVTYVERGDSDPATKKRRAQALVRKLRNLGYQANITLITRPAAAAT

SEQ ID NO: 510574 - protein, 426 aa, unidentified
MRIIGMDIHRVAAEVVSLLDGEIVKLGRVQMLRDKLEEFARKELTHDDHVVVEATGNAAAVAEVLSPYVDRIVIANPKQVHMIAHAKVKTDMIDATVLAKLYASGFLPEVWVPDPETLALRRQVTRRTQLVRQRSRLKNLIQSILHAHLIPPCPHGNLVGISGRKWLARQILPADERAAIERHLGLINQVNEALTVVEADIAVHALQDPTIRRLMTLPGLDVTVAASVAAAIGDIRRFSDPQRLVAYLGLNPSVRQSGEGPAYHGRITKQGRGHARGMLVEAAWAAARSPGPLRAFYKRIASRRGKHIAAVVHRAQACEDHLAHAEQKCRLYLGPAGLTRPQVQIGRAACRPPYEPCQARHRLRLQHPGQARRRTIPSRKGRSCLCSRDFPMANEAGKAEGCGKSRRMRRRGYSTTSVCIGLPGAM

SEQ ID NO: 510575 - protein, 364 aa, unidentified
MKRKVYVGMDVHKETIQIAILPSNTKALVKEQQIKHEEGQIKKFIQKLKSEGNEIHCCYEAGVTGYPLYRYLKTLGVNCTIVAPGKIPRQNSDKIKTDKRDAIKLARLLRSGELESIHVPSEEDEAVRDYLRSRDSLRLDLGRNRQRLMKFLLRKGITYSTTKYWTASHYKWLNNLHFENEILQATFNDYYSRVRVQEENLKAMDQKIREIAESEPYREKVGILRCFRGVDYLTAMFLLSEVNDFKRFKTAGSFMSFLGLVPGEYSSGPKRKQTSITKTGSPRLRRILVEAAWQHRFPGTGSKVVVARRVGQSALVVSLAEKASLRLHKKFKSMQLRGKTPQVMITAVSRELSGFLWAAMNLVA

SEQ ID NO: 510576 - protein, 483 aa, unidentified
MSERRLVGIDLGITSRHTVAVLGGDSSTVCRRSCVATQASLTEIEQAALAGTAPGLQLEVVMEATGPSWGPVAYFFARRGHQVYRVSSAKAAALRKALSRNAKTNSIDAQTLARLPLVDPQGVYPWRPPSRAQAALDRRVRACARLTKQSSQSKVRLRALVRESLPMTPLGGVLSKTELALLERTGADPDQILKLGRTRLTRLISKVSAKHLGVEVAERWLEAATQSRVLYGEGAEIAFAERAREIRTEVHLLAAYQAELVEHERGREAAYQQVDPEQLARSLSGVAEAGGPTLLAGIGEVGRFRNGSRLVSFTGLAPRASQTGESDRKGQPMSKAGPRLLRTALIRAADTARTQDPQLARIYYEQMTNRGANHLKALCVVATHLTRRLYAVMVRQTPYQLRDTDGRAITGEQGKAIVAAHWTVSEEVRRRRRSRKTRKAPQQVQRPAFNANRGITRRPSSTSILPASATPHNPAEGGTNVPT

SEQ ID NO: 510577 - protein, 335 aa, unidentified
MQIYGIDLAKEKFDVSFFDLTSKKVSNQPSHKVVTNNLKGIGKFFKGLPSDAVLVAEHTGVYGDTLLKCCMDSNVKIAFVGGYVIHRYRTTPDRAKTDVLDCALLRDFGERYPDKLKYKTFPEEALYELRQLARHREMLVEQRKQLITADKSEDCRPIRSLAVKRSMDRIKEMLDTEIAETEKEMLKVINGHESIHHNYELVKSVDGVGLITAVELLVKTENFTKITTARQYAAYAGTAPYEKSSGKMDKGAHISKIGNRRSKTLLYICAESARLHNKEIKLYYERRTLIDKKPRHYVLNAIANKLLRIIFTLVEKGEYYDANFIRQDPRVVKHN

SEQ ID NO: 510578 - protein, 364 aa, unidentified
MDNITHIGLDVHKDTIAVATLRPGGTSCEERVIPNTPEAVRRLATCLGDPSTVRFCYEAGPTGYDTQRLLSALGWSCDVVAPALVPKRPGVRQKTDRSDARNLARLHRAGELTPIRVPTPAEEALRELIRAREDLKNDRRIARQRVRSFLLRYGRRPPHPGATWSTLARWAPGQRFEEPATQAAFSCLLAAEQVRSSQLAAIEAEIAQAATRPELAAPLGLLRCFRGIDTLSAVTLLAEVGDFRRFGSAGAFMAFTGLVPSEHSSGLSIRHGSITKTGNAHLRRVLVEAAWAYRHRPAVGEKLAKRLEDQPPEAVAYAWRAQCRLSGRFRSLAVRKGSNKATVAVARELAGFVWGMMTGNMAAA

SEQ ID NO: 510579 - protein, 359 aa, unidentified
MRRRRPWSLRWKTEVERLGPPPTVTHDRTVARPSIARTRQVTVTRVICGVDVSSTSLEAFVGSAGPGCSFANTSEGIAELAAFCRQHEVELVALEATGGYEKRPFALLWAQSVPVSILNPRAVRDFAKSMGLLEKTDRIDARIIAHFASVKGSAPCVPLSKRQEHLKALVTHLRQLTQLHVSQQNQGLLVTDKAVQSSIAKVLKMLASQKRSLAAKIAAVVASDPMWQQLDQAFRSIKGVADRTVAAVMADMPEIGTLSNKAVAKLAGLAPLAQDSGKKHGKRPVRGGRRQLRAVLFVVAGVVARHHPDFVAFQQRLSAAGKPKRVIRVALAHKLLVRLNAKAREVRLQFATAHAAQIA

SEQ ID NO: 510580 - protein, 287 aa, unidentified
MSRFSPSATIATLGIDLGKNSFHLVGQDERGAIVLRIKLSRAQLTRRLANLPPCLIDMEACAGAHHLGRQLQALGHDVRLLPAQYVKPFLKGHKNDYRDAEAIAEAVQRPTMSFVAIKAPEQMDLLALHRVRARLVSQRTGVTNQLRGFLLERGIIVRQGLAPLRQALPGILASSSDMLSPRMVRLIADLMEDWHRLDERIAGVSAEIEALAAQDEHCQRLMSVPGVGPIISSAVVAAIGTGAGFKQGRDFGAWLGLVPKQESTGDRTILGKISKRGNKYLIRFPAD

SEQ ID NO: 510581 - protein, 375 aa, unidentified
MKEKVRFLGMDVHAETIAVAIAEPDGEVRSLGIIPNRSESIRKLVKKLGSVDQLRACYEAGPTGYVLYWQLTELGVECQVIAPTLVPVKSGDRVKTDRRDAERLARSHRAGDLTAVWVPDEGSEALRDLVRAREAAKQDQLRARHRLSKFLLRTGRRPERKMKAWTGVHMTWVRQLRFEQPAQESTRLDYLHEVEHMEERVLRLEQAIREAIQLASPGMQEVIQGLQALRGIAEISAVTIVAELGQLSRFESARQLMGYSGAVPSEHSSGKRTQRGSITKAGNAHLRRIVVEAAWSYRLRPGIGPRLRKRQENVPEEIKEVAWKAQIRLTKRYARLAAAGKDQRKIVTAVGRELLGFIWAIGIKAETASKQRMAA

SEQ ID NO: 510582 - protein, 370 aa, unidentified
MESIIYVGMDVHKESYSLCCYDPRTDRYLYEHKMKSTTTNVLKYLGSVKKQLGDVIFICGYEAGPTGFGLCRDLLRKDIVCVVMAPTSLKRNANYKVKNDKVDARLLAKDLFTHDYSPVHLSSQKEEAIKEFCRMRRSIMTELKTAKQVLLAFLLRQGKHFDGKTHWSGEHRKWLKQITFEQPYLQEAFDEYLISVNELEARLKRVEHRLEEISKDEEVESKVKKLICFCGIDTLTAVSIVSEVGDFMRFARAWDFANFVGLSVGEHSSGEKERHLGITKSGNCYLRRLFTESAKSLKKTSMKSKKSKRLIDRQQGNDPRVIAYADKCRYRLKYKMMSLENRGKAANVASTAAARELACFVWGMMTDHIA

SEQ ID NO: 510583 - protein, 406 aa, unidentified
MFYLGIDVALNTHRLVMLDDHGERVSSGISFQNNTADFEKVLAKLKELSINPDNSIAGLEATGNNWENLYCFLTGNKFKTTLLNPHQTNKFREALRKKAKTDDIDAFVIAGLLRSNEFVSSYVPEDKIQTLRELTKLRYEFIKDHKNYQRQVLALLNLIFPEYRKTALRNPFAIASIAIFKAFPTAKHLSIAKPKHIEKIVRSIKGNNFNVKEIENLISIAKTSVYSGRCQESRALTLNILITQVENFDKSIRQLEEQVNQILSPTSNDDVNSFPGSNLLTIPGVGPKTLAAILSCVGESGQAFSDGVKLIGHIGFFPQIYESGETKRTNKLSNKGPAYLRHALYMASVACIKHNLQLRSLYHMKISQGKKPKQALICVAKKLAHLCLSMLHSGQEYNPARVFCYA

SEQ ID NO: 510584 - protein, 240 aa, unidentified
MSAYAGIDVSKATLQVALFPKADELCVPNTEEGLASIAEYLSAHQVERVLVEATGGYEKLSVKLLANAGFKIQRINPVRSRQFALAMGKRAKTDPIDAQMLAMFASSLEAKGFAKPDEEREVLLELVNLRNNLLQQRDDNRRRIKQAILPSVVDIYLALEASLKVQIKAVDQLVDAQARKVDSELLQRLHAVKGVGPVTIASLFCYLPELGDLSRGQIAALAGVAPYNNDSGSKAGKRQI

SEQ ID NO: 510585 - protein, 355 aa, unidentified
MEQYIGCDAHRRYSVFVSMDEKGNISKPVRVEHERREIRGFLRRLPPGTPVAVEATGSWYWLVDEIEAAGLEPRLAQPFAARRMLGGGAKTDAIDARALATLLRNGTLPESWIPSSELRDLRNLMRTRLGMREYQSGIKNRVVAAVNRYGLREPDDDHDLFRGKGRVRLAVYLGQLPPHTREGAIREWTLVDELEHQIDGLEVRLKELLRPSSGAQRLKTLPGVGEILGATIYLEIGAITRFPCAQHLASYAGLVPVVHSSGGKTFHGPSSKRSNHYLRWAFVEAANAIVCHRKKHPDWHATRLYERLRAAKGHQKAAVAVARHLAESAWWILAKGQSYRAPQPAARVVSSSSNG

SEQ ID NO: 510586 - protein, 424 aa, unidentified
MNFTQNDRLKQVTADTLIVGVDVGSQTHFCRAFDWRGFELSRRVFKFSNDRIGFLTFLRWTEEIMNKTEMKKVIVGCEPTGCYWLTFQKFLQNHDVKLVTVNPFTVNRSKELDDNSPEKSDLKDPKTIAMLVKEGRYSTSYLPEGVYAEIREASVCRDQIMKQHIRLSNQIQGWLQKFFPEYLDCYSDWDSTSGLMLLKSAPLPQDILKIGAGGINQIWRDAKVRAAGLKRAQTLVEAAQESVGLEAGEAARLEIWVLVNDYMLKAEQLKRLDEYLEEKIKEVPNVEKLLAIKGVGMSTVIGFVAEVGDIGRFTDPKQIQKLAGLEIVKKSSGKKKGQPRISKRGRRKLRRTMYESARALMNWNPAFQDVFLYYRNRTRNPLGGMQAKIAVACKAIRVFYVILHTGCDFDEEKFRRDIIRPEAA

SEQ ID NO: 510587 - protein, 370 aa, unidentified
MPDTTTFIGLDVHARSIKAVSLDVMTGEVRCATFGYDAGAVAEWVRSVDPRARCVYESGVTGFDLQKRLSGLGVDCVVGAVSKMIKPSADRRRKNDRNDAEFLARMLSVGNVVEVWVPDDECEAARDLTRALEDARDDLSRAKQRLSKFLLRHGLAFDERTPTGRRKGNWTRAHWSWIESIRFAEGADNDVLAYYVDAVRRAAEEKARLEGLVEAEARKPRWRRRVDSLRCLKGVDTATAADLVFEAGEFSRFRNARSFAAWVGLTPSEHSSGESDRRGAITKAGNKHLRKALVEAAWHYLTCSGRPKDLAKGQAPDRVARRHAAKGVRRLVERRGTLLARGVHNNKANVATARELACWVWAVGLMAEEA

SEQ ID NO: 510588 - protein, 425 aa, unidentified
MNLLILKGVPMALKIVYKICCGIDVHKTFVVACIASTNDKGVTSYESHRFSTYTSGLKTLLQWLLKRNCKDVCMESTGKYWIPIYNILENDCSIVLAHPKYVKAIRGKKTDKKDAKWIADLFKHDLVVGSFMPPADIRQLRDLMRYRFKLTCFQSSEKNRLQNCLTVSNIQLGNVVSDTFGKSAQAILDKLLENPADTSFDLEPLVYKSLKKKLPELRDAIDGYITPEQVGKLKVIKAHYESLESRKAELEELILALAAPYQQELAILQTAPGIRSDFTAIGIISEIGTNMEAFPSAKHLCSWAGLTPTNNESAGKKKSVRVSKAGCYIKPLLVQCANAVVTSKKHPEIRNRYLRLKKRRGHKKAIIAIARMLLTALYHMLKNGENYNAELYRKSDLPPANWEITVEQAIIIARNQGYKIKSATA

SEQ ID NO: 510589 - protein, 387 aa, unidentified
MQASTIGTPTVGHCGTIFVAIELSQRSWLVTLHSPDKDKMSRHKLEGGDHAELLALVGRVRERAARALGAVPAVVSCYEAGYDGFWLHRLLMSAGITNYVFDPASIAVEQRARRVKTDRVDGEKMLRTLMAYLRGEPQVVRIVRVPAPEQEDARRGSRERGRLIKERTAHTTRIKALLRLLGMAVGNPRRRDWLSWLAAQRDWQGQAVPRRMLAEIKYEHARLMLVCEQLDALAQASAEADPAPAAAQMAERSELLLRLKCLGPAFATTLASEVFYKDFRNRREVASYFGLTPSPWQSGGIDRDQGISKAGNPRARCAAIELAWLWLRHQPESALTRWFRNRTHNNASKRNKRIAIVALARKLMVALWRYLTTGLVPEGAQLKAVKA

SEQ ID NO: 510590 - protein, 365 aa, unidentified
MNTIYIGVDFHARQQTICYLKTETGELVTCELKHQDKQKVRAFYAQFRGRVIVGLEASGYSPWFERLLEELGCEVWLGHATEIRRRARWRQKNDRRDAELILDLMLHDEFPRLHRPAVQSREVLRMLRYRQKLIKIRTMSKNSLQALALQSGLAKGSRLFTQAGQQEFSAAVMSPVMHWQREHWLQLLQPLNQQLLETMVWFKAQSKGDVCITRLRTHPGIGLLTSLCLVHTLQPVSRFRNTRKVAAYAGFDPVERSSAERKCFLGISKAGSRLLRYLLVEAAQTAVRKDEDLKRFYQRLAERRGRPKAKVAAARKLLIRAYIMLRDEIDYAEFRHRAVAARLARRGQRPNVPEVLIGQPASPAQ

SEQ ID NO: 510591 - protein, 429 aa, unidentified
MKIIYPRVCGIDVHKKFIVAVICISESVEPIYLKKRFSTFHNDLIRFREWLIQNDCQNVCMESTGKYYIPVYNVLESHISNIVVANPKWVRAVKGEKDDDKDAKWIADLFKFGIVRSSFIPQKDFRILRELTRYKYKLVNMRSSEKNRYQNALTSGNCKLDMVFTDVFGKSASNIIDLILSDNPYTDEDILSKVHKKCKASPDMILDSVNGTDLTPVQKARIELVNDHIKQLSSNIQKLDKLIDLMIEPYEDYISFLCQIPGVSRNSAIIILSEIGVDMNQFTTSRRITSWAGLTPSSNQSAGKKKSVRISRAGVYLKPCLVEVAHAAVKDKNHPYYANKFNKISKRRGKKRAYIAIARKILVAAYHMLLTGEIWNPADLSEVETPVEQRIKYVKNNLKSDIKQLLDIGLTVEELTLMIQQNANIIATQ

SEQ ID NO: 510592 - protein, 408 aa, unidentified
MEVIYSHCAALDVHKNSVIANVITPEHRETRTYATMTKDLLELKQWLLDIKVTHVAMESAGVYWKPIYNVLEDSFTLILANARYIKAVPGRKTDVKDAEWINDLARHGLLRASYVPDRTQRELREVTRYRRILIRERGRVICRIQKILEGANIKLSSVASDIIGVSGRMMLQAMINGVEDPKELAAMAKGKLRKKTQSLEDALQGLMGTHQRRLIESELDHLDFLDKKIAKLDEDIAERMRSYDSIIERIDTIHGIGRRGAEEILAEIGPDVTSHFPDAHHLASWAKICPGNNQSAGKRKSGKTGHGNPWLHSVLVEVAWAAIRVKGGYYSSFYHRLAGRRGKKRAIVAVAHSILVTIYSMLKNNTVYQDLGESFHDLLNPEQVLRRAIKRIERLGYKVSVETPVLVT

SEQ ID NO: 510593 - protein, 344 aa, unidentified
MQIAILGIDLGKNSCSVVGLDESGRIVVRRRMHRVSVIKFAGGLTPCVVAMEACCGAHHLGRLLRTQGHEVRLMSPEYVRPYVKAQKNDDRDAEAIAEAATRPTMRFVELKAEEQLDMQTLHRVRDRLVGERTALLNQLRAVLLERGIAIPQGRRKLEQRLDAMLGAPEWSGVASRMRSLLQDMRAEWRALDRRIEAFDEEFAVRARTDPDARRLATIPGIGALNATALVAAIGNGQTFARGRDLAAWLGLVPRQATTGGKPRLLGISKRGNKYLRKLLIHGARAAMPSLARSATALGGWLRGLLARAHPNTVVVALANKLARIVWAVLRHGCEFERANVVVSA

SEQ ID NO: 510594 - protein, 342 aa, unidentified
MEKVSIIGLDLAKRSFQAHGALADGGVGFRKKLSREKVLGFFAEQPRCIVALEACGSAHHWGRAIGDLGHEVRLIPPAYVKPFVKRQKNDATDAEAIAEAASRPTMRFVVVKSEGQQARGMLFRTRDLLVRQRTQLINALRGHLSEHGVVAAQGPANVKVLEEAVEDQTTSLPLLVVELARVFLDQIEGLSKNISKLEKVTAHEATCGETTKRLKTMPGVGPITALAIETFAPPMDVFKRGRDFAAWLGLVPRQHSTGGKQVLGKISKMGQRDIRRLLIIGAMAVVRSAVWKGAPEGSWLQRMLARKPKMLVAIALANKMARSVWAMLAKGEDFRVPTAAVI

SEQ ID NO: 510595 - protein, 323 aa, unidentified
MQGQKSPERSAQPGVYVGVDVCKDWLDVYLHPVGQKFRVANTPEGLKVLKRRLAELPVELIVMEATGKFHRQAHRTLHAAGFAVAVVNPLRARLFAEAAGQLAKTDRLDARGLALMGQALEPSAIAPAPEAIEALQELARARSAAKAEETALSNRRGASQTAFLKAELGRRLKTLAGHIERLDAEIERRLGADPALKRRYDILITIPGVGPVAAIALVVGLPELGACSAKAASLLAGLAPLACDSGDKAGERHIKGGRAFVRTSLYLAAIAAARFNPQLSDDYNRLRDAGKKAKVAITAIMRKLVVLANVLIKEDRPWKPIYA

SEQ ID NO: 510596 - protein, 506 aa, unidentified
MPVPVPVPVPAALAPVRRLGLAEAIPRRDRRGPAEAAEIVSRIGERSREWDEKAGSSLRLELGAPEALFPTSRSASALWASPTGRDRRLERGAGEPAGSLRKEKWPAFPSEDRRVFQTTRTQGPRERTGLVNGIGLTDTLGIDLGDKFSYVCALSDAGEVTSRFKLRTTAKAFKGRFSARQASRVVVETGTHSPWVARLLDDCGHQVIVANARRVALISKNTKKTDREDCEILARLGRADPALLSPIRHRGKDAQCDLAVVRARAAAVAARTQLINTTRGQVKSIGARLEGCPTTSFAKHARKQLPAELAPALTPLLALIEKLDEAIKGYDKEIKRLCQKHKPTQLLREIAGVGPLVSLSFVLTVEDPHRFKNSRQVGAYFGLVPRQDESGQSKPQLRITKAGDVNVRCLLTTAAQYVLGPWGPDSDLRRWGLQLAEHGAKNGKKRAVTGVARRLAVLMHHLWKTGEVYDPLYLARQRGEADDPTKARPGRLRKPKAEPTPDMALA

SEQ ID NO: 510597 - protein, 362 aa, unidentified
MTLNKNTTDKPFKAIIGIDLGDTKHAICVTDRRGTIRREYSIPNTRKQLEKLALEYPKALIAMEVGTHSPWISRLLQKLGNEVIVANARKLRAIYTNERKSDLLDARMIAKLARVDPDLLYPIHHSSEDTQLDFLTIKMRSTLVDQRVNIVNAVRGSLKALGIRIPKATTVGITNVARPYLEEHHPETLPSMTPMLDILDELKAKIKQLDKAIDQIIATKYKSAQLIQQIGGVGPITSLTFVLTIERAERFEDPRDVGAYIGLVPRRDQSGNTDKQLPISKTGSRYLRKLLVQCAQYNLGHFGQDSDLRRYGENIYISRGSKAAKRKAVIAVDRKLSVLMLTLWQRECDYEPLMNANKKQAA

SEQ ID NO: 510598 - protein, 347 aa, unidentified
MFVGIDVHKDTHTAVGISPYGEKLFEITVGNYKEDFETLDLKVKEHSGVLSPFFGLEDVRGYGERLAGFLYSKYPVYHVPSILVDRARQNATHPEKSDSLDALGVAKVMIQSIDTLLPYTISQESEKAKQLKEISVDREDLVLERTRLKNQVHTLLYRVYNTEYEQKFKDPFALKALRFWSKAKPKCDPYLLKTMKRKVRRLLDIHVEVVDLEKDMEQLLKDNYTIQTASGCGVVLASTIVGEIGDINRFTSPGALSKYAGCSPRERSSGKKTRHVKSRSGNRRLNCAFHRMALAQISRMGNDRARAYFKRKISEGKSKSQALVCLRRQMVNIVWMMLKHKTIYRNA

SEQ ID NO: 510599 - protein, 368 aa, unidentified
MGKFITYVGLDVHKKTIAVAFADEGNSEVRPYGVIDSDLSSLDKIVRKLVSRGGEPRFVYEAGPCGYGIYRHLKQQDIKCMVAAPSLIPKKSGDRIKNDRRDAKKLARLYRSGELTGVHVPNSEDEAMRDLTRAREDSKNAERKARQQLGAFLLRHGLIYSGKSHWSLAHWRWISDIKMEHEAHQFTLQEYMDTIRSCSERVERVTEKIRLLAGQWRFGPVVEALQALRGVCLVVAATVIAEIGDLSRFDNPRDLMAFLGLIPTQHSSGDNIKLGRITKTGNGHARRMLIQAAWSYRLPARVSRRLRDRQENLPEKIWKIAWKAQVRLCTRYRRLVARGKPTQVTTTAIARELAAFMWAIFRTVEVGA

SEQ ID NO: 510600 - protein, 365 aa, unidentified
MSSVTPAAGPIHLGMDTSKNTIVVGILMPGDEVLVIDRIWNEEGPVRHLVGRLGDPAALRACYEAGPCGFELHRLLSSMGIACDVVAPSLIPRRAGERVKTGKRDASRLARLHRAGELTAIRVPAEAEEAVRDLVRARAALLADRKRAQQRITAMLMRHGRVWRSTYWTAAHEQWITGQRFTEPALAAALAHYRAALGTRRAELDAIEAELGPWAARPPLAEAVARLGCYRGIAELTGLVLAAEVADWRRFCSARAFMGFTGLVPAEYSSGERTRRGSITKAGSEPVRTALIEAAWAYRFQPRIGITLRRRQHDASPQTLARSWQAQRRLYARYKTMTARGKPAAVAVTAMARQLAGFAWAEMTS

SEQ ID NO: 510601 - protein, 475 aa, unidentified
MNIKGKKKKNQVITANIFEQQEILAKVEAIKSNLKASTWHELETKGRFTKNEKLTFISDDMLILGCDIGSETHYVRAIDARGRELSKSAFPFSNTLEGFQSAKDWAVKIAAANDKNQIVLGLEPTGHYWFCLTTWMISNGISVVQVNPYAVKQTKELEDNSQLKDDSKDPKLIANLVKDGNFGMPYLPEKLYADLRRLSMFRDQLSEDRIRSINRLHREMKIHFPEYKDAFGKIDGAFSLEVLRKAPFPDDLIVLGKEGIRQIWHDAKLRGRGYSRAEEILKYAKESVGMKDGADTSKMAVKWFVERIKELDEQLSEIESRLNQLCMQIPYAENILEISGVGETILSGILAEMGDISRFDNVKEIQKLSGLGLVACSSGKHKGETKISYRGRKRLRYWLFQAAKSVVAHSEEFKELHVYYTTRTDNPLKKMQSLIVIACKLLRVIYTILTKGTPYDPKKLLMDIKRPSKQEAFVA

SEQ ID NO: 510602 - protein, 369 aa, unidentified
MKQVTTIGLDLAKKVFQVHGVDAAGVVVVRRSLRRRQVLAFFAKLPSCLAGIEACATAHYWAREIGKLGHQVRLIPPAYAKAYVRRNKNDPADAAAICEAVSRPSMRFVTIKTEAQQAAAGLHKVREMLVKQRTMLINTLRGLMAEFGVVVAERPRHVSELMAILADPTDRRIPTPLHEGLSALVETLSGLERRIEIVDKQIVGWGRDNATCRHLITIPGYGPVLSSAMAAMVVAPATFAGARHFSASLGLVPRQDGTGGKVKLGPISKRGNGYLRRLLVNGAMAVLCSKRAKEDPWLAKLLESKPRKVAACALANKMARIGWAVMMRQEDFSRRQHDQPRPSPSQPGTVLPAVKTAARAPAAVAFGQS

SEQ ID NO: 510603 - protein, 346 aa, unidentified
MMIIGCDYHPSWQQISWVDTLTGETEEKKLDHASGEAERFYRQLPGPAVIGMESTGNCQWFVEMATTAGHEVWIGDAAKIRASEVRQQKNDRRDAALILKLLLEGRFPRIWTPSGEEKDLRQLLIHRHKLVRIRAQVKNELQHLAMNQGVTKKRKLWSKAGEKVLRELPLKPWASRRREDLFKVREMLNGQVELLDRAVVEVAEKNEKARLLMTQPGVGPITSMAFVLTIGDVSRFQRGKQVASYLGLIPREYSSGGHQRFGSISKQGNGFMRMLLVEAAQVAVRCDPQMRSEYLHRCHRKAKGVAKVAAARKLAIRLYWMLRTNRGYPEVVHVESSSRVPLVSAS

SEQ ID NO: 510604 - protein, 394 aa, unidentified
MRFVGIDVGAERHVVASVDAAQAVVLKPTGFSEDAGGYQHLLTLLGSAPETLVAMEATGHYWKNVFAVLVTQGFAVALLNPLRTRRFAAEELQRTKTDAIDALGIARFAAQKRPAASRLPDPATDPRRELLRYRDRLSQDFGDRERQLHRLLDLGFPEFPRYVRDVGSELATAILRVYPTAVAFQGVAVRRLGGLRYAGQHKVGTELAAALLAAAAASVGQHHGAAYRVQVQDICEDLDVLRRRLRTLDRDIERLLERHEVGTLLTTIDGIGPQTAARLVATFGDFSGVRSGAALACYVGAIPGLRQSGKRTSSRARLTPIGAARLRAKLYMPVLSAVRCNPWLRTYYAALIARGKLPKVALIAAMRKLLHAVYSVATHRRPFVPHVVAQEARP

SEQ ID NO: 510605 - protein, 370 aa, unidentified
MKKPVALFVGLDVHKDSISVAHVPEDRRADVTYVGRIGTRPADIDRLVRRLQEKADRLIVAYEAGPCGYVLYRHLTRRGITCLVVAPSLIPKKPGDRVKTDRRDAVQLARLLRSGDLDSVYVPSVEDEALRDLCRAREAAVVTLKAAKFRLKSFLLRLGLHYTGRADWNDAHLRYLAEVVCPTPAQQIVFQESLRSVDEQVERLQRIEAELADLVPAWRLAPVVRALQALRGVQDTVAVTMLAEIGDLTRFDNPRQLAAFLGLVPSEDSSGDSRRQGPITKSGNGHARRALVEGAWAYQYPAKISPHIRKRLEDLPQPIQDIAWKAQIRLCKRFRRLVAKGKHPNVVVTAIARELAAFMWAIAKEVPVTA

SEQ ID NO: 510606 - protein, 315 aa, unidentified
MDPITVGIDVSKATLVVAVHPTGEQWVTETTPAAVEALVARLRTLRPTLIVVEATGGYERALTAQCATAPLPIAVVNPRQVRAFAQALGRTAKTDDIDAQLLAAFGARIQPAARALADAETQALAALVVRRRQLIEMIGMEGRRLEQAPPTGRITRDLRNHIRWLQRRVDDVDDEIGTAIQASPLWRGQDDLLRSVPGIGPTTARTLLAELPELGHLDRRAIAALVGVAPFNCDSGQHRGQRHIWGGRASVRAVLYMAAVSAARHNPVLRPFYRRLRDAGKPAKVALVATMRKLLTIVNTMVKHQSKWNPAVSTV

SEQ ID NO: 510607 - protein, 343 aa, unidentified
MQIVRVGLDLAKYVFEVHGVDGRGKVVLRKTLRRDAVSSFFANLPSCLIGMEASNGAHYWARVLSGLGHEVRLISPQFVTPYVKSNKNDRNDAEAICEAVGRPTMRFVPAKSVDQLAVQAVHRIRSRLVSGRTRLANQIRGVLAEHGVIVARNIAKLRQNLADIVGNRGNGLSDLVRALVGELQQELADLDRRITTYDRRIRELYRGSEVCQRLGQIEGIGPLSATALVAAVGDRQGFKNGRQFAAWLGLVPKQRSSGGRDRLFGISKRGDRYLRTLLIHGARAALGRAGGKQDPRSRWLSKLRQRRHPNIAAVALANKNARIAWALLSTGQAYDPGLTVGSA

SEQ ID NO: 510608 - protein, 410 aa, unidentified
MEVLYPHCAGLDVHKNSVVACARHMSGGKVSTKVRTFKTTTEELMALLVWLTDQGVTHIAMEATGVYWKPVWHILSDDDFVMVLANAAHVKNVPGRKTDVNDAQWLADLMAHGLIRASFVPDQLTQQIRDLLRTRKQLVRERASHTLRIQKVLEDANIKLDSVVTDLLGLSGRRILDALVNGQTTPAVLAALADGRIRATTEELTAALYGRVTFHHRFLVKLHLDQIDAIAQAIASIDEEVDSQAELFRQPAQMLSTIPGLGPLAALVVLAEIGLDMSHFPSAPHLISWAGLCPRNDESAGKRRSTRMRTGAPWLKTVLVQCAWAAARTKGSYFQSLYHRLLSRRGAKKAIGAVAASLLTTIYHMLKNGTLYEDLGANYFDQKSKERQAMRLINRLHTLGYQVHIEQKTA

SEQ ID NO: 510609 - protein, 358 aa, unidentified
MAIVGGLDIHRRQITYDWIDTTTGETRRGQLSPATRLELRGWLARFTGQQADFALEATTGWRFVAEELECAGFRAHLAEPADTRALRGPKRRAKTDRTDARHLRELLRAGTLPESWMPPAHIADARTQVRLRRALVGERTGWYQRIHAILFHHGLPERSQLLTADGRAWLARAELPAVARQAVELALRMIDHLEVELDTLDAQLAGIARVQPGCQALQRRYGIGWLTAVAIWAEFGDVRRFANSRQAVRFTGLDITIAESDGKRARGHLARQGSPVLRWALHEAAMCAARPSSPDHTYYLQVKQRLGGKRAALSVARKLAREAYHTLRELGDQALVPPTSQPPPEQDWPSCGLGRLNR

SEQ ID NO: 510610 - protein, 324 aa, unidentified
MLPTLGIDISKTSFHVELSINNKLQHRRFANRKEGFAELCVWLAKHKAGPVHACLEATGPYSEAVALYLHEQGHTVSIVNPTQIKAFGQSELLRNKDDRPDAGLIRRFCEKQQPTAWQPPPAHFRELQALTRHLENLLETRQQQVNRLEGTTTKAVLKSLRQLVAHVEAEIKRTEQQIDDHIDRHPDLKQQCQLLESIPGIGKRTATKLLAEIEDISRYKSARQVAAYAGLTPRNSRSGTWRGPTRLSKTGNARVRKALFLPAMVAKRHNPVVRSFCQRLAGYGKNKMQLVGAAMRKLIHIAFGVLKSGKAFDPDHELLSNSVS

SEQ ID NO: 510611 - protein, 373 aa, unidentified
MRKKVTGSRRVGKEIRLLAGEAAFVGVDVHKKMYQVSVWTESREWVAQWTQPADDEALCRRLEPVREQVAHVVYEAGPTGLGLARTLRARGFTADVVAMSKTPVAPGRSNKSDRRDAAQLAWLSGKGMLTAIYVLTPQEEADRQVLRRRWQMVTDVCRTQHRIKSLLLQHGIAEPAGLRYWSRAAVAELRGLPLLAELRFCLDLLLDDLDHGRTKLVAAARKVRELAASERHAAAVAWMRSVPGVGVITPMTFATELPHPERFTTPEAVGGITGLAPRVRRSGQTVKGGPILKTGNAHLRRVLVQSAWQWVRRDPAAAALYGHLVGETGCAQKAIVAVARHLAILLWHLVTEESTYTPGQPAAQDPEPAAAEA

SEQ ID NO: 510612 - protein, 415 aa, unidentified
MEKVYDKCCGIDVHKKLIVACFKCGKKQEVQEFGATTRELLKLADWLGSGGCEMVAMESTASYWKPLYNILESSGLNAMVVNAHHIKAVPGRKTDVRDAEWIADLLQHGLLQASYIPDKDQRELRELVRYRKSLVGERTRELNRLQKMLEGANIKLSGTVSDINGKSARNILEYILTGESFDGAKYDEMYNKKVIAHNLKATKGQIIDDLNGVMSPLQRKMMRTLLKHLDELNAHIKELDDDIDGFMKPEEKLASTAIREVTGIGNASAQAVISVIGTDMGRFPDDAHIASWAGLCPGDNESAKKRKSGKTRKGNSLLRETLVNCAHAAVKNKKSYFYAQFMRISAHRGKKRAYVAVAHSMLVAIYHILKDGVAFKDLGAEYYNQFNKERKVKAYLKKLKALGWENPTSVAGQPA

SEQ ID NO: 510613 - protein, 423 aa, unidentified
MKVIYTKACGVDVHKSFIVAVICDSTSNKPKYLRKRFSTFNNSLIQFRKWLLENDCQNVCMESTGKYYISVYNALEGFISNVVVANPKWVAVIEGEKDDNKDAKWIADLFKLGIVRSSFIPPKDIRILREFTRYLYKLTTSEKNRYTNALTVGNCKLDIVFTDIFGKSSQNIIDIILNNDNFLDADIIGCLRKNCKSSHEDILSSVGGLTYTNEQKLRIKIVEDHINYLTNQINNLRDIINNLLVPYEDYINLLITIPGVDRNSAISILSEIDTDMSQFSNHYRLASWTVLAPGCNESAGKKKSVKISRAGVYLKPCLVEVAHCAVKDKTNTYYANKFNKISKRRGKKRAYIAISRKILVAIYYMLSTGEVWNPTDLASNETSNKDRIKYTKNNFKQSLKQLLSLGLTSEELLEMVNQNAILE

SEQ ID NO: 510614 - protein, 325 aa, unidentified
MDDAGKIVREARVASEPEALLQVLTNTIYRFKRVGLEAGPLSQWLYSVLAEAGLPVICVETRHMRAVLKAQINKTDRNDARGIAQMMRVGLYRPVHVKTLRSQKLRMLLTHRKLLQSKAIAIENDLRATLRNFGLKVGMVGTVKFEGRIKELVENLPDVAVLVEPLLVVRRVLREQVGILHRRLLAIVRDDDVCRRLMTVPGVGPVVALTYRATVDVPARFRNSKAVGAVFGLTPSKYQSGENERTGAISRCGDEMMRMMLYEAAQSMLVRSAKWSWLKAWAMKIARHRGIKKAIVALARRLAVIMHRIWVDGSEFRWTREVAAA

SEQ ID NO: 510615 - protein, 327 aa, unidentified
MATTAWLGIDIAKDTFEACLLLEKRSAHGTFANTPAGFAKLDHWLKKRQVGPVHACLEATGRYSEGLAEHLHAAGHTVSVINPARLKAFGQATLVRTKTDQTDGWLLAEFCRRQQPEPWQPPAPEKQALRALVRRRESLLQLRQQEANRLGSGEDSPVVCASLAAVLKVLDEQLAQIEQAIRAQVADDPALKHQSELVDSIPGIGPTTAAALLAEIDFGAYPSARQVAAQAGLTPRQRQSGTSVHGRPRLSKQGASQLRRILFFPAIVAKRHNPVIRAFAKRLAERGKAKLAIVCACRRKLLHLVYGVLKTGLPFDPNYRPARRQQL

SEQ ID NO: 510616 - protein, 310 aa, unidentified
MRIIGVDLHARQQTIAMLDPETGELVEKTLKHEGETVREFYSALPHPVLVGIEATGSMHWFLELLEELGIERQVGHPAEIRAAEPRKQKHDRRDAALLLKLQVENRFPSIWVPSTELRDLRALLRHRHQWVRMRTRVQNTLQAIALSHGLRRGQSLWSQAGQQAIASLPLAPHAAHRRTELQALNCKLGKQIDELGERVMDQALQRPGAKLLMTHPGVGPITALATDVFLGDPARFDDGKAVASYVGMIPSEYSSGGRQRLGGLSKQGNPLLRFLWCEAGIHAVRRDPELKRFYRRKLQQKGLEVKRESP

SEQ ID NO: 510617 - protein, 398 aa, unidentified
MGCFVGIDVGKSRHAYAVVDAAGAELASGEVTGTAAGFEKLKRVLVRFDVEVIGMEATGHYWRNLWHALVHGGYECRLLNPASTVYFRRMSLTKHKTDALDALCIARYLAAVRSDRRGLDVQSQEGLRSLARAQAAIAEQITEAVNRLHKQLDLSFPEFPKLVGRLDSPKALALLEHYPTASMMSRARKLADRRYGQQNHRIGVPLAQRLQDAARSSFGCAQSSSDALLIRQSVSHIRLLHEQSKELIREMETLVAEQDQDAANLLSVPGIAIKSAAAVIGEVGDITRFETAKKLTGYIGAHPRFHDSGNKSGHPRMSKAGNKRLRRILWQCTIVAMKYNPIIKAHYEKKLAEGKKKMVAIGHCMNKLIHIIWGVLTYHEPFDPNGGSRVQKVLQHEA

SEQ ID NO: 510618 - protein, 330 aa, unidentified
MSIGMIIRMILGIDISKRSMDVTLVREGKRLHERFENTASGIKQLLQWLVEQPVSELHVCMEATNTYWEAVAEALYAEGYCVSVVNPTRIKGFAMSQMQRNKTDKLDSEVIAAYCEAMQPAAWQPPTETQSKLRALERHRLDLKQSIGQQKNRQDTVKDKDVQASLQRVIDSLEAELKAVEQQMDEVAKQCQVVSEQKKHLLSIIGIGPKTSNMLLAEMYDMAKYESARAAAADAGLTPAHYESGATVRKRPKLSKVGKSAVRGELYMPAMNAMRTNPVLRDFAQRLRARGKPEKVIICAVMRKLLHIAYGVLKNNTDFDPNYGRLPSTA

SEQ ID NO: 510619 - protein, 372 aa, unidentified
MKEDSVIFIGLDTSKLKISVAIADGSRNGEVRFFGDISSEPASVASMVSKLSKRGAKLHFCYEAGPTGYGLYRQIVELGHDCVVVAPSLVPKRAGDRVKTNRRDAMSLARLHRAGELTAVWVPDEGHEAIRDLVRAREVASDALKQVRQQLQSFLLRHGRIYAGREPWTRAHRRWLTCQAFDHPAHHILLAEYCQAIEDAGVRLDRLTKLVVETASSWSMAPVMAAYQAMRGVAFMTAVTFVVEIGDVRRFDNPRQLMAYLGLIPSESSTGERVKRGGITKAGNTRARRVLIEGAWTYRFPARVSPKIQARLDDLPRTVREIAWKAQVRFCARYRKLLAAGKPKVVAVTALAREMAAFLWAIGQEVAPTAKA

SEQ ID NO: 510620 - protein, 442 aa, unidentified
MLYVGIDWADSGSVVAAMDRDGTVLRKLKVEQSLEGYERMLAEMSQLESDRRKVAFGIESPHHPLMHFLVEKGYTGYAPNPKSVDRAREIESPSGKKDDFFDAVTIANMVRVDRGKLRPYTPDTPATVKLRILCDAHRSLVEARTAYINQIAHCLKAYWPDALELFSRLDGKVAMKFFARWPDPVSAGRARRQSVIGFLKNHGYTYPRRIEKIMAILRRPPLPVAEAVREAKSLQLSQLLPQFAVVCSQADACEKQIAKRFDVHPDAHIFRSLLISKDSNSRILVARLLCDFGDRRDRYASRKELLALAGVAPVTYETGNGKLRVIKMRRACRKNFRNDVHHLADLYRRHYYWAEAIYQAHRDENSGHNTALRALGGVLLKITYGMWKNRSEFDPDIYLARRGEQLLRQSAHPVKSKKKGRQTANPTLLLVRSSIKGQDQFC

SEQ ID NO: 510621 - protein, 343 aa, unidentified
MWIIGCDYHAGFQQIAFLNQATGECGCKRLEHGNKEAEQFYRSLAGQQVRVGIESTGGTRWLERLWTEMGFELWIGDAARIRAAAAHKQKTDKRDAELLLQLMLENRFSRIWRPTAEQRDLRQLLVHRHRLVQMRTRVKNQLQAVAMNEGMQRKQRLWSAAGQAEFLSLSLPRWSDQRRSDLLSLLKELDERILPLDRSLKQQAEQRPEVRLLMTHPGVGPVVAMAFALTLGDPERFASSKQVASYLGLVPLERSSGGRQRLGHITKQGSSLLRGLLVEGARVAARHQPEWKRKYVRLAMKKNRSIAAVALARRLAVSLWWMWKLGLDYGRMRESHSHAGSPA

SEQ ID NO: 510622 - protein, 352 aa, unidentified
MIWVGLDLHQRYITACALNDAGAVVAEHRRLPADVQALVAWLTGLGGAVTVAMEATRYWAWLHDQLSAAGIAAVAAHPYQVKLIWQARAKTDPIDARKLADLLRTNLVPTVWVPSPEWRAHRKLVRGRAYLVRLRTSVKQRIHGHLMAENCRTEVTDLYGKAGRAWRASVGLSEMGRVHGDLLLEVVDLLDVRVKRLDQRVQRLVKADPQAQLLQTWPGIGPVGAALLLAEIGEIGRFGTSHELAAYAGLTPSTQSSGDQTTHGGVGRSGSPWLKWILIEIVQSLKLAPGPIGDHYQRLLRSKGKATATVAAARKLSCSRYWCLKEGWSDEAWLRQHDKLEVRPVQALGSAA

SEQ ID NO: 510623 - protein, 402 aa, unidentified
MNCVGIDVSKGKSMIAVMRPFGEVVVSPFEVRHTANELSELAGLLKSLDGETRVVMESTGNYHAPVAWLLHGAGLYVSVVNAMLVHDYGNNSLRRGKTDKKDAVKLANYGLDHWLTLPRYVPEEDTRLMLKTCYRQYQQYSKVQTMLKNNLISLLDTAFPDANRLFTSPPRTDGSEKWVDFVATFWHCACVCGLSKKAFTAKYQKWCRKHGYNFSQDKALDIYASACGRFGVMPKTNTAKLLVEQAISQLQTTSAALAALKQEMQSLAASLPEYPVVMGMFGVGPTLGPQLIAEIGDVRRFHSKKALVAFAGIDAPPYQSGQIDVRSRSISKRGSASLRRTLFLVMGVLLQCAPMDEPVYQFMNKKRSEGKPYRVYMMASANKFLRIYYASVKAYLDSLEHD

SEQ ID NO: 510624 - protein, 454 aa, unidentified
MNKIIAFGIDVGSERHHIAILTPENQLYKEIVVEHNQKGFKKALGEILMAKEKFNAEPLGGLEGHNGYGSPFDEYLMAHGVKLKQVNSFKLSRYRELYGQPFKKDKHDARLIANFVANYKALEIDERKCLHEIIYEEQTIQKIRLLTRYQERLIREQTRLKNRLQKHLREYFPEYFTIVKKKQLSNYNSLSLLRECPEIERLKNLNEEEIAGLRANDSKACVGSKLAKKVKKVVEDIEYFPKSMEVLCEVIKSEAKRLLELKREIRQLDKRIEEEGRSCEMFKIIKSYPGAGTRTAGRLAGEIISVERFRSSSALGVYLGVSGIDDSSGKIVRVRAVRKFNYRAKNAIMEIAFSSIRLNPLSKTYYVKKRCEGKSHWEAIKYLARQIVKVFYAMLKNHTLYDPNYRTSSLKKGKIKQVGRQSYQSPLKEVDKEMSHTLPPCILIFNGREIKWKI

SEQ ID NO: 510625 - protein, 396 aa, unidentified
MIYVGIDVASDKHDVCIMSNDGEIFGRKFQIHNSSDEYKKLLSKINEAKKFFKDSTVRIGIESTGVYSSTILNYFSKFDNFEVIFINPVLTNMFQLSQAVHYAKTDSIDAEGICIYLQDKRKKLFTYTPPSYHSLQLKSLYREMIKMNKLITQSKNRLTGLVHTVFPEFLTVFPKINGNAVYFLLNKYSTPNSYKGKRAETICKLVLKEGHGRTSIDNIEKIISLSKESIGTYNHSDALLIKQLSSLISIFEEQKKELIEEMTNIIKEHFPKILSIPGIGGNTAAGIIGEIGDISNFHSSDSLLAFAGLNPLVYESGKFKALHTRISKKGSSYLRNALTLVARSIIKHDETFSKYYLKKRDEGKSYNTAICHVRKKIVRVIYSILKNNNEYKSLNN

SEQ ID NO: 510626 - protein, 338 aa, unidentified
MPLYGGIDLHANNSVIVLLNEQDQVIYQRRLANHLPTILEQLVPYHTDIQGVVVESTYNWYWLVDGLMEADYRVHLANPAAIQQYSGLKHTDDHSDARWLAHLLRLGVLPEGYIYPKAERAVRDVLRKRSHLVRQHTSNVLSLQNIIVRNTGARLSVKQMQELSLAALTKLLPESDQALAVRSGLAVVHTLSQQIKTLEKTVTKHLQHTPAYEQLLTVDGIGSILAQTITLETGDLRRFPAVGNYASYCRCVQRTKVSNGKRKGQGNVKNGHKYLGWASMEAAQFAIRYNPRVQRFYQRKQAKAHFMVARKAVAHKLSRACFYIMRDLVPFDANKAFG

SEQ ID NO: 510627 - protein, 400 aa, unidentified
MERTAGIDLASEEHRLCVVEQDGRRREERRYRHSEDGIAALVRRLVELDVARVALERPNGLVVDRLLDAGIMVVPVHPNQLAAARDRYRSGGGKSDGFDAYVLAELARTDMHRLGVLEPDADETRALTRAREDLVEQRVALANQLRAQLDAFWPGAARIFSEVDSPICLAFLERYPSPQDARGLGEKRLAAFLARHGYCGRKSAAELLDRLRSAPQGRAGELENEARRAVVLGLVATLKPLVEQIKLLTSEIRGLLADHPDGAIFRSLFRDPKSVVTAAELLAEIGDRRERHPARDSLEGIAGQSPVAVESGKKKVATFRWACNKTLRSAVSVLADASRKHNPWAKKIYEDAIARGKDHPHALRILGRAWLRVIWRMWQDHTPYDPTRHRSLNRLSPAEG

SEQ ID NO: 510628 - protein, 470 aa, unidentified
MSSTKQIKTEAKKEIPQRKKRGLYQQDRPVVEPNAAGIDVGAREMYVAIPPDRDSEPVRIFKTFTADLECLVDWLIARGITTVAMESTGVYWIPLYQMLEDRGVRACLVNARHMKNVPGRRTDWYECQWLQYLHAAGLLRAAFRPEQDVCGVRTLLRHRNELVKMAVQHVQHMQKALTQMNVHIHHVISDITGLTGLAIVDAILAGERDVAKLAELRHPSIQANEETIRKSLEGDWRKEHLFTLSQSRQMYVTYRNNIEACDEKIAKLLGAFEPQVDITLQPLPAHPGPSRKRRTKRTGDFRFEVRTEAYKLFGVDVTRIPGLNELAIPIFSEVGRDLAARFPTAGHFASWLGLCPDNDKSGGQVLWTGVRRINNRAAQMFRMAASSLHHNRSPLGDFLRRMKAKLGPAAGITATAHKIAIIFYTLVTKQIEYDDSIWATRDEHRQKRFEQKLKRQARQLGYELLPVQPV

SEQ ID NO: 510629 - protein, 354 aa, unidentified
MDGTKYIGMDVHKESVSIAVMNSAGKVVMESVIGTKASMILQFVHGLRGDLLVTFEEGTWAAWLYDLLRPHVTRIVVCNPRRNALLKDGNKSDRIDAQKLAEVLYLNKLKPVYHGEHGLRAVKELVRSYSTVTKDLTRVMSRVKAIYHRLGYSLHRQASLWTAPSCGVAGEDHRAGCASPQFYYQQLDALRALRQEVRRELLKESKKHKAWRLLCRIPSIGPIRAAMLMGILQTPHRFRTKRQLWTYSGFGIETRSSADHRSVEGQLRRARKPASIRGLNENHNHDLKNLFKSAAIIASNKPGPFQEFYAALLTKGMRPEMARLTLARKIAAITLHVWKKGASFDAQYLKPQTA

SEQ ID NO: 510630 - protein, 371 aa, unidentified
MKEHSKYIGLDVHKETIAVSVAEANGGEVRYVGEIANTPEAVVKLTRQLKKGDATPSFCYEAGPCGYEIYRQLQELGLACQVVAPSLIPKKPGDRVKTDRRDSLSLARLYRAGELTAVWVPDGAQEALRDLTRAREDMKHMQRQGKQRLQAFLLRHRKRYGGKSNWTQAHFRWLETVKFDQPVQQIVFQEYVDLVKAMTKRVDALDDQIESAAAASVFWPVIEGLMALRGVSLLTATIIVAEIGDLRRFASAPQLMAYLGVVPSEYSSGGTKSRGGITKTGNGHVRRVLAEAAWTYRHPARKSAFLQRRAERTSETVQDIAWKAQKRLCGRYRLLEAKGKLKVQVCIAIARELAGFIWAIGQALPQPEARA

SEQ ID NO: 510631 - protein, 418 aa, unidentified
MLSIKHFVCCGMDVHKKFVVATIALTDYRGVTSYVKKRFATFNSDLNSLKKWLLSFNCTEICLESTGKYWIPIFNILEDSCHVVVANPKYVRAIKGQKTDDKDSAWIADLFKFDIVPSSYIPCKEIRMLRELFRYRQKLIGHRSSEKNRLQNALTVSNIALASVLSDTFGKSATAIVDYILTCEVFDPEYCKSLLLKKAKDKADDVVTSIIGYELRRDQSVKIKVCRKHFDEINECVSTLEETISDLAKPYHKFIELATTIPGITEQSATFIIAEIGVDMAVFKSSKRLCSWAGLAPENNESAGKKKSVHVSRAGVYLKPLLVQCANAAIKSKNPYFRYKYDRIKKRRGHKRAIIAIARMVLTCIYHMFQKQEVFNPADTDYSAIPEEMYRKIQEQYDRNAIKRLEKRGYVITPPAMA

SEQ ID NO: 510632 - protein, 377 aa, unidentified
MNAPGAAPGKHTGESSELYMAFELGEKNWKLSLSDGTRSPSRYTVAAGDTAALLECIAKAKARCGHAPEARVGSCYEAGRDGFWLHRWLIAQGIDNIVVDSASIEVNRRARRTKTDRLDADKLLAMLLRFTGGERRVWSVVRVPTAEQEDARRAHRELGRLGQERTAHINRIRGLLVLNNLRVKYVGGRLWQRWWTGHAQELAPCVRAEIERESERLLLVKKQMDAIEAAQRQAMAAGSEPQVARLARLCGIGMSSGWVLGKELFGWRRFRNRREVAGCLGLTPSPYASGESETEQGISKAGNRRVRTLMVELAWSWLRYQPESELSQWFARRFAGGGKRMRRIGIVALARRLAIALWRYLEDGLIPQGAQFKAIGG

SEQ ID NO: 510633 - protein, 352 aa, unidentified
MLSFNYKPTLFSLSCKTFRTLLDATLIRYESQSDREQQLAYTTVENNPKGFRSLVSWSKKNAGRGVKTDTMLFCCETTGGYDRALCDWLYGNDLDIWRESALQIKRSMGLRKGKDDKADSEMIAYYALRFRSKATLYKPLDGNMRSLRDLFLYRQSLVAERRAKMVSAKEKQHISSKSKVDDFIYRDAQKAINILTKSIQECECRMLEIIKEDEQMYRNYLHLISCKGVGLVTSIMLIIYTDNFKGWNAKKMASYCGIAPFYESSGSSVFHKANTSGYSNRRLKGILTQAARSAITHNPTLRQYYLRMKAQGKSYGVILNNVNNKLVHILFSLVLHDCDFELDHETKRALRA

SEQ ID NO: 510634 - protein, 419 aa, unidentified
MTRRDDSKIIRIVHPICCGLDVHKQSVSACIIFPGGNGEEQCEVKVFGTFTDDLMRLREWLLEHDCPVVAMESTGVYWRPVHNVLEDTVQVVLVNARDIRNVPGRKTDIGDSKWIAGLLRHGLLKGSFIPPQTVRQWRDLTRLRKKYVQSAGDYRKRTHKLFESANIKIDSVVSDLFGVTGRNLMQLLVADRKLTLAEIQTCVRGKLRGKEAELFRSLQGFFTDHHRFVLKTILETINMLEAQIETLDQEIRRAMKGHEPLLARMKDAPGISDVSSCDILAEIGPTLESFPTDRALVSWSGLCPGNNESAGKRKSGKSPVRKHHLKTIMLEVAWAAVKKKGSYFKDKYYRLKARRGAKKAIVAIAHRILLGIYHVIKDGTKFRDLGEDYLTCRNKSQKIFHLRKQALAMGFDLVPQAAQ

SEQ ID NO: 510635 - protein, 346 aa, unidentified
MSLAGDADLIIGVDTHLDTHTAAVCDAWGRAVARLQVPATAAGYAQLLAWARAAAGDSRAVWAMEGTRHYGLGLARYLVSQGQQVSEIDNTRHVGKRRAGKSDAIDAVRAARELLARPHPAQMRADGDREALRLLMVDRDNAVASCKTARAVLASVLVTAPAELRERLRRLPRARRAQACAALACPADADRQIRVLHQTLIRLGQRIATLASVAAELEAQIAAIVEDMVPGLVAAEPGTGALSAAQILLSFSHAGRIRSEAAFAMLSGTAPVPVSSGRTSRHRLNRLGDRQLNRALHQIAVTKMRCHPPTLAYVERRRAEGKTDREIRRCIKRYLARHFYRTLSNT

SEQ ID NO: 510636 - protein, 420 aa, unidentified
MESIHSCCCGLDVHQSTVVACLVTEEGKAKPRKVTRTFGTVRQELEQLRAWLRDNHATAVAMEGTGVYWRPVYGILEGEFDLHVVNARHFRNVPGRKTDVTDAEWLATLLRMGLLRKSFIPSKEIRALRDLSRYRRTLVQSETAEKNRILKLLETSAVKLASFMSDVFGRSGMAMLRAIADGVLPSAQIARMARGKLRQKIGQLELALDVLVDEHVRLMLRDSLARLDRLTDDIARYEGVLEERVVPYEQNLAMLCTIDGIQRKAAIEIFAEIGPDLSSFPSDANFAAWTGTCPGQHQSAGKSKDARRRRGNPFLQSILVEAALAATRKKDTYLRDKFHRLRVRRGAMRALFAIAHKLARAVYRVLTTGHPYRDLGANYLDNKHKTDLVRHLVDRLKRLATIEEISARLGFGPPSAPTLA

SEQ ID NO: 510637 - protein, 465 aa, unidentified
MSTLSTRHRTRSSQGEARPFAGMRQVTPHAAGVDIGAHEIVAGVPDGDDQQIVRPFGTYTADLQTLADWFVDRGIQTVAMESTGGYWIPLFEELDARGLQCCLISAQSLKRVPGRKSDVLDCQWIQTLHRDGLLAASFRPEADFVARRTLLRHRAQLLEHRAPHVRHMQKALLQMHIQLSPARSDVTGTTGRRIIRAIVAGARDPHPLAALRNSRCKKEAEEIALALTGTWREAHLFVRTHALALFDFSTVLLRACAAQIDGAFSVITPRFASTPNAFVLPEASMPPRRQPHSHSKNAPAGNTRAHILRITGVDLVAVHGRSDSLAQTIFAEIGTDMRKWPDDKHFCSWLGLAPNNDLSGGKVLQSRPMKNRNRATQAFRLAAQSVIRSHGALGAFSRRLKGRLGPAQALVATAHKIARTVYHMLKNRGQYPDIGAAEYNKRFHEREMQYLQKKAAKLGYQLLPA

SEQ ID NO: 510638 - protein, 316 aa, unidentified
MVVVGFDVGKDSLFGARLDRSGVVKEHWELANTPAVLLPVLRGLRRKYKHLLVASEATAEYHRPLAQLCLTLNIPFSLLNPITTKQFTRATVRKRKTDKGDAEVIARVAMQGQGTLVTKDTFNDIKPMLRTAVKLIQMSRMLTLMQYHVADVLSNEPALLQQLATCQEALDVAAATFRSTARQRVNPSLSKLLQTVPGIGPQTAALLIAELGDITRFKNANAVVAYMGFDPRVKQSGTSLKRNTHLTKRGSPYLRRALYLAAAAAQRHDPELQATYDKKRAEGKRYREATIVVARRVITRVYAVWKRGTVYQKRIA

SEQ ID NO: 510639 - protein, 363 aa, unidentified
MNSVHYVGMDVDKEKIVVARLTSAARLSNECVIANTPQAVKKYFAALTKEAEVVAAYEAGCFGFGLYRQLNDLGVAAVVAAPGLIPRKPSDRLKTDRRDARTLAFALRAGQLTAVHVPTKQDESVRDYLRMCEDMRDDLRKCKQRILHLLLRRGIRYEQGGPWTVKHKNWLATLDLGSELDRQTLDSYLARLQELESTCSQLAAEVESIAQGDRYRDSVRTLSAFKGIKTLIALSFITEIGDFRRFSSAAQFMAFLGLVPSEHSSGPKHRQGSITKAGNSHLRRLLVEAAWHYRSYHPSSRVLVQRRREVHPRIISYVNRAGRRLNRKYLHLLMRGKRSQLAVTAVSRELAGFIWGAMVGQVA

SEQ ID NO: 510640 - protein, 362 aa, unidentified
MTFFIGVDLHKTQFTVHVRTDEMTETLKQIRQYKTDKSGYAEFIERIQAYRESGACVKIGVESTGNTRFFKHQVEKAGAEVTVINTLKFKVINESAKKTDKHDAATISEFLAKDMLPESYLCSKETENIRRLLKSRERLVRSIVGQKNEVHALLVSMGLKDEQRSLQSKKGRQKILDVLESNNDYVLEAQSVKLMVEIISQMEAAVKVIEKQLSELTKDDQMVNRLLTIRGCGKITAWTIRAYTEDISRFSSAKKYAAFCGLVPWVSDSNETIRHGKITKRGPQELRVSFVQMVMGIRRCKDTANWRIMQRYDYMKTHKGSGKSIIAAARKFAEIVWVMLSNNNDFDREKMYGKYKPAPLAV

SEQ ID NO: 510641 - protein, 355 aa, unidentified
MSQEKYIGMDVHQATISVAVMDGNGKLLMECLLETKAATILEFVQGLRGTLSLTFEEGTSAAWLHDLLKPHVSRLVVCDPRKAALLKEGNKSDRIDARKLAELLRTNQLKAVYHGEHGIRTLKELGRSYLTVSKDVTRAMNRIKSLYRSWAIPCPGTTVYAPSHRLEWLAKIVQPGVRVRAQHLYEQLDNLQPIRQQARRELLLESHKHPAVKLLRQIPSIGPIRAALLVALLQTPHRFRTKRQLWAYSGFALETRDSGEYRMVRGKVRRNRERLTVRGLNNNHNHDLKNIFKGAAISASTRPGPLYDFYAGLLQKGMRPTMARLTLARKIATITLTMWKKGVDFDAQQLNRQAA

SEQ ID NO: 510642 - protein, 348 aa, unidentified
MAMTIVELDRAVTGGVDTHLDVHVAAALDPVGGLLGVESFDVDVRGYRRLLEWMSSFGPVSKIGVEGTGAYGAGLARYLGGKGIEVVEVDRPNRQARRKKGKSDPADAIEAARAALSGRAEGKPKSKDGRVEAMRALVVAKRSARQARIAALCQMRHLSFTAPDALRERLKGLSPSALWAECAALRPRPGADVVGYATKVALCALGRRVEALEAEISGIDELLRELVAQTAPGLLDLYGVGVDSAATLLVTAGDNPERLHSEAAFANLCGVAPIEASSGKVVRFRLNRGGDRHANSALWRIVMVRISSDPRSRAYMERRTKEGRSKLEVIRILKRYVAREVYRQLPRP

SEQ ID NO: 510643 - protein, 434 aa, unidentified
MRKIRTNAAGIDIGAKKVFVSIDGQPVKSFDTFTEDLELLGAYLVSHHIKTVAMEATGVYWVILYDILASHQLDVWLVDGRSTKQVPGRKTDVKDCQWIQQLHSYGLLNKCFIPDNLVQELRAYQRLREDHIRSSSMHINHMQKAMILMNIRLKEVISQIHGASGMRIIRAILAGERDAEKLALLCDSRILKTKKQWVIKSLKGHYSEAALFQLKQAVSCYDFYGEQIAGCDVKLEEVLQKMNTDKPQQPKSKNTRKAIRHNKPNITNMGEHMLGIFEGKDATVLPGITDYSWMQLLSEVGTDLGKWKSEKHFTSWLGLAPKQHNSGKKNRNYKAKGTPKAGLIFKQAAVGLLNSKHIALGAFGRKIRAKKGGLVAIKAVARKLAELYWKLFVRGLEYVEGGIQKYQEKMMLNKQRAVTRMAKEMGLVVIPLRS

SEQ ID NO: 510644 - protein, 416 aa, unidentified
MQVLHGCCCGLDIHKRFVVACVLTTAADGSVQKVTRTFSTMTDELLALLDWLTEVGCTHVAMESTSAYWRPIYNLLEGHLTVLVANAYHIKAVPGRKTDVRDAEWIADLLRHGLLRGSFIPSPEQRQLRDLTRYRTHLVEERARVTNRLQMVLEDANVQLAAVVTDVRGVSARAILEALVAGESDPTTLADLARGRLRAKRELLTRAVVGRFTAHHAFLITEHLSQLDYLEEAMERVSAEIAQRLQAEQGAIDLLDTVPGIGRRAAEIIIAEIGTDLCRFPSAKHLASWAGMCPGNAESGGKRLSGKTRKGNRWLRQVLIEIAHVATKTRGTYLAAQYRRIAARRGKKRALVAVAHTVLVIIYHILTRRESYRDLGEAYFDHLEHQHVERRLVRRLERLGYSVTLAPATPGPEVAA

SEQ ID NO: 510645 - protein, 500 aa, unidentified
MKLLYRRCAGLDVHKKSVSVCVRIRVRGQKEAEIEEAVFGTFTQDLERLRDWLRQHKVKQVAMESTGVYWIPIWNILEPVRWGFQLLLVNPQTVRALRGCKTDRIDARRIAEFLQYGLLRGSFVPPAPIRQLRDLTRMRVHLQGDRNRVINRMGRLLETVNIKLGSVASNIVGKSGRAMLQALAAGENRPQDLADLARGHLRAKKPDLVLALEGRMSEHTRWLLGRLLQELQWLDGRVTELDARLTEQMLPHADLVKRLCTIPGVDRLTAGVLIAELGLDMQQFPTAGQAASWAGLCPGNAESAGKRFSGRTRKGDRYLRRILVQNAWAVAHQKDCFLTALFYRIAYRRGLKKAAMAVAHRILIIAYHVIRDGSEYRESGGDYFDRLHPERTAQRLANRLTRIGFDVVLTPRHTQPPTTALDNPQPVQKRRGRPCQCAARGIPCQHGIPPKSRETQARSEAEQPPQTQCRICAKWGIACIHARPRKRHGHLPATGPQSTA

SEQ ID NO: 510646 - protein, 408 aa, unidentified
MFIVGIDIAKKTHVAAITDDTGKLIGKTFKVDNSVEGFNTLLQKLADISTDISQFVFGMEASGHYWLNLYTWLSDKGFTIHVINPLQSDALRRLQIRRTKTDPIDAQLIGECIRLGKYCETNLANDDMLALRDLTRQRFYLVDMAGDIKRKVISMMDRIFPEYESLFSDMFGTTSCKLLKECTTPEEILALDTERLCEILRKSSKGRFKQQKADQVRERARNSFAVLLSSQSLSLLVKQMIEQLELLESQIRQIETLIEQLYAKFDCKLTKIQGMGTTLAAVILSEIGDISRFQNPKQLTAFAGLDPVIKQSGSFSATRVHMSKRGSPYLRRALWLAANTVKQWDPSFAFAYQKKLNAGKNKSQALAFITHKLLNVVFTILKNNIDYLPLFPPDFELSKLPQNFHLAT

SEQ ID NO: 510647 - protein, 409 aa, unidentified
MPSTERPFTTTAVHEPDATLFAALELSLSRWVVVASAPCESKLSKHTLPACDGPALLALLDELRRRAERRCRRSVAVVTIQEAGRDGFWLHRLLEAHGVRSHVVDAASVAVSRRSRRAKTDRIDAEGLLRALMAFARGERQVCSMLRPPSREAEDARRLTREREALLAERVRHTNRIKGLLATQGVFGFEPTWQARRVRLEALRTPQGHELPPRLKAETLRQIERLELILRQITEVEAARDAALAAERQTAPVAAAPAPEADATPVALPADEGAGARLMRLKGIGPETASVLRLEAFQRSFGNRREVAAYAGLAPTPWQSGGLDTEQGISKAGNARLRRAMIQLAWFWLRNQPQSELSTWYRERVREGRGRIKRIAIVALARKLLVALWRFVTQGLVPSGAELKPAKAA

SEQ ID NO: 510648 - protein, 435 aa, unidentified
MSQDTAKGSKSDGNGEETFAALIGIDWADEKHDVHLYDVASGASEASVLPHTPEDLVAWATQLAQRYPGRRVAICLEQARGALVYALMRYEHLVLFPINPVTMKRYREAFAPSGSKNDPTDAQLLCELLRMHRDKLRAWKPDDAATRQLQLLCEDRRKLVEMRINLLLRVKATLKGYFPQALTWAGVDLTHPLASDFLLAWPSLADVQKAREQTVRKFYWAHCVTRPQVLEQRLKEIREAQPLTTDSVIIEAGRLSVQMLMTQMRHLNHAVKVYEGRIAAAFKQHPEHDIFASFPGAGPTLAPRLLVAFGSDRDRFAECGELQTHSGIAPVIERSGKQVWTHWRWACPTFLRQTFQEYARSSVVYCGWARTCYDRMLERGMKPQAAFRALAFKWQRIMFRCWKDRMPYNEERYLKAMQKQDSPVVKALMAFPAKA

SEQ ID NO: 510649 - protein, 355 aa, unidentified
MDSKKYIGMDVHKESISIAVMNGAGKIVMECLIETKASMILQFIDGLRGDLHLTFEEGTSAAWLYDLLKPHVTKLVVCDPRKNASMREGNQNDKIDARRLAELLRLNHLNPVYHGEHGLRSLKELVRSYLTITKDLGRVMSRVKAIYRSWAIPCTGKQVYAPRHRAEWLGKIGEPGVRRRAEFYYQQLDALRVVRQQVRRDLLAESKKHKAWKLLCQIPSIGPIRSAVLLGILQTPNRFRTKRQLWTYSGFGIETQSSADHRSVNGQLQRAKKQSSIRGLNRNCNHDLKNLFKGAAVVALSKPGPFQEFYTALLAKGIKPEMARLTLARKIATIVLIVWKRGACFDAQHLKPQTA

SEQ ID NO: 510650 - protein, 381 aa, unidentified
MDQEQATPEKGHTTKFPVLYVAFELGNSTWKMACSDGRKVRQVTVTARDLGQVQGALLRAQTHFGMDGASPVVSCYEAGRDGFWLHRYLQDQGIDNVVVDSASLEVDRRLRRAKTDRIDAGKLLRMLIRYHGGEKQLWRVVRVPSREDEDARHLHRELESLKRERTRHRNRIHGILMQQGLRIPNPSKKRFLKDLEALRTWDGHKLPVAMKARLVRVHLQLRLVEDQISILATEKREQLKQVDNAKMRQVAQLLRLPGIGPVSSWTFVMEFFGWRRFRNRREVAALAGLTPTPYDSGRKLREQGISKAGNRRIRTLAIEIAWAWLRYQPRSKLSQWFSERFAGGGTRMRRIGIVAVARRLLIDLWRFLEYGVIPEGALLTT

SEQ ID NO: 510651 - protein, 427 aa, unidentified
MHYTQNDKIRQATEGTIVVGVDIGSEKNYARAFRGNGIEITRKAYFFPNTLTGFKAFEEWITKMAVPLAEKKIIVGVEPTGHYWFNFADYCQGKQMTVVTVAPQHVKHSKEMDDNTQRKDDRKDPRVIAKLVIEGRYCIPYRPKGIYAELRVAYNRRCEIVEAETRAKNRIRRWFDLYFPEYRTVYGSVTAITGIIILKKAPLPQDIVSLGVDGILRIWRAHKLRAAGYKRAKTLYEAAQTSICPPDAGRAVRMELWQLLEEYEQIEKQLNDADIMIGIVTADIPEVNELMKIPGIGMITAAGMISEIGDIRRFDDPRQIQKLAGLAIVVNESGKHKGQSEISRRGRKRLRKILFQAAMSLVKSNKEFKTVHDYFTTREKNPLKKMQSLMAVAAKLLRVCFGMVKNGTPYDPTKVLKDIRKMEPKAA

SEQ ID NO: 510652 - protein, 386 aa, unidentified
MSVVVGVDIAKSKFDYRIITEGNDKLSKGSCLMTHEGFHGFLADPNITKDAMFIMESTGMYHIPLLRFLNDGGYDVHCVNPLLVKKQVMADSLRKTKTDSADALSIAKYGRLHYDMLKEQKSRMDDEVKAIARRRQQIVEDVARTKTQLKADLCVAWPEILSLDVFTATMLNFLSRFGCAGEVLAATDEDILAALSHKGRGRGPAFGVEDIRKLALGSIGVPYRSDMVKDSAEKLVHLIARDKKLTEALYAHEMEVHSKEIDILTSVPGIGDTTACQFMAEIEDIGKFSSYQKLIAFVGTDPGIYQSGQQNTSGHITKHGNANLRRVCYIMATKCNTWNPIISDYYSKKRNEGFSHRKAMIAATNKLLKIIYVLLSRGERFQIQTD

SEQ ID NO: 510653 - protein, 341 aa, unidentified
MMKKQTCFFLGIDVSKLWFDISLMPVVNYQKQQTITERFDNTIDGMALLKKWLKVQKVTFDDDTLLVIENTGIYHRLLWKFFNENNIPIHIGNAAHIKKSFGIARGKNDKIDSQRLCSYAYKNDDELKASSTLNPAFLKLKDLITSRSRLRTQLGANKAYLKELKNINDKAAQKMMENVYKMAITGLQKSITEIEKQITVIIQSDSSINTNYTLLLSVPGIGPVTATYILCCTNNFANKISGKQLSCYAGVVPFSDRSGSTLNGRNKVHKMANKELKCLLHMCSLSSIKYHQEFRDYYDRKVKEGKHPNSVLNAICNKILLRAVAVVNNQKDYVENYKKAA

SEQ ID NO: 510654 - protein, 400 aa, unidentified
MLSIGIDVSKGKSTVCGMKPGGEIVYTPFEVQHTREGMSELVSLLRGSGEEVRAVLESTGSYHCPVVAALLENGIFVSVVNSLRMKRFCSQSIRKVKTDRIDAMQIALYGLAYWQELQPTKLPEDTYRELQLLARQYYQMTSLLIKAKVDFNAICDQVLPGMQELMNDHAGRHKLSDFVLRYRHTTHILEMGETRFRKDYCKWAEKKGYRNHERMAALIFATAQNGIPVLPNAPSTQIVITEAIRVLHTVEASRDAILTQMQALAKTLPEYSLVREMPCIGDTLAPRLIAEIGDVRRFHSKRALIAYAGIDAPPYQSGKFCANNRHISKRGNRYLRKTGYEVMQSYVMHKPANDPIFTFIEKKRGEGKSGKLAMVAGLNKFFRVYYGKVTELYRSLPAIE

SEQ ID NO: 510655 - protein, 489 aa, unidentified
MFGAMKRKNIFRNESQKLDAAFIEAGLPERVLLVPLDFAKITHYACFCDGHGTYIRKAFTVQNTKEGIDYLVDQIERTRAARSIKSKRHVIIGGEDSASYTCNFMDRLFELGYLTVRLDSKEVHRQADSVDSSTDKTAVRAIAKTLLNRDALHTGGTDLYAQMRGLTRQRRRVVHLSTAVKNRIHTHADRLFPGFLSKESAVSAFTQASLELMANKFSAATLARKSEKTLTRMLARQGVRGAPEVAAKLKEQASNSICANDASVRLSSQLIESELSLFQTLQSNLNDLNIECARILLQLPEAFTVSIKGIGITLAASIFAETGSLRQIQRSDQINAYAGIAPKVKQTGGPESPARIGGKRRQFNRILKDYTLQAGNHLYLHGPTELLHDATRRKLAGKAVDTAMARRFLRIARALAKSHCIYSPSDLRAGQHGTDAESQARAQYIVQIWPDLLLKWKRLGLHEEAFAPETPLGDWRIIVQEIYEIDLPF

SEQ ID NO: 510656 - protein, 379 aa, unidentified
MTQFPVLTSNEQSIYAALELSKNSWLLAIQVPGRDNPSLHPIKGGDAEGLMAKLDAARDRVAKVTGQVPKVTLCYEAGYDGFWLARLLEQRGVTCRVMDPASLQVNRRARRVKTDRIDVENLLHTIVAWHRGERHVCSMVVIPNVEEEDLRRSHRERERLVRERTAHINRIKALLFGQGIRGINVKARYKTLEPAKLITGEGHHLPERLSREIVREIERLAVVQEQIAAIERERDLAPTPCAATERKRHQLLCLNGIGQATAPILAREVYYRRFANRGQVASYLGVTPSPYDSGGSRRSQGISKAGNRRVRTVMIQLAWLWLKHQPQSALSQWFNRRTEGQSKRLRRIMIVALARKLAIALWRYLEHGLVPDGAIVKAR

SEQ ID NO: 510657 - protein, 391 aa, unidentified
MILAGIDVAKNKHDCFIMNSDGEILVKAFTFSNNLEGFNFLYEKISSVSKPKDKIKVGLEATGHYSYNLLGFLLNKGLPTFVINPLHTNLFRKSLTLRKTKTDKVDSRTIAMMLMSDVALKPYTDTSYHNEELKSLSRYRFTKVQERSKLKTSVSRLVQILFPELEKIVCTIHMSSIYHLLEEYPGASYIASVHLTKLTNLLMEASHGRYNRNTAIKFREAARNSIGSILPAKSLELKHTIELIRELTVEIDEIDAEIKKMMDSIASPITTIPGIGYSMGAMIISEIGDFSRFSSPDKILAYAGLSPSTYQSGQLNNCYSHMEKRGSRYLRYALFTVAQKVCIWDNTFAEYLSKKRAEGKHYYVAISHAVKKLVRVIFHLERTGQAYLKAA

SEQ ID NO: 510658 - protein, 393 aa, unidentified
MVCVGIDVAKDKHDCFILSSEGKVLADVFTIQNNAEGFNTLLQTISCCTNPKDKIKVGLEATGHYSYNILGFLLDKGLPTYVINPLHTNLYRKSLSLRKTKTDRVDARTIAAMLLSDVDLKSYTDTAYHNEELKSLTRYRFDKVRERAKLKQSVSRLVTILFPELEKLVPTLHMASVYALLSEFPGAKQVAEAHLTHLKAVLHDASKGRYGRDMAVTLRDAARCSVGSVMPAKSLELRHTIRLIRELDSEIQDIEAAIQTMIEEIASPITTIPGIGVRMGAMILAEIGDFSRFDSPDKILAYAGMSPSTYQSGQMSLTGAYSHMEKRGSRYLRYALYNATKYVCHWDPIFSAYLAKKRAEGKHYNVALSHAAKKLVRLIYALEKSRLPYSSAA

SEQ ID NO: 510659 - protein, 458 aa, unidentified
MDWFGFGWRASEVGHRGKRRLAPVDKSAPEVIPDAEHELVIERVAAVDVAKAAGKVCVRLPAKTGRRFSRVWDVPARTGAITELGEQLVELGVEKITVESTSDYWRIWYYLLEAAGLSVQLVNARDVKNVPGRPKTDKLDAVWLAKLTEKGLLRPSFVPPAEIRRLRDYTRLREDLTHERTRYWQRLEKLLEDALIKVSVVASRLDTMSTRDMIEALIAGERDPRRLAELARGRMKAKRSELITALDGRFDDHHAELARMLLAQIDALSAQINTLTGRIEDLIAELPEAAAVDHGGGDDTDTAAPDAGDGPDAGPPPARGAAGLTGGTPRRVDPAIEAECARLSAIERLDEITGVGEHNAQVIIAETGLDMTRFPTPAHLVAWAKLCPRTIQSGPVTRSGRAGKGNPYLKGALGQAAAAAAKTDTFLGQRYRRIVKRRGKLKALVAVARSILVMALSR

SEQ ID NO: 510660 - protein, 344 aa, unidentified
MPSIVGGMDIHRKQVTFDYLDLETGEVKCGQITPADRANLRAWLQRFAGVSGVAFAVEACTGWRYVTDELQRAGVEAHLAEPADTAAARGRKKRAKTDKADSRLMRDLLAAGRLPECWIPPPQILEYRALLETYHALRREHTAWVQRVHAVLFHQGAPVFHGLAETDGPAQLAALARACLSPAGQQQIALYLRMLEVTGSELDALRAQLVKAAGRLRGARALAGQLYGVGPITALALCCWLGGAGRFSSARKAVRFAGLDITVYSSAGKRSPGHLSRQGPPVLRWCLYEAGKTHARAGAPDHGYYAAVKDRKDGKRAALSEARKIVRQACHLLGELGDDAFATV

SEQ ID NO: 510661 - protein, 401 aa, unidentified
MECIFGLDISKHTANVAVLIDRQVIKEFKLSSNREGFERLEDELNSFREPKIIFESTGIYSRPWRAFFQRNGWLYTEINPLKAKKVMDSFRAVKTDSVDAVGLAEAMSRNHFLPSFQEKSEYTELRELHRIYQEHNDDVVRNKNRLHHELQLTFPEIEHFLSRPEGGLYWHIVQKFPHPHLVLQHGSAELTSIILGATQKNMGSKRAQRLAEHLLELAKSSEPALDTDSYAIKRVIELAYEVKRLDRLKESLIEEMAKIGTSLPEVAILTTIPGIALKSALCIIAELGDIRRFHSANAINAYIGIDLTTYQSGDYMAKQRIRKRGNPLARKVLYRTVINIISASSYRPTRFNDFYQMKKQSSQSKGTKKIAVAVMSRLNRMIFHLVLHNEVYEPTVSQPRQ

SEQ ID NO: 510662 - protein, 319 aa, unidentified
MKTIGIDISKLTFDVYNEELGHEKFSNDKEGFKGLKKLLKKEDHCVMEATGCYHIQLANYLFEKGFKVSVANPLVVKRFIQMKQQKVKTDKHDARMISLYGEEQNPKLWEPEPEFIEEGKLMTTLIQLYVKQQTQFKNKLDNLRSGGIEKGMMIQSLNLQLKRVKVEIKKLETNLEDLLKEHAPDVLTNIRSVPGIGKKTAMLMMVTTNNFRDFDNAKQVTSYVGLAPVERSSGSSIRGRSYISKKGDPMLRHHLFMCSFTACQNNPQCRALYERIVAKGKSKKLALIAVCNKLIKQAYGVCNNDLVYDENYRRRKVEL

SEQ ID NO: 510663 - protein, 345 aa, unidentified
MKITTAGIDLAKNVFQVHGVNEHGKTGLKKKLKRDQVAAFFANMPPCLIGMEACASAHHWARKLRNLGHDVRLMAPQFVKPYVKTNKNDAADAEAICEAVARPNMRFVPIKSVEQQAVLSLHRVRQGFVKARTAQGNQVRGLLAEFGLVIPQGICHIAKRAPELIEDASNELPGSFRLLVQRLLEQLKEFDRQVHEIEDQIVTWHRTNDDSRKLAQMPGIGPITASAMVASIGDAKTFKNGRQVGAWLGLVPKQNSSCGKTMLLGMSKRGDSYLRTLLIQGARSVIYAAQRKKDAVDGWLGGLLTRRNANVAAVALANKNARVVWALLAHNRDFRPDYRSCNQAA

SEQ ID NO: 510664 - protein, 462 aa, unidentified
MPDRREDESRPDNVRPMEGLPALRPQVAGLDLGSGRHWVCAPGLEGKGREVVDFGATTPELLRMAQWLKVRKVESVAMESTGVYWIAPLEVLEAEGLEVLLVDTRQLARVPGRNKKTDPTDCEWIQRLHSCGLLTGSFRPAEQVCRLRTLVRDKANLVAEAGDWVRRMQKSLDQMNVRVHRAVSDLEGVTGLAIVRAIVAGERDARKLAQLRDRRCQKSEEEIAEQLSGHWREDHLFSLGQSLKMYDAIQKRIAAYEQEILRQLRNMQPEERRGQAAPPLKNSHKAHGIRKRRQEPMRQALYRMSGVDATQIDAVGVETVEVVLSEYGPDLSRFPTEKQFASHVTLAPHVPKTGGKPIRKKKRHSASTRVAAALRMATLSLRHSPTALGAYYRSIARRIGADVAVFATARKLATLIYRLLRWGQPYVDEGAEAFEKRYQQQRIRSLIAKASELGYKLLPTTN

SEQ ID NO: 510665 - protein, 328 aa, unidentified
MVAKVSDVIVGIDVSKETLDAYCAKGQRKQGRTFANSSDGWKLVRTWLKVMGSKQAHVCMEATGRHSLGVALALHDAGHVVSVVNPAQIRDFARTKLGRNKTDKVDAALIREYTELFKPVPWTPPSPAMRRLCQLQTVRAGIIRSRAEWKNRIGSGLGDTTATKLAAATIEHFTTQLEAIDRAISETIDQDAELHARCDLLVSVIGVGDTLAALLMAKMPEPGVLHRSGEIVAYAGLNPSHHRSGTSIDRPTRISKIGNAELRSALYMPALSAMRFNPAVAALVARLKSAGRLKPRQIVVAAMRKLLVLCFGALKTGKRFDPAIAMPA

SEQ ID NO: 510666 - protein, 342 aa, unidentified
MLIIGCDYHPGMEQIAWFDEESGECGEQPLEHGTGEAERFYRELKRRGVQVRVGIEASGHTRWFERLLRELEMELWIGNPAHIAAQRVRKQKTDREDARLLLRLLREGRFPKLWVPSPENRDLRQLLWHRHRLVQMRTRVKNQLHAIALNEGVQRKSRLWSKAGRTQLESFALAPWTARRRHDLLQLLDQLTPQIAELSQAVEQEAERRPEVQRLMTHPGVGPITALAFVLVLGTPDRFRCGKQVGSYLGLIPCEDSSAGKQRLGHLSKQGNTLLRYLLVEAAQAAVRCDPQWRRRFLHLAMRRQRNIAIAAMARKLAVSLYWLWRKAEDPPAAPQSGSHVG

SEQ ID NO: 510667 - protein, 313 aa, unidentified
MGSFVGIDVSKDRLDVHVLPQGEAFVVERSGAGLVALVERLKPFAPELVAVEATGGFETTVAAAIAGAALPLAIINPAQIRHYAQALGKRAKSDPIDAEVIARFAADIKPEPRILPDDVSRHLAELVARRRQIIEMMQAERQRELRTTNKRLKRSIARVIAALERELAETDSELDDCVRGSPLWRAKEDLLASVPGVGKQTARVLIAELPELGTLNRKQIASLVGLAPYVRQSGRWKGKSAIGGGRKSVRSALFVAAMVASRHNRVLKPFYDRLLSRGKPKVLALIAIARKLLTILNAILRDQTPWQTVVSPA

SEQ ID NO: 510668 - protein, 385 aa, unidentified
MEYLGIDWSYRRAAWCSLSDAGVIVGEGAVPADADGLARLVIERGTDVRAVVEMMSGAIWVRDQLAAAGWRVQIAHARKVRDVAPLACKTDKVDARVLAELARRDLVPELWIPSLDDRALRERLRRRTHLVRMRASAMNRIFGLQTQWGLRLSLQRLRAPEAMTLLEQQGMPAVWRRSIAEALDVIELLDARITPIDHELRPLARADARVVLLDTIPGIGELLGLTLASEIGDVARFGSPRKLIGYAGLAPKINQSGDRSRTGALSKAGSRTLRWAAVEAAQHAVAPALHRHRQARRQEPGQGRRRAQDPDRRLARPLAPAIVQAGRAAPARSCLGKLPLLSGRLTALHGIEKPRQLPRTLCADPSAEREMSPPQTCAALHLAEP

SEQ ID NO: 510669 - protein, 409 aa, unidentified
MRASGNPGSVILGLLLEPWRTEMTPSCKSAPAIAALDYDSTIIGSLELSSTKWLFAAQVPGVARHSRYMLSANGDELMALIEKLKARATTSGKAVARVILTFEAGRDGFWLARFLARRGVEVHVMQSSSLPVDRKARRAKTDVIDVEMLLRTLLAFLRGEPRVCSMVPIPSEADEEARRAHREREDMIGERRSIVNKIGGILATLGVKGFRALRSDRRRALDALRQPDGDPLPTMARSRIDRLLDRLELILKQIAVVEKARDAVTVKAEPENEAERMIKTLVSLGAIGPELATLLVREVFVRPIANRRALGSYVGITGTPYSSGGSEREQGISKAGNSRARAGLLELAWLWLRWQPDSALSVWFRQRVGDIGGRIKKIMIVALARKLLIALWRFAKEGVIPEGAKMKTA

SEQ ID NO: 510670 - protein, 353 aa, unidentified
MQRPRQGQVIIGVDTHKEIHVAAAVDRQGTLVGEERFPTTRQGYRQLESWARSLGDVLRVGVECSGSYGSGLTRHLAKNGFAVLEVTFPDKTVRRKRGKGDFIDAEMAAEAAFTGARTVTPKSRDGMVEALRMLRKTRSTAVAARRVALQMIRADVISAPEELHDRLRGMTRMQLIRHLVATRPDSTDFRTPLGAAKIALKRLAKRYVDLDDEVSELDDMIDAILADAAPLLVQLKCVGAQSAAQLTVTVGDNPERLRSEASFAMLCGVAPVPVSSGMTYRHRLNRGGDRQANSAIRIIAIGRLRTDERTKEYVAKKMSEGHTKMEAIRCLKRYIAREVYYIIKRQSELVNCS

SEQ ID NO: 510671 - protein, 415 aa, unidentified
MKQTQNTRGYERYFAIDTHREYHLVGGQNEDQEWVVNPRRVSIEKFPEWAQKNFRAGDIVVLETTTNVWDTYDIVAPWAGRVLVANAAAVGEIAGARVKTDTKDIERLLKLLFGGIVPEVWVPPVHVRELRAFISYRNRLVKMATMIRNRLQSLLHKHSLMLPEEGILNQAWWDAQASISALEKMQIRQELGLLDEIKKLQSAVNEELEKQSTGELWGKQALQLMQLPGVGVIVAMTVLSAVGDISRFEDAKQLVGYAGLGAGVHDSGKTHKEKHITKKGRKELRWIMVEAAWRAVRMSPYWKEQYEKHLRRVRKPNQAIVVIARKLLVAIWHVLTKEETDIHASEDDLAYKMLLLSWSLNDNVRMGLNYKQFAKYALMKLGVEKDITRFVRKDVPRRLSPREEVLARMVELGIA

SEQ ID NO: 510672 - protein, 308 aa, unidentified
MNQENYTYIAIDIAKASLDVLVEGKRVKTANTQAGYRQILAIARDLETPLVVFEATGGYERALMEYLGEQSIPMAMVSPARMRAFARSEGIKAKTDPIDTQMILRFAQEKKVAPMRIIEGKRRELSDLMDRRSHLSEQLKREKTRLQKAPQLIHSSIRRMIAYVEQELSLIEKQIEQLIAADNTLNEEVNRVQSIKGIGKVNAWTLTAYLGEIRDLKRNQLVALAGLAPFNRDSGKSIKNRFISGGRAKVRKALYMAATCAAVHNPVIKPYVNKLRERGKPYKCAIVAAMRKLLLHVQSLLKNLPVPA

SEQ ID NO: 510673 - protein, 448 aa, unidentified
MRTRKPTRPRKMKLPEHLQHINPHAAGIDVGGRSHFVAVPEGSCKQPVREFSSFTDDLHRMADWLLACGVTTVAMESTGIYWIPVFEILESRGLEVRLVNARHVKNVPGRKSDVLDCQWLQRLHSYGLLEGAFRPTEQVCTLRAYVRQRMNLVRYAASHIQHMQKALSQMNLQLANVVADIAGVTGMRIIKAILAGERDALVLARLRDARCKNDESAIARSLQGNFRPEHLFNLKQAVDLYEFYQSQIAECDRQILDQLAGFDAADGSGKAPPDSLEEALVRISGVDLTRIDGINTNITLKIISEIGTDMSRWKTAKHFASWLGLCPGTKISGGKPLSTKSKRVVNRAATALRLAAQSLLRSKSALGAYLRRQRARLGAPKAITATAHKLARLVYSMLKHGSAYVDVGQKHYEERYRSRVIQNLKRKAQDLGYELVDVAGKQPKPLTV

SEQ ID NO: 510674 - protein, 410 aa, unidentified
MAERFVGIDVGLREHRIAVLDRDGEAVGQSFTIAASKDGVATLLRALDARDAPPAPTLIGLEASGHLWENLEAALVGAGYRVIVLNPLQTRRYRDVVRRKAKTDDIDAHVIAGLLRSGVAQASYVPDEQVQSLRELARLRARLMADRQDYQRQLIAQLDVVLPEHHAVLGDLLTARARGILAQFPTAQHLAQANPRAIRRAAEDAGARGFSLNDATVVRDSARRSLYSGKAAVARAHVVRTLVNQLERLINAIDEVDRAATALLPPSEPGTGPSDAELLQTIPGIGPQTAATLLGELGALTRFTDARALVAYVGFYPVIHESGDRAATPRLSRVGSRIARRSLYLAAVNAVRRSGEWRTIYLRKKAQGKTAKQALVVVAVKLIHALYAMLKHRQPYNPSRLLVAPATIGT

SEQ ID NO: 510675 - protein, 356 aa, unidentified
MAIVAHAHPFVIGVDAHARNHAIAVLACPTGEVVGEAQFPATVAGLQRAVSWVARRTGGDLDVLWVIEGVGTYGARLARVANDAGYTVAEAGRMNARANRGVGKSDPLDARRIAQAVLAIDVAMLRRPRTDDGVRAAVRVLVASRDHISGERTAAVNALTAIVRVADLGIDARRPLTTAQITAIAAWRARDEDLATAVARREAIRLARRVIATDRELAANTKQMTNLLNASPARVLLDQPGIGPVTAAVALAAWSHPGRVRSEAAFASLAGVNPIPASSGNTVRHRINRGGDRRLNRALHMAAVTRVRMDPRTRSYVEKRTAEGRTPREIRRCLKRYLARQIYRQLNAAATVHEEA

SEQ ID NO: 510676 - protein, 315 aa, unidentified
MVDVPCFVGIDVAKAQLDIAVRPSGERWAVPNDASGVVTLVERLQALHPTLIVLEATGGLERSATAALATAGLPVVIVNPRQARDFARATGQLAKTDALDARALAHFADVIRPTPRPLPDAQTQELRALLGRRQQLIGMRTAEQNRLAGTSERLTQDIEAHIAWLNARIATLDDDLETTLRASPLWRENDDLLQSVPGIGPVCARTLLLELPELGTLTRQQIAALVGVAPLNCDSGTLRGRRTIWGGRAHVRTVLYMGTLVAPRFNPQIKAFYQRLLVAGKLKKVALTACMHKLLTILNAMLKHRTSWQVQEVQN

SEQ ID NO: 510677 - protein, 424 aa, unidentified
MQNTAARKRKQVPEGYLVVGVDPHKKRHAAVAITQDFTTQAKFKFDNTREGLEAMLDRAKVEMVKSGCRGVMFAIETGGHYWRNVAYFLDEHGIPFRFINQFTLKRRREGKDLNRRKNDYRDSEVAAQLLCTGEFTESKLPQGVYAELRTAHNAYRRLVKERTRITNLVKGLLDALFPEFTQVFKDPCALTALSVLSICPIPRVIAGMTEDEFEATIEAQHKGRRLMRKKLRALHYSARTSIGIDAGACSLSSEIAFLVEKLELIRGHVCSIERTLVRLVDETEEGKYLLSIRGLNYIAVAGLLAELGCFKAYQSARQMIKMAGTNPTESESAGKKRARTPMSKQGRPVLRYCAWTSVIPMLRFNSDFRAWAKQRRERPVHANPLGGREVVGAALNRLLRLAFAMVKNKTYYQVSKAELTLVAV

SEQ ID NO: 510678 - protein, 352 aa, unidentified
MDRKIIVGIDTHKDFHHAAVITALGEAIGDHRFDATPAGYDQLLDWMESHGDVLRVGVEGTGSYGAGLTARLRLVGMAVIDVIAPDKQERRLRGKTDRIDAYSAARAVLAQRATTIPKDRDGQVEAVRVLRATRRLKVKQRTETMNQLQGFLVSAPERLRARLAGLGGKKLAMACSKLRDRAGDDTVSAVTVEMLRSLGRSWLELKVEADRIEGRIGELVADYAPELLAVHGVGPDVAAALLAVAGENADRLTSESALAHMAGTAPVPASSGKTNRHRLNRGGNRQGNAAFHRIVLVRMKSHPETRHYVAKTLARGKTKRDAMRLLKRYIAREIFPILIAIQQRHLNAQIAA

SEQ ID NO: 510679 - protein, 356 aa, unidentified
MNGDTLVGVIVGVDTHKHTHTAVAINAFGVRLGSLAVPVTCKGYRMLDAWARSLGPVRAFGVEGTGSYGAGLSRFLGEEGHTVLEVNRPNRQLRYLKGKSDTVDAESAALAVLSGQATALPKAGTSAVEMIRHLKVARDTAVKARTQAMLTIKAIIIRAPSTLREQLDLISGKMALLRHLAALRPGPITSTTTSAKTSLRAIARRWLALDEEIKSHDLQLQPLTAACAPELVQAHGMATGTAAEMLLLVGDNPERIRSEAAFAKLCGACPVPASSGKTNRHRLNRGGSRKANAALYRVVVTRLRGHQSTLDYVRRRTAEGKNKAEIIRCLKRYVAREIYGYLCAKRRPFNAASSSP

SEQ ID NO: 510680 - protein, 371 aa, unidentified
MKSILSVGMDVHKNSFSLCAYDGYTGEIVSESTFASDVKLVIKFIETLKSRYENDVEIKCGYEAGCLGYSLYKSLTSRGVDCVILAPTTMQVSAKNKMVKNDRMDALNIAKNLASGSYKAVYVPDEEDVEIKEYIRMIHDFKKELKRVKQEIYAFVLRHGYQYDGKSKWTIRYMNWIRELEMSEIQRETLDEYLAEMDNLNDKIERFMNRIDEMYQSERYHEKVSELRCFKGIDTFAAMTIQVETADFERFPNAKAYASYTGLTTGEHSSGDKNNRIGITKQGNTVIRKTLVECAQSLVKGNVYTPKSKRLKSRQKGMDVNIIAYADKATERLKKKYQKLIERNVPRNKAIVAVARELACFIWGMETGNIH

SEQ ID NO: 510681 - protein, 362 aa, unidentified
MRIIGCDLHARQQTLAMLDTTTGEVVEVTLKHEGDNVREFYSSLPRPVRVGIEATGSMQWFLNLLEELGIECLVGHPAQIRAAAPRKQKNDRRDAELILKMLVEGRFPAIWLPSKELQDLRSLLRHRHQWVRLRTRIQNALQSIALANGLRRGTSLWSQVGQHTIASLPLAPHTAYRRSELQAMYEKFEAEIEKLNQRVEEQACKRPGARLLMSHPGVGPITALATEVFLGDPTRFADSKALASYVGMIPREYSSGGRQRLGGLSKQGNPLLRFLWGEAGAHAARKDPELQRFYRRKLVQKGLGKASVAVARKLGIRLWIMLRDQIEYNEFCRRGQKQQKSSDACAGMPETRYGAKSHRPVD

SEQ ID NO: 510682 - protein, 374 aa, unidentified
MDSVARSAGLIYLGMDTSKDKIAVGILRADAASPDVEMIFNDEASIRRLINRFPDPGQLRACYEAGPVGFELHRLLTSMGVACQVIAPSLIPTAPGDRVKTDRRDCKRLARLHRAGELVAIRVPTPAEEAVRDLCRARADLVDDRTRTRHRLSKFLLRHDRIWRGGEAWTGKHDLWLLGQRFDEAALTSTYGHYRSMLVARDAELTAIESDLAYWYTHGPFADAVARLGAYRGVAYLGALTIASEVGDWRRFAAAGAFMGFTGLTPSEYSSGNTVHRGHITKAGNAHLRTQLVESAWQYQHRPSIGVTIARRHKDLPPTTVARSWAAQQRLCARFRRLDARKTNRNVVVVAIARELAGFLWAEMTTDQPQLAKA

SEQ ID NO: 510683 - protein, 311 aa, unidentified
MEIQRNKVCGVDIHKKFLVATILSRDGAKQTQRFGMTPDDLSRFRVWVIENGCEQVAVESTGVYWIPLLNALDGCIDLILANAYKIKNTSKPKTDLTDSEWMAELCLNGMIKPSRIFLKDDRDLRSLTRARERYVNDLTREKNRVHKRLDSCNINLSSVLSNIFGKVGSHILEGLLAGKNIDEIIDGIPVKLLMKKADQIREAIKNGLDVTKIQLIRGSLELMAALRKRIDELESEIRRRVKHKRENIAILMSVPGIGFISAVTILAEIGDFRDFEKPEKLAAWCGLVPSVYQSADKLITQNASPNMDQGT

SEQ ID NO: 510684 - protein, 353 aa, unidentified
MAHLEPARVTVGVDTHKHVHVAAARDQLGRRLGVTIAPATTAGYGELLAWARGLGEVQAWGVEGTGSYGAGLVRFLAAAGQRVLEVNRPDRATRRRRGKSDPVDADAAARTVQAGEATGIPKAQNGTVEMTRALRVARQTAVKARTQAINAIKALLVNAPAELREQLDGLPTTRLVRQAATLDPGEVATPTAACMLAVRSLAQRYQHLGAEIQLLTRELDRLTLQHAPALRALLGIGPEVAAELLVCAGDNPARLGSEAAFAALCGTSPVEASSGKTRRHRLNRGGDRHANAALHRIVIVRLRWHQPTRDYVARRTAQGKTKKEILRCLKRYVAREVFAVLRQLAQQDQPTAA

SEQ ID NO: 510685 - protein, 413 aa, unidentified
MDVLHPRCCGLDVHKNSISACILVQVAGRVQKHQRRFGAMTQDLQELANWLRQFEVTQLAMESSGVYWKPVWNILEGEFTVVLANAQHIKNVPGRKTDQKDAEWIAQLLQHGLLRPSYVPCEVIRDLRDLTRMRASLSQEASRISSRVQKVLEDANVKLSSVATNTLGKSGRAMLEEIIAGQNDPEYLASLALGHLRAKTPQLKLALEGKIRPHHRFLLRRLLDQLRFVEHEIELLEERLEDIGRERPELSQAVARWDTIPGIDRVAGWTLLAEVGHNMAQFPTAEQLASWASLCPGNHESAGKRLGGTTRKGSPWLRRMACQCAWAAARTKNTYLSAQFRRLAARRGIKRAIIAVAHSLVIIGYYLQQNQRNYEDLGGDYFDRIDSDGLKRYFIRRLEKLGHKVTLAPIKAA

SEQ ID NO: 510686 - protein, 392 aa, unidentified
MMKLFVGIDVSSKKLEVSMLTSDISAKPLFQGTFENDLNGATEVKKLILKLNLSQQFEKIVIGMEATSIYSFHPAYFFENDDDLAQFNTQAVIINPRDTKKYKDIFEIQKNDSIDAYYIADFLRLERYSTSLVRQEKYVALQRLTRSRFELVKSLSRSKQHFLENLYYKLNKLVVNDDLNTSVFGATMLDLLTEDFTTDDISVMPIEELADYLNSKGKGRFANPSALAKTIQKAIRGSYRLDKTIQTSIDVVLSVYLNEIRLFQKQIKLLEKSIDDLLKTFDEAQILQSIPGIGPVYSAGILAEIGQIKRFENQSQLAKYAGLAWKKYQSGSFNGDNTPMIHSGDTYLRYYLIEAANSVRRYDPVFARYYHQKLMKPNILHTNELSHLPHEN

SEQ ID NO: 510687 - protein, 352 aa, unidentified
MTVTIVETRVQARAITGGVDTHADVHVAAALDPVGGLLGVQEFPATAAGYARLLGWLGGFGPVCLVGIEGTGSYGAGLARHIAAAGIRVVEVDRSDRQDRRRAGKSDPLDAVSAARAALSGRAAGEPKGRDGQVEAIRALMVAKRTARSERIQTINQARSLIVTGPDDLRARFGHHSADHLVAELASLRPRPGSMIRYHTLLSLRELGRRVAFLDGQLQRLDELIVPLVTARAPGLLCLYGVGHDTAAKLLIAAGDHPERLRSEAAWAHLCATAPIPASSGKVTRHRLNPGGDRQANHALYRIVITRMSSHPPTRAYVDRRSKEGLSKKEIIRCLKRYVAREVYPHLRPGAG

SEQ ID NO: 510688 - protein, 422 aa, unidentified
MKIVYPICCGVDVHKTFLVATIITSNGITPHYSKKRFSTFNNSILQFKQWLIDNNCFDVCMESTGKYWVPVHNLLEDTIRITIANPKWVKAVKGNKDDTKDSKWIGDLFRLGLVPGSYIPQKPIRILREYTRYRSKLVSCKSSEKNRFQNAFTVCNVALDAVVSDMFGKSATYITDYLISSNTFDPEYCTSLLQKSLKKKASSVIESIEGYQITQAQKERIVMVRSHLNYINNSIDKLDQALYKMVEPYESTIELLCTIPGVDRQSAITIISEIGTDMSQFSNSKRLCCWAGLTPGNNESAGKKKSVRITRAGVYLKPALVQVAHAAVKSDKSPYYKIKYERIYKRRGKKRAIIAIARMILTAIYYMFTTGEEFNPCDLYKIDMPQEMQDKQKEKAVKEAVRFLIAQGVIKDSNISIQESNH

SEQ ID NO: 510689 - protein, 350 aa, unidentified
MIVLGADTHKRSHTIAAVSAATGELMGERTVRVGAKGFAALVVWARELGGERVWALEDCRHVSGSLERFLIERGERVLRVTTKLMADSRRRARGRGKSDSIDAIAVARAALREGLDVLPAAHLEGPELDLRLLVDHRERLVRQRVALNNTLQWHLHDIWPELRLPGSSLFYGNWGPRVARRLARAEQTMRIRIARDELRRIRELSQTIKALEAEIAQLVAQIAPQLLSEPGLGPLTAAKLVGEIAGAGRFTSDAKLARAAGVAPIPVSSGKTNRHRLDRGGNRQLNATIHRIAVTRLRCHAQTRHYIARKRAEGKSTKEAIRCLKRHLTRRLWHLLQPPTPDQHTIKLLT

SEQ ID NO: 510690 - protein, 348 aa, unidentified
MQIAVLGIDLGKNSCSVVGLDAAGRVVLRRRVSREGVVKLASGLPPCVMAMEACCGAHHLGRVLNGMGHEVRLMSPEYVRPYVKSQKNDERDAEAIGEAAMRPTMRFVTLKSEAQLDGQTLHRARTRLVGRRTALINQLRAVLLERGIVVAKGRRRLEEYLTRILDDDAEGGRTLSARILLLIEDMRREWRDLDTRIAALTADLVEQARVDEAARRLTTIPGFGALNATALVAAIGTGETFRRARDLAAWLGLVPRQATTGGRPRLLGITKRGNVYLRTLLVHGARAALPSLSASSTPLGAWLRALMARTHKNKVIVALAGKLARIAWAVLRSGTSYMINPAGATVAG

SEQ ID NO: 510691 - protein, 337 aa, unidentified
MKLYCGIDLHSNNHYVTIIDEDDRRIIDKRLNNDLTKTLSLLTHYRADLCGIAIESTFNWYWLVDGLMDAGYPVFLVNTCAVQQYDGLKYTDDKHDAFWLAHLMRLGILPTGYIYPKEQRGLRDLLRKRMQLVQYRTGQILSIQNQFWRSLGQRLKSQDIKQGIELPITALTDPNIRMAIQSNINVVQMLNTQIDTLEQAVQRQCKNIPEYQQLQTVFGIGKILAQTITLETGNIRRFNNAGQFASYSRCVGSKKTSNGKNKGKGNTKSGNKYLAWAFMEAANAAINHYSQAKRFYQRKMAKRNVILARKALAHKLARASYYVMRDGVPFMPERLFL

SEQ ID NO: 510692 - protein, 373 aa, unidentified
MPKYSTAFGMDVHLRSTTVCALDADTGEAVTRRFPGNPWGEIAGWMDGFPGPSLAAYESGYLGFAPQRELAGLGVECVVAAVSKIPRSAADSASKNDRNDAARMAKAILAHDISPVWVPSPEVEGIRDLAGAYDGATARLATAKQRLLAFLARRGFVYGGTTPAGNPRKYWTYDFLRWLDKVRPEDDGGVRALAALRNEVEAAAEARADLLSEYRAAVDASPIAAEVAALQSIKGCAFALAAAFSAEVGDFTRFRSGRQVTAYFGLAPKQRSSGDSVRLGGISGAGNALVRKLAVEGSWCYAAARHQPKLMPRDTGVPLEIRVHGRKGSERLLRRREEMLARGMPAAKANAATAAELVRWLWALGMMCREGAE

SEQ ID NO: 510693 - protein, 341 aa, unidentified
MNAITIGLDIAKSVFQVHGEDHTGKVVIQKRLRRHQVEAFFSKQLRCLIGIEACGTAHHWARTLVALGHDVRLIPAGYVKPFVRRNKNDARDAAAICTALSRPDMRFVTIKSVDQQASRGLERSRDLLVKQHTQLMNCTRSLLAELGIIAAVGWRGFAELIARVKHNEAAIPPVLLAALLPLIQQIEGLHTAIAALEDRIIAAARDNPVMRRLAGIPGIGGLTAHAIVTAIGDGRQFGSARDFAAWCGLTPQQHSSANKRHDKGISRQGDIRLRKLLALGASTIMRNARSRSDRATLWQRGILARRPVKVAVLAQAAKNARIAWALLVSGETYRNTTATTA

SEQ ID NO: 510694 - protein, 338 aa, unidentified
METYAGIDLHSSNNYIGIMDQDHKRLFSRRLPNSLDKILMVLEPFKSDLKGVIVESTYNWYWLVDGLQEHGYTVHLANPSAIKQYEGIKHTDDKWDSFWLAHMKHLNILPEGYIYPKEQRAVRDLLRRRLFFVRHRTANILSLQSTITRNLGIKMSSNEIKKLDMDDACDLFDSSNLVFMAQNNISTIKHLGKIIKGIEKEVKSQVKLRKEFVMLTTIPGIGLILGLTIMLEVGDIGRFFKVGNYSSYCRCVGSKRLSNGKKKGENNKKNGNKYLAWAYVEAAHFAKRYIPRAQRFYQQKMAKANGAVATKALANKLARASYFIMRDQVPFDEEMLFR

SEQ ID NO: 510695 - protein, 389 aa, unidentified
MHKTTARSEQTATIRTDLSAIFVSLELSRSTWLITSLSPGNGEKMSKHSMPAGDIPGLFALFSKLRERRRTKTGETYSIVTIQEAGLDGFSIHRVLEKESIESHVVDPASIATSRRRRRAKTDRIDGEALLRTLMAYKRGEPRVCAMVRVPSPEEEDQRRICRERKVLIIERVAHVNRIKGLLFSQGITNYEPIRKDRRERLAELQTGDGRALPAHMKAQISRELDRLELLLQQIDAVEDERDALIATQTAAVPPAPITMLLKLKGIGTEFAAILWSEGLFRHFDNRRQVAAYAGLAPTPWQSGSIDREQGVSKSGNPRLRTMMIQMAWLWVRYQPSSALAQWFNERVQRNGGRLKKSTIVALARKLLVALWKYATSGVFIEGAIMKSA

SEQ ID NO: 510696 - protein, 325 aa, unidentified
MEAKKLCCGIDVSHTKLDVCYQNNLGELFHLKVGNNNKGFEEILEHTGVDYHFVMEATGVYYIRLAFYLHEQGCQLSVVNALSIKRYIQMQLERNKSDKKDAGWICRYAMEQGPPYWEMPDSAYFEGKQLYNTIREYQDQIKRFNSQLHSLRLLPVPSKDTMKSLEKMKQQLGKETKNLEMKLETLLQQWQPAQLKSVSSIKGIGKRATAMLIVFTQGFKYTHSHRQLISFAGLSPTEYSSGSSIQGKPRIYKRGGKNLRDVLYMCSMNAMKTNPACKALYERLRANGKTGKQALIAVCNKLLKQVFAVVKNNSLYQPNYCSARP

SEQ ID NO: 510697 - protein, 341 aa, unidentified
MSEVSIIGLDLAKNVFQMHGEDASGTVLFRKKLRRDQVLKCLAAQPTCTVAMEACASSHYWGREIGRLGHAVRLITPDYVKPFVKRQKNDAADAEAICEAAQRPTMRFVAVKSEEQQAAAIVFRARDLLARQRTQTINALRGHLTEFGVVAAQGPTHVTKLVSAIIGHDTDIPELARPILRLLVEQLRSLNEKVALLDRELARRAKEDAEAKRLMTIPGIGPITATALVALAPTAQAFKRGRDFAAWLGLTPLQRSTGGKQKLGETSRMGERTLRRLLIIGASAAVRWAMRKGSTADPWLARMLARKPPMLVIVALANKMARIVWALMARGGTYRAPAAAK

SEQ ID NO: 510698 - protein, 344 aa, unidentified
MDHFAGLDVSVKETSVCIVDDTGKIVREVKVASEPEALLAVLKNPAFHFKRIGLEAGPLSQWLFSALAEAELPVVCVETRHMQALLKAQINKTDRNDARGIAQMMRVGLYRPVHVKTLRSQKLRMLLTHRKLLQSKAIAIDNDLRGTLRNFGLKVGMVGTVKFEARIKMLVENLPDLAGLIEPLLVVRRVLREQFVILHRRLLTIVRDDEVCRRLMTTPGVGPVVALTYRATVDVPARFRKSKSVGAVFGLTCSKYQSGEIDRSGRISRCGDEMMRVMLYEAAQSMLRSKKWSWLKAWAMQIARRRGMKKAIVALARRLAVIMHRIWVDGTEFRWTREQAAAAA

SEQ ID NO: 510699 - protein, 364 aa, unidentified
MKQKEKHNTIGLDLGERRHRFCVLDEAGEVVEQGSLSNERVALARLTQRYRGALVVMEAGTHSPWISRYLKELGSEVIVSNPRKVRAIYQHERKSDQRDAQMLARLGRMDRALLYPVRHCSEQAQQDLLRIKLRDSLVRARVGLINSVRFSLKSLGYTVRNSSSERFHKVVWETLPEAVRQMISPSVETLAELSARIKVLEREINLLAQSKYPQTLWLQQVPGVGALTALYFVLKIEDPQRFENVRDVGAYAGLCPRRDQSGGSDPQLRISKRGDAYLRRLLVSAAQYILGPFGPKSALRAYGLMLAADGGARAKKRAVVAVARKLAVLLLSLWKNRSHYEAFPHCQTIEDKRSGTIAIHRVEA

SEQ ID NO: 510700 - protein, 387 aa, unidentified
MRIIGLDIHRAFAEAVAWEDGKLRRLGRVDMRRALLTAFAKRLSKDDVVVVEATGNAAAVAAVIGPQVKKVVIANPMQVRIIAHAKIKTDTIDAGVLAQLYASGFLPEVWVPDEPTQALRRQVTRRNQIVRQRSRLKNIIQSILHAHLIPSCPHADLCGGKSRAWLAEQIVPEDERLAIERHLREFDRLGEDLTVIERDLARSALADDGAKRLMTIPGVDMIVALAMMAAIGDVARFSDPQKLVSYLGLNPSVRQSGPGPAYHGRITKQGRGHARGMLVEAAWVAARAPGPLRAFFLRVRARRGQHVAAVATARKLAVVIWHLLVKGESYAWARPLLHAKSFAISNSRPATRPHAARRGRRMLTTSRVCVRRSAAGSSRPKRLMRAS

SEQ ID NO: 510701 - protein, 340 aa, unidentified
MGEVTTVGFDLAKNVFQIHGIDAEGSTVLRKQLRRAQVLAFFSKLPRCVVGMEACATAHYWARELRELGHEVRLMPAQYVKAYVKRNKNDAADAEAICEAVMRPTMRFVPVKTADQQAAVLLHRGRERLVRQRTMLANALRAHLAEFGVIAPQGLRNISKLIAIIRDENDARLPDLARQVLQVLATQMEQLEGAIAALEQQLMAWHKSNPVSQRLATIPGIGPIIATAIAAAVAEPSGFRSGREFAAWLGLVPRQNSTGGKTRLGRISKRGNQYLRRLLINGASANLLRSKATNADPWVIGLRRRRPSLVVAVALANKTARIAWAVMHRQKDYQRMAAAA

SEQ ID NO: 510702 - protein, 332 aa, unidentified
MDICLLDERGEPAGELAVPPDVDGLHGLVRRLHGHRVRAVIESMNGARFVHDTLEEHGWEVLVADAQKVKGLAPLACKTDRIDARVLAQLSWHDLVPAIWLPDPSVRRERELARFRLHLVRHRTTLKNRIHATLMTFGHPCPVSDLFGLAGRDLLDKLAIPDPRRSNVEVSLRVIDDLELEIAQLTVQLKQLGADHRYIPLLVTAPGFGWINAFTVASEIGDIERFSSPAKLCGYTGLCPRVIQSGAMDRRGPISKHGPRYLRWGLFEAALNACKHPLYAERYQATKRRLGRQRGPKVAQIDLSRKLTEAIWHMLTRNEPFAPAGARFRLAA

SEQ ID NO: 510703 - protein, 421 aa, unidentified
MSPLPEQPFTAYVGIDWADTKHDICLQAAGDTRRESCCIPHQVAAIDGWANTLYRRFGSPVAVALELAKGPIVAALQKYDFLMLFPINPATLAKYREAFQPSGAKDDPADAELALDLLVRHPERFRPLRPQSAAMRSLVSPVERRRQLVGDQNRLTNRLCDTLKQYYPQALEWFDDRGTVLFCDFLDRWPTLRSVRQARTATLETFFHAHHCRSASRISARIESIRGAAALTDDPAIIGPCRLHVLALVAQLRAVLAAIAQFDREIAAVVHTLPDYTLFEDLAGAGAQLAPRLLAAFGEQRERFRSADELQKYSGIAPVTERSGKKSWVHWRRQCPKFLRQTFVEWAAQTINRSFWAGAYYRQQRAKGDSHHVALRALAFKWIRILYRCWQTRTTYNEIVYLNALRKRGSPLLVNFSQLPG

SEQ ID NO: 510704 - protein, 426 aa, unidentified
MVLPQAAVDCRYRGAGERVLFAGDDWAEDHHDVELMDASGRVLARARLPEGAAGMARLHAMIGEHLGDAEDVQVTVGIETDRGLWVQALVAAGYLVFGINPLQTSRYRERHGVSGGKSDTSDAHALADMVRTDAHQLRPVAGDSPAAQAVKVVARAHKTLIWERTRHVQRLRHQLRDFFPAALEAFEDLDAADTLELLARAPDPVSAARLTTAQIDAALKRARRRDRAARTAEIKAALRSEQLAQPPQVTAACAAVVRSLIAVITTLSEQVRALQGQVDAHFSQHPDAEIIRSQPGLGPVLGARVLAEFGDDPRRYASAKARKNYAATSPITRQSGKRKTVAARHVHNDRLRDALDGQAFAALSTSPGARACYDAQRARGTGHRAALRHLANRLTGILHGCLKTRTHYNEATAWPQHATRQTRTAA

SEQ ID NO: 510705 - protein, 416 aa, unidentified
MSWLHEELRRSDDASGVTALGWFGHPAPRWHVDAGHALWAQVGARGGAAGGRRHRMSNERTTVGLDVHARSVVAEAVDWAGGRVFSQRLVPANDVVLGWVAQLPGPVAVAYEAGPTGFGLARAFGSAGVRCEVVAPSKLERPPGDRVKTDRRDARRLARLLHIGEICGIGIPSVIQEDARDLVRAREDARADLMRARHRLSKLLLRHGIVYYGGRAWTGRHERWLRAQRFELPGTRVAFEEAFDAVLSVSARRDRLDEAITVTAAAPQWAPVVSRLCAVRGIATLTGLGLAVEIGDWDRFTGASIGAYLGLVPSESSSGNSRSQGPITKTGNTHARRLLVEAAWHHQKPLRAPSKALAARRAGLSPPARARGEAADRRLHHRWSTLAARKKRPTVIAVAVARELAGWCWSLATLKD

SEQ ID NO: 510706 - protein, 343 aa, unidentified
MQSVTTIGLDIAKSVFQIHGVNARGNVVVRRQLKRRHVLAFFEKLPPCLVGLEACASSHHWSRELQALGHTVRLMPPAYVKPYVKRQKNDATDAEAICEAVTRPNMRFVPTKTPEQQSCLMLHRTRHLFIRQQTAVINAIRAHLAELGIVAPVGRRGVEELLEVVADANDGRVPEVARACVAALGAQLRMLKAQILEFDRRIMAWHRSNATSKRLDAIPGVGPALATALVACVADPRAFRSGRDFSAWIGLVPTQHSSGGKDKLGAISKKGDRYLRGLFTAGALAVIRYAKIHGARHRPWLTALLARRPTKVAAIALANKLARMAWAMMARGENYKEPAALAA

SEQ ID NO: 510707 - protein, 408 aa, unidentified
MKTLHRRCAGLDVHSDTVVACVRLTVRTKVSHEVRRFSTATRDLLELAAWLTERGVTHVAMEATGIYWKPVWHILEGRFELVLANAAHIRNVPGRKSDVNDAVWISDLLAHGLIRASFVPPAPIQALRDLTRTRTQLTREVAQHIQRIQKTLEDANIKLVSVISDIVGMSGRRILKAMIAGETNAMRLAELGSARLKCSRSDLAAALDGRVTAHHRFLIDHHLGLIEELERRIAAFDARIGEVLAPFRNAVERLITIPGVSRVAAEVILAEIGPDMTPFPTAGHLLSWAGLVPRLDESAGKRRSTRVRKGAPWLKPVLVQCAWAAGRTKATYYQAQFFRLKARRGPKKAAIAVAASLLTAAYHMLKDGTFHHDLGADFLVNRDKARIAARLANRIKDLGYDVSFTATA

SEQ ID NO: 510708 - protein, 371 aa, unidentified
MKHNSIFIGMDVHKNSIDIAIAESGRTGQVRHYGKINGTLAALNKAVGKLVGKGDRAHFVYEAGPCGYQIYRHLTARGFDCAVVAPSMIPRQSGNRIKNDRRDSLMLARLHRAGELTAVYVPLAEDEAIRDLSRAREDAKSDEKRSKQRLLAFLLRSGHRYSGRSPWSQAHMRWLADIKMVHPAQQIVLQEYIDTINQCTLRLQRLTEQIRQLLPQWRLFPVVQALQSLRGVSLIVAVTTVAEIGDFKRFQNPEELMGFLGLVPSDNSSGEKIKHGSITKAGNSHVRRMLVEAAWAYRFRARLSRALLKRQEDLPQPICDIAWKAQLRLCARYRHFWAKGKVKPVIVTAIARELCGFIWAIAIKTDIPVAV

SEQ ID NO: 510709 - protein, 353 aa, unidentified
MPIVAEQYTFVIGVDTHAATHSFALINATNGGIIDQAVFPTSPAGLDRACTWITRGIDEKAALVVIEGAGSFGAGLATRVTNIGLPIAESAAMPAAARRGVGKTDALDAVRIARSVLAVDITRPRTPRADGQRVALRVLTVAREEMVAERTRAINALTALLRTVDLGIDARKPLPHSQFKTIAAWRERKEDSVLATCRQEAVRLAKRIVALDGELVDNRRSLDSLVEDVAPELCKLPGVGSVVAACVLTAWSHPGRVRSEAAFAALAGTCPVPASSGNTVRHRLNRGGDRRLNRALTTVVIVRMRTHAPTRAYVARRRAEGRTTKEIMRSLKRYITRQLYRTLAAAHPVPETP

SEQ ID NO: 510710 - protein, 355 aa, unidentified
MQTIYIGVDFHARQQTICYLTTESGEVVTHELKHQDKDEVRAFYAQFTGRVVVGLEASGYSPWFERMLEELGCEVWLGHAIEIRRRARWRQKNDRRDAELILDLMVHEEFPRLHRPPWQSREVLRMLRYRQKLVKIRTMSKNSLQSLALQSGLAKGSHLFSKAGQQELRTAAMTPAMQWQREQWLQLLEPLNQRLIETMLWLKQQSQGDVRISRLRTHPGIGLLTSLCLVHTLEPVSRFRNTRKVTAYAGFDPMERSSAERKRFLGISKAGSRVLRFLLVEAAHTAVRKDDDLKRFYHRLGERRGRPEAKTATARKLLIRAYIMLRDEIDYAEFRRRAVAARLARQNPRPPCLSL

SEQ ID NO: 510711 - protein, 401 aa, unidentified
MQDTQQRDAVDVFVGVDVGKGHHHAVALDRNGKRLYNKALPNDEAKLRALTAELKTHGRLLFVVDQPSTIGALPVAVARAEGVLVAYLPGLAMRRIADLHAGEAKTDARDAAIIAAAARSMPHTLRSLRLADEQLAELTMLCGFDDDLAAQVTQTSNRIRGLLTQIHPALERVLGPRLDHPAVLDLLERYPSPAALAGTSEKTLANRLTKLAPRMGKGLAAEIVQALSEQAVTVPGTQAATIVMPRLAQQLAALRKQRDEIAAEVERLVLAHPLWPVLTSMPGVGVRTAARLLTEVAHKAFASAAHLAAYAGLAPVTRRSGSSIRGEHPSRRGNKVLKRALFLSAFAALRDPVSRAYYSRKIQQGKRHNQALIALARRRCDVLFAMLRDGTIYQPKSAPNA

SEQ ID NO: 510712 - protein, 360 aa, unidentified
MRITTVGIDLAKDIFRVHGCDARGRVVVSKSLTRHELRVFVAKLPPCLVGMEACHTAHYWAHEVQKFGHQVKLMAPRFIRPYVKNNKNDTRDAEAICEAVTRPTMRFVPVKSRAQLDVEAVHRVRQQVVRERAALANQLRGFLAEHGIVIRKGFAVVKHALPDIIEDSDNGLSGLMRELMRDLFERFKLAEQRLSRYDELVTKLVEQDERCQRLAELPGVGPLTATAVVASVGNAREFRSGRELAAFFGLVPRHRASGKRTVMLPIAKRCDHYLRTLMVQGARSSLRYIERRRDPRGFWANRLRLKRGSYIAAVAIANKNARVMWALLTRGETYRAEPARRSSSMLTVKSDQLQRKPRRA

SEQ ID NO: 510713 - protein, 395 aa, unidentified
MTMYIVGVDVAKRSHEATVIDSDGSTIKKAFNFRNDADGFQKLMSVLEAVSTNPSDFVIGMESTSHYWLALYSNLQRRGYTVHVFNPIQSNALREMFIRQVKSDERDCFVIAEVIRFGRYTEGGMPPSDIYELREMCRARFFMVDMVSDLKRKVISLLDQVFPEYETLFTNIFGLTSSELLRNCSTPEEILAIDTEKLIEMISEPSNKRFGRQKAEEIHAVAENSFGIILNYNTMGVLIKSHMEHIRFSEQQINELDARIAYLFSKFDTPITTIPGIGPVLGATIFSEIGDISRFASAAKLAAFAGIDPTVKKSGEFTGTNNRMSKRGSPYLRRALWQASTIAVRYDPALREYFQKKRTEGKPYMNAIGHVMRKLTNIIFAVLRDNKPYYIPLDK

SEQ ID NO: 510714 - protein, 347 aa, unidentified
MLHAGLDLSRRKVDICLLSESGEQVDQLAAPPDADALRTLVRRIDAVHGEPVCAVIESMTGARLVHDTLEQEGWHVEIADAQKVKGLAPLACKTDKIDSRVLALLSQRDLVPAIWLPDPRIREERELARFRLHLVKHKSALKNRVHSALINFGKPCPVTDLFGVEGRALLARLQVPEPWRGNITASVELIDDLEGQIAEINRKLREGHAEHPYIPLLMSAPGIGWVLAFTIAAEIGQIERFASPEKLAGYTGLCPRVNQSGDKDRRGPLTKHGPTYLRWALLEATMHALKHPAYAQRYQRNKRRLGKQRGAKVAQVDIARRLAHAIWHMLTRNQEFAPRGAAFRLAA

SEQ ID NO: 510715 - protein, 377 aa, unidentified
MSKVRFVGLDVHAATIAVAVAEPGGEVRSLGIIPNRPESIRKLIAKLGPVKDLKVCYEAGPTGYVLYWQLTQLGVACEVIAPTLVPTKAGDRIKTDRRDAEKLARCYRAGDLTAVWVPDAAHEALRDVVRAREAAKKDQLRARHRLSKFLLRHGQRAPEGIKAWTKKHLEWIKSHVRFDQAALEAAFADYVQEVDHCADRILRLEKAIAEAVEQAPPTMRAVIEALQALRGVAQTTAATIVSELGSLSRFESPRQLMGYSGLVSREHSSGTHIQRGAITKTGNAHLRRVVVEASWAYQHRPNVTGFLLRRQKNLALDEGTKQIAWKAQQRLHSRYKKLAGRGKNKNQIITALGRELLGFVWAIAVRTEQQHQLAKTA

SEQ ID NO: 510716 - protein, 341 aa, unidentified
MEKATIIGLDLAKRVFQVHAASKDGRPVLRKKVSRAQLLGFLAKQPPAMVAMEACATAHQWGRAIGGLGHEVRLVPPIYVKPFVRRQKNDVADAEAIAEAASRPTMRFVALKTEEQQARSMIFRTRDLLVRQRTQLVNALRGHLAEHGIVAAHGLAKVKVLASAMRDTGSLHPLVCELGERYLEHIARLDVEIAELDKRLRRSSKDDETLKRLQSMPGMGPITAAAIEAFAPPMATFKRGRDFAAWLGLVPRQHTTGGKPRLGRTSKMGQRDIRRLLIIGAMTIVRWAVRKGAARGSWLARMLAEKPRLVAAIALANKMARSVWAMLSKGEDYRGSALAPA

SEQ ID NO: 510717 - protein, 336 aa, unidentified
MKIAVLGIDLGKNVCSVVGLDPSGAVVLRRRVRRDTLIDLVAKLPSCIVGMEACCGAHHLGRLFAAQGHDIRLMSPEYVRPYVKAQKNDDRDAEGIAEAATRPTMRFVEMKTEDQLDMQTLHRSRERLVGERTALINQLRAILLDRGIVVPQGKRKLEQYLVILMNEHDGEGLSARMRMLVADIRAQWQELDRRIGEFDAEFVRWAKENEDARRLVTIPGVGVTISTALIAAVGKAETFEHGRDLAAWLGLVPRQSTTGGKPRLMGISKRGNKYLRKLLIHGARAALPYVAEKDTALGRWAKSLLSRVHQNVAVVAFANKLARGGQQDRLVAIQRR

SEQ ID NO: 510718 - protein, 411 aa, unidentified
MLEVKVENCAGIDVGKKFLAVCVLAGPVDRKPTEEVRRFGTSVRELERLRAWFMEKKCTEAVMESTGSYWKPVFNILEGSLKIILANPEQVKALRGKKTDPKDSRWLASLLRHGLVQGSFIPPRDIRELRDLTRRRRTLVGDGTAEKNRVQKILEDANVKLGNVLSDVFGTSGQAMLEALLENKQSPAEIAKLGHWSLAPKIPQIIEALEGHRMSDHHRFMIRQSLRHMRTIEEMIEELDKEIAVRLKPYPQQVKLACTVPGIKPTAAASILAETGMDMSPEGPFPDCHHLASWATVCPGNNESAGKRKSGRTRQGNRWLRATLTQTGWAGAADKKSLFQLRYQRVKLRRGGQRAVLAIAHAQLIAIYWALRNGTPYPEQVQHMEQDRRESQIRYHLQRLTKLGYEPDMRG

SEQ ID NO: 510719 - protein, 321 aa, unidentified
MGTEVFAGIDVSKDTLEVAIGPQGERMSFAQSDDGWSLMADFIQSFSPGLVVLEATGGLERAAVATLAARSLPVVVVNPRQVRDFAKSKGILAKTDKLDALVIAQFAQAIRPELRPLKTTEAQQLEAILNRRRQIVQMLTAEKNRLHSAPGWTKKDIRLHIAWLEKRLEKIEKELETMIRNSPVWRVKDELLRTFKGVGPVLSQSLLSGLPELGILDRKKIAVLVGVAPMNRDSGKFRGRRMVLGGRAQIRSVLYMATVAAIRSNPVIGAFHERLIKAGKAPKVAITACMRKLLTILNAMMKNQTPWRPLTQNMLDMQHSC

SEQ ID NO: 510720 - protein, 389 aa, unidentified
MRGGVRYAPVNFINVVPHEAGHNNLFERRLQMDKYIGFDIDSKKTVACVVQKGKKDRFTTLKTDIEQMKNFLQKQRNQGAKLHLTFEISGEAGYRYDALADVADTITVGNPTKMTWIYRSAKKNDRIDARKQAVLLSIGEVPKVHIPSREVRQWRLTIQHRRKIVNRVTAVKNRTRALLKANGFTRAAHKGSWWKKSNRAWMWWISQDGGITSEQLWRMSLSNMLDELDLLDKQLKRVTMYLDSYLANQPGGELLMSIPGVGPRTAEAVLAYTDEVRRFNRSKQYCAYFGLTPKLDESGSSRRLGHISKQGPSVVRWLIVESAWRAIKKSRALGSFYERVMAGQKSRKKIAVVAVARKLLSIMRAMQMTGELFNEELVCVDGWLERTLR

SEQ ID NO: 510721 - protein, 357 aa, unidentified
MTSSNHLPATRVVVGIDTHRDEHVAVAIDWLGARLGEYRLSTTPTGYEGLHRWAISLGELVAFGIEGTGSYGAGLARHLAGRGRTVIEVNRPDRSTRRRLGKSDPIDAEMAARAVLAGVAKDSPKSGLDKVEMIRMLKIVKDSAIKARTQAINQMKALIVTAPVELRHKLAGLSVRRLVVRCASFRPGELVAPLAAAKHALRLLARRHYQLTSEIEGIDSELFYLTTETAPALVDTFGVGPDTAATLLVTAGSNPERLRSEAAFAALCGVNPIPASSGRTNRHRLNHGGDRQANSALYRIVLVRLRYHEPTKEYMGRRMGEGMTKSEVIRCLKRYVARQIYPILRDMGRKNLALAAA

SEQ ID NO: 510722 - protein, 331 aa, unidentified
MFPVGIDVSKKNLDLCMLYDGIKGRIKTRNIQNNRHSVENILRWLRLQHCSPEDVHVVMEATGVYHERLATELHDAGFRVSLANPHRSREFARGMGIMTKTDKVDAYMLACYAFLKKPHRWEPPAPEIRYLGALLRRRDVLLGDALREENRLEKYLSTDTPADIISSCRRMAQLLREEVSNIERQIKAHIKASPALRRDYTLLTSIKSVGSQLGMHMLVVLRSHNFVSAEQAAAFLGVVPIEKRSGTSVRRRPRMSKIGPPQLRAKLYMSALCGKIYNKRMRNIYDEMCLRGKPKMVAIGALMRKLVHWCYGVLKTGTVFNDEDLKPVLST

SEQ ID NO: 510723 - protein, 385 aa, unidentified
MRTSVVYVGLDVHKDSIAIATARGREPAAVLEVIRHDELSLMQVLDRIGPRERLRLCYEAGPTGFDLARRLNQWGYCCQVVAPSLVPTAPGNRVKTDRRDAARLAQFLRSGDLVEVRIPEAQTEAMRDLERARDDAKKAERVARHQLDKFLLRHGRSWSQGSKWTLKHWTWIRVQQFPEEMLRRVLQDYITTIEQATQRVERLEKDMAEMVDSWALKPLVVSLMALRGVRLVTAVILAAEIGDFARFASPRNLMSYLGLVPSEHSSGQRRSQGRITRAGNAHARRIVIEASWNYRFAPRASKAGQSHLNQAGFPHRMPSRVALFHPARTRLPRRFSVSEVSCCRMDSASRRKTEAISGPCPLRMRLSSSEKTTSSTQCSEFSMLQ

SEQ ID NO: 510724 - protein, 342 aa, unidentified
MHYLYYVGLDVSKETFDASLVAFEDANEMAHRKFANSRKGICSCLHWVEKRHGILLDDVIFCAEDMGSYISEMAVCASDRTLTFNFSLISPLVIKYSMGIARGKTDRVDARRIAEYAITHYRKIALYLPAEKELCQLRTWLILRAYLAKQRVAKLVLLEKLDYKEKFADVSIQRSMLQEEIAYAETHMKTIEREMKELIAADSNICRNYKLLTSIKGVGPITAIVMLCSTLNFTKITDHRKFACYCGLRVGDVTDLRWSDISGTSVRGGCHTSSMANRDIKVQLNRSALIAIRCDPQLKAYYERKVAEGKHKFSVLNAVRAKIAARCFAVVRRGTPYVALQI

SEQ ID NO: 510725 - protein, 482 aa, unidentified
MKCDSQEKAKEATNHPTPHHWHEMNRKQRRELTRKMQSEDLRLEVVHPDAAGIDIGNESHYVAVPPTRDSPAVRRFGCTTAELKAMAAWLQHCRIRTVAMQSTGVYWIAVYDILEAAGLQGYLVNARDTKNLPGRKSDVQESQWLMKLHTYGLLRNSFRPPQEIRTMRTYWRQRNDLVQSAGRYLQRIQKVLTQMNVPLANVLSDVSGVTAQAIIQAILGGERNPHKLAELRDRRVRASKAEIASYLEGHWQEDLLFVLKQEQQGYEFCQQQIAACDQQLEHYLQQREDRSQGVRLPEETRKGRLQKKKKGKPQFDLRGELFRMSGTDLTRIDGLDVLTATTILSEAGWDMSKWADENHFVSWLRLCPDNRISGDKVIGKGRLPTNNRASTALKMAASTLRASHSYLGAPFRRLRSKLGAPIAIKAMAAKLARLVYRMLRYGMPFADRGADFYETQHRKLQIDPLKSKAAKLGFRVVEAPAA

SEQ ID NO: 510726 - protein, 314 aa, unidentified
MTSLSCMNSIHYIGIDVSKDTLHINASDLRSSTCSNQAKALVPWLRQLPARAHLVLEASGGYEKLLATLAHRAGVPVSIVNPARVRAFAKARGQRAKTDRIDAALITDYARHLQPTPTPPMSATHARALELLRGRQALIAQRVSWINLLEHANEADLIRLYRKHLRQTDASIAAVEKQISATLLTDPALAARYQCLISQFGVGEVTASTLVLELPELGRLNRKKLAALCGLAPFAKDSGQKRGVRFVHGGRNQLRRALYMATLSAIRQKSSPLQSFYLRLRSNAKPTKVALIACARKFLTYLNSQIKNLENCPT

SEQ ID NO: 510727 - protein, 377 aa, unidentified
MNRIIKIGMDVHTTNYTLCIFEPSFEHDGTVHCITQVKPEVKNILRVIETFKNKHPEESFKITCGYEAGCLGYSLYHDLKAKGIECVILAPTTMKVEKGGRKIKNDYRDARMIAECLAYGGYSAVHVPTQLDNSVKEYIRMRDDVQSNLKSIKQQIIGFMTRNGKSYDGKSYWTQKHLDWIRQTTFHDPLLREVLDEYMIEYSRLKERVETLDKRIEELSTKEEYVEKVKQLQCLIGIKTHTALSLIVETSDFKRFRKGDMYAAYLGLIPGEDSSAEHENRLGITKAGNRHLRRLLVEAAQGYTRGQIGFKSKALKERQEKCDHEVVAYADRANERLRRKYYRMIGRGKKYNVAKTAIARELACFVWGIMTDHIELQ

SEQ ID NO: 510728 - protein, 336 aa, unidentified
MQVTTIGLDLGKRLFQLHGVDAAGTVMLRRQLKRRQVEPFFAKLPRCLIGIEACGTAYHWARRLGELGHEVRLIPPAYAKAYVRRNKTDPADAAAICEAVSRPSMRFVPIKSEAEQAIAAVHRVRDRLIGQRTMLLNALRGHLAEFGVVVSRGPAHVKELIEMLAEPGSVPEILRSVLLGLASVLARLERQIVLVDKQLMRWHRDNALSRRLATIPGLGPIISTAMAARVLQPQRFRRGRDFSAWLGLVPKQSSSGGQIRLGAISKQGDGYLRRLLINGAQAVLGSKRAKTDPWLKRLLDTKPRLVAAVALANKMARIIWAVMVRQTGFREAVATV

SEQ ID NO: 510729 - protein, 333 aa, unidentified
MSVYVGIDVHRKRSQVAVITKDGQVQLNKNVVNGSEPMLRLIGDLPSGTPVAFGWGWLARLLEDYGFEAHLVHPLRCKAIASARLKNDKADAAILAQLLRADLLPEAWIAPAEVRQLRALLRHRASLVRLGTQQRNRIHAVAADHGYDRSASYWTGPGRGWLAELDLPAASREIVTDCLAVIDGLAPLIDRIDGELHARAKADPRVKVLRTLPGVGEFTALVMLAEIGDITRFGSARKLASWAGLTPTVRGSDLTVRHGHISKQGSAWLRWVMNQAAQTAKRSPEFAATYSSIAKRRGKKIATIAIARKLLTRACHLLADMQATSTNEPPQRP

SEQ ID NO: 510730 - protein, 458 aa, unidentified
MEQFYLGADVSKGYSDFILIDQHKQPVETNFQLDDTAEGHVKLYDQLAHILAEHPKTEILAAVESTGGYENNWYNALLKFQGSLNIKTARLNPEGVYCNSKAALKRTITDKVSARSIAEYQIAHAEKIIYQQEDYWAPLRKQWSFVTLLTKQKTQLLNQLEILVYTANPEVLQYCRDGTPQWVLKLLKQYPTADSLSRARISTIVKIPFITKERGRKLIAEAKKSVASAQDNFTGQLISSIIGHIVQLEKSIKAQLKILADNCSIPEIELLKTYPGVGDYSAIGLMLELQTVARFPKVKNLSSFLGIHPVFKASGDGSTVARMSKKGRKEPRRILFMVVMSAINCNPLIRDLYQKQVASGKEKMAAIGICMHKTLRVLYGMLKNNTAFDPDIDRVNQSRSRTKTATMLKDKNRRYQEFDSNAPVSRRQKIKRKEQKTSHSATSDAQCGINTSAPETSL

SEQ ID NO: 510731 - protein, 347 aa, unidentified
MLIIGCDFHPGFQQVAIFDNRTGEMQEKRLQHRGEAEQFYRGVAGQEVRVGMEACGHYPWFERLLEELGIELWFGDAARVRAAVVRKQKTDRRDAEHLMHLLIEDRFPRIWVPSLEVRDVRQLLVHRHKQVQARTRTKNQLQAMALSCGVQKKYKLWTKAGRAELEQLPLLPYAAERRKRLLEALDGLEVEIGELDRRVAEEARQRPEAVRLMTHPGVGPVTALAMVLTLGPAERFESAKQVGSYFGLIPREESSGGKQRLGKISKQGSSFLRFLLVEAGQTAVRYDPQLKRFYRRLASRKNRGVAKVAVARKLATRMYLMLREGWTYAQLNQAVMSVSPSHSVAGE

SEQ ID NO: 510732 - protein, 423 aa, unidentified
MVLVDTADREEIIARVAALDIGKAELTCCVRVPGNGPAGRRAQEVTTYSTMTRSLLLLADRLAEVRVTRVVMEATSDYWRAPFYVLEAAGFEVWLVNAKDVKHLPGRPKTDVLDAVWLCKVAERQMLRPSFVPPRDIRELRDLTRYRIDQVGVRTAEKQRVEKLLEDAGIKLDVVASDLFGVSGREMLAALIAGQRDPKVLADMARGRMRVKRPQLVEALTGRFTDHHGYLLAKMLARIDAIDADIADLDTRIGEQISPFAPQMAALIEIPGIGATAAAVIIAEIGVDMTRFPTAAHLAGWAKFAPGIKESAGKKKGTGSTGHGNRYLARVLGEAAVNAGRTNTFLGERYRRIARRRGKKKAIVAVGRSILVVVWHLLSEPATRFHDLGPDFYDTRLGAQRATRNHIRALQTLGYTVTLEPAA

SEQ ID NO: 510733 - protein, 443 aa, unidentified
MRTKRFEEKKRRVRGEKVIGVDPGMDRHQVAVIDESGMQLGKSFSIPVSYEGFEEQLHKKLVMLMGEFEASEVVFAVESSCNLWQTLCAWLSERGYKVVLVAPLTTRSSRALVNHDFSKTDPKDAYLVGLNAQRGHYDEYRVYESWIESMHHLSITWSKLSTDRVRNLQRLRSFIQNRFPEYLKVFPDVGVETSLYLLERYFLPQHFGEEIVLRELSAVRRISRGNYGKEKLIALVEASERSIGIKEKGGEEESLRIILDGWLSELRCIDRQMDRVGAKLVALAKGSEHFGILQSIKGVSELGAARLIAECRNFEGVTHYGQIEKFAGLNVRVSDSGRSRGARHINGIGNKRLNHLLNQIVSQVVRYTPEVANKYMRRQLIKASYRKNLIASIPNFLKLIVALMREKRAYEFREEAVKEMLELKEKYEELSRKRKWRTMKFAA

SEQ ID NO: 510734 - protein, 387 aa, unidentified
MPQVDDLSRSLVAFDQDATLIVVVEMSEASWLVAGMAPGVDRQPLKKLGPDPDVLLRLVERWRDEAVKAGKMIERIALAFEAGRDGFWLARWLQARGIEVHVIHSTSVAVSREHRRAKTDRLDTAMLMRVFLGWLRSERGHCGMVAIPTLEDEDARRPSRERESLVGERTRIINRMKAILAWLGVRGFNPTLRKAPQRLDELRTPEDLPLPPNTVDELRRDMARLAMVCEQIKALEQARLANLEQAPGTGPHAMVRLIANVIGVGIETADMLVQEVLSRNLRDRRAVARFAGLTGAPNESGSRRRERGLAKSGNARVRRGLIQLAWRFLRFQKDSALAQWYRMRTEGPAAARRTKMIVALARKLLIAFWRMVTVGEIPAGLALRQPA

SEQ ID NO: 510735 - protein, 408 aa, unidentified
MELMYKRCAGLDVHQRTVVACARIVEDRKLTEEVRTFETTTTGLLELSAWLESRECTHVAMEATGVYWKPVWHILEEKFQLVLANAAHIKNVPGRKTDVKDATWIADLLAHGLIRGSFVPPTPIQDLRALMRTRKQLVREAARNTQRIQKALEDANIKLTGVVSDILGKSGRAVLDALIAGETDPEKLVELTRGRLKAPRETLVEALRGKVRDHHRFLIKLHLDQIDAVDKAVRELEARVGEHLDPFRKNVEILTTMPGISDTAARVIVSEIGSEMARFPTAAHLVSWAGLCPRSDESAGKRRSSRIRHGAPWLKTTLVQCAWAAIRTKDSYLRAQFHRLKSRVGPMKAIIAVAASMLTAAFHMLTHGTEYKELTGAYFDRRDHAKLAKRLVRRLQDLGLKVTVSHAA

SEQ ID NO: 510736 - protein, 404 aa, unidentified
MAGRTRTAGIDWAAEAHEVCISEEGEVTQRFSVSHDERGIEALASRLAKLGIARVAIERPDGILVERLLAAGLQVLAIHPNQVKAARARFAIAHGKSDRFDAYVLAELARTDAHRFRVLVPDGEETKALKALTRAREDLVGVRVELANQLRAQLAAFWPGALIFAALDSPISLAFIKRYPSPADAQGLGAGRMAAFLKRNSYSGRTEPAELVARLNAAPKGTAGKAEREARRAVVLGLLCALGPIVTEIAALDTQIRERLAAHPDAAIFRSLFRDPKTALSPATLIAELGDCRERYPTEAAMAADAGMSPVALESGKLRVATFRRACDKRLRVALARLADSTRHWHPWAGEVYRRARARGQDHPHAIRTLGRAWIRVLWRCWQNREPYDPARHGNFNRLQTAGG

SEQ ID NO: 510737 - protein, 330 aa, unidentified
MEQIYGIDLAQKKFDVSYQVDERKNGHKVIKNNMKGIIRFLESLPENALLCAGHTGVYGEMLLFLCSCFNIPIALTTGYQIRHSLGLQRGKSDKVDSVRIREYGERFRDKLVIIDYPGESMKELKELLGLRSQLVKERKMLLTYERRTMHMPFNSIKIHQVTLNVLDNLNLAISEIESEMTHIIDTNMDLRRNYTLVTDVIGIGQVTACGLIVKTDNFTAINTAKKAASYAGICPFPNSSGQMVRKSRVSRMADKELKSLLYICAVTSTRRNPEYRLYFERKKLEGKPYFLIMNNISNKLLRTIYAVVKTGKRYQLGHITEDPRLSEKVA

SEQ ID NO: 510738 - protein, 354 aa, unidentified
MNTIKYIGIDVHQSTSVFAVRNHRGKLVSEAILETEATAIVDFLKGQRGTVWVTFEEGTYSHWLYEMIQPQVAKVVVCDPRKNKLDGNKSDKIDARKLAELLRLNALKAVYHGQNNMRTLKELARSYVNLQQDSTRAMNRLKSIYRSRGIGCRGTSIYQPKNRKEWLEKLNSTGARGRAERLLKQLESIQVLLAEAHRDLIRESRKHQDYKTLRQIPGLGPIRVALIMAFVMTPHRFRNKRQFWTYTGFSVIRRGSAEYEITQGELKRTKRKPLPRGLNNNYNRVLKNVFKGAALMAAYRGPFKKIYEQRVAKGIAPNLALLTLARKIASITLAVWKKGERFDIERHLLSEQTT

SEQ ID NO: 510739 - protein, 267 aa, unidentified
MNTKINQSINVGVDTGKTQLDIHIRPIDLFFSVENNDKGIKNALKTIKSRNPERIVIEATGRLEMPFVLACAEAQLPTVRANPVHIKRFAGAIGRRAKNDRLDAELIAHYGEAIKPVLTVIKPKNIGLMSELVIRRNQLLSMQTMEKNRIQILPASLHPTIKPVLTTIKNQITKLEEKLVKLIEDSPEYQAKNTILQSVPGIGNIALASIISNVPELGYITNKQAASLIGVAPITRESGRYKGKCVIQGGRAQVRTVLYDNDVSHAM

SEQ ID NO: 510740 - protein, 355 aa, unidentified
MNSEKYIGLDVHQATISVAVMDSTGKLVMECILETKAATILEFFAGLRGTLSVTFEEGTWAAWLYDLLKPHVQKLVVCNPRKTALLKDGNKNDRIDARKLAELLRLNNLKSVYHGETGVRMLRELARSYLTLVKDLTRVMNRLKAMYRSWAIPCAGRDVYYTRHRTEWLGKIREAGVRRRAEHLYQQLDMLQHLRQQARRELLAESRKHPITAKLRQIPSLGPIRSALAVALIQTPHRFRTKRQLWAYSGLALETRTSGEHCYIQGQLRRSKKQVSIRGLNKDHNHDLKGLFKAAATRASVQPGPFQDFYQASLAKGIKPTMVRLTLARKIAAITLTLWKKGENFDAEKLKSQAA

SEQ ID NO: 510741 - protein, 352 aa, unidentified
MVSAELEGAAVKVIGIDSHKATLAGCAVDELGTPVDERTLGNDRAGHVALADWARSLGVDRIGIEGSGRHGAAAARRLAAAGFDVRDVPPHLSYRERLRTRRPGKSDPTDALAIARVAAREQTLPPVRLADRSEDLGLLVTARDELVAEATQLRNRIHADLVVLLPGYGERVPNLVARRHRRGVALELATLSGVRAELARSRLSRLEETDAATKLLERRLDALLVGHPLLALPGVRVLLAARILAETGDVRRFRSADAFAMFSGTAPIPASSGQTERMRLNRGGDRQLNRALHAMALIQGRYHDRAKAYLARKRAEGKTQREAIRCLARKLARVVFEVLRRSTLATADAFAA

SEQ ID NO: 510742 - protein, 352 aa, unidentified
MIHVGIDLHQKSSYLYAMDDTTGELLLNEEVPSERQALLDCLEPCRGRGDLRLVLEACGFAGYWSDVLDPLGEVVAVHPKHVKGFQGKDKKKNDRRDAQFLVDLSRLNRLPRAYLGTTAERDLKDLLRYRVGLVRIQTRLRVRLRNVAQRYGTVLAASDVDSAKARRLWAEWELRDPHRLIVDQLLEVLAEVGNRVAVVEEQLGKRAVKNRTVDLLDTLPGVGLFGALLIAAEIGDWQRFHSGEALACFAGLVPSEESSGGRTQRGRITKEGSSYLRWMMGQAALHADQSPRLAAFHARVRERRGAMKARVAVAREMLVIAWHLLRTDTPYEERPPWQPGKSSGQLASPQTP

SEQ ID NO: 510743 - protein, 453 aa, unidentified
MRREKNAAQELSLEFIEPNAAGVDVGAREIYVAVPRDRVPEPVRCFSTFTEDLRAIAGWLKQCGVVTVAMESTGVYWIPLYEVLEEAGVRVCLVNSRHVKHVPGRKSDVSDCQWLQYLHSVGLLRGSFRPEGAICALRALSRHRSNLVEAAVVHVQHMQKALTQMNLQIHHVLSDITGKSGLAIVDAILSGKRDPARLADGRIHAERETVIKSLVGNYRSEHLFTLRQSLEAYRHYQKMLVDCDREIEQHMSQLPNQPDGGQPPVSLGGNKQGKRRKNQFHFDMAKELYRVLGTDLTAVPGLSALTVHTLVTEIGTDLGRFPNVAAFTSWLTLCPGSKKSGGKVLSSKTRKSNSRLAAALRLAAQTLHKSHSYLGAYYRRMRARLGAPQAITAAAHKLARIVYHLISTRAAYDESVFAQEEQKQTLRRQHRLHKQAQALGFQLVPITLQEVVH

SEQ ID NO: 510744 - protein, 340 aa, unidentified
MKDTVIGVDLAKNIFQVHGASRAGEVMFRKKLRRQQFMQFMATQPPALVVLEACGSAHYWARELAGAGHEVRLIAPQYVKPFVKRQKNDAADAEAIVIAARQPEMRFVEPRTEAQQARGVLFRARQRLVHQRTELVNALRAVLYEFGLVVPQGIAHIRHIEALLDEAVLPEAVKQECLDLLRQISEQSVRIDVRTKKIRMLAQESENTCRLQSMPGVGPLTALAIEAFAPDLQSFRRGRDFAAWLGLVPRQFSSGGKERLGKISKAGQADIRRLLIMGAMTQVNWASRKAPAPGSWLARMLARKPRMLVAIALANRMARAIWAMATKQEDYRDPALSVAA

SEQ ID NO: 510745 - protein, 348 aa, unidentified
MLHAGLDLSRKRLDVCLLSDHAEVVEEFACPPDTDGLRGLTRRVAAHGVPVRGVIESMTGARVVHDTLEELGWDVLIADAQKVKGLAPLACKTDKIDARVLAVLSHRDLVPAIWLPDPRVRSEREQARFRLHLVKHKSMLKHRIHSTLMSFGHPCPVTDLFGVAGRELLERLNIPQPWRGTLDASLELIEDLEAQIDQINRELRICGPDHPYVPLLLTVPGIGWVLAFTIASEIGDIDRFPTPKKLCGYTGLCPRVNQSGDKDRRGPLSKHGPKYLRWAMLEATMHALRHPIYRERYQRNKKRLGKQRGARVAQIDIARKLTEAIWHMLTRNEPFAPAPGGAPLRLAA

SEQ ID NO: 510746 - protein, 400 aa, unidentified
MRAVFGIDVSKASSEVAILVNGEKVHGYTISNDALGFARLLGDLKTVHKPEIIFEATGVYSRRLQAFLEDNGYAYTRLNPLEAKKQLDSLRVRKTNQIDAEKLAQSQFVLNRKPTYVQEEVYQELRDLSRFYQNLTEDIVRAKNRLHKVLQVTFPELETILSTPTGEQYGNLVVAFPCKDFVLDLSKDELSESIRQSTSKRISDKRVAYLAEKLIALANQSYCAVKKTSPMLEEVRYYAQELLRLSERRKAVLDQMVELAQPLPEYDILLSIPGIAETTATSIIGELGDIRRFQSANQINAFIGIDLRHYESGNFLAKEHITKRGNPYARKILFKCIHNIASASNTNPCHIADFYEKRKRQSQTTSTKPHTIASIHRLIRTMYYLIMHNKLYDYASTQNR

SEQ ID NO: 510747 - protein, 327 aa, unidentified
MMFIGIDISKEKIDLSWLRDQLTNKIKTKVFKNKRQDFLAIEKWLLNTTKSAANELVITLEPTGVYHEALMYFLYEQGFNIILANPGKAKKYADALNIIHKTDKSDATMLAHYGCAKHAVVNYWQPDALEVRELKALIRRLDALESNRQREANRLEASEFSNVSARVCQSIKVTIAFLDDEIKQLKSDIDNHIDNEPDLKRNRKLLESIPGIGPVLSRELTYLFAAKKFNKAKEAAAYCGLIPRHNESGKLKGRTSISKLGPARIRCKLYMAAIVAGQWNKTIKRHKLTLINNGKTPMQAVCANMRKLIHICFGVIKNQEAFKLQES

SEQ ID NO: 510748 - protein, 459 aa, unidentified
MNRKKSKPKIDRKMPMVHPNAAAIDVGATMHMAAVRPDRTPEPVRSFGTFTTDLHRLVEWFKECGVETVVMESTSVYWIPIFELLDAHGFTVLLVNARDAKHVPGRKTDVSDAQWLQRLHSYGLLRASFRPKGQISELRAYMRQRERLLEYAASHIQHMQKALIEMNLQLHHVVADITGATGLRIIRTILAGERDPKVLALLRDYRCHSSAETIEKALTGSYRAEHLFALEQALALYDAYHEKASACDARIEAVLKELSIGRGRCSGTELPSPRRSRTDQANALAFDVRAALFALLGKDITKIDGLGPYISLKLIAECGDDLSAWPSPKHFTSWLCLAPSNKISGGKMLSSRTRRSGSRAAALLRLAAVTVGRTDTALGAFYRRLSARIGKAKAVTATARKIAVLFYNAVRYGMEYVDPGASFYETRYRTRVVDNLHRRAKAFGFVLMPLEAPPSVVVS

SEQ ID NO: 510749 - protein, 404 aa, unidentified
MKQRIAPGWAGVDVGKGHHWICLIDEAGTTVWSTKVVNDEAAILDAIAGVLGHADEVVWGVDVTGTMSGLLLALLAAHGQRVRYVPGRTVNQMASAYRGEAKTDARDAYVIAETLRHRGDLQDVEVATALVTELRLLVTHRTDLVGDRVRVVNRLRDVLSGYFPALERSFDYAHSRGALVLLTGYQTPQAIRRTGESRLRAWLVKRKVRSADQIAAAALGAAKAQQTVVPGQDVAASIVADLAAQLLALGARISDLDARITTTFRAHPQAEIIESLPGMGPILGAELVAAAGDLAAYANAGRLASAAGLVPVPRDSGRRTGNLHRPMRYSRKLRRVFYLSASAAMMREGPNRDYYLKKRGQGHGHVQALIALARRRVDVLWALLRDNRPFELAPPSREPMAQTA

SEQ ID NO: 510750 - protein, 394 aa, unidentified
MTATHKPDCTFASVLYMALELSSGTWKLAFTVGLGQKPRLKTVTARSTVGLVCEIKAAKKRFGRSEDAPVLSCYEAGRDGFWLHRFLLAHGVQNQVVDSASIEVNRRQRRAKSDGLDAVKLVEMLIRWHNGERKVWKLVRVPAVAEEDQRQLHRELIELKAERTAVSNSIKGLLATLGLVVIVDETLPKQLENLRQWDGAKLPPSLHQRLLREFTRWQLINGQIDDLERARTAKIRDAKTPQIEKVRRLMNLKGVGLNGAWLLVYEFFGWRQFKNRRELGSLAGLTPTPYDSGESRREQGISKAGNRRVRWMMMELAWGWLRYQPASELSQWYQRRFAQGNTRLRKVGIVALARKLLVALWKYVEGGEEPPGAVLVGWENKRGYKGVKARQKAS

SEQ ID NO: 510751 - protein, 334 aa, unidentified
MMNFQALGIDISKNKFDCALIRDIGSSKIKTKALPNRLEGFNQLTEWLYKNIGEDLSLLKIFMEATGVYHEALAEHLHEKGIAVYLFNPADSAHYAKYDSLHKTDKADSQSLARAGIDRLMHHKVRQWQPAAPHIKRLNALLARLDALQSDLQREDNRMEKAGFSSVPEAVSQSINTMQINLKQQISTITQEIEQHIDRHPDLKKDRALLRSIPGVGEVVSLRMTALYHSKDFTSASQMAAYLGLVPRKRESGKYKGKAMLSKRGNPVIRAKLYMAAVVAKTWNPDINAHYRRLKARNKTEMQTIGAAMRRLVQICFGVLKHQCEYQAKVTIAA

SEQ ID NO: 510752 - protein, 348 aa, unidentified
MVVIGVDSHKRTHTVVAVDGNGRRLAEKTVATTPEGHLELLRWVRRWRERRWALEDCRHLTRRLEGDLLRAGEQAVRVPPKLMAGARRSSREPGKSDPIDALSVARAALREPDLPTAQLDGVEREVRLLVDHRDDLIKERTRYQARLRWFLVELGITEPPARTLARPTTLADLERRLVGRTELSARISRDFAARIRELTLTVDALGREIAARTESLAPALLSLPGCGYLTAAKLVGETAGVSRFPSRSAFASHNGTAPIPVWSGNIVRHRLNRGGNRQINLALHRIAVTQLRGAGPGREYVAKRMAAGDTKAEAIRALRRRISDEVFRRMTADDAARARSELTSSAAA

SEQ ID NO: 510753 - protein, 370 aa, unidentified
MDDISFVGLDVHKATISVAVADGDRRGEVRHLGVFANRADVVARLVRRLAAKGNRLHFVYEAGPCGYGLHRQLTSLGHACQVVAPSLIPIRSGDRVKTDRRDAAMLARLSRAGELTGVWVPDAAHEAMRDLVRARAGAVRDLSRARQQLSGFLLRHGRIYPGKGGWTRAYRRWLTTVRFDHPAQQLVLQDAIHQVEAAEARVARITGHIEEQLSLWSLAPVVEAIQAMRGVGLIVAVTVAAEVGDFTRFSNPRQLMAYLGLVPSEHSSGASVRRGGITKAGNALARRVLIEGAWTYRMPARVSRKLYDRLETLPQSVREIAWKAQVRLCARYRRLVAAGKPKVVVVTAIAREMAGFIWAIARHVEAPKPA

SEQ ID NO: 510754 - protein, 365 aa, unidentified
MFSERTSVGLDVHARSVAAAAIDGVTGELFQTKLTPSFDHIRSWVTDLPGPVAVAYEAGPTGFGLYRQLNAAGIRCEGEVVAPSKLQKPAGERVKTDAKDAIHLARLLRLDDITSVAIPSIDQEAARDLVRVREDCRGDLMRARHRLSKLLLRYGIVYYGGQAWTGKHDMWLRNDALPQLTTRATRLTFDADYETALVTKARRDRLDAMIEEMAADSEFTPLVRRLGCLRGVSTLTGFGLAVEVGDWHRFTGNTIGSFVGLVPSEHSSGGSRSLGSITKTGNGHARRLLVEAAWHHRPRYTIGKTMRDRWNLAPATARIRGDEGNRRLHQRWVKFIDRRKRSTVANVAIARELAGWCWSLAVMED

SEQ ID NO: 510755 - protein, 341 aa, unidentified
MPTVCTIGLDIAKNVFQLHGADAAGGVVFRKQLRRSKVLDFFSTCPPCLVALEACGGAHYWAREITRFGHDVRLIPPAYVKPFVKRQKTDAADAEAICEAVQRPTMRFVAIKSEAAQASGVVFRARDLLVRQRIQIINALRGHLSEFGIVAPEGPAYLGRLIEQLVDPESAVPDAARAVLAIMVDTLRLLEEKIALFDKEIVRRAREDEEARRLTTIPGVGPITATALVALAPAVSQFRRGRDFAAWLGLTPKEHSSGGKQRFGATSKMGERTLRRLLIMGASAVVQHFGRRKPPTGSWLAQMLSRKPRMLVIVALANKMARIVWAMMATGSNYRTSAGAA

SEQ ID NO: 510756 - protein, 309 aa, unidentified
MKEELVYLGVDIAKAYLDAALGNEKRRFSNDALGHRQLINWIKQMLAPVQVICEPSGGYERALVRALARARVKISLVPANRVRQFARAAGILAKTDRIDAKLLCAFAEAMQPGTISASQLEQEHLRELESQRRHLTHLLVMEQNRAARMSDLCVCKLNRRLINQIKKQIEQLDLLIEAQIKASPELSTKAQKLTAISGVGARTAALLLAQMPELGQLNRREVAALVGVAPFNRDSGRMRGKRAIYGGRRPVRHGLYMAALVAARHNPILRGFYLRLRAAGKPAKVALIATMRKLLIVLNSALKADPLYA

SEQ ID NO: 510757 - protein, 324 aa, unidentified
MIDGILGIDVCKNTLDVSISSYTKVRTKSFTNSPDGWRHLLDWLIAQKIQRVHACLESTGRYSLGIACALYEADHVVSIINPAQIRDFVRTKLGRNKTDGVDASHIREYCELFKPSPWAPPSKAHRRLGELQTIRSGIIAGLTEWKNRKNSGIVDAEAQALADATISHFTSQLGAVDKAIALTIDNDCNLQSKRDLLLSISGVGETLAGVVLAELPGPDVLRSSAEVVAYAGLNPRRHQSGTCIDRATRISKIGNAVLRAALYMPALSAMRYNSAIVALVTRLKSRGRLKPKQIVVAAMRKLLVLCFGVLKTGRPFDAAIAMGG

SEQ ID NO: 510758 - protein, 331 aa, unidentified
MEYIGMDVHDRYCQVAILDDDTDNPEECRIRAERAELEEFAREYAGSAVAIEATGHYRPIYETLDEHVDVTLVNPSKTRVIADAKVKTDRVDAKMLAHLLRANLVAESYVPPKDVRERRDLVRARKALVEDRTREKNRVRAVLKRTGNQYSRELFGPTGREFLAELTLSEVDRAVLEAHLAVIDTLNEQITKLDKRIEDTAAARHDAQLLMTIPGVSYFTSLLITSELGEINRFSSAKKVISYAGLDPSIRQSGDKEVRGGISKEGSAPLRWALVQCANVAVRFDDYLGQFYNRLKQRKNHNIAIVATARKMLVAMFHMLSREEVYDPPTA

SEQ ID NO: 510759 - protein, 354 aa, unidentified
MADAPKHSIAFVGIDIGKNSFHVIGLDERGAIVLRQKWSRGQVQARFANMPPCLIGMEACVGAHHLSRGLQKLGHDARLMPARYVRPYSKGQKNDFRDAEAIAEAVQRPTMKFVATKTVDQLDLQAMHRVRERLVSQRTGIINQIRAFLLERGVAVRQGLRFLRNELPGILAQPSDALSPCMVRIIENLAGDWHRLDERIEGLSNEIEAIARRDSSCERLMSVPGIGPIISSAMVAAIGAGDVFCKGRDFAAWLGLVPKQISTGDRTILGKISKRGNRYLRVLFVQAAWVVLIKPKSWERHGLKSWIEAAKKRLHRNVLAIALANKLARVAWSVLAHGRNFEATKSGEAAAQSA

SEQ ID NO: 510760 - protein, 356 aa, unidentified
MNKISKLNFKGQQIYVGMDVHKKSWSISIFTDKFEHKTFTQPPEVGTLVNYLKRNFPGASYKSVYEAGYSGFWIHDRLQEHGVQCLVVNPADVPTKDKERAKKTDRVDCRKLARSLRSRDIEGIYVPSRPKVEDRSLIRTRYSMVKKQTRCKNQIKSILQFYGIQIPEELADGNWSKRFIAWIEDIRMERASGNFALKVHLEELNNIRKIIADITRAIRTLANSEEYRQNVRLLKTVPGISTLTAMTLLTELYDIGRFANFDKLCSYIGLIPDTESSGETDLKKGITNRRNGQLRGILIECCWVAVRKDPALMMSFNTLCKKMPKNNAIVRIARKLLNRIRYVLKNQQEYVPAVVQ

SEQ ID NO: 510761 - protein, 349 aa, unidentified
MNFYTNTHPFYCGIDLHIRLLYVCIIDNENNILVHEKIDDSPEKLLALLTPYLGNIVVGVECMHCWYWVSDFCEQHNIDFILGHALYMKAIHAGKTKNDKIDALKIAKLIRGGNFPLAHAYSKEHRSIRDALRRRTHIMRMSAQLKAHVASTISQYNLPALETRLNLQNSPDRQKMHHFFPDEAVQKSMDLNLNIISTMVHELYKIEHYVKIQAQTHNARDLHILKSFPGIGKILALTILYEVGDIQRFPSVQKFASYSRLVKCKAESAGKSYGTQGNKIGNAHLKWAFSEAAVLYLKGNDNAKRYLANLQKRMSKAKALSALAHKIGRCIYFMLKNQQVFDEERFLNG

SEQ ID NO: 510762 - protein, 448 aa, unidentified
MANGKKTVVKKEQKASLKKINYKVAGIDLGSEELFIAVIDKTVQKFPTFTRGLESASEYLKSESIEKVVMEATGVYWIPVFEYLERQGFHVSLVNGAHAKNVPGRKTDVLDSEWLRELHTYGLLRASFIPDEKIRELRYYVRLRDDHISMAATHINIIQKNLDMMNIKLHKVLSSIMTKSGLAVIKAILEGERQPEKLWELCQDKIDNKKKQDVIDSLKGNYRSEYLFGIKQALQMWEYYQNMEKQCDAVIEKLLTQMTFDKENPQNLNTPKRIKQNSPEIEDFHILMTKLTYGKDVTAISGINDYSALKIIAETGLDFSKFQNEKHFTSWLGLAPSAHQSSKTKRKKGRRHCNRAGMIFRQLAVNVGNGKHTALSSFYKRIRSKGGKMVAIKATTRKIAVYFFNLMTKGLAFVEEGIKKYEKRYSEQQEKFLFRKASEMGFSLVKKS

SEQ ID NO: 510763 - protein, 416 aa, unidentified
MKIYPRTRPIQRYIAVDIHKEYVLAGGMNASQEWILPPRKIEMSKFKEWAKRNLCETDAVVLETTTNVWDLYDMVQPLVGHAVVAHAGAVRQIAEARVKTDKEDVKRLIRLLIADIVPEVWVPPQPVRELRGLISYRQRLVKTGAVFRNRLQSLLHSHNLVLPEEGLLSQEWWARQEKISPLEKLQISQEIALLEQIEKHKAEVDQELGKQSLGETWGRDAVRLMQLPGIGVVIAMTILSAIGDIHRFEDANHLVGYSGLGAGVHDSGQEHIEKRITKSGRKELRWAMIEAAWRAVRMSPYWKEQYEKFFHRMRRESQAIVVVARKLLVAVWHVLSKEETDIHASEEELAYKMLLLSWSLSVDVRMGLTYKQFAKYALMKLGVETDITRFVRRNVPRRLAPREEVLARMAELGLTA

SEQ ID NO: 510764 - protein, 452 aa, unidentified
MRPTRAVRKSTHQRTTAIRQDAAGIDIGARLIHVAVAAERDARPVREFQTFTQDLYALADWLQSCGVRTVAMESTGVYWIPLFQILEERGFEVCLVNARHVKHVPGRKTDFADCQWLQYLHAVGLLTASFRPAQQICAVRSLLRHRESLIQTAAAHVLRMQKALDQMNLQLHHVISDITGMTGLAIVDAILAGERDPTKLATLRNFRVHASVDTITKALVGDYRPEHVFTLRQSLGAYRYYQHLMAECDVEIERHLTALPDAHSGLRPSTASVTRRKPRGNEPHFDLRAHLHRLFGADLTTIPGIDVLTAHTLLTEIGPDLSKFPSPDAFASWLGLCPDNRISGGKVLSVRTRRVKNRAALALRMSAQAVQGSRTSLGGYYRRMRAKLGGPKAITATAHKLARIVYHLIATGQRYEESVFLKHEAVHRDRMQKRLHAQAAALGLKLVPNVVP

SEQ ID NO: 510765 - protein, 346 aa, unidentified
MEHVGIDVHKNQSQICIIAESGELIERRIVTDRKRLREVWGDRSGMRILIEASTESEWVARCLEEAGHEVIVADPNFAPMYATRSRRVKTDRRDARALAEACRLGAYRRAHRTSDAQRHVRGQLAVREALVRTRSRYISVVRSLLRREGLRIRSGAAKSFARRVGELEIPALLALEIGPLLVVLQQVDEQIDWADRNLEQRVQDDPDVQRLTSLPGVGPVIATTFKATLDDVERFRGAHQVAAYLGLVPREYSSGEKQHRGRITKAGSSRARTLLIEAAWLILRGKREDTAALREWAGRIAIRRGKRIAAVALARRLARILYAMLRDRTKYEATKVRGRRLEVQGA

SEQ ID NO: 510766 - protein, 439 aa, unidentified
MDDEDYQLRHERVAGIDIAKAKADVCTRLPPPREGGRRRSRVEEVPATARDILDLGTRLLADRVELVVMESTSDYWRIWYYLLESLGLAVQLVNASQARQLAGRPKTDRLDCQWIARLAEMGLLRPSFVPPAEIRALRDLTRARLQLVRDRTREWQRLEKLPEGALIKLSSVVSSLAAAKSAHKILEAIAGGETSPQALAALAHGNVKGGRAAVERALEGMRPEAHHLMLIRLHLDRIKDLDRRAAALEDEAGAALDAIPAARVTADGEPAPGTAVLSAAERLAEIPGVTPELAIAIIAEAGLDMTRFPTAARLASWAGLAPAARQSGPRTRKPRKGQGNDYLKGYCTQAALGTANTATFLGERYRRLARRTGGVRAQCAVARSILTIIRHLLSDPAARFTDLGPDWHTRKADRDRKIRTHLRQLEALGLDVTITPRAA

SEQ ID NO: 510767 - protein, 402 aa, unidentified
MAAGQLWAGVDVGKEHHWVAVVDSAGTMVLSRKLANDEQQISKLVAEVDRLGAQVSWTVDLTTVYATLLLAVLAEAGKSVRYLSGRSVWQASVIYRGGEAKTDAKDARVIADQSRMRGDDLPVLHPDDDLVTELRMLTAHRADLVADRTRTINRLRQQLVAVCPALERAAQPAQDRGWVALLARYQRPKAIRHSGITRLTRVLADAGVRNAPVIAQAAVTAAKTQTVRLPGEEVAAALVAQLAQGVIALDERIKQIDADIEDRFRRHPLAEVITSLPGIGFRLGAEFLAAVGDPALINSADQLAAWAGLAPVPKDSGKRTGRMHTPQRYSRRLRRVMYMSALTAIRCDPHARSYYQRKRNEGKRAVPATICLARRRTNVLYALIRDNRTWQPDSPPITTTAA

SEQ ID NO: 510768 - protein, 344 aa, unidentified
MKYYAGLDVSMEETAVCVIDSDGKVAAEAKVASEPTALAAYLARWRGSLVTVGHEAGGLAPWLHAGLVGEGVPAVCIETRRMKAYAKASPVKTDRRDAKLIAQAMRAGLYQAVHVKSEQSHKLRLLLTNRQALLRQARQLQGKLRGDLKVFGIKLGKVGSGGFAARVKARLAERPDLLALVEPLLEMRARQLAEVRAYDRLLRRLGRADPACRLFLTVPGVGVQTALAYRATIECPRRFARSSQVPPVLGLTPRIDQSGERSCHGAITKAGDKLLRSLLFEAANALLTRSRRCCALKRWGLDIAKRRGLNRARVAVARKLAIMLHRMWLDGTAFRWSAEPAPAA

SEQ ID NO: 510769 - protein, 408 aa, unidentified
MLFIGVDLSDRFFDYCISNSSGEALSKNRFDFNDDGFYSLVACIGEHEPDIQNCVVGMENPHSRLVDFLVQRGYTVMATHPESIARYRESRIPSRAKSDPVDAGLIADYIREHHKNLRPINMPDEIIRELSILLEDRDKLVEQKVRFSNQLTSTLKDYFPQALEAFGSITNKSALEFLVRFDTHKDVKALSTQELEQVLTECGFFRKDSKERFHNAIDKKQSVISNAVIKAKTRLKNVLVGHLLLLISQIEDYEKQIQKIVDDNPNGSIFRSLPGADYILGARLLVLYSSREFASASEAQAFWGTCPCTSRSGSSMIVRFRKGCHQFGRNTFHQLAFCSLSSSQWAKKQHAKKRKEGKGNNHTLRCIANTWVKVTFAMWSRKTPYDESKHLASIANHILNQPSFTLGG

SEQ ID NO: 510770 - protein, 381 aa, unidentified
MMTMTRDRECNAATTCLLLAFELGQRSWKRGFSAGMGQRPRMRQISAGAVGLIENEIVRAKMRLGLPLEAAVISCYVAGRDGFWLHRYLLAHGITNHVVDSSSIEVNRRARRAKTDRLDLGGLLNLLARYVLGDRRVWRVVRVPTVTDEDARQLPRTWETLTEDRTRLINRMKGLLTTQGVQIPIDKSFLEHLHAAQLWDGTPVPTGLQERLTQDWAQLRQVETQLRERRARAARPPDATTPTGRAIVQLQTLRAIGVAGAWVLATEIFGWRQIQNRRQLGGLVGLVPAPYQSGETAYDQGITRAGNTHVRRVMVQLAWVWLQYQPDSALSQWYQRRFGGGGKRLRRIGIVALARKLLIALWRYLETGAVPDGAQLKPMEV

SEQ ID NO: 510771 - protein, 331 aa, unidentified
MTKKEIIGIDVSKLTLDVFIHSSKFHYVVSNNPVGFSKLLQVIWKKLPDKKRDLFFCFEDTGKYSLPLCIFLNGENLSFSMVPALDIKRSMGMVRGKSDEKDASTIALYAWRKRDEIKPTIFPASTIIRIKQLLSLRNKLVKHKTAYKTGISDVHDYFKEGDSQFYLDVNKRVIQSLSSEIEIIEKEIESIIKSDPEIQKNYKNLKTVPGIGKIIAYYLIGYTHNFSRFENARKFCCYCGIAPFENSSGTSIRGRTKVNPLANKMIKALLNMGAISVARQNHEFKSYYNKRVENGHNKMSTLNIIRNKIVFRAFSVVKRGSPYVNLHKYAA

SEQ ID NO: 510772 - protein, 514 aa, unidentified
MVSPFRSMVPGRVRKSLVTPDIVAIPFERVPTVYADLGRLLATALPLPLHRGGPAMARRLPRPTRPVTMPTLHPDAAGIDIGATEIYGCVPLDRDSAPIRRFGTFTEDLHAVADWLRQCGVTAVAMEATGVYWIPLYQILETRGFAVCLVNARHVKHAPGRKSDVQDCQWLQYLYSVGLLRASFRPPEAVCAVRTLLRHRDSLVQQAAAHIQHMQKALTQMNLHLHHVLSDLAGVTGLAILDAILAGERDPHVLARHRDRRIKAAPETIAKALVGDYRPEHVFTLRQSLAAYRHAQGLIEACDHEVATRLAAFASRIDPTTHPLPAATKQSRRTGRDAQPGFDLRAELYRIFGTDLTPMPGLNTPSVFTLFAELGADLSAFPGGGHFASWLGLCPDNRISGGKILSVQTRHVKHRVAQVLRLAAQSLSRSQSVLGAYFRRMRAKFGAPKAITATAHKLARILYHLLTTHEPYDETQLAKADQHHQRRTEARLRAQARALGFQLVPVAPADSSVS

SEQ ID NO: 510773 - protein, 378 aa, unidentified
MYGATHRGEPTVPTQKITDRGRVHLGLDVAKNSVAVAILRPDEVEPDTEKIAHDEASIRRLIARLGDPRDLFACYEAGPTGYDLHRLLSGIGVRTDVVAPSLIPKAAGDRVKTDRRDSRRLARLHRAGELTAIRVPTVTEEGIRDLCRARQVVVEDRRRARQRLGSFLLRHNEIYREQTAWTVKHEEWIAQRHFADQAARSAFSFYRAAVAERGVTLSAITAELTPYFDKAPFAEPVHRLAAYRGIDYLGALTIVCEVCDFRRFAHAGAFMGFSGLVPSEYSTGESVSRGHITRAGNVHVRTQLVESAWAYQHGPSRGVVMARRQEGLPKETIDRAWRAQVRLCGRFRRLGARKDSRNTVVAAIARELAGFIYAEITA

SEQ ID NO: 510774 - protein, 362 aa, unidentified
MPKMIWLGMDVHAASITVAQYEDQAPTATVQTIANDPAQVRRLVRRLPAGSDVRACYEAGSCGYGLHRQLTALGVHCDVIAPALIPRRPGERIKTDRRDAEKLGRFYRSGELTTITVPTPSQEGVRDLVRAREDVRRDRTAARQRLAKFLLRHGHRYPGSHWTKRHWEWVCGHTFDGPARTVFVHYCDHVLALNERLAHLEREIRTLAESAAYQPVVTRLSCLRGLATLSALMLIAELYDLRRFRTPRELMAYLGLVPSEHSSGARERRGRITKTGNALARRLLIEAAWAYRHPARQTRRVQQALTTQPPEVHAISDRALHRLTARYRRLLSRGKTPHHAVTAIARELCGFVWAIALVPDLA

SEQ ID NO: 510775 - protein, 342 aa, unidentified
MTAVTLIGIDLGKHSFHLHAQDAAGRMVFRKKLTRSQLFAQLANVPSCMVVMEACAGAHWVARQLAALGHTARLISPQFVKPFVQGNKNDFNDAQAICEAASRPSMRFVSPKSEAQQTLSALHRVREGLVRQRTAATNQIHAFLLEFGISLPKGSAVIKRLPAVLALQPDLPVRLIAVLERLQAHFKYLDEQLAEVERELTQQLKEDESSQRLLAIPGIGPITASALSMELGDAHQFGSSRQFAASLGLVPRQYSTGGKPTLLGISKRGDKNLRCLLVQCARVLMQRIDKREDASGLWVRDLLSRRHSNVVACALANKLARIAWAILSKGTHYQPDTAVQAT

SEQ ID NO: 510776 - protein, 343 aa, unidentified
MQAITTVGLDIAKSVFQVHGVDAAGKVIIRRQLKRRHVLPFFQRLPACVVGMEACATSHHWSREIRALGHTVRLMPPAYVKPYVKRQKNDAADAEAICEAVTRANMRFVETKTPEQQACLMLHRTRHLFIRQQTSVINAIRAHMAEFGIVARVGRNGVAELLAVAADPTDRRLPEVARTCVAALGVQLRMLKAQILEFDRRIMAWHRSNQTSKRLDQIPGIGPALATALVASVPDPKVFRSGRNFSAWIGLVPKQYSSGGKDRLGSISKQGDRYLRGLFTAGALAVIRYAKIHGTEHRPWLTALLARRPTKVAASALANKLARMAWAMMAKGERYKEPAALAA

SEQ ID NO: 510777 - protein, 423 aa, unidentified
MSHRIAGIDVHKKMLAVVVCDVEVDGEYQFERVRYSSSPEHLRFLADWLMAQQVEEVVMESTAQYWKPVWGALERYWKPICQKREGAGPMSGTLHLAQAQSNRGRRGRKKDFPDAERLVKRLVADELVLSFVPDTEQRLWRAVTRRKYQLTRNHVRLQNQLEGLLEECHIKLSSLVSDLLGASARRMLKALAEGETNPIALAAMADKNLRATQAQLCDALGACTELKPIYRRLLKMFLEELQFIDQQISELDQELASLLSRHHDAVVHLAEIPGLGVDSAQQIIAEVGAGAATFPSAKQLSSWVGACPGEEESAEVSKSHRSPKGNRHMRRILNQAANAAAKSKGTIFEIVYRRLVSRLGHNQTIGAIAHRLCRLIWIILHRGVRYEERGPSVNAKTRRHRTNRMIRELRNLGYRVEPLVNTV

SEQ ID NO: 510778 - protein, 324 aa, unidentified
MSGTEAVGVGIDVAKATLELSIGAGGRTRTFANEPEGQAALLQTLRESDKEVSLVVLEATGRLELEVACLLQAEGYAVAVVNPKAARDFAKSIGALAKTDAIDARVLAQMAAALANDPQLLARHVRALPSNARRELDALVGRRRQLMTMLVAERLRLMSAHPKVRASLGAMCAALEAQIADLERQMAEHIAQHEAATEALLRTMPGIGPTSAACLIANLPELGRLNRQQISALVGVAPFANDSGTHRGRRTIRGGRFELRRVLYMAAMAAIRHANPVIAPFYERLRAAGKNHKVALVACIRKMLGILNTMLRTGTKFDPALHRA

SEQ ID NO: 510779 - protein, 412 aa, unidentified
MEVLYACCCGIDVHAKMLVACLLKGRKKDIRTLSTMTEDLLRLLDWLTQEGCTHVAIESTGVYWRPVFNILEGALEVMLTNARDAKGYKARKTDVIDAEWLADLLRHGLLKPSFIPPLPIREIRELTRYRESLVREQTALANRIQKLIESANIKLGQVASDALGVSGKAMLRALAAGETDAEKMSHLARRTLKRKQPQLQQALEGRMTPAQRWILGQLLDQYDQVEAALQSAAARIKQEVESSADPFVPEAIKLLDTIPGVGETVAQIIGAEIGADMARFPTANHLASWAGMCPGNNESAGKRKSGKTTKGSRYLRAALVQAAWAASHQKGTYLAAQYKRLVKRMGKKKALVAVGHSILVSAYHVLRTRTSYQDLGGDYLDRRNVDKQRKRLIRQLESLGVKVTVEEIKEAA

SEQ ID NO: 510780 - protein, 320 aa, unidentified
MRNTVGLDISKLTFDATAIVGKTEHSAKFDNDSKGLDQFSDRLKSLGCQNLHICMEATGSYYEEVADYFAQYYSVYVVNPLKISKYAESRFKRTKTDKQDAKLIAQYCRSAQESELVKRQKPTDEQYRLLRMTAAYAQIKSECAAMKNRHHAAKDEEAAKAYAQIIKAMNEQLEVLKEKIKEQTEKPNCKEGVKRLETIPAIGRMTAAVLFHHLTSSKFETSNKFAAFAGLSPQQKESGTSVRGKGKLTKFGNRKLRAVLFMPAMVAYRIRAFPDFIKRLEEKKKPKKVIIAALMRKLAVIAYHVHKKGGDYDPSRYKSA

SEQ ID NO: 510781 - protein, 372 aa, unidentified
MSSNGITWVGMDAHKNSIQVAALFPDRPGAVEWAEATTPEAIRRLGRKLRREAPGEVRCCYEAGPTGYALHRQLEAEGVICEVVAPSLTPVKPGSRIKTDRRDARKLAELLRAGLLTEVHPPSATDEALRDLCRCRDDVRVDLLRARHRLTKFLLRRHCIYRQSKHHWGTRHWAWLEELRFDDPVSQATFDSYMLAVRQLEERQDQLDAQLAEFGGRDPYREPVAWLRCFKGIDTVTAVCVVAELHDFRRFRSARELMSYVGLVPSECSSGERERRGSITKAGNRHVRRLLVEAAWHHRHRPALSAPLRRRREGQPARVLAIADRAQERLCARYRRMTGRGITSPKTIVAMARELTGYLWAVLHPAATATRS

SEQ ID NO: 510782 - protein, 323 aa, unidentified
MRSMINYITFIGIDVSKEHLDIHILQSNKRFRVDNSKKGCAKLCRQFVKLQKPAAAVEASGGYERLALRMLSAAGIGSFCLDPVQVHAYSRSRLQRAKTDPIDAEMIARCLMQNHEILRPYIHDPITEELAELVAFRTKLIREATKLTCQIDQAEAALVLRILKTQKRQLKARIVLLDKAIANIVKNTNEFAQKAEILRSMPGVGPVLSFTLLARLPELGKLEGRKISALTGLAPFARESGKSKKPGRCQAGRSDIRSVLYMASLSAMRMKEHPLKLFADRLKKAGKPFKLVIVAVMRKMITMLNAMIRDMKNWQQNQWQKTL

SEQ ID NO: 510783 - protein, 355 aa, unidentified
MNSVKYVGLDVHQSTISVAVLNAEGRLVMQSVIATQAAAILDFIAGQRGTLQVTFEEGTHAAWLYDLLVRRVARLVVCNPRQNALLKSGNKSDPIDARKLAELLRAGMLSPVYHGENSTGGLQQLVASYTALTQDTTRVMARIKALYRSQAIACAGKKPLGKRHRQQWLEKLTAAGQRQRAEWLYAELDAVQGLRRQARQALVAENRKHAAAKLLRTMPFLGPLRAAVLLAKVQTPYRFRSKRQFWAYCGLGLETRSSADYVIQNGEVVRRRRALYIRGLNWNHSHPLKNLFQSAATTASTMQGPLREFYQARVAKGMQPALARLTLARKMAAIALILWKKGEVFEAKHLNSQAA

SEQ ID NO: 510784 - protein, 426 aa, unidentified
MWDAKRRVLKIKSLKHGIIQDKRGNVMRAVFGIDVSKTSSEVAILVNGEKVHGYTILNDAIGFNRLLRDLKTVHNPEIIFEATGVYSRRLQVFLEEYGYAYTRLNPLEAKKQLDSLRVRKTDKIDAEKLAKSQLVHNRKPTYVQEEVYQHLRDLSRFYQNLTEDLVRAKNRLHKVLQITFPELENLLSTPTGEQYWNLVMAFPCKEFVLRLSQSDLCEIIRQSTSKRISEKRIAYLTDKLIKLAKQSFCAVKKNSPMLEEVRYYAQELLRLSERRQVVLNDMVTLAQPLPEYDILRSIPGIAETTATSIIGELGDIRRFQSTNQINAFIGIDLRHYESGKFLAKEHITKRGNPYARKILFKCIHNIASASHTNPCHIADFYEKRKRQSTIASTKPHAIASIHRLIRTMYYLITHNKLYDYSLTQNR

SEQ ID NO: 510785 - protein, 423 aa, unidentified
MSYKIAGIDVHKKMLAVVVSDVEVDGEYQFERVRYSSSPEHLRFLADWLMAQQVEEVVMESTAQYWKPVWGALERYWKPICQKREGAGPMSGTLHLAQAQSNRGRRGRKKDFPDAERLVKRLVADELVLSFVPDTEQRLWRTVTRRKYQLTRNHVRLQNQLEGLLEECHIKLSSLVSDLLGASARRMLKALAEGETNPVALAAMADKNLRATQAQLCDALGACTELKPIYRRLLKMFLEELQFIDQQISKLDQELASLLSRHHDAVVHLAEISGLGVDSAQQIIAEVGAGAATFPSAKQLSSWVGACPGEEESAEVSKSHRSPKGNRHMRRILNQAANAAAKSKGTIFEIVYRRLVSRLGHNQTIGAIAHRLCRLIWIILHRGVRYEERGPSVNAKTRRHRTNRMIRELRNLGYRVEPLVNTV

SEQ ID NO: 510786 - protein, 385 aa, unidentified
MMLIGIDPHKSTHTATAIAPDTNQEAASIRIDATLREYRRMLTWARQWPQRRWAVENAEGLGRHLTSWLLARGEDVVDVPTTATARVRQLSRGGGRKNDRIDAGAAACVAALQGDARPLEAESYVDAMAVLDERRVNLAQSRVRAVNQLHALLRALIAGGAPRDLSATTAAALLRTVRPNGAVEQARKAVAKDLVTEIRTLDTQLKANAQAIARLVAATGSTLTEVVGVGPIMAGRLISRTGRASRFLTASAFANYAGAAPVEIASAEKSRHRLPRHGDRQLNSALHTIAITQIRIPSSRGHRYYNSKIAEGKTPREAARCLKRRLADHLWRTMINDERRAAGPGGQLGTTLQSSVAGPTPTTNSSDKSLPGPATHDSTTAKPAA

SEQ ID NO: 510787 - protein, 372 aa, unidentified
MPSMPEPTPADPTEVVLGVDTHKDLHVAAVLTTSGVLLATSTFPTTAAGYGQLLNWARGFGAVHRAGVECTGSYGAALARFLHAKTITVIEVNRGDRAQQRRRGKTDTLDAESAAHAVLSGRATAIAKSGDGHVEMLRMFKLAKASAIKSRSQAINQLKAVLVRADPKLRESMSGLRNPALFRRCADLTITDPSDPTGAAAFTLRLLARRVLSLTSEIDELTTHITAAIQAQAPQLLQRYGVGPDTAAALLLAAGDNPERLTSEASFAALCGVSPIEASSGKTQRRRLNRGGDRQANSALYTITIARLRWDKRTQHYIQRRVADGKTRREAIRCLKRYICRELYRDITTPHRPASPARRGLSHERCFRRSHQ

SEQ ID NO: 510788 - protein, 430 aa, unidentified
MEVVYQRCAGLDVGKDEVVACTRVPAGAVGGGRRQEVRTYKTFSAGLAALGDWLGDQGVTQVVMEATGQYWKPVWYVLEERGFELLLVNARHVKILPGRKTDVGDAAWLCELLEHGLLRGSFVPPPVIRELRDLTRYRKRLIQTHTAEAQRIHKTLEDASIRLGSVASDVLGVSGRAMLRALLAGERDPAALAELARGRLRNKLPELREALRGRFDAHHALLLRLALEHVEQLERSIAALDAEVDRVIAPFARARDHLDTITGVGKRAAECIIAEIGVDMGVFPTAGHLASWAGRCPGNNVTGGKRRSGKPTKGNRWLGEILVECAWAAAHSRDTYLAAQFWRLARRIGKKKAAGAVGHSILRAWRRLLRPARRRPRPPTGSRPAPSPRLPRHPQAGRRVTPGDSPFRARQGCVEISHPFDLGRRRLTCR

SEQ ID NO: 510789 - protein, 340 aa, unidentified
MKSTQIAVDLAKTVFQVAVSSTPGRIDKEHRLSRARFQRFIAEHEPVEVLLEACGTAHHWGRELEALGHRVSLLPAADVRRYRDGNKTDRADAKALLEAARNEAIDVVPVKSIDQQTITALHRLRSGYLQTRTARINAVRGLLREFGIAIPVGARHLVPRVRAAIEEGAVPTDLAPVLKDALGEIEELKRKAHDIERRLKGLAKHMPEAEILMSVPGIGVLTATALVAFVGDVRRFRSGRHFAAYLGLTPREHSSGLSRRIGRISKRGNTYLRMLLIHGARSVLRAAKLTEQPDGLRTWALGIAARSGYNTAAVALANKLARIAWRRWRDGQPFESRLTA

SEQ ID NO: 510790 - protein, 355 aa, unidentified
MQFYCGIDLGARKTHVCLIDENDHKLLDKKMDNDLSTMEAALRPYKGALETVVESTINWEWIVYGLQKNDYEVKLAHTLGLKAITWSKKKTDTCDAFTLAKLLRGRLIPQAYIYPYELRPVRDLVRERIRLVTKRATEYGAISRMLLKYNIQGFTRNSIKRLNEKDMHELYHHPFIRAKSTMELQRIELLTAQIKRMEKALFERARQDFTFSLLQTIPGIGDTLALTILYEVGDINRFANARAFCSYCRVVPGIHQSSDKAYRSPNSKQGNRYLKWSFSQAAIMAIRYYPQIRRLYERLAAKRKKAARLVARSIIAHRLAQAAFHVMRQRVAYKEELLFQFSKESVEGKTVAPVA

SEQ ID NO: 510791 - protein, 398 aa, unidentified
MKDKSQACEEKILGVDLHPDSFSLAVTVPKADGTLNIQQQITKAPTSEWREHLLKISKPALVVCEASGNSFEFMKTAEELGFRTCILNSVDVGQLGKKLCKTDKQDAVRIVKIYQANLASEVWLPDEETRKLRAVSSMFDQASQDCRRINNRIKSFLTQYDVRLGKGEKDLSSPIVRVMIAKKRQWSQDDLFVLNNYYEMFDHAVKVKQNLYQFMLRKVHGCRLMRELMKLCGIRVIAAFHIVAAVGDVKRFSNPKKLVAYLGVAPCIHQSGCREYSVGMQNNGCRGIRSLLVECANAILKSKNASAKHLRDWAVKLKMRKGTNIALCALARKLAVAIWYALNGWLPDIIDNETTLKRKIGSLFDEFKLEFIRTLGYNSRKEFVDSFSSAILTQKKGG

SEQ ID NO: 510792 - protein, 446 aa, unidentified
MKARTSLALFLSPTDDERVVLRAPQYKGPGTQERFLQRGEFLMWYAGIDWADQHHDALVIDEKGHQVGSIRVNHSPEGVAKLNAFLEQIVGSGGREQIACIIETTHGLLIAALPEAGWPVYPVNPRTVDRRRSASGAKTDIIDAYLLAKTGRADFADLRRLTPESEQVAELKALTRDQDALIQMQTRLVNQLTACLKAYYPVALQFFSKLQQRVSLIFLQTYPTPQAAMAASLEQVTSVLKQASHPHPTQVAHKIFETLRQPVLQADEVSTRTKSRLMLALVKQLLPLLEEIASYDEEIARLFLIHEDNDVFSSLPRAGRRLAPGLLAEIGDDRSRYADAASVQALAGTSPVLFQSGMYSKAHRRLGCIKPLRNALHQFAWQSTQSEPWARDYYQRKRAEGKSHTVAVRALANVWARIIFALWFNRTCYQTAIFEQAQRQHAPRAA

SEQ ID NO: 510793 - protein, 389 aa, unidentified
MKYVGIDLHKKTISGFVVVKERGKKKVAARKRLECRDEAGIKSWFSELGKFEVVVEATASYEWFVKLVEPLAQRVVLAHPKKLRIIAESKRKSDKLDAQVLAEFLASDEIPLAYRPCPRVREHRTLVRWRYFIQRRITGAKNKLRHILAAYNADVPHLFTAEGREHLAAVELSAADRFVADQLVGELDQHQERLGTANRRLREFATSAPLPEREARAILDSIPNVGPVTMDVLLAELGDWRRFRSQSDVACYAGLAPGFRESAGKAKQLGITKEGSRLLRWVMIEFAWRMVGTSRKWGGNYHRLEARVGSKKAIVAIARRLLGMTFALLRTGQKYSLALESPRPASCRSKSPRDTNPSDPARLRGQPRQASSLGAGVDYGGPLSVPERE

SEQ ID NO: 510794 - protein, 342 aa, unidentified
MQVTTIGLDIAKNVFQVHGIDASEKVVVRKQLRRGKLMAFFEALAPCLIGMEACATAHYWARELTKLGHEVRLMPAKDVKAYVKRNKNDAADAAAICEAVRRPTMRFVRIKSPEQQGQLMQHRTRDVLIRQRTQLINAMRAHLAELGIVAAKGDAGVTELLAIVADETDTRLPIDARASVIALATQLEALQTVIGALEKRIKSQHRANEASRRLETIPGIGVIGATAIAATVADPTVFRSGRDFAAWIGLVPRQDSTGGKQKLGAISKQGDRYLRRILVVGAIAVLRRAQENPGKYPWLTQLLARRPFKVVAVALANKMARMAWALLAHGGTYRAPELAAAA

SEQ ID NO: 510795 - protein, 354 aa, unidentified
MKRTTKHVALDVHQATTVASVREDSGRVIARAILPTEEAALVEFFRGMRGTIHVACEEGTQAQWVHDLLVPLVDRVVVCDRRGESRSGNKADQVDADQLSEQLRRGNLRAVYHASGERVTLKELTRSYTNLVEDSTRVMLRLKALFRARGIPAPGQRVYHPRERAEWLARLADRGARLRAAVLYTELDMLRQLRPPAKTVMMAEARRDPAWAVLQTIPFFGPVRVALLLATMQTPWRFRTKRNLWAYAGLAVVTRSSADYVLRAGQPVRRRRAPLTRGLNRNHNRVLKDVFKGAATAATARPGPLQDWYQERLAGGMRAELARVTLTRKLAALTLRLWKKGERFDPTQLTRQAR

SEQ ID NO: 510796 - protein, 398 aa, unidentified
MNAVGIDISKGKSTIAAISKTKDVIIAPQEFLHTDEGLHKIITTILALGKNTKVVMEATGHYHEPVAQALHKMRVCVSIVNPLLVFAYGDNSVRRVKTDKKDALKIARYCLDNWEELREYIPQEAIRQQLKLFSRQYNLCIKTVHTLENNLISLLDKTFPSAPGFFTSQKKKNGHQKWVDFVSTFWHADIVATTTASEFHKAYQDWCEQNHYRFSPHKAQEIYQKSQGLTTTLVRSVDTKLLITSAVMQVIALATTLAQIKAQLIYLSSLLPEYEYVRAFYGVGEVTAAQLIAEVGDVRRFHSGRALIAYAGIDPLPKQSGTYEKKSTKTSKRGSASLRKTLYQIVVTHLRHSPKGEAVYEFLNRKRTEGKPYFVYMTAAANKFLRIYYARIKGYLNG

SEQ ID NO: 510797 - protein, 335 aa, unidentified
MQIYGIDLAKEKFDVSFFDLTSKKVSNQPSHKVVTNNLKGIGKFLKGLPSDAVLVAEHTGVYGDTLLKCCMDSNVKIAFVGGYVIHRYRATPDRAKTDVLDCALLREFGERYPDKLKYRKFPEEALYELRQLARHREMLVEQRKQLITADKSEDCRPVRSLAVKRSMDRIKEMLDTEIAETEKEMLKVINGHDSIHHNYELVKSVDGVGLITAVELLVKTENFTKITTARQYSAYAGTAPYEKSSGKMDKGAHISKIGNRRSKTLLYICAESARLHNKEIKLYYERRTLIDKKPRHYVLNAIANKLLRIIFTLVEKGEYYDANFIRQDPRVVKYN

SEQ ID NO: 510798 - protein, 432 aa, unidentified
MSERKSLELRVSVDVGSRRHSVAIGLPDGQVLEEFEIAHRPEGFQEFFSRIEKHQKAQGCGVAVAMEGYNGYARPLDTLVRQRGYRLYNINNLKLARFKEIFPGAAKKDRIDARKGLELFQLRDHLPLAKGVLQEVTGTPKENEILKRLTRRRRRLVNERVRVVNNLQSDLQAVCPGLLEITTEASNQWFLNFLLSADSLPQLARLRKSTLLKIPAVGRKYASLIEQWQKRAHFSDEIEWVNEMVREDALRCLELDEKIRTLEAKIEEIAKSSEIAKILLSIPGFGPVCTSELAGEIGTVERFSKEGSLALYLGMSTLDNSSGDYHGSKQPKHVNTRAKAAMMIALDRHRKYVPESQRYYEKKRTEGKKHNQTIRSLGRHLCRIIFRMLRDQRNYEIRPQQGNTKTKVRSRSCVKTKIRRPKISATHLKQKV

SEQ ID NO: 510799 - protein, 343 aa, unidentified
MEYYVGLDVSLKQTSICVVDRTGSVVREGVVDSDPEAISVYVRSKAPDAVRIGLETGPTSTWLWTELKRLGLPVICIDARHAKAVLKMQINKSDRNDAIGIARIMQTGWFKEVHVKDIDSHSVRALLASRALLVKIKRDLENHVRGLLKNLGLVIGRAKFNVFAVRAEELIEGRPELIAAIRPLLEARNAVGEQVSELDRKVMKLARQDAQVRRFMTAPGVGPITALAFKATIDDPARFARSRSVGAYVGLTSRRHASGEVDWTGRISKCGDAMLRSYLFEAAGVLLTRVPKWSALKAWGVRLAKRNGLRKAKVAVARKLAVILHRMWIDGTEFNWSKQEIAA

SEQ ID NO: 510800 - protein, 375 aa, unidentified
MKEKVRFLGLDVHAETIAVAIAEPGGEVRSLGTIANREESIRKLVKKLGSVEQLRACYEAGPTGYVLYWQLAELGVKCEVIAPTLVPVKAGDRVKTDRRDAEKLARNYRSGDLTAVWVPDESSEALRDLVRAREAAKQDQLRARHRLSKFLLRSGQRPAPGVKTWTQIYMTWIRQIRFVQMAQESTRLDYLHEVEHMGERVARLEQAIAEAAKLAPPGLQEVIKGLQALRGIAHISAVTIAAELGEFSRFEGARQLMGYSGIVPSEDSSGERTQRGSITKTGNAHLRRIAVEAAWSYRLRPCVGPALRKRQEGVAEEIKEIAWKAQHRLHKRYCRLAATRKDQRKIITALGRELLGFIWAIGIKTEAAARPPRSA

SEQ ID NO: 510801 - protein, 392 aa, unidentified
MPIRASGMGDEPWSRIRPTWLEQNTTYVAFDTSKETIAVALAEGGRRGEVRFFGTVANRPEAVRKLVDKLAGRHSRLAFCYEAGPTGYGLYRQIRALGHDCQVVAPSMVPVRPGGHIKTDRRDATTLAALFRAGELTAIWVPDAAHEAMRDLVRVRQTATEGVRRARQQLLSFLLRHGRIYPTKRHWTRAHRRWLAEQRFEHPAQQIVFEELIQAVEQAIARRDRLQQQMIALVPSWSLQPVVAALQALRGVAMVAAIILVAEIGDFRRFATPRQLMAWLGLVPREHSSGGSTSRGAITKAGNGRARRLLIESAWTYRLPARIASELLARSAALPETVKAIAWKAQVRLCARYRRLRCTGKPTNVVTVAIARELAAFAWAIAITVMPAPQTA

SEQ ID NO: 510802 - protein, 356 aa, unidentified
MEGERYVGIDLGKRTYVACAISQGGSLERWNGKTDGVARDHLAARLRCGDVVGVEAGSTAFHIARRLKSVHGVRVVILNPGKLAVIYASMKKTDKEDALKIARLLETMPEGYLPLVPLPTQAEEDMRRLAGSQIFLKKERTRLINRLHALFMGAGITTVRKKDLARDESRRSMLEMLFGVYEEVAGHLVAILSEVEQQIANLDQSIRKALVDRREQAALLLSIPGVGPVATATFLGYVGDGSRFDTASQVSYYAGLVPRLDISGERQRLGHITKNGNPAIRRAMIQAAWTAVRSPLGNPFREVFERIAATRGRGIAIVAVGRRILELMYTLITHGEYYKYGSAAERQRKLRRYKVA

SEQ ID NO: 510803 - protein, 391 aa, unidentified
MSMYFIGIDISKYKHDCCIISAANQKVVSKVIIKNNKAGFNELLTIIHSLANPADIRIGFESTAHYALNLELFLENSLLTFMEVNPVLISEYKKSKTLRRTKTDSVDCESIARWLMTVEYKPHSKGFYHAYSLKSLTRLRDKLIRQRSFYLFKITNVLDHTFPEFKPFFNERLSKTALYLLENYGSAEKMARMNSASYEKLRSVSRGKFSPQQFLRLKELAVNTVGVNNSIFDVELNSLLSLYKSLVKEIDTIKKEINQLIEEVHPHYMSVPGIGPLSAAVIYSEYGDISNFTNPGQTLAFAGIEPGINESGTESHGGKMVKRGSSQLRYTLINCCLPLIRFDMTFATYYAKKRGEGKPHRVAITHVAKKLIRVIYALESQDIDFNAQELR

SEQ ID NO: 510804 - protein, 345 aa, unidentified
MHYVGVDYHKKSSYVTVMDERGKVVKEGQIANSQEALGAFLDGRAQGASAVLEAGRNWPVMYDWLEELVEEVTLAHPAKVRVIAEAKVKTDRIDSRMLAHLLRADLIPAAYVPGAVTREQRRRLRQRMFLVRVSTMVKNRIHTLVDRHPELSRQAGGWSDLFGKAGRAWLEQLDLPAGEAQLLRTDLDLLGAIQEHIKASNRWVTQLARKDARAKLLATIPGIGDFFAVLLAVEIDDVGRFSRPQKLAAYAGLVPSTYASGGYVHHGRITKRGNKWIRWACIEAAYPAIRQDPELAALYHRLKVAKGANVAKVAVARRLLTIAYRVLSEGRPYRPAPEQARWRRR

SEQ ID NO: 510805 - protein, 344 aa, unidentified
MTNFVGLDVSQKMTAICVVDGVGLRLWRGQCPTVPERIADMVRRQAGDGARIGIETGAMTPWLVHELRNVGLDVVCLDARHARAALKMQINKTDQNDAEGLAQIVRTGWFRAVHVKSFDSHRVRALLGARTQLVGMTTRLSNHIRGVLKTFGLLPGAMRGLPFDRKVEALLVEHADVALIVQPMLVAWRQLRVQIKAFDKAIRKLVRSNTTCRLLMSVPGIGVLSALAYVSTVEDPERFARSRSVGAHLGLTPRQYQSGEVDRSGRISKCGDNLARTLLYEAAGVVLSRVKRDSGLKIWAQAIAKRSGSGKAKVALARKLSVILHSIWRSGQPFRWSEQAGAAA

SEQ ID NO: 510806 - protein, 349 aa, unidentified
MIVVGIDPHKQTHTAVAVDAATGRSLAELTVKARTPGFELLVEWARELDHDRLFAVEDGRHVSGHLERHLIARGERSVRVPPRMMGEARRTDRVWGKSDPVDATAVARAALRHPELPEASLAGVEREIGLLVAHREMLVNERTDRICKLRWLLHDIDPDLAPPLRTLDRLKRLDRLAEELRDLVLTVQVEVCLDLLARCREITVRANELERRIDGLVRTHAPELLEIPGCAALTAAKIVAEAAQIGRFPTEGHFARYAGTAPIPASSGARHRQRFNRRGNRQLNTAIHRIAVTQLRMHEPAGEYVARKRADGKTKTEAIRALKRHITRVVFKTLISVSQPTDRLTAAAA

SEQ ID NO: 510807 - protein, 340 aa, unidentified
MNNFFIGIDVSKETIDVSCHNPSRFKEAEYVGQYTNRPSGYRSMVRDLRLYCGGISTGQWLFCCETTGSYDKPLCNWICGKGMFIWRESALQIKLSKGICRGKDDKTDSMMITDYARRHHDKAVRYELPSPILSALKDLYSYRRSLVEMRTMAQSRLSAMKFNKDGLVARFITKDIEKEIKLLNERISICERKIIELIESDEEIMNNYHHIISIKGVGPVCATALIIYSGNFNIIPTANKMACYSGCASFRDQSGTSIDKEAFVKHLSRTHLKSVLSMAALQATRTCELYTNYAHRMKSQGKSNKVIINNVRNKLIHLVYALVRNDCDFDEKHVFTHHKL

SEQ ID NO: 510808 - protein, 455 aa, unidentified
MSKRARRSKSNISLPTLNPHAAGIDIGAKEIYVAVPLDSDCEPVQRFTTFTDDLHAIASWLARSGVKTVAMESTGVYWIPLFQILDSAGFEVFLVNSRHVKNVPGRKTDVGDAQWLQYLHSVGLLRPSFRPPQAVCAVRSLLRHRENLVQISSKHILHIQKALTQMNVQIHNVITDITGVTGLRIIDAILDGERDPQKLASLRDGRIKASADTIARSLVGDYRREHLFTLKQSLDAYRHCQALIAGCEVEIESMLKDFESRIDPAANQIPERRSHHKLSPAGVAIHEHVYRILGVDLTQVPGVDTHAARTLFCEIGAIMDRFPSANHFASWLGLCPDNRITGGRILSAKTRDVRSRAACILRMAANSLHRSQSRLGDYFRRMKARLGVPQAITATAHKLARIIFRLVREGTAYDDSVFATQDERHLQRKLRHIRKQAAELGLSLVPLTEAQPQVS

SEQ ID NO: 510809 - protein, 392 aa, unidentified
MEAGTSQPHTPTAIRTDLAAIFVSLELSRSTWLITSLSPGNGEKMSKHSVVGGDVTALLNRFAQLQEKVRSRTGNQVPIVSIQEAGLDGFWIDRVLKANGIESYVVDPASIATSRRRRRAKTDKLDGEALVRALLAFKRGEPRVCAMVNAPSPEEEDRRRICRERKVLIAERVKHVNRIKGLLFSQGVSGYEPLRKNRRKQLDELHTGDGRPLPPHLKTQISRELARLELLLEQIAAVEKERDTLLAAQKDSVAATLIPAAAMLCDIKGIGLEFAAILWTEGLFRHFDNRRQVAAYAGLAPTPWQSGTIDHEQGVSKAGNPRLRATMVQLSWLWLRHQPQSALSQWFTARVQSSGGRMKKSAIVALARKLLVALWKYVTAGVVIEGAVLKTA

SEQ ID NO: 510810 - protein, 347 aa, unidentified
MKKVVKQVLGIDIAQDELVCCFGKMHDDFTPELISHKTFVNSLKGFESLLTWVGKLSDASVSVRYVMEATGIYHEKFAYFLNDQGLDLSIILPNKISNYARTLDVKTVTDKTASEAIALFGLERKLENWEPPKGVYKKLQQLSRERGQLMDEQTVIKNQLHAESKEARPHENSIQRSNKRLALIKKQIQDIKEELEELINTNDEVNEIVILLCSIPGIGKITAATVLGETNGFNLIRNKRQLTSYAGLDVKEKQSGTSVRGKATISKKGNKQLRKAMHLPALTAIRSDERFKAIFIRLVSKHGVKMKAVVAVQRKLLEMTFTMFKSKTKFDKNYFKGAEEIVEQGAE

SEQ ID NO: 510811 - protein, 302 aa, unidentified
MPDVISTAPADVRLWVALDVHKFSIVAAVLPPAGGRPEVTRIETTEKAIRRFIKSLGGPEGLAVSYEAGPGGFALWRLLASMGVACDVIAPSLVPVWAGDRVKTDRRDAKKLVGLFRGGLLRFVQPPTPETEGLRDLLRCRDDIRCARTAARHRVAKQLLRHGRIYRDGKKAWTLIHRAWVNRQRLDDPLAHEALTQMLTHLDSLDRQLAALDAHLEDVAGYDRWAWQVEKLRAFRGIATLTALGLIAEIGDFARFAHPRELASWLGITPSEYSSGDQQHRGHITKSGNRHARRLLTQAAWH

SEQ ID NO: 510812 - protein, 350 aa, unidentified
MIIIGCDYHPSFEQIAFVDTETGELQERRLQHREEAEKFYRDLAAQGMKVRVGMEASGHARWFERLLSELQFELWIGDAAEISAKRVRKQKTDRQDAQLILKLMLKDDFPQIWVPSWENRDLRQLLWHRHRMVQARTRMMNQLQAVALNEGLRCKKKLWREAGRAQLEAFKLAPWASQRRTDLLELLDRLNPTIAKLTQAIDWEVEKCPAARRLQTHPGVGPLTALAFVLIIGKADRFQCGKQIASYLGLVPLEKSSGNQRRLGHITKQGNSLLRFLLVEAAQVTVRSLPEWRSKYCHLTLRRGRKIAKVAMARKLAVRLYWMLRKEWDYEQLRKFGSYAGKPGHRDGVK

SEQ ID NO: 510813 - protein, 311 aa, unidentified
MGHTFVGIDVAKDQLDVHVRPSDERVQLGRDDAGLAGLVARLQPLGPRLVVLEATGGYEVPVAAALGSAGVPVAVVNPRQIRDFARATGQLAKTDALDARLMALFAEAVQPEARPLPTAAAQALGELVARRRQLIDMLGAERNRHHQARDPRLQRRIATHIGWLTKALAELETDLDDTIRSSPLWRAKDNLLQSVPGVGDVTAYTLLADLPELGQLDRRKIAALVGVAPLNRESGQWRGRRMIAGGRPAVRSVLYMATLTAIRFNPVLVHFYQRLTAAGRPKKVALTAAMRKLLTILNAMLRDQRPWQQLA

SEQ ID NO: 510814 - protein, 392 aa, unidentified
MRKPKKQKKPLNDLNRSLTPFDPNETLIGVVELSKGSWLVSGIIPGVERQPLKKLAPDENELLKLLERWRAEAEKAGHKIARVAVAFETGRDGFWLARWLRKRGIEAHVIHAASVAVSREHRRAKTDRLDTEQLKRSFLGWLRGERGHCKMAAIPTFAEEDAKRPHRERETLVGEHTTIINRIKSTLVRLGIRSFNPTLKEASERLEHLRTPEGEPIPPNTLAELSRDLERKQLVAEQIHQIEKARMGQLKQAPKAGPNLMVLVLMRVIGIGIETADMLVKEILSRNLRDRRAVARYGGLTGSPDESGSQRREKGLARSGNARVRKGMIQLAWRFLQFQKESTLAKFEARTKNARTSRKKMIVALARKLLIALWHLVRDGVVPQGVVLRPAH

SEQ ID NO: 510815 - protein, 335 aa, unidentified
MSLYFVGIDISKYKHDCCIISAADQKIISKFTIKNDKAGFEELITTFNSLSNPEDIKIGFESTAHYALNLELFLENAHHSFMEVNPVLIKEYKKSTTLRRTKTDSVDCESIARWLMTVEYKPHSKGFYHAYSLKSLTRLRDRLIRQRSFYLVKITNVLDHTFPEFKPFFNERLSKTALYLLENYGSAEKMARMNSASYDKLRCISRGKFSIQKFLRLKGLAANTVGVNNSIFDLELNSLLTLYKSLSNEINTLESEIIKLIEEVHPHYMSIPGIGPISAAVIYAEYGDISNFSNPGQMLAFAGIEPGIDESGTESHGGRMVKHGSSQLRYVLLNA

SEQ ID NO: 510816 - protein, 450 aa, unidentified
MKLLYRCCAGMDVHKESVSVCVRRRVRGNGKVETEEAVFGTFTQDLERLLQWLKERKVRQVAMESTGVYWIPIWNVLESGKYKVELMLVNPATVRALQGQKTDRIDARRIAEYLQYGLLRASFIPPRPVRQMRELTRMRAHIQQDRNRVINRIGRLLETVNIKLGSVAKKITCKSGRAILNRLAAESRQPERLAKLAPGRLKEKIPQLILALDGRPDEHFRWLLSRLLKKLESLDAELAGIDARLCEQTAEHEDLLRRLCTIPGVEITTARVLIAELGTDMTQFPSAAHAASWAGLCPGNAESAGKRFSGRTRKGDRYVRRILVQSAWAAARTRDCFLAAVFNRVAHRRGLKKAAVAVAQRTLAIAWSIIRNGTEYQEHGGDHFDRLHPERTARKLMRRLERIASEIALKRPVGLPRSAPKEPMPISSCERCWHFGIRDCIHLIKRSKKT

SEQ ID NO: 510817 - protein, 415 aa, unidentified
MALKIVYKICCGIDVHKTFVVACIASTNDKGVTSYESHRFSTYTSGLKTLLQWLLNRNCKDVCMESTGKYWIPVYNILENDCSIVLAHPKYVKAIRGKKTDKKDAKWIADLFKHDLVVGSFMPHADIRQLRDLMRYRFKLTCFQSSEKNRLQNCLTVSNIQLGNVVSDTFGKSAQAILDKLLENPADTSLDLEPLIYKSLKKKLPELRDAIDGYVTPEQVCKLKVIKAHYESLESRKAELEELILAIAAPYQQELAILKTAPGIRSDFTAIGIISEIGTNMEAFPSAKHLCSWAGLTPTNNESAGKKKSVRVSKAGCYIKPLLVQCANAVVTSKKHPEIRNRYLRLKKRRGHKKAIIAIARMLLTALYHMLKNGENYNAELYRKSDLPPADWEITVEQAIIIARNQGYKIKSATA

SEQ ID NO: 510818 - protein, 315 aa, unidentified
MDEPPAVFVGIDVSKDRLDVHLRPSGKAFCVPRDAKGLDGLVGRLGSLPIALVVLEATGGFEATVAAALAGAGLPLCVVNPRQIRDFARAMGRLAKTDALDAEVIALFAERVRPQARPLQEPERSHLAELVGRRRQVIEMIGMETNRRGQTVDKQLARRLDRHVAFLEKELADVDRDIGQAIKASPAWREAEALLKSVPGIGDVTARTLLAELPELGTIGRHQLAALVGVAPINRDSGLMRGRRAIGGGRTSVRGVLYMAALTAIRRRSPLRAFYDRLTTRGRPKKVALVAVMRKLLVILNAVVRDRTSWRPLTA

SEQ ID NO: 510819 - protein, 374 aa, unidentified
MGLDLSKKSAVIFAVYAGVREIKPAQQKFLDELNKEFRMIHPDLDEFVRLSKAVKDHEVHVLIENSTQTFDVYWMLTNLGLNVTVAQSQDLYRITKSVKKTDSNDSVELANYMRRRLAGEDEFAVCVMPPKEWMYRREMCRVVFDEKVHLADLKRRVRSHMLLHGIKLSKDYREIFSPYAIRELKNTKDPVLLCHVAEAESIKKRTDQEVKYIETMFEGVRIYELIHSIPGFGCISAAYLASMIIDADRFESCKKFTANFGVVPRMYQSGDTNRNCHVTHRGDADAIRLLKQAAFVHVNTVENSVVTQMYNRLRAKGKSFNEVKMACARKLLTVVWSVLKNDKPYTSPMELQRKASDLADEMLEDMEQELPILG

SEQ ID NO: 510820 - protein, 371 aa, unidentified
MVWTAPYGIDCARMRLLRSQTREPSVNQIIRIGMDTSKHFFQLHGVDAAERPILRRKLRRKEVFAFFAALPPTVIGMEACGASHYWARELGQRGHTVKLIAPQHVKPYIKRNKNDGRDAEGLCEAMSRPTMQFVPAKTAEQQAALMLAGMRERLVAQRTQLSNAIRGYAAEFGLVAAKGLDKIEPLLADISADEALPVMARELFAMHGREYAQLQAELKAVEARLMAWHRANADSRRLAQIPGIGPIGATALVMKAPDPRLFPSGRHFAAWIGLTPKDHSTAGKTRLGKITRAGDERLRSVLVAGATAVIQQARRGRGRASHWLLALLKRKSPKLAAVALANKIARIAWKLLVTGESYDGMRMPGASAFAA

SEQ ID NO: 510821 - protein, 376 aa, unidentified
MIRIIYTGMDVHKDTYSLCSYDAKENFMFSETTVKAETAAVLSYITAIKKRYSEDDVMIVCGYEAGPTGFSLCRELQKKNIACVVMAPTLLPKAPDAKKRKTDKGDARSLALHLAHKTYKAVHVLSPEIEAIKELTRTRAAALKAQKRAKQNLLSFLLRKGMVYPFGGRARYWTQKFYAWLKTLEFTNSIERYTFEEYLSEVNHQMSRVSRLDEKIAEIAENPLIKEKVKKLCCFSGISTLTAVSLVSEIGDFNRFEKARYFASYLGLCPGIHSSGLSSQTLGITKAGNKNLRCLLIEAAQAMSRSQLCGKKSLRLLTRQKDMDPLVVSYADRATERIKRRRSSMIFRGVNCNKATTAAAREMACFIWGMMTNNIA

SEQ ID NO: 510822 - protein, 400 aa, unidentified
MKRDSMFVGMDVHQKSIDITVAEEGHQGKVWHFGCIGGDLKALDQAVDKLLESGRQLYCVYEAGPSGYVIHRHLTGRGLDCTVVAPAQVPKKASDRIKTDRRDSQKLAVQHRAGALRSIYVPAPEDEAMRDLVRAREDAVDARRRARQHLNSFLLRHGRRYGGKTKWSTAHRGWVAEQRFEHSAQRVTLEECLGAIAEAEQRVERVSAQIRTLLPTWRWHPYVEALQALRGVSWIVATTVVAEVGDLRRFQPRELMGFLGLVPSEYSSGETTRRGAITKSGNAHVRRVLCEAAWAYAQQRPAISRELLRRQQQLPQEIRAMAWKAQLRLCARFAHLSAARKHRNKINTAIARELTGFMWAIAGAVRPPATVPGSANAPTGAPEVYVLRRQPRPARKRAAA

SEQ ID NO: 510823 - protein, 366 aa, unidentified
MKKTSTIRVNRNMIFKGHQLTIGLDLGDRWSFYCVLDEAGQIILEQKLPTTPEAMKQTFGKIPRSLIALETGTHSPWVSRLLRELGYEVLVAHAQKVQLISKSNRKDDRHDARTLARLARIDPELLGPVRHRSAKAQIHLTVIRARAELVSARTALVNAARGLAKSYGERLRKCGTQQVSRELAAELSVELREVLEPLLQEVESLNEHIKEYDARMEKIARESYPQVELLKQVKGVGTQIALTFVLTLEDPHRFPKSREVGCFLGLRPGRRDSGGSQPQMHISKEGDPYLRTMLVQGAHYILGPFGQDSDLRRWGLKLAARGGKNAKKRAVIAVARKLAVLLHRLWVGGEVYEPLRNSHQAMRAVA

SEQ ID NO: 510824 - protein, 457 aa, unidentified
MSKRQKKVQSQSFNLQSLPKQLQHINLKAAGIDIGSEHHMVAVPEGRAEVAVREFSTFTADLNALADWLQQCGVTTVAMESTGVYWIPWFELLERRGFEVKLVDAGHVKNVTGRKSDILDCQWIQQLHTYGLLAGAFRPADEICVLRSYLRQREMLTQTASMHIQHMQKALQQMNLLLHNVVSDITGVTGMKIIKELLAGERDPRVLASNRNKQCHNDRATIAKSLVGNYREEHLFALRQAVDLYEIYQTKIGDCDEAIVKQLSAQPDVKDEPPPPGQKLTPARDRQRGGVNVRDLLFKKSGVDLFAIPGLGADTLLVLTSEVGFDLSPWKTVKHFSSWLSLCPGTKISGGKVLSRKVKRNPNRAAQAFRMAAATLARSQSALGAFYRRVKSRTGGKQAITATAHKIARIYYALLTQGTTYVEMGQKAYEQKYQERRLKHLTTQAKSLGFQLVPSTT

SEQ ID NO: 510825 - protein, 402 aa, unidentified
MTTDQLWAGVDVGKEYHWVCVVDATGAVVLSRKLLNDEQAIRTVIAEIDTLGKEAVWTVDLTMAYAALLLTVLADAGKPVRYLAGRAVWQASAIYRGGEAKTDAKDARVIADQSRLRDADLPVLHPDDDLIAELRMLTARRADLVADRTRTINRLRQQLVVLCPALERAAKLSSDRGWVVLLARYQRPKAIRQSGITRLAKTLTDAGVRNAPTIAAAAVAAAKSQTVRLPGEEVAAELVAALAQEVIALDDRIKQTDADIEGRFRRHPLAEVITSLPGFGFRLGAEFLSAVGDPTRIGSADQLAAWAGLAPVPRDSGKRTGRLHTPKRYSRRLRRVMYMSALTAIRCNPQSRAYYQSKRAEGKQSIQATICLARRRTNVLYALIRDNRTWQPDSPPITESAA

SEQ ID NO: 510826 - protein, 401 aa, unidentified
MSEFNPEQYRIETVSALEVVRNAENVQVHAAYVGLDVHKDTIAVAVAEPGRAEPIYRGEIANKPKTVEKLLAKLSADYDGGLLLFCYEAGPCGYVLYRQILASGHDCQVVAPSKIPKTPGERIKTDRRDALKLARLLRGGDLTAVWVPDQEQERMRDLSRARADMKGQERKARQQLNAFLLRHGYHWPRGKSRWTPAHENWLAGLKMEHPWQQVVLEEYIAAERGAGERVAQLNDHLMRALPEWSLAPVVDSLIALRGIDKLAAIVLLAELGDISRFESPRQLMGFLGLVPSEHSTGTRRRQGGITLTGNAHARRMLVESAWSYRFPARQTKHLKGKARNASPGAKQIAWKAQTRLCGRYRALTRAGKNTKLVCVAIARELAGFIWDIVRHEMPRLTPHQG

SEQ ID NO: 510827 - protein, 472 aa, unidentified
MIHSVGIDLHQGRHRARCLDDRAQPCDSFSFQTTPEGLATLEERVFRDGANPIIVLEPAGLPWLMVAVYLRSRHPDCRLVKAKTQKVAALRRYLRGPVKTDRLDALTLAKMPFIDPEQMDEIYLPPAEIHALQRLTRQRKRLEGDITGRKVRISAIVDGYLPGVRRAFNDVWSSPVRAFLRSRLNHFAVVRDGEEALHAFLSKASPRSKWSRAETWLVFLACQSVASVCELSRPAGTVNEEFFLDLQDEIARELRLMEAEEAESESLARRIAELYQKLHPSDNLCTIPGVGKHTAPVFLAAVGDPARFPNQSAFANWEGVVPGARQSSNVEAKGLRMTKAGPSIMRMALYQAGDVGRRWDPQLAAVYYREMVYHGKNHRQAMGAVMSHLGARVLAALKEDRPYELRDPEGKLISKDEARKLILSKYHVSEDIRRERRRRNSKVSKDRETATYRTNEAAKAPQPVPVQAVSRK

SEQ ID NO: 510828 - protein, 408 aa, unidentified
MYKLFVGIDVGSRDNAVHIMLPDGEKHSSFSVQNNLGGSQTISKNVVSAMVEKGLKSLEIGIEATGVYGDGLMCFLNEDGAIGRFEKSLYILNPKQVEKFKQAYSDLPKNDPVDAFVIADSLRFGRIKTNPFQDDCRYKALQTLTRSRYHAVQNLTREKQQFMNCLFRKCSGLAQEKIFSSNYGAAALAVFEEFETPDDIANMDVDQLAAFIAEKGKNRSPRPDEIAKEVQAAARGSYRLPKTVNDSVNQVLSISISSMRAMQAQIKALDKEIERQFEGIPNTLKSIGGIGLVFSAGIIAEVGDINRFTKGQAGLAKYAGLVWSEHKSGIFEGQNTRMIKSGNRFLKYYLCEAAFSLVRCDTEYRRFYDLKYKEVNRYQHKRALALTARKFVRLVFRLLKDNRLYRPA

SEQ ID NO: 510829 - protein, 394 aa, unidentified
MTTVIIGLDVGKTNHFAMAISADGQRLFAEAVPQEEAALRTMLHKAATYGPPILVLDQSASMGLLPRAVAHDLAIPVHYLPGSTFRHVANSFPGGTKTDRRDAEIIALAGRTMPHAIRPLTAPAPDIADVRALDGYLEDLTDDITRDKNRLRGTLLQLHAPLEQVLGPRLGQRGVLPLLQRYPTPEALRQASDATLEALLRTQGSRRAPRLVAEIREALPRQTLNPTGTTRLGEAIAHRAGQCAANLAEKRRVISELETALAQNTTAQLVLTMPGYGTRTAATVLVETAGKTFASAAHLASYAGVAPTVRQSGATRQVRRSRTANKRLKDALCWSAFNTIRSGPGKELYQAKRHKGHWKAIIAIARRQVSILYAMLRDGTPYVPKLTQAPLTPS

SEQ ID NO: 510830 - protein, 507 aa, unidentified
MEVGPEHFGIVSIDCAKARSKWFFGDFYGRVLLEPASVEHRYGDLQRAITQLKEAHKQYEIKDSIVCVEMTGTYHQVIMRAFRDAGFETRLVHPFASTHYRTVEHGDIKTDDNDLVGIFRAAVNGFGLVEPVWSETYRNLQLLVRHRRDLVRKRAKVQTQFRSFVERCLPGYTSLFPDDALWQHPTGLAVLQFIAERGGTHQALTDAGIPGVTQWLKDKKCKFLSKTLERIMAWAANAAVGDPLKLTLTRIWLALLDDWKLKTQQIQQIERDVASLLVRTPYILTLSHPGINVISAAELAGEMGPIEHYAHDRAIRGRAGLFPSRYQSDKVDRGGNLSRHRNAKLRAAWLLIADNLVKCNAYWRGKYNLWTSQGTHPRDARCRVANRVTRSIFQIVAGRKLFQHPSRLDRGYVLKKLLDFHRDHDSLVPIIRDDLQAATEFLPTKSYADEAKQIAEVQRKGANSRKPEPIQLAAVLVHVLERLGVTIGEPEVKSEMLEAPVDEAQRE

SEQ ID NO: 510831 - protein, 393 aa, unidentified
MYKYFICIDVGKFNHWANVMTPDGEILVDPFPFSNDNNGFRKLQKAIDPYLKKDHLVGMEDTGHYGDNLRIYLLNHNATVAMINPVSTDAMRRASLKSAKTDKEDTRNIGIVLLNPQLYRIVKKKDLDPHIMRELTRYHHNMQEACTRYKEQLQKDIDKVFPEFNSLFSASYGPAYMRILEHCQSAYAIAHTDIRTLRNIIRPKGTTGRFPQFSAEQLKQLARDSVGQPDMIIEMEIRHLVGLIRQITEDLKEVDKKIEEYSHELNSPILSIPGISHFSCTSIVTEIGSIDKFDNPYQLISYSGTNPIVYQSGQFTARMTRISKRGSKYLRKTLYQIIQPVIDNNPVFKAYYQKKISQGKSHRCAQGHCARKLLRVIYHILKTGQTFDPALLH

SEQ ID NO: 510832 - protein, 392 aa, unidentified
MLTCQEDGQADKETRRFATVTDDLLQMSDWLQTKGCTHLAMESSGVYWKPIFNLLEGSFKVLVVNAQHMKAIPGKKTDVKDAEWIADLLQHGLLKASFIPGQDQRDLRDLTRYRTTLIQERARLTNRLQKLLEEANLKLSSVLSEVLGKTGRLILHALASGETDPEKLADLALERLPQKRAAIAQALGGRFRDHHRFLLQELLEAIEYHDRAIARLDAHIAEHLRPFQETIQRLDEITGVGRGCLETLFAEVGSDVTPFPDAAHVASWAGLCPGNNESGGKRLGGRIRQGNHWVKIALVQAAHAAAHTKNTYLGAQYRRLKLRLGAKRAAIAVAHSILLIYYQMLATGESYHEKGGDYFLVRDQQQVEHRLVKQLERLGHKVILLPNAQASA

SEQ ID NO: 510833 - protein, 353 aa, unidentified
MEHFIGCDAHKKFSVFASMNEKGEYGRTIQVRHDLEMFREFLKELPAGSKIALETSGCYYWMVDEMERAGHLPQLAHALTAKRRMEGRHKTNDRDARGLAMLLRNGTLPVVWIPPAELRDQREMLRWRMYLSRMRTQVKNRIHGVLQRYNVDIAVSDLFGDGGRVKLLARLGELPPHNQESVLGQLKTIDSVETQIGECERILGEILYPSVERDLLDSLPCVGKILSAVMALEIGDVRRFSGPDRLVSYAGVVPVARESADKKRKDKCPRDCNVYLKWAYVEAANLISAHSKHWADRHVVQLYQRVKESTKMHGKATTAVARHLAEASYWMLSKQEVYREPQNKWQVLSSTHG

SEQ ID NO: 510834 - protein, 390 aa, unidentified
MSTKGAAKRTLIQVAVTTRDFMMGWTPPTALMCQGGGVEHHLREGSVSEAIIIGLDIAKYVFHAHGVDGRGRAIFSKRITRRKLLDFFVAQPSCTVALEACGGGHHWARLLTQLGHEVRLIPPAYVKPFVKRQKNDAIDAEAICEAAQRPSMRFVAVKSEQQQAAGLVFRTRDLLVRQRTQLINAIRGHLTEYGWIAPKGPSHVAMLAELLEEEEMASSLPEAARAMFRLMLDTLAGLGSKIADLDKEIARRAREDEVSRRLMTVPGIGPISATAIAALAPPAETFAKGRDFAAWLGLTPLQRSTGGKQKLGATSKMGERTLRRLLIIGSSAIVLQASKRGAPKGSWLEQMLARKPRMLVTVALANKMARIVWALLVKQENYRALVAAKA

SEQ ID NO: 510835 - protein, 348 aa, unidentified
MRFYTQQHRYTCGIDLHARSLYVCILDDTGQSIIHKQIKASPGALLKLIQPYQDDLIIGVECMFSWYWVADFCAQHDIKFVLGHALYMKAIHGGKAKNDKIDSDKIARLLKGGMFPMAYVYPRPWRSTRDLMRRRMRLMHQRAELIAHIHNTLSQYNLPPNTDNLRYAKNRVQFRELFPDTSVQRSIDLDLDRIDFYDDLLSKLEWYLKKTARSIDPNTIIRLKSIHGIGDILSLVMLYEIHDIDRFARVQDFVSYCRLVKCQRESAGKIYGTAGAKIGNAYLRWAFGEAAVLFLRGNPDAKQWLEKKTRKYNKAKALTILAHKLGRAVFYMLKRKTLFDQDKFLALG

SEQ ID NO: 510836 - protein, 388 aa, unidentified
MTSSAPITCSIYVKAIVLYYLLHVVQINGYQNPCKLMKTETTALIPKLYIGIDVHKKSWTYHYQTDLFDGKTITQPANPQTLVDWVGKHYPSHEVTCAYEAGFSGYSAARLFQKQKWNVLVLNAADIPRSQKQSIVKTDKIDCRNICKQLKNEALKSITIPEEQRESFRSLFRERNNFVEGLRHIKLQIKSYLMYCGVTIPEEFDNANWSKNFIEWIRQQSQPYETGTLKITFLLKRYDFMYQETLAISNQLRAYARKNYKKDYDLLRSVPGIGGITASAILAELGDLRKYNRFDDLASSVGFVPGIYSSGDTTIVKGITPRAKSLLRSYIIEASWQAVRFDPVLQEYYRSHYGKQPNKIIVKVARKLLSRIHAVIKTETSYQIGVIK

SEQ ID NO: 510837 - protein, 425 aa, unidentified
MRKIGLDVHRDFCEVAIAEGGRVRLAGRVATDPAALTLFAESLVSSDEVVLEATANAVAIARLIEPHVGRVVLANPKAVKAATGLRAKTDKIDARTLAQLLAGGFLARVWTPNEPTVVRRRLVARRAQLVRHRVREKNQVHAILQRNLVPRPPMTDLFGVKGRRWLAEQLECLPEAERTMASACLRQIDFLGREIDLVDRDIARQALDSPEIRRLMTLPGVSAVTATALMAAVGDISRFPTPRELVGYLGLDPRVRQSGTEPARHGRISKQGPGNSRGLLVEAAWHAARTTGPLRAFHQRIAARRGANVATVAVARKLALIAWHMLSRDEDYAFARPSLVREKLRRLELMLGASRQQGKKLTGAGRSFATVEGRRLEKELATQQEAAYLRLVSDWKANRPKAGAGATPGRASQKPSKGKAARQTH

SEQ ID NO: 510838 - protein, 343 aa, unidentified
MAYFAGLDVSVKETSVCIVDDAGKIVREARVASEPEALLQVLTNTIYRFKRIGLEAGPLSQWLYSVLAEAGLPVICVETRHMRAMLKAQINKTDRNDARGLAQMMRVGLYRPVHVKTLRSQKLRVLLTHRKLLQSKAIAIENDLRATLRNFGLKVGMIGPVKYEMRIRELVENLPDLAVLVEPLLIVRRVIREQLGILHRRLQVIVRDDDVCRRLMTIPGVGPVVALTYRATVDVPARFRNSKAVGAVFGLTPAKYQSGENDRTGAISRCGDEMMRMMLYEAAQSMLVRSAKWSWLKAWAMKIARHRGMKKAIVALARRLAVIMHRVWVDGTAFRWTREIAPA

SEQ ID NO: 510839 - protein, 346 aa, unidentified
MQNDTLAAVDIAKEIFEVGVSDRPGRVVLRKRLPRDGFLEFFAQLPRAMVVMEACGSAHYWARRIEELRHVVVLLPPQYVRPYVMRNKTDRTDVDALLEAFRNEQIRPVPIKTVTQQILATLHRLRSGWLADRVRAINTLRGLLRELGFFIPEGRKHVFPEAWEIIQAHRHGLPDALKPSLAALCEEIASLSTRIEDVEAQLEALARQIPALARLRSVPGIGLLSATALYAFIGDPSRFPSGRHMASFVGLTPREYSSGLRRHLGRISKRGNAYLRMLLIHGARSVLWHAKRMKHRDRLRSWALRLEPKVGHNKAAAALANKLARITWAVWKNDRDFEIVPEPQAA

SEQ ID NO: 510840 - protein, 346 aa, unidentified
MATVPFFVGIDIACDDFTVAIVDQPGHVIGAREKIPNRSDGFHDLDAWLGQQGVTMETCVVCMENTGVYGEALCYYLAAAGYRVAVVPPHHAKKRFTTLSKTDRIDSKQLAEYACRYYDQLHFWRPREPVLEQIKVLYATREHFTRQLIANKNALTALERKVVQTPLAASSYRGMIAEITRRIKALDKEIGKLINDNPAYKQLSGLADSVPGVGQPLANSLMVITEGFTTNLDHKKLCSLLGLAPHEHQSGKSISYRPRSVGHGNPRIRKLLHLAARSVATHVAEFRHYFLRKLAEGKPKLLIYNNIANKLIRIVMAVVRSRTPYIKGYRSVNPIYMASKTPSLCH

SEQ ID NO: 510841 - protein, 360 aa, unidentified
MKKVSKQMRKMEAADKPELILGLDMGDRYSHYCLLNADSEMVEEGRIQSTEAALRRHFEGDPPMRIALECGTHSPWVSRLLTALGHQVIVANARKIPAITGSESKNDKNDAEKLARFAAYDPQLLSPLQHRSPERQLDLNLIHARSTLVRARTMIVNALRGLIKSAGGRLPACSTESLPARAPAAIPAALATVATPLIEQIALLNAQIGGMDKQVEKLGAKYPEIKLLRTVPGVGPIVAAAYVLTLDRPDAASNRSAGAFLGLRPAQSQSGDSDPQRRISKTGDRCLRSLLVQSAQYILGRFGPDSELRRWGLKLAATGGKRGKKRAVVAVARKLAVVLHAMWRNGECFQAFPQPATIAA

SEQ ID NO: 510842 - protein, 344 aa, unidentified
MKHRYHIGLDAHSKNSTFTVMDNRGRVAQRATVATNETELLGFVRSVRGTKALTFEETMISQWLYVLMKDEVDELVVCDPKPNKRIGAKTDKIDALELADLLRVGRLKPVFHTCDERAELRTLVSGYYDLVQEIVRTKNRYSALYRQSAIRIGGPKVYTDARMVNALPTKTQRFVAKPLLEQIELLERHKTVYKKKFERNMTRFREMRLIKGIPGFGPIFANQVVGIVVSPWRFATKYKFFSYAMLVKHRQLSDGVAYGNRKAFGNIQLKSIFKMAAKSACKSDNAFGRKYRRMLSEGCTEKAARNAVARALAATVLGVWKRGKKYNDHHREVEPRPRGCRIRT

SEQ ID NO: 510843 - protein, 362 aa, unidentified
MRMKTHPQYFISKSRRSSNAGMTIGIDLGDIWSHYCTLNEAGEVVDRGRFRTNPSGVGKRFRDLERARVAMEAGTHSIWVSEQIRELGHEVIVANVRELRAISHSDRKSDKVDAEKIARYARLDPEILRPIAHRTVAQQETLTLVRARDVLVRLRTGAVNSVRGLAKPCGYRLPASSTLTFAKRCLAVLPPGLAQALGPLLHQIADMTVKIKQYDREIQRLTETAYPETQALVKVYGVGHLTALTFVLTLGKKERFQRSRDVGCYLGLRPRRSQSGDSDPQLGITKAGNGYLRQLLVECANHVIGPHGKDSTLRRWGLSLGARGGSHARRRAVVAVARKLAVLLHRIWITQEVYVPFYEVAA

SEQ ID NO: 510844 - protein, 346 aa, unidentified
MDHLGIDLHKRDSQICWLKDTGEVVERRIRTTRERFVEVFGGQPRAQILLEASTESEWVARCLEGLGHQVVVADPGYAPMYPRRGARQKNDRRDAQALAMASRAGTYRAVHRVSPAQRAVRDVLTVRAQLVTSRTRVIATVRAIVRGQGQRVPSCSAEGVVGQVEALGLAEPLAGTLRPLLTVLSTLTAGIEASEAQLVTLTGDDRRVRALQSVPSVGPITAAAFVATVDDVGRFRDAAQLTAYLGLVPRDRSSGEGHRSGRITKAGPARMRWLLVQAAWRLLRTKAAGAQALRRWAEALVARRGKGIAVVAVARRLARVLFALLRDDSTFVPDHEARRQAARAAA

SEQ ID NO: 510845 - protein, 410 aa, unidentified
MRYYLGVDWADQTHAVWVVEEKGTKTAARTVPHTAEGLSEWGRELDEWRAQGIELWAAIERREGRVVDFLLDHGVVVYPVNPKALDRARDRFRQSGAKSDPFDARVLADFLRTDHTHLQALQPSSEAAQELKLLTEDYQQQIRQQTRLVNQLTATLKAYYPRALEIAALPTPLAREFLQAYPTPEAAAALTERQWQRWARAHRLSETRTQALWDVLQQPQLPVPVHVLRAKARLMRSLVAQLTLVVAVVEEYREAIEDFFARMPAAQWARTLPIGKHGITAPTLWARLGDAPGRWESFRHLQAHAGAVPVTKRSGKQQRVIQFRFACDKALRYVIDHVAFLSLHSSVWARAYYDQQRARGHAHRQALRALAAKWLKIIFVMWQHQVPYDEQYHLATMTRQQLRHGQKHIA

SEQ ID NO: 510846 - protein, 325 aa, unidentified
MQTQTNYTGIDISKSFFDVAFMQADRYVYYKFSNDGDGFRALLKVVSPGSWVVMEASGPYYLQLACFLHDADVAVSVINPLVIRRFSQMRMSRAKTDKKDAKMIAEYGKMEQPVLWHKPEQHVITLQQTEALLARLQTEHTALSNQLESFNSSGMLAKGLRKEISGELAHKYQLIKKLNKQMEQIAKAHYSDMLADLESIPGVGKKTAMMLTVVSGGFARFDDYRKLSSYIGICPRIFESGTSVKGKARICKMGMSRIRATLYVCSWSASKCNKACRELYERLLAKGKAKKLALIAVANKLLKQAFAIAKQQTKYQENYSNIICF

SEQ ID NO: 510847 - protein, 372 aa, unidentified
MSIGVDLHKTQFTVCELSEDRKIVEFREYPTNDSGYEEFIKRLNNLTERGYEVSTAVESTGNTRYFKNRIVTAGVLVIVVNTLKFKVVNESVKKTDRHDARTLAEFLEKDMLPESHLCSQESEDIRRVLKSRAFLVKTVVALKNQVHALLLSYGVETKKGQLQSKIGRQRILDGLEDHKSFGSAAKAIKPLLDTINQVSIEVKKLEKVLNELVKDDEDVELLKTIPGVGPITASIIRAFTDDIQRFESSKKYAAYAGLVPWVQNSNQTIHHGKITKRGPVELRTAFVQVVMGMVRSQKKTQSYRIIRKYRYMKTHKGSGKSIIATARKMSTVIYTMLKNREPFDELKMAYVTEYKEIQAAVFDAALAEDKSA

SEQ ID NO: 510848 - protein, 354 aa, unidentified
MKRARKELQAGDRVFVGIDLHKKQWHVTARTAEFELFSGSIPGHWKALQRILDRYKGHQIATVYEAGYFGFWLHDHLIEYGAECIVTPPSLIPQEYGNKVKTDRRDSRKLAHFLAKEMLKRVWVPTKKERYHRQVSRRRRQLVGDRIRTQSRIKAELKLFGIDLPEPDGKWTKIYLGNLGRIRFNNRWMQESFNCLLEQYHFLDGQIVKQTKLLQELSKTALYRERVELLMTIPGIGMIAAMELLLELQDVRRFQRADQLAAYVGLTPSQYTSADKVRMGRITCIGKNSLRATLVQASWALIRKDGVMQEKYDRLKSRSGGKRAIVAVARTLLIRMRRMLLDNNPYVIGLIAAN

SEQ ID NO: 510849 - protein, 390 aa, unidentified
MFAGIDVAAERPVLARLDDTGESIGRPTPFAEDASGYRLLLDALGAPPALVVIEATGHYWKNLYATLAAAGHDVVLLNPIIARRFQEAQLERTKTDAIDALALARLGFEKRPVPTRLHDAASEALRELVRHRDRLRQEFDDRVRQLHRLINLGFPEFTRHVKGLDTMLATALIAECPTAEIFARTDPRRLARLRYDGRHKVGLDRAERLVAAAKRSVGQHRGPVYEMQARHVCQDLDLWRRRLKEIEADIGGLLDAHEIGRLLTSIDGIGPHSAARIIAAVGDPARFRSAGAFAAYVGVVPGLRQSGKRMAARAPTTFGNAKLRRALWMTVLAAVRINPWLKAFHDRLRGAGKPPKLALIAAMRKLLHAVYSVAKSRNPFVISTEQARAA

SEQ ID NO: 510850 - protein, 430 aa, unidentified
MFTLKKADLLSTLFVGIDISSRENVVAIMDFESTKPIASFAVPNNEPGVEEMVTRIYEYLTPKSGLDRLVIALESTSFYGVHIANYLSTCPRLMPFHTEVYCLNPKSIANYKKSYIGLSKNDYIDAFVIADFARVGRITTKPWRGCQYLALQRLTRHRLHLVKALSREKTYMLSNIFLKFSEFNLLDVEEQPFSNEFGATASAVLTEFLSTEEIVDMPIETLVEFICEKSRNRFPEPQKTAQLLQAAARNSYRLDKCLYEPLTVAIASSFTMISTYNAEIKKVNKAIENTIKGLNPNAFQSLMSIPGIGPVMAAGIMAEIGDITVFKSQESLAKYAGLVWRETQSGQFRADDTSMSKAGNSYLRYYLLEATSHMKLHCKEYSEFYYKKYAEVKTHQPKRALALTARKAIKLIFGLLAKNQLYSGNRVGQA

SEQ ID NO: 510851 - protein, 346 aa, unidentified
MLYVGLDLSRQKLDVCVLDEDGRTVETLAVRPDADALRTLAARIARYGEPVSAAIESMTGARFIHDQLELAGWDVEIADAAKTKGLAPLAAKTDKIDAHVLAELARRELVPAIWLPDPSVRAERERARFRLHLVRHRTALKSRIHATLMTFGHPVPVSDLFGLRGRELLDSLAILEPWATTLARSLALVDELDGEIARSEAELRRLGADHPYVPLLTSIPGISWILGYTIASEIGDISRSASPKKLAGYTGLCPRVYQSGAMDRRGALAKNGPKYLRWALIEAATQAIRDPRYGARYQRTKRRLGKQRGSKIARVELARELTTAIWYMLTRQEPFRAVGPTCGLVA

SEQ ID NO: 510852 - protein, 420 aa, unidentified
MKESKVSDFSTLIGIDWADNKHDICERTLDHKGYHYSVISSSPKSIHSWALGLKVRHPNKPVAVACELQKGPLVHALAKYEHIVLFPINPSTVAKYRDAFTHSGAKDDPSDARIQTEILENHMNKLRVITPDTADIRALAQHVENRRKLVQDRVDLTNKITATLKNYFPQILEWFPEKDTIIFCDFLLKWPTLSAAKKARKSTLLSFFHQHNSRYPEANDRRIEAIKEAIALTDDRAVIEPNQLMIEIFIPQLKLLIESIVQMDKVIRKYYRAQSDRVLFDSLPGAGPHLAPRLMAAMGSNRDRYQNAAEIQKYVGVAPVIERSGKKSWTHWRYSCPKFLRQTFVEWAGHTIKYSFWAKAYYHQQIEKGKSHNTVIRSLAFKWIRIVFKCWKERTAYDESKYLEALKAKGSPLLNYAVNG

SEQ ID NO: 510853 - protein, 353 aa, unidentified
MNATTVGVDLAKNRFELAIRVGEDQPLRRERLSRQRFARFFSNFPPSLIVMEACGSAHFWARTLVAQGHEVWLLPAQYVRAYVRRNKTDAADAAALVEAARCPDLHPVPIKAIEQQQVQQLHRGREQLQSTRTRRINLLRGMLREFGIAVPVGLARGRTAVREALEIADNGLPDLLRPMIAETLQEITALTERIARIEATLTALSRTDPVVQRLLKLPGVGLLGATALRAAVGDIQRFPTGRHFASWLGLTAREHSSAETRRLGRISKQGDTYLRTLLVHGARSALCAAARAHSQARPLDRLRLWALATEQRRGRNKATVALANKLARIIWATWRYQRPFAGDWPTRLEATPG

SEQ ID NO: 510854 - protein, 350 aa, unidentified
MTQFSKIIGVDLAKTVFQLALADAHHHVTQSKRLNRTQFHTFFVNHPPAHVVMETCGTAHYWARTLMAMGHTVTLLPAQYVRPYVRRNKTDANDAMALVEAARNRDIRAVPVKTEYQQALQSLHRLREQWKTTRTARINALRGILREFGVLVPLGPRAAITTTRASLDALPLLLNTSVQAVLDELTDIQARITTLEKQLKQAAKEDGVIQQFMTINGIGLLSATAMRASVQSPAQFKNGRQLSAWLGITPREYSSGNQRYLGRITKRGDKYLRTLLIHGARSVMARNKIRQRNNEKLNHLQQWAIQLEQRVGHNKATVALANKMVRILWATWMHQREFDGNYAGQQLNAV

SEQ ID NO: 510855 - protein, 407 aa, unidentified
MANKIAGIDVHKKVLMVVVMDPATADKPERQRFSTMPTELHHLSAWLRERGVEQAVMESTAQYWRSVWLELEPHMRLHLAQAFSNRAPRGRKHDFKDAERLARRFIAKELILSFVPGEEQRIWRNLTRMKLQLIRDRVRLHGQIECLLEEMRIKLSVVVTDLFGASGLRILHALAQDETDANKLALLGDERLKCSEEQLIEALTGRSNAVHRQMLGLQLERLRQMNEQIATLNMMIAQAMKPYQDAVIRLAEVPGFGIDSAQQVIAEVGPTAATFSSAAEFTSWVGTCPGKEESAEENRSSRCAKGNKYMRRILNQVAHAAARSKGTHFQAVFRRLLPRLGYLSAIWAVAHRLCRMVWKILHEGVRYIEQGIAYEPKLLIHRARYLARQLRKFGYDLQVTAPNPATP

SEQ ID NO: 510856 - protein, 406 aa, unidentified
MNMNAVGIDVSKRKSTVAILRPGGKAVGKPFDVPHLFADFQSLIKRIRELDGETRIVMECTGRYYEPVARELSQAGFFVSAVNPQIIRNFQGQDNPLRKVKTDKADSVKIARYTLDSWANLKQYSLMDELRSQLKTMNRQFDFYMKHKTAMKNNLIGLIDQTYPGANAYFDSPAREDGSQKWVDFIDTYWHVDCVRKLSLTAFIDHYQKWCSRKKYNFSKSKAEEIYGKAKELIPVLPKDSFTKRIIKQAVGQLNAASQTVEQLRSLMNETASKLPEYPAVMAMKGVGPSLGPQLMAEIGDVTRFTHKGAITAFAGVDPGVNDSGDYSQKSVHASKHGSPALRKTLFQIMDVLIKTKPDDAVYLFMDKKRAQGKPYYVYMTAGANKFLRIYYGRVKEYLAALPTSN

SEQ ID NO: 510857 - protein, 333 aa, unidentified
MTTLKKFTYFIGIDVSRNELDFAVMQGNSFLFHREIKNEDTEIKTLLSEIKTLPKFTRSRAVFGLEYTGVYGSHLLNALKRFKSNIVQENALFIRNSLGNIRGKHDKIDSIRIAQYLYKNKEHLRLWQPKRMVLQQLAYLSVIRNRLISFEKTLTSRFKEDGDFMNKKILMNSKQLCNDTLQSLASDLKTVNDKISELIKNDNNLDRLHNLIISVPCVGTVTAVQIMITTNEFIDISDPKKFACYAGVVPFKNDSGQVERRGKISPMANKKIKALLQICAIGAIQHVPDLKAYYIKKTTLEGKPKMMVLNAIRNKLVLRIFACVNQNRIYQTT

SEQ ID NO: 510858 - protein, 337 aa, unidentified
MKFCGIDLHSNNSVVVVTDETDRVLVSRRCPNELTPILSLLEPHRDELVGVVVESTYNWYWLVDGLMAAGMDVKLANPVAMKRYDGLKHSDDKDDAVFLAHLLRLGILPTGYIHPPQERALRDLARKRIQLVRTRTQHILAVENIAARQFGHGFSCNEIKGFSAASVDRLGLPTDVALAMNANVAVIQALEAQIAGLEARLLQQAKLRPEYLLLKTMPGVGEVLATIIMLETGDIERFAEVGHFASYARCVKSARYSNGKKKGEGNAKNGNAYLIWAFIEAANFARRFSDDAKRFFERKKAKSNGVVATKALAHKLARATYHILKEKQPFDAKRCFA

SEQ ID NO: 510859 - protein, 342 aa, unidentified
MYYIGLDVHKKTISYCVKDAAGCVHQEGKIGSTRRELDAWIGTLPQPRTVAMEATIFPGWIYDHLLPHAEAVKVAHPLMLRAIAAAKKKNDRVDAAKIADCLRCDFLPECHMASTAIRERRRILRYRGLVMRQVVQMKNRVSGLLMETGVEHNRSRLHKVGYFRRLMAISSEIDSIRPLLRISRDTIERCQKTEYALVSSLERDPLLKDRIRRLRTVPGVGPITALTWALEMGDISRFRSINQAISYCGLCGDQRSSADKMMRMPLSKQRNKHIQHVLVEAAKLAPRLSPELALVHQKAMERSNNRNRATLAVARKIVAWLLAVDRENREFIPAEQREMRAA

SEQ ID NO: 510860 - protein, 344 aa, unidentified
MQITTIGLDLAKSVFQVHCVDEHGHVVKRRKLRRGEVIGFFAALAPCLVGMEACGGAHYWARRLAQFGHEVRLMPPQYVKPYVKTNKNDARDAEAICEAVRRPAMRFVPVKSVEQQAVLSLHRARQGFVRARTAQSNQLRGLLAEFGLVLPAGMAQIRGQVVALVESAQELPACMRQLVGMLLENFKAIDAKVKELERQILDWHRASEASRRLEAIPGIGPLGASALVASIADASSFKSGRQLAAWLGLVPKQDSSGGKTRLLGMSKRGDTYLRTLLIHGARSVIRAEQQKKRPNPWLASLLQRRNPNVAAVALANKNARVLWALLVHDRPFRADYVSSPPLAG

SEQ ID NO: 510861 - protein, 342 aa, unidentified
MEHYAGIDVSLECSSVCVVDANGKIVGETKVASEPQALIAWVGSLGFGLERIGLEAGPLSQWLFAGMKGASLAVELLETRHVRKAFEAMPVKSDRNDARGIAQLMRLGWFRPVHCKSMSAQETRSLLTARKLVQSKLHDVENSLRGILRGFGLKVGKTTGQKFAGRIEELVAGHPHLQTIAKALLAVRAVLRAEFAAFEKQTRRMVRSDMQARLLTSVPAVGPIAALTYASAIDDPARFKSSKQAGAHFGLTPKKHQSGETNYTGRISKIGDASVRTALYEAANVMLTKPVKGCSQLKSWAMRIKRRAGTNKAKVALARRLAVIMHRMLADGAPFNAAAAAT

SEQ ID NO: 510862 - protein, 314 aa, unidentified
MDAIVVGIDVSKDKLDIAVLPQGQTFAISRDTKGLDGLIARLKPLAIEAVAVEATGGFEAVVAASLAAEGLPVIVVNPAQVRAFAKALGQRAKTDPIDAMVIARFAMATKPEIRPLPDEAPRFLNDLVCRRRQIIEMIVAEKQRAMRLSNKRLQQSIARLIKALEKELAGLDTDIDARYAVRRPGASPGVGKSTVRTLLAVVPELGALRAGEAGSIVGCAPFTRQSGLWKGKSFISGGRPAARSALFLSALVAMRHNAQMKGFYERLVGAGKAKKVALIAGARKLAVLLNAILRDKRPWRFSSNQGLAYAEASI

SEQ ID NO: 510863 - protein, 352 aa, unidentified
MEIATVGIDLGKTVFHVVGLNAAGETVVRKKFSRTQLLRFTGNLKVGLIGMEACAGSHFLGRALREQGHEVRLMPAQYVKPYVKTNKNDYIDAEAIAEAVGRPRMRFVPIKSDEQLDMQSMHRARERWVRNRTALLNQIRGLLLERGITIRKGRRHAEEALPTILEDAEASLTGMMRQLLGRLTSELKQLQVQIAEIDAMIADKADDQEACQRLMAIPGIGPITATAIVSAVGNGAEFRKGRGFSAWLGLTPAEYSTGGKQKLLGISKRGNGYLRKLLVHGARAVLQFRDKQSPGLRAWLGQLVSRAHRNVVTIALANKMARMAWALLAKGETYRPPSMANNMEAAAPQLIA

SEQ ID NO: 510864 - protein, 329 aa, unidentified
MQHEPVTDAALPAPGLPVAGTDVAKGQLDVFIDIIGRRLQFANDDAGAARLVATLVEHKVRLVVIEATGRYHRRVAAALLQGGVGVAVVNPQQVRAFARAAGKLEKTDRIDAEVLARFGRAMNPRATAKTPESQAVLSDLVSRRRGLVQMRVAESNRAHGQLPKLAATQSRKLLRLIEQQVEDLDREIAKLIEADDDSSNKARIIDSVPGIGPGTANQLLVGLPELGKLNRQEIAKLAGLAPLNCDSGQYRGQRRIRGGRADVRTCLYMAAFNARQKCARFKQYFDALVARGKLYQVAMTACMRKLLVVLNQMVKNKTRWNQNLTGALA

SEQ ID NO: 510865 - protein, 386 aa, unidentified
MRKSSALHVGLDVHANSIDVTAAETGAGREVRHVGSIGGDLASLDRVLRRLRSDGAKLHVVYEAGPCGFVIARHLREQAIDCEVVAPSMIPRRPGERIKTDRRDSVKLARLARAGELTPVHLPEQADEAMRDLSRAREDAIRAQRAARHQLKALLLRNGIRYAAKSAWTAAHRRWIARLKLPDPVQQIVFQDYVNAVEEATRRVASLSEALEAQVKHWPRAPLVRAYQALRGVQLVNAVCLAAELGDLRRFANARELMAFVGLVPSEHSSGENRRQGRITKTGNAHARRALIEAAWHYRLPARVTPIIARRWDGLPKSVTDIAWKAQLRLCARYRRLAARRLLAQKVVVAIARELVGFVWAIGQIVESRTETAQRSTSTITRSLTG

SEQ ID NO: 510866 - protein, 397 aa, unidentified
MLAQSNPRSYCAAEFDLFLGMDVDKKSIDFTCADSKRIIRSVHIPNDAEHLIRYVRKHFPDQKVLFAYEAGPTGYGLYDGLTAGGFGCLVSPPSMIPRAPGQRVKTNRLDSKKITEALRAGQLKGIHVPSPTYRHLRHLTKVRDLVARQIAGNKCRIKALLLFEGIPFPEAPQKSHHWSRSVIAQLQKLPCSGGVRFRLDRLLEAFEFQRQQYLKITRELRIFCRQDPELKRCLFYLTSIPGIGQIVAPHLLARIGSWQNLQEHRVDELAGLLGLVPTEHSTGDRVHRGSITHGGDGRLRSKLIQSAWTAIRQDPELREFYRSVCRRNPQHLAARKAIVAVARKLTTRIFAVLKEQRLYTFRSQVHSRPLLPGEIGPRERLDATQKEEENNLPSFVS

SEQ ID NO: 510867 - protein, 343 aa, unidentified
MQAITTIGLDIAKSVFQVHGVDAEGNVVLRRQLKRRYVLTFFQKLPPCLIGIEACASSHHWSRELQTLGHTVRLMPPAYVKPYVKRHKNDSTDAEAICEAVARPNMRFVETKTPEQQSCLTLHRTRHLFIRQQTSVINAIRAHLAEFGIVAPVGRNGVEQLLGVVADESDKRLPEVARACVTALGAQLQMLKAQILQFDRRIMAWHRSSETSKRLDEIPGVGPALATALVASVGDPKAFRSGRDFSAWIGLVPKQNSSGGKERLGSISKRGDRYLRSLFTTGALAVIRYAKIHGAKHRPWLTSLLARRPTKVAAIALANKIARMAWAMMVKGERYKEPAALAA

SEQ ID NO: 510868 - protein, 373 aa, unidentified
MAAQIDTNLNLNIAGADLHVDNIYVTYDRLDRSVITKVFRYEREDLIRLAEELLSNAVKKVFVESTGSYYFPFALTLESRGIEVYIFNAFKTKNPDIDKRDDLDSAWLYALGKTGRVKASRPIDANMIALREAVRLRFKVADMIAASKKRIEAMLWRFGFIAKGVSKRLEGRRFREALKNALKGRVSKKFKNCSLIVWIAERARSGFQGFDLILNELSELEHLIKRREWLDEKIRELAEPYRDQIKVLMSIPGIKFTLAVAILSEIGNINRFPSARHLVSYAGLRPTLRQSGKKRRHRRTSKKSNSRLRRFMYLAATAAMRSKDHRVRAFVARLRARGKHYKVIAVALARKLLYIAWFLLVRGECWRSVTPIR

SEQ ID NO: 510869 - protein, 337 aa, unidentified
MLAEEVDYVVGVDPHRDRHALAVVEVVSGALVAEAAIAASGVGYRQALELAEAHAPGRRAWAIEGTGSYGAGLTRFLQQQGQLVLEVGRLPRARQQRGKNDALDAARAARSVLGRPRASNPRRGERREALRSLLVAREGAVEAKKAALCQLRALIVTCPEPLRHELARLSRARLLARCARLRAGNDTDQGCRAALRSVARRAQALSDEERQLKQEIETHVRTLAPPQLLAERGVGPISAARVLLAWSHPGRIHSEAAFARLAGSAPLDASSGQTIRRRLDRGGDRQLNRALHTIIINRRKHDPKTIAYIQRRQHDGKSSREATRCLKRYLARHLYRL

SEQ ID NO: 510870 - protein, 311 aa, unidentified
MTEHNIGVDISKSYLDVFRLENNKAQRFDNSAAGFRALTKWLGEAPVARIVFEPTGPYHKAFEGAFGKTFPLVKVNPLQARRFAQAHGTRAKTDAVDAQMLARMGAAFDLKPQAPCSKETLVLKDLHVARAVLIKDRTRLRNRAQTQDIALLKRQTKARLAQVERQIAELDAEIAALIEAHEATARNRDILCSMPGIGAVTAAAMLTLLPEIGRLHRKQVASLTGLAPITRQSGQWQGKSFIGGGRKPLRDALYMPALVAMRFNPDLKVKYEGLRAAGKPAKVAIVAIMRKLIETANALVKADRTWTPKNA

SEQ ID NO: 510871 - protein, 352 aa, unidentified
MNQLKYIGMDVHKAMTVISVLNSEGKELAQAIIETKSTTIIDFIHGQRGTLHVTFEEGTQAAWLYDLIRPHVASVLVCDPRKIVTRGNKADKIDARRLAELLRTKGLTAVYHGEHSTRAVKELTRNYQEMMEDSTRVKNRLKALFRARGIDCTGSAVYSPDERKTWTDKLEQAAVRARAGRLWEELDALEKLCEQAEDDLKTEARKHAAIKILQGIPGIGPVRAAVILGIAGTPHRFRSKKQFWTYCGLAVTSKITSEYQMVDGRISRSKKQPLVRGLNRNYSRTLKDVFKGAAKTAAAGAWKFHFDAMVANGQGPPLALLTIARKIASITLALWKRGERYDQKKVEILHAA

SEQ ID NO: 510872 - protein, 428 aa, unidentified
MAYAIAGIDVHKRMLAVVVSDLAADGEDAFERRQFGSTPAQLRLLADWLSEHPVNEVVMESTAQYWKPVWAALERHWTPRARARAGAGPMAGTLHLAHARSNRARRGRKRDFTDAERLVKRLVAQELTLSFVPAPEQRLWRTVTRTKVQLTRNRVQLQNRLEALLEQAHLKLSSLVSDLLGVSARRMLQALADGATDPGALAALADHRLRATPEQLRDALEACQELSPVYRRLLKMVLEELQLLDSQISRLDQEMAELLCPYQDQVQRLAEVPGLGVDSAQQILAEVGPTAATFPSAGQLASWVGACPGEHESAEVNYSHRSPKGNRQMRRLLNQAANAAVKSKGTIFEILYRRYVPRLGHPQTIGVIAHRLCRLIWKILHQGVRYEERGPALSQKSKRHRTARMIRALRSFGYRVELASAQSTVVPA

SEQ ID NO: 510873 - protein, 343 aa, unidentified
MKLMRIGVDLAKNVFQIHGVDHHEQPIWRQRLPRDRWLQTVLEKIEPGCEIGMESCGDAHHWARQLQAHGFRVRLIAPQFVKPYVKSNKNDANDAEAICEAMSRPSMRFVAVKTIEQQDIQATHRIRAGLIEQRTAKANQIRGLIAEYGLVAPKELLMLRRAIPCWLEDADNGLTARFRRLLNGLWDDLRALDYRVRELDGEISAIAASDPAAARLQQLRGVGPMISTALVAAIGDASQFDNGRQLAASLGLTPKQHSSGGKDRLLGISKRGDAYLRTLMIHGARSALRTAKSKDDRLSQWAVRLAERSHPNVAAIALANKTARMAWAMLRNGTDYQPDRAAA

SEQ ID NO: 510874 - protein, 468 aa, unidentified
MRDWQKMNQKQRKQLFRQVSVEDPGLDVIHPNAAGIDVGNASHFVAISPKRDSQPVREFGCFTEDLRRLAEWLVSHGIQTVAMQSTGVYWIPLYDVLEEHGIEVFLVNARYTKNLPGRKTDVQESQWLLKLHTYGLLSNSFRPPAQILAMRTYWRLRAEHVREVSTTILRMQKALTQMNIQLANVISEISGVSGMAIIRAIVAGERDPLKLSQLRDRRIQATPEQIAKSLEGNWRQDLLFALSQQLLNYDHFQKQIQLCDEQLRSHFQSLPATHRPGQTAGAPSAAKLRTKKRKKPHGNAPSFDLAAELKRILGVDLTLIDGINVMTAQTVASEIGYDVSPWKTEAHFASWLGLCPDNRISGGTVLARTTRHVVNPISNALRIAASTLLRSQTYLGAQYRRLRTRLGAPKAITAMAHRLARLIYRMLKFGEEYVDKGAQFYEDKYVQLQILHLKKKAAKLGLQLAPLQ

SEQ ID NO: 510875 - protein, 427 aa, unidentified
MSFKIVRFNCCGMDVHKNLIVATIGITDPTTLVTEYFQKNFTTLNSDLQLLVDWLLSYHCTDVCMESTGKYWIPIFNVLEAHGISVTLAHPKYTKAIKGKKTDKKDSMWICDLHKNGMTRGSFIPPKAIRELREISRYYHKLTGMNSSESCRYQNCMTVSNIGLASVLSDVNGKTGKSIMKELLKSDEINEKKILRLIHGRCKNKDKILEAIHGYHIEPDSQFKMVTIQKHKEELNQHINACLTEMYKRVQPFYDQFQHITEIKGISLLSAILIISEIGVDMTVWEDSKQLCSWAGLCPGNNESASKKKSVRITKAGQYLKPLLVQCSLAAIKDSNGYFGTKYRRIKKRRGHKKAIIAIARMMLTCIYHMILTGESFHPTDYEELMNPKPKTYTKFTVESAINFLKSSGLDFDTIQQFYQSETVLVS

SEQ ID NO: 510876 - protein, 352 aa, unidentified
MAIVADRYAFVVGVDTHAAAHHYALIDARTGGVIDDRAFPTTPAGLGRALNWVIDRTGPATGGLVEQVLISMEGTRSYGAQAAVVFAEAGYRVTDAPTPKRERGAGKNDHLDAITAARGILGKEVDRLADARAGQTSTLLQILLTARNAMTSERTRAINALTALLRVHDLGIDARRALSSQTITTIAAWRRRAGDTPAQAAARTEAIRLARRVGDLNTDVKANEAALRAAVTEAMPSLLEMVGIGPVNAAIVLATWSHPGRVRNDAAFAKLAGACPLEISSGRRHEHRLNRTGDRQLNRALHTIANTRMRYEPRTRDYVERRTAQGLTGPRIRRCLKRYIARELHQHLATMT

SEQ ID NO: 510877 - protein, 394 aa, unidentified
MIYVGIDVAKDKHDCIILNSNGKVVFDVFTIQNNIDGFEDLLFKIKTTEKCPDKVKVGLEATGHYSCNILGFLKNKGLSTIVINPLYTSLSRKSISLRKTKTDKVDARTIACMIMSDVNLKPYSDTLYLNEDLKSLTRYRFNKVAQRAKLKQSVSRLVNILFPELEKLVSTLHGKAVYELLSEFPSAQHIASANLKHLTNLLHTASKGRFQRASADEIRQAARKSIGSYLPAKSLELKHTIKLIRELNSEITEIEAEIKKIMDVIDSPIISIPGIGQNLGAVILAEIGDFSRFESPDKILAFAGCSPSTYQSGQLYSSHAKMEKRGSRYLRWALLNAAAYVCKWEPTFATYLAKKLAEGKHYYVALSHAAKKLVRVLYHLETTGKTYQPTSILS

SEQ ID NO: 510878 - protein, 284 aa, unidentified
MEPKFVHFAGIDVSKQKMDVCIIVNNHRSEIMHQCFDQSKKGFSNLKKWLMEMTAKQTGRLLICVENTGLYDDALLYYLSDNGLPVCLENAANIKRSVRDNRGKTDKLDARNIALYALKQHDELKLWERPRKQVAQLQQMLSERSRLVNVLKMLKQPLHEQQAFSWSNAIQSKPCQQGIKGLEKDIEEIEKDIWELVKADKGLLQMFILITSIPSVGKITAWHFICYTNEFKQVKSGKQLASYCGVVPFEKTSGSSIKTKPRLRPLPGTQFLCNFFVLKAPEFQ

SEQ ID NO: 510879 - protein, 399 aa, unidentified
MPNGLALSRGAHKRHGADGCSDGMDSSRFFRGIIAVNSWVGPRNQEEATMDATTVAVDLAKDVFEIAVANRAGRIIERKRLTRRQFERFVDTLPAGVEVIMEGCGTAHYWGRRCRARDVSVRLLPVQYVRPYVRRNKTDRTDTEALLEANRCGGIQPVAVKTVEQQAIQALHRVRTQWQATRTARINVMRGVLREFGLPIGVGARTALARIPVLLEDAAVELPGLVRHAVWLLLEEVRALDARIAAIDHELATIAREHPVALRLQQVPGVGVLTSTALVASVGHIHAFRRGRQFASWLGLTPRESSTGGRRYLGGISKRGDVYLRCLLTHGARAVLLTAQRTVGRTPQRATAFQRWAASVAVRRGHNKAAIAVANKLARMIWAVWHHDVDFRVESRVAA

SEQ ID NO: 510880 - protein, 331 aa, unidentified
MKFTNTIGIDVSKKILDIHDYVHQLTLQVNNNPAGHKELLKWVRQNNAELSEVLICFEHTGMYSLPLALYLTEHKQCYVMVPGLEIKRSMGISRGKNDSADALAIARYAHLRREEIIIYQLPSKQLLELKSLLSLREKMVSQRAGYQASKKEMKAFLKIVKTSSVIFDAQETMIKELNKQILRIEKQMMEIICNDEHLKKTFDLVTSVKGVGVILGTTMLVYTNCFTSFDDWRKFACYCGIAPFEYQSGTSIKGKTKISPFANKRLKSLLSNAACSSIQHNPEMKLYYERRIQEGKNKMSTQNIIRNKILARVFAVVNRGTQYVDTLKYAA

SEQ ID NO: 510881 - protein, 450 aa, unidentified
MSKLKPKSQSLPVINPNAAGIDIGGRFHVVAVPPDRSDKSVQTFKAFTGDIHNMARWLTKCRITTVAMESTGVYWVPVYEILEEHGFEVVLSNARDTRAVPGRKTDVGDAQWIQRLHACGLLKASFRPDATIAELRTYMRVRERMLDYAAAHIQHMQKALTFMNVQLHIVVSDITGVTGMKIVRAIVAGEHDPAILAKFRDPRCKADEQTICAALKGNYQPEHLFALRQAIILYDVYQRQVNECDVQIEAVLDRLCINSSEPDEPIPKPKHRAKQANAMTFDVREKLYRLIGADFTQIHGIGPFLALRLISECGTDMNKWPTEKHFTSWLTLCPGSKISGGKVMSSHSLKSNNRVVAHLRLAATTVGRSDTALGAFYRRLSSRIGKAKAVTATARKIAILFYNAMKYGTKYKDPGAEYYEERYKERVLKNLKRQAERMGMTLQAKEECVS

SEQ ID NO: 510882 - protein, 341 aa, unidentified
MSIITVGIDLAKNVFAVHGVDDNGKAALVKPKVSREHLLPLMAQLPPCVIGMEACSGAHHWARLFRQYGHTVKLMAPKFVTPYRMSGKRGKNDAADAQAICEAVRRPHMRFVPVKEEHQQIILCLHRTRNGFVEERTATYNRLRGLISEFSIVLPQKIANLRRDIILHLEDLPGYVNQCVGDLLAHADALEVRIADYDRIIAKAARDDARSKRLMKLPGIGPNTASAMLASIGGGHDFKNGRQVAAWIGLTPGQYSSGGKARLGRITKAGDRYLRSLLVMGARAVLSGLGDKQDRFSRWARSLQERRGYWKAVVAIAAKNARLAWAVLKFGDEFRLSPSAA

SEQ ID NO: 510883 - protein, 310 aa, unidentified
MDMITVGIDVSKDRLDVAVCPSGEAFAVERNAAGLERLAARLREIAPHVVALEATGGFETFAAAALSAAGLPVVVVNPAQIRSFAKALGQRAKTDPIDAAVIARFAEAVRPEIRPLPDEATRLLADLVARRRQIIEMIGAERQREKRATAPHLRKSIARLLKALEKELASLDGDIDDAVRGSPAWRDKENLLASTPGVGPTIARTLIAELPELGQLGRKQIAALSGLAPFTRQSGQWRGRSFIGGGRVAVRTALFMGAMVAKRHNPALKAFFERLVAAGKPKMVALIAVARKLLTILNAILRDKRPWQTA

SEQ ID NO: 510884 - protein, 337 aa, unidentified
MLFCGIDLHSNNSFVVISDDTDKVLYSRRLPNNLPEICAALSPYRQELVGIVVESTYNWYWLVDGLMEAGYSIHLANTTAIKQYDGIKHRGDESDARHLAHILRLGLLPEGHIMPKAARAVRDLARKRMQLVQQRTTQIVSIETCLAQQTGARISCNDVKQLTDQEIDKMPVGHHEAMSMKANVAIMQALQIQIDRIEKELSAHCRRDPGYRLLNTVSGVGPILATVILLETGSIDRFADVGNYASYCRCVDSVHVSNGKKKGEGNTKNGNRYLAWAFVEAANFAIRFCEPARKFYQRKKAKRNGIVAIKAVAHKLARACFHILKTGECFSVERCFT

SEQ ID NO: 510885 - protein, 340 aa, unidentified
MTITTVGIDLAKNVFAVHCVDQNGKAVLVKPKVSRAALSELIAGLPPCVIGMEACSGAHYWARLFRQYGHDVRLMAPKFVSPYRMAGKTGKNDAADAIAICEAVQRPHMRFVPVKDESQQAMQCLHRTRQGFIQERTATYNRLRGLVSEFGVIAPQSTDALRHAVSDQKETLPVQVRLCIDDLLAHVTNIEEKIAEYDRVLSRVAKTDHRSQQLMELKGIGPTTASALVASIGNAHDFKNGRQLAAWLGLTPSQYSSGGKSKLGRITKAGDAYLRTLLVQGARSVMVGAENRTDSFSRWVCSLIGRRGYWRAVVAIAAKNARLCWASLHYGDDFRLYSTT

SEQ ID NO: 510886 - protein, 341 aa, unidentified
MGQASTIGLDIAKWVFQAHGADATGRVVFRKRLVRAKVLEFFAGQPPCLVALEACGGAHYWARELGKLGHTVRLIPPAYVKPFVKRQKNDVADAEAICEAAQRPGMRFVPVKDEAQQANAVVFRARDLLVRQRTQCINALRGHLAEYGHVVPQGPAHVDSLVALVEDPKSSVPESARGILQVLIRMLNALEEQLKELDGEIARRAKADPVARRLMTIPGIGPIAATAITALVPAPEGFRAGRDFAAWLGLTPLQRSTGGKHKLGAISKMGERTIRRLLILGASAVVGWASRRGAAAGSWLARMLARKPRMLVTTALANKMARIVWALLVKGGTYKAPAVAA

SEQ ID NO: 510887 - protein, 358 aa, unidentified
MSHYRVGCDAHRRYSQFAVLDQNGQLRQQTRVDHEPGAIQAFLEALPEGTPVALESVGNWYWIADEIEAAGCLPLLTHAAKAKVMMGNVNKTDKLDAKGLAKLLHLDSLPTVWLPPGEIRDERELHRTRMALSKLRTSLKNRIHSTLAKYGITTTDHSDIFAGAGRIWLQGTIGRLPPETGRCVAQEIEALDGLGDQISQLERRIRQRTALTPSIQLLKTLPGVADVLAIIIEREIGSIDRFDTSGQFTSFSGLVPTVHASGGKTRFGHMRKPCNQYLKWAFIEAANVIVRHRHHPAWKTKYVCQIYDQVSQRKGHAVAVGAVARHLAEAAFWILKRQQPYRPPANRQASPKQVRGRA

SEQ ID NO: 510888 - protein, 355 aa, unidentified
MPMLAETVELVIGVDTHTDTHTAAVVVAATGARVQTLTVAADPHGYDELLATAERHGGLRAFAVEGAGGYGAGLTRHLTEAGEVVVELDRPQRPARRGGRRSDPLDAERAARDALSRAQLARPKTGAERAALQSLLTARRSAVEAASTAQRQLRAQVITAPEAVRARFRGHRSTRAQISIAAGLRPANSTGDVEVLTTLRVLRDLARRIRALEAEAAEYEKTIRRVVASWRPDLLELTGVGPINAATVLTAWSHPGRCRDEAAFAMLAGAAPIPASSGRTVRYRLNRSGDRQLNRALHSIVLSRQRYDQATRDYTQRRHTEGKTDREIRRCLKRYTARQLFRQLETDPLRGLDEP

SEQ ID NO: 510889 - protein, 354 aa, unidentified
MKRTTKYVAFDVHQATTVASVREESGRVIARSVLPTDSGALTEFVRGMRGARHVTFEEGTQAQWLYELLAPLVDRVIVCDRRGAPRQGNKGDQVDADHLSELLRRGALRAVYHGSADRATLKELTRTYRNLVEDATRVMLRLKALFRARGIATAGTAVYHPRHRARWLAQLLEGGARFRAEALYAELDVLRKLRPKAKAVMVTEARRDPAWRVLRTIPFLGPVRVALLLATMQTPWRFRTKRHLWAYAGLAVVTRSSADYTLIAGAPVRRRRAPMTRGLNRNHNRVLKDVFKGAATAATARAGPLQDFYHSVIARGTREELARLTLTRKLAALTLRLWKKGERYDPTKLTTPAR

SEQ ID NO: 510890 - protein, 334 aa, unidentified
MKPDGVHIGVDVSKEKLDVYVPAREEGLRPETREVDNGIEGFRELRDLARKAGATVCVEPTGGYELELVAFMHKFGVPVAYADALRVRQFARAEGNLSKNDAVDAALISRFADKIGVRVLGPTDIDAVELKRKTKFRQTMMNSRTALICRLETEIDTDIRLMMKEQIRHLDRLIDRMERSCLDTVSKNEEMDTLRNRFTKVGGVGNLTAISILAGLPEIGKLPDEKLNRLVGISPEQRQSGTKEWQRRIWGGRKDVRNALYMTATASLQWNSILGAYYRKKRAEGHPHKWAMVPTMRKLLSLLNRIARDPNFTPKPEPESTKERAKTGQKKKAA

SEQ ID NO: 510891 - protein, 457 aa, unidentified
MYGPFNVASSTRIRFAVSLQLPRATAPPLVRRVEVVRVQVAQDDQEIIARVAALDIGKAEVVCCVRVPGEGPRARRMQEVRTYTTMTRSLLAMADWLTELGVTRVVMEATSDYWKPPFYLLENTFQTWLVNAKDVKHLPGRPKTDRLDAVWLCKVAERQMLRPSFVPPPAFRELRDLTRYRVDLITTRTSEKQRVEKLLEDAQIKLSVVASDIFGVSGRAMMAALVAGERDPKVLADMARGSMRGKTARLEEAFTGRFTDHHAFLLRTMLARVDGIDADVDRVQARIDEQIAPFAAAVTRLDEIPGIGVTTAQVIIAEVGLDMTRFPTPDHLASWARFAPGISESAGRKKGGSSTGKGNRYLARVLGEAAVGAGRTKTFLGERYRRIAKRRGKKRAIVAVGRSILMIVWELLSDEEKRFIDLGPGYYDSRVNRNRSTRNHVRELQALGYKVTLEPAA

SEQ ID NO: 510892 - protein, 320 aa, unidentified
MSRKRAKLFIGIDVSKQLLEVAAHQHDYQFRCANKASAFGELIAELITLRPALIVLEATGGLERTVAAALRSASLPVAIVNPRQVRDFARALGQLAKTDRLDACVLAAFGAAIKPPLRPLKASDELELDALTGRREQLTGMLADEKNRRASAASDSVRDEIQEHIDWLTERIAELDQQLKKLLQASARWQIKDQILQSTPGIGPVVSYSLLAQLPELGNLNRQQISKLVGVAPLNRDSGQQRGSRHIYGGRAQVRRVLYMAALTASRCNPVIKVFYERLRARQKPFKVAITACMRKLLTIINFMVRHGNSWKSAQTEISA

SEQ ID NO: 510893 - protein, 371 aa, unidentified
MDESTKMLFVGLDVHKDTIAVAYAPDDRGADVVSLGIIGTRQCDIDKLIRQLESKGATLVFVYEAGPCGYWLYRYLTRRGFGCSVVAPSLIPRKAGDRVKTDRRDAVTLARLRRSGDLTSIYVPSVDDEAIRDVSRGREDTMRDLKRAKVRLKAFLLRQDLRYEGRANWNAAHLRWLSRVVCPTPAQQIVFQEYVRAVTEQTERLQRLESELHELVKGWRLYPVVEAIQALRGLELTGAIVLVAELGDLTRFDTPRKLMSYLGLTPSEYSSGGRRRQGGITKAGNGHARRVLVEGAWAYRYPAKVSRHLQLRLEKVPAEIQGIAWKAQVRLCKRYRQLSARGKHANQVVVAIAREMAAFAWAIARTVPVAA

SEQ ID NO: 510894 - protein, 337 aa, unidentified
MNKQQPTFFWIGIDLSKATFDAAIATEGTPNSQRQKLPSQQFQNTPQGHTAFALWVSEQMGSLPCAGLCLEDTGIYTPNFIRALAALPQSTLPAPSAVNPVAPKAFAKSLHVRDKSDRIDACVIALYALRNEPKPRPEREQSYRELRALHRLRASLVLDRTAWKNRLESAEPATKKHTLALIDLLSKQIEAVVADMEELLKTAEQLAVDYSRLQTIPGIGKVIAVMLLAEYGDLRTWKRGQVVSYAGLFARSHESGTSVRSKPRLAKGGGKDIRAKLYMGVVSLLRWENPFTGWQQKLEKNGLCKMATIGALMRKLLVTARAVIRSEKDFDPNFLLA

SEQ ID NO: 510895 - protein, 437 aa, unidentified
MTSMTTTAAAVIGGVDTHADTHYAAALDQVGRLLGTRQFAADAAGYRQLLGWLESFGSVQRVGVEGTGCYGAGLTRFLRGRDVTVVEVNRPDRRARRLRGKSDPLDAEIAARRAMAAYDTAVPKDTATAVESIRVLRLARDGAVKARTAALNQLKDLITTAPDQPRSSLRGKTLRKVAAEAARFRPDMTRLANPVQVTKIALRSVGARVVALNGEVAALDRQLGALVGATAPRTMALFAVSTQHAAQLLVTAGGNPHRLRSEAAFAALCAANPIPASSGKTTRHRLNPAGDRDANATLHMIAVLRMRWDPATRDYVTRRTQDGLSKREIIRCLKRYIARQAYHAVTADLAEPATCDDTPKLARVSSEPVELIALDEPAQGLISARRNGEPTFTHVQGIADAMMAALSRGVDRVIPKQLYPDLRESLPPELPPWVKVR

SEQ ID NO: 510896 - protein, 448 aa, unidentified
MVLRTSACRLRKESTQSRSFYSVATPPAAAALAGLTVMDILYPRCAGLDVHKEKVVACVRKLKGGSARQQVRTFRTETNALLEMADWLAAQEVTHVAMESTGVYWKPIWNLLEGLFELLLVNAEHIKQVPGRKTDVKDSQWIAELLQHGLLKPSFVPERPVRQLRELTRQRVQLVRQKVQVANRIQKTLEDANIKLSSVASDVLGASGRDMLKAIIRGEDDPITLANLARQRLRKKLPQLQEALCGEVEDHHRFLLGMLLEQVEFLEAQIDRMSGRIGEVLPAPFAEAIERLDTIPGVDRRAAENIIVEVGADMGRFADAAHLASWVGLCPGNHESAGKRKSGRTTKGNKWLRVVLVQSAWAASRSKGTHLKQLYGRLVGRRGKKRALVAVAHRLLVIIYNVLKKGQAYVEPAPACASRPQDKERLKRRLLKRLEKLGVKVAEVEAVA

SEQ ID NO: 510897 - protein, 274 aa, unidentified
MTLYGGIDLHSTNNYLGIYDQDDRVVFSKRLPNELGIVLESLDPYKAELAGIAVESTYNWYWLVDGLKDQGYRVLLANPAANEQYKGLKYTDDRYDSRWLARMLGLGILKTGYIYPKEERPVRDLLRKRMRLVQHRTAHIVSVLNTITRNTGRSLSWSKLEAMTDDQVSTLLGEGLIGMAPRASLEIIKSLDQEILKIEKTAKARATLRSEFKLLKTVWGVGTILGLTIMYETGEISRFPQVGDYCSYARCVGSVRISNGKKKGENNTKNGNRY

SEQ ID NO: 510898 - protein, 416 aa, unidentified
MEVIVSRCAGLDVHKNTVMACVRVPGPNGGRTSTVRQFRTFTAGLRQLRDWLVAEQVSQVVMEATGVYWKPVWHVLDPTPGLELMLVNAYAVKNMPGRKTDVADAVWLAELGECGLLRPSFVPPPVIAQLRDLTRYRKKLIEERARETQRIQKLLEDAGIKLDSVVSDILGVSARQMLEALIAGVRDVAALAELARTRMRPKIPQLRQALEGRFGAHHALMLRMHLEHVDQLSVSIDRLDSEVDRVIRPFSNALQRLITIPGVGRRTAEVIIAETGADMRRFRTAGHLASWAGMCPGNHESGGKRRSGRARKGNAALRAALCEAAWAASHARSGYLPAQYRHLLRTFGKKGQTRAVFAVGHSILVIAWHLMAHDRDYADLGGDHFTRATDAEARERYLVRQLEALGHKVTLEPAAA

SEQ ID NO: 510899 - protein, 321 aa, unidentified
MATIGIDTHKATLAVSVIDATGRGCGARTFPNDHEGHVTLLHWVQGLAAERRFGIEGSGSFGAVLARLLVAAGEHVVEVPAVLTDRERRHLRRAGKSDPGDALAIARVALREAGLGPISMPGIAEDLKLLVDARDQRVGERTRVANRLHANLVVLVAGYKRMVPNLASSSHRAALAGLLEDLVGVRADLARADLARLLELDAECTALAKRIRSLVRLSGSSLPTITGVAAITAAKLLGETGDPRRIRSTPAFAAMSGTAPIPASSGQTSRHRLNRGGNRQLNRALHTIALVQARTDPLADVVLRTMLADVERSAEPVTLGT

SEQ ID NO: 510900 - protein, 412 aa, unidentified
MKPLLESCCALDVHRDNATACIAKGPFDKAEEELIVRDFPTMTSDIRKLSSWLKEHNVKTVAMESTGIYWKPIFNILEEGFEVILANAKQVKNVPGLKTDKKDARWLARLLRYGLVPASFIPPKNIRELRDLTRTRRKLVGEMTRQKNRIQKILQDANIKLSSVTTSVFGVSGDAMIRALLEARDITEDEIKSLAKGKLKSKIDFLIKAMDGNVTSHHRFLLQMHLNHIDFLSKQIKKFDKEINRKLKPYHKEFKLIQTKPGFNEVNAASIIAEIGVDMNRFPDENHLSSWAAICPGNNESAGKRMSGKTRRGNNYLKATLTEAAWAASRTKDTAISEKYRNLARRRGKKRAIVAIGHQLLKEIYYVLDTGKPHKELGAKAISKQKSKKREHYLIQELKNLGYDIQPVNVPP

SEQ ID NO: 510901 - protein, 417 aa, unidentified
METVIERGCGLDVHKKSVAACVRVPGPKGTRESHVRTCGTMAAELAALREWLESQGVTQVAMESTGVYWKPVWAVLEEAFTCLLVNAAHVKQVPGRKSDLLDGAWIAQLREHGLVRGSFVPPAPIRELRDLTRYRKSLIEERTREANRLHKLLEDTGIKLASVATDILGVSGRAMLEALVQGTTDPARLADLARGKLRAKLPALRQALAGRFRPHHAFLVSQLLAHLDYLDEAIDTLRARLTEVMAPFTAELGRLDSIPGVAQRTAEVLIAELGVDMTQFPSAGHAASWVGLCPGNHESAGKHKSGRTRKGNRWLRAALTEAAPAATRTDSALAAHYRRLMPRGPKQAVVAVAHSMLVIAYHLLSPQTTRIGSWGGLLRRPPRRADDAPRGPAARAPGLPRDAPAGGLSASDRRTAA

SEQ ID NO: 510902 - protein, 404 aa, unidentified
MWYVGLDWADTHHDVEVQDEAGKRIGARRFAHSHAGLHELQAFLLGIAASPEELACIVETNHGLLITFLLEAGIPVYPVNPKSANRLRKAAGAKTDRIDAHLLAKLGRFDLAELRRLEPDSPSVAELKTLTRDQDALIQTQTRLVNQLTACLKEDYPPALHLFAKVQQRSTLVFLQAYPTPQAALAASIEEITATLRTGKHTNPRRVAPKIVEELHRPQLVASSVIVRAKSRLMLALVKQLLVVIEEIASYDKAIRPLFLSHPDQELWSSLPRAGKRLAPRLLAEWGDDRSRYADGNSVQTLAGTAPVPYESGNYAKAHKRFACSKPLRNALHQFAWQSTQHEAWARDYYQRKRAQGKTHSMAVRALANVWVRIIYRMWMSETCYQTATFEAAQLAHAPRQHVA

SEQ ID NO: 510903 - protein, 366 aa, unidentified
MKKISTVQIFESEIFKERRLTIGLDLGDRWSCYCILDEAGEILLEQKVATTPEAMKQAFAKIPRSLIALETGTHSPWVSRLLTELGYKVIVAHAQKVQLITKSSRKDDRHDARTLARLARIDPELLGPVRHRSAQAQIHLTVIRARAELVSVRTALVNAARGLAKSYGQRLPKCGTQQVSRELGAGLPAELREVLEPLLKEIESLNERIQEYEVRMEKIAKESYPQVKLLQQVKGVGTQIALTYILTLEDPQRFPKSREVGCFLGLRPGRRDSGESQPEMHISKEGDRYLRTMLVQGAHYILGPFGADSDLRRWGLKLAARGGKSAKKRAVVAVARKLAVLLHKLWVSGEVYEPLRNSQKAMRAVA

SEQ ID NO: 510904 - protein, 396 aa, unidentified
MWTLGIDIAKRRHRATLLDDDGQTVFRNVSVEHSREGVEKFLQRLSATDQPADTVLVGMEATGHYWMVLYETLVRSGYTVQVINPLVVAARRNITIRGTKTDSADALLIARLLRETHLKVCAIADEEIQQLRDLTRLRFQCAHTAKAEKARLVSLLDLAFPEYHDHFSDVFGASSRVVLAEYPTAEQLAKVDVRRLTRLLKQASRGRFGRQQSQSLKAAAKSSFALTSRNQHLQLAIRFVVERLNLLVEQIAQIDRQLKAFLVEQQTLLQSIPGLGKVWAPTILAEILPVFHPQSQRGARKLVATAGLDVRQTDSGERTGKGKMSKRGSRYLRTAVMQAAEIAVFKSHDPLFTQVYERHMERGKHHLVALTHVANKMLHVIFSVLKNNRPYTPILN

SEQ ID NO: 510905 - protein, 363 aa, unidentified
MEQFIGCDAHKKYSVFVAVNERGEASPAIRVGHDREQYRQFLERLPAGSQIALEAGGHYYWMVDEMEAAGHQPRLVHPLEAKKRMGKTGKKTDKVDANGLGILLRNGTLPEVWIPPSGLRDQRESLRLRMFLVQQRTRLKNRIQGALARYNIQIAGVSDLFGGEGRLRLGQRLGELPEHTRQSVELELVTLDFLEVQLGDIEKRLEELMKVTAEADLLKTLPYVGRILSMVMTLEIGKVERFASAAHLASYAGLVPRVHSSGGHTRLGQICGDVNQYLKWAFIEAGNLAVIHQKHLVGQHVVRLYQRVKRKKNHQKAVVAVARHLAEAAYWILKKQEVYRDPQPKPKAPAQAQAAHALSSTHG

SEQ ID NO: 510906 - protein, 397 aa, unidentified
MYIVGIDIAKRKHEAAVIDGEGTVIIKPFSFTNNCSGYNRLLAMLTKAKLPLDEVSFAMEATGHYWLALFTRLQKEGFRVQVINPVQTNSIRSFYIRQAKTDPRDALLIAEVIRFGHFSESTLHPENIYELRELCRGRHAIVSMQADVKRKVVALLDQVFPEYETAFTNMFGDTSMAILQTCPTPKELSEMRLEELCHLIEVSSHKRFRMAKAQELQALARNSFGFAMAGDVFSTMIRLYAKHLDFLKQQVREMDRKIAEIMETLDTPITTITGIGPTLGAYILSEIGDISRFSSAAKLAAYAGIDPTMRQSGEYNGVRNRMSKRGSPYLRHAIWLAASSAVLHDPALKLYFQKKRDEGKPYMASVGHACRKMVSIIYAVMRDNKAYTPCIPNEISV

SEQ ID NO: 510907 - protein, 361 aa, unidentified
MGGTMTWVGLDVHARSTHAAVIDSMSGELSRVRFGPGIEAPVVWLAGLPGPVRACYEAGPTGFGLYRAAVEAGIAMEVIAPGKTPRAPSDRVKTDRKDAELLARLLLAGSLTRVVVPPPEVEAAREMTRSHDACRRDLMNARHRVSKMLLRHGRVYSKSTTWTAEHRRWLSLQYFDEPASDLVFADLLASVDGLTARKQAIALRLSDLATDERWWPTVARLRAFRGIDTLTAFSIHLELGANWKRFEKPSSLSAWLGLTPSLSQSGESSRQGSITKTGSMLARRLLVESAWHYSRQPRLGATLANRQAGQPDHILAISNRAQQRLYKVNRLMRSRGKPHNVTVVACARQLACFLWAAATAD

SEQ ID NO: 510908 - protein, 372 aa, unidentified
MRRSSETRETMRMKTHPQYFISKPRRSSHAGMTIGIDLGDIWSHYCTLNEDGEVIDQGRFRSNPSGVDKHFRDLGPARVAMEAGTHSIWVSEQIRELGHEVIVANVRELRAISHSDRKSDKVDAEKIARYARLDPEILRPIAHRTVAQQETLTLIRARDVLVRLRTAAVNSVRGLAKPCGYRLPASSTLTFPKRCQAVLPPGLATALGPLLHQIADMTVKIKEYDRAIKQLTETEYPETQALIKVYGVGQLTALTYVLTLGSKERFQRSRDVGCYLGLRPRRSQSGDSDPQLGITKAGNGYLRQLLVECANHVIGPHGKDSTLRRWGLSLGARGGSHARRRAVVAVARKLAVLLHRIWVTQEVYVPFYEKAA

SEQ ID NO: 510909 - protein, 442 aa, unidentified
MQIQEHNFKNTYVGVKELCQFLKRFSKATTFLMECTGVYHVALYRALQEKFPHQRDNIIAMNPLLVHNRIADLGSKTDRADARTLSSLALYHSILRPSYVGSVDFFAIRDLMRSYHRNITQVTRLKNRIHRQLHLANQKFKFDLNTEWGLHLLDQYINQSWSLGACYNHMLSDLKTKGKYIVLEKKQEEIVPHAEVILADTQRFILQMDLLRLLSSQQSSAIFLHEAERQVLHTPSLAKHYQHMRIIPGFSSATILTVLTEIGDYSRFRNANAFCKFCGVVPSIQQSGNYSAKGHVNRFTNKHLRSALSQAAAAVIGRPNKDTDIGAFAYKQCHLRHMPFKKAMLKVAQKYARILYGMFNEIRQYDPHFEINRKKAKRLKLRLEKQNTLIEGIQTRALKRNISNFLVANSELLNSTSRYHLVTGFHRLIQKSRYREKEDHTK

SEQ ID NO: 510910 - protein, 348 aa, unidentified
MVTIGVDPHKSSHTFVAVDGNGRKLAEKTCSATAEDDLEALCWAGQWPERVWALENCRHLVRRLERDLLVAGEPVVRVPSRLMAKTRRTGRQRGKSDPIDALAVARSALQEPGLPVAHLEGISREVRLLVDHREDLVGERSRIQNRLRWHLHELEPGYQVGSLSRTAALRKLETRLASHSGRVAELAGELLGRLRELTVRVQQLESELGQLVRPLVPTLLALQGCGVLTAAKIIGEVGNISRFRSRAAFARYNGSAPIPVWSGKDDHHRLNPGGNRQLNAALHRIAITQIRAGGQGRPYLEHRLHERDTPKEAIRALKRRLSNEVYQRLLSDERTRMACAESPHVEAA

SEQ ID NO: 510911 - protein, 401 aa, unidentified
MTSEYAVFLGLDVGKGEHHAVGLDPSGKRLHDAPLPNTEPKLRAMFDKLAAHGPVLVVVDQPATIGALPVAVARACGHDVAYLPGLAMRRIADLYPGNAKTDARDAYVIADAARTLPHTLRQLNVDDEALAELDVLAGFDDDLAAEATRVSNRIRGLLTGIHPALERALGPKISHPAVLEILSRCGGPIGIRKAGRRKLTAIATKHAPRMGAKLVENILAALDEQTVTVAGTAAADKILPRLADNLKTVLQQRKTIASEVEEILDAHPLAQVLTSMPGIGVRTAARILLEIGDASGFKSSGHLAAYAGIAPVTHRSGTSIKGEHPARTGNRRLKRAFFLAAFAALSDPTSRTYYDRKRAEGKKHNAALICLARRRCDVLFAMLRSRTYYQHPEPTIAPAAA

SEQ ID NO: 510912 - protein, 400 aa, unidentified
MAKRTTMCAGIDTGKRKLDVAFDSSTERLQVENTVEGYKTLVEWLRRHKVKRVGIEASGGYEQAVVAELRCKRFVVVVFQPAQVRSYAKFRLQRAKNDKIDAALIAACTAAVRKIYAAPDAKLLPFAGHLTMIDQIGEDIAKLKNRLESCRDGRIQKLWKEDIARLAKRERAEFKALVAAIRARRDLAARLDLIYSVSGSGLLTAVAILVRMPEIGLLTREQVAALAGLAPYDDDSGDRLGSRQIDGGRKRLRRALYTAALPASFRWNPQLIALYRRLIAAGKGHKRALIACAPGSCSFSSTPSWPAGHRGKTSHRWPLPSRPADPFLCSIGAPFLRPDLPSQRRRAQRPSRMAVAQTPPHTPPSTGHALTAASTTSGSTAIGQSNREQPQDLIVATGSS

SEQ ID NO: 510913 - protein, 428 aa, unidentified
MTVRDCTSVKEFWQLKKEIRGSEKHLIVGIDVAKDEHKAFFGTAYGKTLLKRLIFKNDIEGFENLLSRVKALKVKHSLKEVVFGLEPTANYHKPLGDFLIKCGHMVVLVSGVSVKRNRELLDGRWDKNDTKDSANVGDLISQGKCLYYEYTPVLFRELRSLLSLKRRLKKQEHGLRVRLRNNLLAQYFPELDRYYGQWEKEILSVVRWCLDPSVIAVLEYDQFVNLIAPGSKNIRQQGRFEWIWKKAVDSIGCDVGEGVEFEAKVMVEELRHIREVIEETNAKIKDICMRFPEYKYLLSIPGFGPDISSKVLAYIGNPFRFNNQNQVLKMAGMDLNAQRSGKSSETAVPVISKKGNAHLRYALYQAAFVASVRNKYFIAYYTNKLMGREKEKGIKTKMRVKLAAKMLVIGWSLMKKKEPFDPAYLRID

SEQ ID NO: 510914 - protein, 426 aa, unidentified
MTRAWCMSCLTDPAGADPLGSERASTIMTNERGRVGGIDSHQDTIHVAVLTDIGQPLADQEFPTTQAGYRRAVGWLIGHGPLSAVGVEGTSSYGRGISTGLTNAGIKVVEVNRTRPAERRRQGKTDALDAYRAARSVLSGEASTDPKAASIEPLRALTVARRSAVKAQQAARRQIGALLVNAPAHIRDRYRDLPEAALLSTLARSRPDQCADPDEADTLHALRTLARRHRDLGAEITDLEQRMLTRATRANPGLMAVKGVGPVVGAQLLITAGDNPDRLRSSASFAALCGTAPIPVSSGRTDRHRLSRGGDRHANAALHHIVKNRMTHDPATRAYRDTHLDKGWTKAAVYRALKRAVARQVFQALIGNCAVPDYSDLRPARQAKNITLTNAATALGVWPARVGELELGRRRDDHFADRYRQWLNAA

SEQ ID NO: 510915 - protein, 309 aa, unidentified
MKQSVVYIGIDVAKAHLDVAWAGTFRRLPNERSGHAALVRWIKQSATPVQLICEASGGYEQALLESLEKSEVKVTLVQAVRVRQYARAAGILAKTDRIDAKVLAAFGSALQPQPTSPLSGEQKRLRQYEAQRRHLSRILVAEENRLAQLSCTELRTLSRSLISKIKTQIKTIDRGISDLIAQDQTLCVKAQKLTAISGVGVRTAALLLAQMPELGQLNRRQAAALAGLAPFNHDSGSVRGKRAIFGGRPALRSGLYMAALSAARFNPILSSFYQRLRAKGKPHKLALTAVMRKLLLALNQTLKTQPAIA

SEQ ID NO: 510916 - protein, 448 aa, unidentified
MSQEKYIGMDVHQATISVAVMDAKGKLIMECVLETKAATILEFIQGLRGTLAVTFEEGTSAAWLHDLLDPHVNRLLVCDPRKNALLKDGNKNDRVDAQKLAELLRTNQVKPVYHGKHGTRALKELGRSYLTITKDGTRVMNRIKSVYRSWAIPCAGTSVYTRRHRAEWLAKLVEPGVRIRAEHLYQQLDSLQPLRLEVRRQLLLESHKHAAVKLLRQVPAIGPIRAALLVALLQTPHRFRTKRQLWAYSGFAVEVHDSGEYRWVRGKLQRNRERITVRGLNDNHNKEVKSLFKAAAISASTRPRSFARFLCGSGREWDAPNHGSSHSGTEDCRHHPNHVEERSEFRPQTVISTSSLSIAEKQAPSHEFLFGGGRRVLQMLGSRRVSVNEIWPRVPWAPSHPFHVMPPRITRNSHRPRASDRTMVDTFNTTSLSRSQLDSIATSKQRNL

SEQ ID NO: 510917 - protein, 358 aa, unidentified
MDKIKNSKLDCTGQPVYVGLDVHKKSWSVSVFSRYGEYKSFTQPPQVDTLVSYLKRHFPGGEYHSVYEAGYCGFWIHDQLKERGINCTVVNPADVPTKQKEEQHKRDRVDCRKLARGLCNGEMEGIYVPSRQMREDRTLVRTRQALVKKRTRCKNQIKGMLSFYGIHLTDEQTFAPWSERFIKWIESIRMERDSGNTALKAHLEELAYLRQLIATVNRAILKLAGSAEYATPVKVLKSAPGISTLTAMILLTELCDMARFASLDSLCNYVGLIPAIKRSGETEYVRGITPRRNAHLRWILIEAAWVAVRKDPALMMAFTEYCKRMRKNRAIVKIARKLLNRIRYILKHQTPYVPCIAK

SEQ ID NO: 510918 - protein, 337 aa, unidentified
MRFCGIDLHSNNSVVVVTDETDKVLVSRRCPNDLQGILALLAPHRDELAGVVVESTYNWYWLVDGLMAEGYDVRLANTVAMKRYDGLKHSDDETDAAHLAHMLRLGILPTGYIHPPAERALRDLARKRIQLVRSRSQHVLAVENILARSTGSRPSAAAIKRLAPTDIGTLGLATDVALAVQTNLAVIATLNLEIGRIEARLLEGVKLRPDYVRLKTIPGIGEVLAIVIMLETGDVSRFAQVGNFASYARCVDSARYSNGKKKGEGNTKNGNAYLVWAFVEAANFARRYSEEARRFFERKKARTNSIVATKALAHKLARASYHMLKEGQPFDVKRCFA

SEQ ID NO: 510919 - protein, 424 aa, unidentified
MVRGFGLDVHRDFCEVAIAEGGEVRSAGRIETRVQALELFAGSLVEGDVVALEATSGTDRIVSVLQEHGIQVVVANTRKLKSITEAKAKTDRLDARTLAKLLVSGLLDEVWTPDERTRALRRLTNRRERIVRARTRAKNEAHGVLARNLCERPPVTDAFGKTGREWLATLELPADERLTLDGCLRQVDFLDAEVQALDREIAKHALEWPQILRLMSVPGVNVQTAATFMASVGDIRRFSSPGKLVSYLGLDPRVRQSGNSPARHGRISKAGASEARHMLGEVAWKVTITPGPIRAFFERVRARRGPQIAATATARKLVVLFWHLLTSEQDYAFARPAMTRNKIRKLELLTGAPSQKGRKGIAGGKSKKVFEAERELSRQAEDAYRRLMSDWKSSGPPKEGAGATPGRASNRPSKGKAARQATSP

SEQ ID NO: 510920 - protein, 376 aa, unidentified
MSNYEDITFVGLDAHAKNINVAVILPGSGEVDAQWQMTHDERSLRRLAKKILTMAPGEVQVVYEAGPCGYALKRNLEALGLCCEVVAPSLIPVKPGERVKTDRRDACKLASLSKAELLTIVHPPNEKEEALRDLMRAREDAKKDLLSARHRLSKMLLRYGLQFLETKNWTLKHRAWLKGLRFDQAHAQQVFDNYLLSIEQVEERLKMLEAHIEEAAADEAYAEQVGWLRCLRGIDTVTAMTIVAELHDFRRFTHPRDLMAYLGLTPSEYSSGGRTKRGGITKAGNSHVRRVLVEVAWNYRHRPAVTALLRKRREGQPTAVIAIADRAQHRLYKRYYRLKEGHRKPHNVVAVAIARELVGFIWAVLHHQNAAQAASH

SEQ ID NO: 510921 - protein, 364 aa, unidentified
MHDSTTTVTVGLDVHARSIRLAAVRADELLEERTLPYDAEAVERAVRRWPVVRCCYEAGPTGFGLYRFLVERGIDCCVVAPGLVPQRPGDRIKTDSRDARKLASLLAGGLLEPIYVPSRGLEAARDLVRAREDARLDRMRDRHRLSKFCLRHGLTLPTSSWTVARRRWLSEQRFEFAAQQQTFDSYLHTVDLVDARIEQLERAIGETAEQEPWRALVARLRCLRGIDTLTALALVTEIGDFNRFKTAEQLMAFVGLVPSERSSGERRRQGSITKVGNAHARRLLVESAWHARRRPTVGYQLARRQRGQDPAVIERAWRCQQRLYQRWQRMAGRGKPQQKIVVACARELAGFVWAIATEQPLRNT

SEQ ID NO: 510922 - protein, 402 aa, unidentified
MIFINCLGIDIGKSQSLLAHYKDEVLVKEMVIQNNQNGYRYLKNYIKHLDSLFILFESTGIYSRGMKRFCEIHKIDYLEMNPLEAKFKTSSLRSWKTDKSDAHKLALLAFRMKDSKVQRQSEEIYFELRERARFHLEMEINQNRLKVELVETLHQTFPGLEKLFTNRYSKIALSIAKAFPHPDFVSTLTHDELVEKVLHSTDKGISVNKAHKYVQKLIEIKNNSFPNVDKSSFLLQKVQYLCDKLLIGIEEMKEFDQEMIDLAKNTTEFENIISIPGIGELTAALLIGELGNIREFKTNKQLNAFVGIDIKRYQSGTSKSRDTINKRGNKKARRLLYLIIMNIIRGRNHYQSHIVDYYYKLREQPHGKTHKTAVIASINRLLKTIHYLIVNNKLYDYQKAPH

SEQ ID NO: 510923 - protein, 354 aa, unidentified
MRYVGIDVHKKFCQYAMIDDVGRIVGEDRFLNTDEAIQSFISMLVSYGDVRVVMESTGSLWVKLYDIIEEHGLSAVLSNPYKTRLIAEARIKTDKLDARILAHLLRADLIPKCYVPSKKVREVRSLVRHRAKLSKTRTEIKNRIHVLLDKHRLEAPCGELFSKEGLEWLKGLKLSSVDDAVLKSDLGILKALDEQVGYVESEIASVALKDPNVELLITMPGIDYYSAMVLSSEMGSVERFSTDKKLVAWAGMAPSLRQSGGVLRVGGITKEGNRMVRWIMVQAALNAIRSDARLRAFYERYCSRKGHQKAIVAVAHEMLRIVWFMLKRREPYRDENRRLSLRKHNRMSRLAMVG

SEQ ID NO: 510924 - protein, 453 aa, unidentified
MKKLSMEIVNPKAAGIDIGSRFHMVAVNQNVDDVKEFGVYTEEHEAMIIWLKENSITTIAMESTGSYWQTLFSVLQRAGFEVILVNGQHTKNLKGRKTDVQDCMWIQKLHSLGLLNGSCLPGEYVERLRTYYNHRQHLIEHCSKYVNKMQKALRLMNIRLDVVLNDITGKSGRAILDAILSGEREPMVLASLANIWVKKSKEEIAKSLHGNWREDLMFELQECLSLYDIYCEKLALCDKEFDKVLQSVKSIDMRLPIAVPSGRVVRDRSKHAPVFNVRELAYMHLGVDLFDIKGVSHNTVLCVVSNMSREEMKKFPTVKNFTSWLRLAPNNKKTGGKIISSRTPKGKNQIALALRQAANSIGNQKDHPLTHFFKRIAYKKGRVAAITATARKLAVIIYHMITKQQAYQPINSEEIITRIKKHQISNIKQRLNKLNLLPDELNDIVRSVSLSAN

SEQ ID NO: 510925 - protein, 338 aa, unidentified
MESFVGIDLHKYVSQLAVLRESKSPSQLRFANDVVTVERVLKKLPERSKIALEAMGSWWWLVELAQKSGHEVFLSHPKQTKAISSARLKSDKVDALMLAKLLKADLLPTVWIPPANQRHIRELLSHRARLVRQRTAAINELRAVYAKRNIDPEARLQRVRPIVSGAEDLSGYGPRIVEEDLKLLEFINRQIGGLDKELIKIAHEDPQAKRLMTISGVGPVSAVAISCWIGEISRFANAKKLASYFGLAPRVRQSADTERHGHMTKEGNRMVRWLLIQAALVHTRRGKGPSRKHYLGVVKRRGKQIARVAVANKLIGAMFHMMKDEIDYHEYLRRSGAQ

SEQ ID NO: 510926 - protein, 392 aa, unidentified
MIYVGIDIAKDKHDCFITNSDGEVLFKSFTISNNRDGFETLFQKIQSVSDDLTKVKVGLEATGHYSYNLLGYLLDKGLPTYVINPLHTNLYRKSLSLRKTKTDKVDARTIASMIMSDVNLKSYSDTSYHNEELKSLTRYRFDKVKERAKLKPSVSRLICILFPELEKLVPTLHMASVYALLSEFPSAHAVASAHLTRLINLLSQSSKNRYGKDTAVMFREAARNSIGSNMPAKSLELKHTIKLIQELTSEIDEIEAAIKQIMDEEIQSPILTIPGISYRMGAMIIAEIGDFCRFDSADKILAYAGMSPSTYQSGQLDNCYSHMEKRGSRYLRYALYNATKYVCHWDKSFGEYLAKKRSEGKHYNVAISHAAKKLVRLIFAMEKSRKAYLPTA

SEQ ID NO: 510927 - protein, 347 aa, unidentified
MQITTIGLDLAKNVFQVHGVDTAGQAVVRKSLRRSQMLPFFAKLPPCLVGIEACGTSHHWARELVKLGHEVRLMPPAYVKPYVKRGKTDAADAEACCEAVTRPTMRFVPVKSPEQQAVLSIHRARDLLVKQRTQLINMIRGLLAEFGVDIPKGLERALLMARQIVDGKAPAVPIEASKIVATLSQQALDIHVRLREIDRDLAVCLRGNDVARRLLTIPGIGPIGATALAASVTDPHQFRSGRQFAAWLGLTPLQKSSGGKERLGRISKMGDKYLRKLLIVGMTSLVGRAKCNPGKIDPRLADLLARKPTRVATVAMANKTARVIWAIMVRGDTYRTGHQPVLAAQTI

SEQ ID NO: 510928 - protein, 442 aa, unidentified
MEAVMIGIDPRKVSHTAVAIDPAEMPLGQLQVRACAARVERLPGWAQAWPQRTWAVEGAGGLGHLLARQLPAAGERVLDVPPELAARVRLPATGDISKNDPDDARSVAVAALRPAGVREVCRDDHAAVLKVWSKRYRDLGRVRTQVACRLHQVLCELIPGGVPGEITAGQAERILASITPAEAVEAARWELAAEFTEDLRGIDARIRQTRNKLAAAVRAAGTSLTGLFGAGPVIAAAVTGDVRHVARFPDRDHFAACNGTAPIEVSSGGRKIWRLSRRGNRRLNHAIHMAAVTQIRRRHSQGHACYQKKLAEGKTGKEALRALKRQVSDAIYACLQAGARRAAAHVKSPGGQPGNGSDSSAAGSRPGHRLFGQATPGPAAYPTTPAASFPAPLPSQASRRPGPGPGAARPRQRRPQGVLDPAVREPIMPAAGRKATGPAGHR

SEQ ID NO: 510929 - protein, 358 aa, unidentified
MISSQTTAIPKLYIGIDIHKKQWSVHLRTDICDHRGFSMPPDPDKLFQYVQLHFPDHQVAVAFEIGCCGFWAARHFLNYGWKVTVVNPADIKRSDKHRYQKTDAIDCRHICNQLQKQELKPIFIPTEAQEQLCSLLRQRNHITKMLRKQKSFIKASLLYAGIAIPQQYDNPNWSHAFLHWLEQLQWSQTTGQFSLHSKLRILKVLNKEYLEVANQLRAWCRKHRNKDYYLLKSIPGIGGYLAAAVLAELGDLRRFNNERQLSNYIGLVPGIYQSDETSKPMGLTPRSRSLLRSYIIEAAWVALRRNPEMQAYYRKHIGKNPKAIIVKVAHKMIRAMLSVIKNEKTYQVNHSFQQTVSA

SEQ ID NO: 510930 - protein, 526 aa, unidentified
MPATTRRRPALASANSVHLGKPSGVLAPRVQSVGPEHFGIVAVDCAKASSKWMLTDFYGKVLIAPTVVRHGRDAFDRAIAQIRQAKASHQLEDLVVVVERTGRYHRPVKRAFAAAGFDVRVIHPMISRHFRRAAFPNQKTDDTDLQGIIQAACHGYGLVDPHWEPVYSQLQLLVRHRRGLVYKSTKLCCQILEHLESCLPGYARCFDNVFNSGIALVIPRAYGTPRAVVTAGLAGLVELARRENVRVHKSTLIRILAWAEDAPSADREALLHQRLLGELNQDRIATEESIQVIEREIVGLLVQTPYVRLLALAGINVVLAAELAAELGPIEHYPTARVITGRAGLFPGRYQSGPVDYRRGRLVRQGNRRLRQALLMGADTLCRCNDYFRVMAQKWQNQGKDPRDIHVRVAGRLARIAFQMVAGSVAFRHPACQGPPAVLSKLNEFHNEHDINITTTRTNLQHAAAQLPAAEQAREREIWQAKQAEIRARRGRGPKRLAAILPAVLSRLVGGELVGVIQSNSSGETP

SEQ ID NO: 510931 - protein, 343 aa, unidentified
MKLTRVGVDLAKQVFQVHGVDRAERPVWCQRLKRGRWIAELERNVEPGCEIGMEACGGAHHWARLLQSKGYVVKLIAPQFVKPYVKSNKNDANDAQAICEAMSRPSMRYVAVKTVEQQDIQAVHRIRASLITERTAKANQLRGLVYEYGLVAPREIASLRRAIPAWLEDATNGLSARFRVLLAALYRDLRSLDERVRELDREIAAIVQENEAVQRIEQLRGIGPLTASALVAMVGDGRQFKNGRHLAVALGLTPRQHSSGGKEKLLGISKRGDKYIRTLLIHGARSALRTAPGKTDRLSCWALALAERAHPNVAAVALANKMARVAWAMLRNGTTYEPERVAA

SEQ ID NO: 510932 - protein, 371 aa, unidentified
MGKHRLAFVAFDSAKNKHAVAIADGGRGAEVRYLGEIDNSPDAVRKLVAKLTRQYERLHFCYEAGPTGYGLHRQLTELGHVCDVVAPTMIPKRSGDRVKTNRRDSVALVKLLRAGELRAIWVPDRVHEAVRDLTRARATAMVDLKTKRQQLLSFLLRHGRGFPDGRNWTKTYERWLAKQTFAHPAQQIVFQDQLEAITTAQARLAALEQQLREIVPTWTMAPVVAAYQALRGVSFLVAITFVAEVGDVRRFATPQQLMAFLGLVPSERTTGDTIRRGSITKTGNHRARRVLIEGAWTYRFSARVGETLRTRLKDLPSSVRAIAWKAQVRLCARYRRLIARGKKTPVVTTAIARELSAFLWAIGQQVAPQTR

SEQ ID NO: 510933 - protein, 370 aa, unidentified
MLNTTTFVGLDVHARSIKAVALDAMTGEVRSATFGYDAAEVAGWVSSVDPSAKCVYESGVTGFDLQKRLASMGIDCVVGAVSKMIKPPADRKRKNDRNDAEFLARMLSVGNVVEVWVPDDGCEAARDLVRALDDAREDLKRCKQRLSKFLLRHGYAFSETTPTGRRKGSWTAAHWAWIKSISFPEKADNDVLAYYVDAVRQAMEDKARLERLVEAEASKPRWKRRVDSVRCLKGIDVTSAADLVFEAGEFSRFKSARSFAAWLGLTPSEHSSGESVRQGGITKAGNKHLRRVLVESAWHYLGCSPHSKDLAKGQVPDPAARRHAAKGVRRLVERRRAMLERGVHKNKANVATARELACWCWAVGRMIENG

SEQ ID NO: 510934 - protein, 407 aa, unidentified
MLNAVGIDVAKRKSTITIRRPGDEIVLPPCDVHHNQTEINELISYIKSLEGETKVCMEHTGRYYEPMAYWLSNAGIFVSAVNPILIKDFKDDDSFRAPKTDKADAAKIARYTLDRWSKLKQYGLMDEIRNQLKTMNRQFGFYMDQKTAMKNNLISLLDETYPGANSFFDSSVREDGSQKWVDFVYTYWHVDCVRGKSLKAFTEHYQNWCKRKGYNFSVRKVKEIYEKSSGLIAMFPKDGNTKMLIHQAIDVLNSVSATVELLRREMDKVASTLPEYPIVMAMDGVGPTLGPQLIAEIGDVTRFTKRGALTAFAGVDPGGDQSGDHERKSNRTSKKGSPHLRKTLFVVMDGILKRSPMDNPVYLFMDKKRSQGKPYYVYMTAGANKFLRIYYGRVKEYLEKLEESQES

SEQ ID NO: 510935 - protein, 331 aa, unidentified
MEREYVGIDLHKAFFQACTMRETGERQWEGRFARTPEGIARFIARGVGPHQVLAVEASGPTWAFVEALRHTGARICVVDPRKTKLKAGFAAKTDRLDARRLADAVRRDSVVSIYIPPPAIRELREVCRGRHQVVRLRTRVAQMIRALLLRTDAGDPPTDRLYSPRALAWLAQVRLSPDADCSLRRLERLFRAAHAEATAADAAVRQRAAADPIAGALGAMVGVGPVRALTIRAEIGDIARFRRGPELASYAGLVPRVDRSADRGYTGRITREGSPWLRYVLVQAALNAMRRTDATGRWARRLAVRKGTYKARVALARVLCDEVVAHWPRSL

SEQ ID NO: 510936 - protein, 423 aa, unidentified
MQGVEDNEEIIERVAAIDVGKAEVVVCIRIPDPARPGRRQQEIVHSSTLTPRLLVLADRLVELGVTRVVMEATSDYWKPVFYLLESRGLDPWLVNARDVKHLPGRPKTDRLDAVWLAKVAERQMLRPSFVPPGPIRLLRDLTRYRAGLVKVRTAEKNRVEKLLEDAQIKLSSVVSDIFGVSGREMLAALLAGERRPTVLAQLARTRMRPKIPLLEEAFVGQFTEHHAFLLRLMLARIDEAGADIAALEDRIRQLVAPFATVVTRLDEIPGVGATAAWTVIAEIGLDMSRFPTPAHLSSWARFAPGVNQSAGKTKGRGATGHGNRYLGQALGEAAVAAAHTHTFLGDRFRRLARRRGGPRATVAVGRSILVIIWHLLSQPDARYHDLGPDYTRRRADPNRATRNHVQRLEALGYTVTLTPVALA

SEQ ID NO: 510937 - protein, 438 aa, unidentified
MSNKVIFNLDNLFISVGIDVGADFSWMSIVLPNQQFVGKPYKILHNSIDSLTTAVSKIKEAEELYSLESRIFLESTGIYHYPLFCYLRDKGFNCSVINPIITKNSTNINIRKVHNDRFDSKKAALVGLKPDLKVSLMPSDLALNCRNLCREYYDLMDNRSAYVNKLQGELRMAFPQYLGIFSKVTINTSLTLLETYTSPSAFLEADKQEIIDLIKSTARFGLTYAQNKYNAIIQAATDANQFGYIIESNIKRIRLYISFIRKYDEEINDILESLHKLVDSNEDTKFVKQVHLIETFKGAGFLSAATIMGEIGDFSAFSKPKQLFAYFGLDPAVKQSGKFEGTKVQMSKRGSSIARRVIHTLSLQSISISRNGKAKNPVLREYYLQKCDSKPKLVAMGAVSHKVCNMIFAILRDNKPFEIITPQEHIKQYNAAKCDIAA

SEQ ID NO: 510938 - protein, 423 aa, unidentified
MDVLYERVAGLDVHKDTVASCVRVSSGGQTSRECRTFATTTEGLTALAAWLEENRCTHVAMEATGVYWMPVWKILGHGDFELIVANAAHIKNVPGRKTDMNDAMWIADLQACGLIKASFVPPEEMQELRSLTRTRKQLVREQTRHAQRIQKTLAEANIRLDSVLSDIMGASGRRIIEAMIAGVRQPRKLAELASKQIKASPKELYDALHGRLTDHHRFLLELHLRQWDGLDTAIRNIDREIDERIARMDVQIGAGRAPFRNLIDLLNTVPGVSTVSAQTILSEIGHDMNRFPTAGHLVAWAGLCPGHNESAGKRKSSRLRKGAPWLKTMLVQCAWAAKRKKDSYYRAQFFRLQSKRGPQKAICAVAASLLTAIYHILKHGTDHHDLGAAHFDRRPTELKTKRLVAQLAKLGFTVQLQPIVQAA

SEQ ID NO: 510939 - protein, 348 aa, unidentified
MTVPTLAHRWFVGIDLHKETLTACIYCSCCGEIRFQKLACRSRKQIAEFFGSLPRPHVVAIEAVGFYRWLWEMLEPLVDQLVLADATQARALAGRRMKTDREDAQNIAELLACGRLPLAYAPPFEVQVLRDCSRQRNAFSRQHAHVLHRVKSVMNANNRPGSARMDSGGLIRYLKTFESKLPERHGRYLWQCVDQLVLIERQLAQLERELARLLAQPAFASASAILQSFPGVGLVTCATVLAEIGDFSRFTYRKAIARYGGFDPRTFESAGKQRGGHISKRGPSDLRWVLVQAAWAAIRLDPHVKRIWLRICRQAGKKAATVGVARRLLRWMWRAVRTGEPYRAPVAA

SEQ ID NO: 510940 - protein, 397 aa, unidentified
MTESSDYESVQVFIGVDVGKDTHHAVAINRSGKRLFDKALPNDENKLRSLISDLKQHGQILLVVDQPATIGALPVAVARSEGVLVGYLPGLAMRRIADLHAGEAKTDARDAAIIAEAARTLPHALRTLKLADEQIAELSMLCGFDDDLAAQTTQASNRIRGLLTQIHPALERVLGPRLEHPAVLDLLQRYPSPEKLASLGEKKLAAQLCKLAPRLGKRLAADIAQALAEQTVVVPGTNAAAVVLPRLALQLITLRKQRDEVALEVEQRVLAHPLYPVLTSMPGVGVRTAARLLTEVACRAFASAAHLAAYAGLAPVTRRSGSSIRGEHPSRRGNKALKRALFLSAFAALRDPLSRAYYTRKMSQGKRHNQALIALARRRCDVLFAMMRDGTFYTPQG

SEQ ID NO: 510941 - protein, 351 aa, unidentified
MKYFAGLDVSLDETAICVVDEDGIVVTEGKAASEPDDLVRWLVATGLTITRVGLEAGPLSPWLHTELRAAGLPAICIETRRMKGATAAMAVKTDRNDARAIAHAMRVGWFTVVHVKTAESQELRLLLNNRRTLLEKRVAIDNEIRGTLKAFGLKLGAVTVAAFEVRVLELLAKRSRLLAMVRPMLAARAALRQQCDVLHRMVLKAVRASAVCRRLLSVPGVGPIVALTYATGVNDPARFIHSRDIGPHFGLTPRKYASGEIDRNGIDHQGRRWGCARSARAGCADLAHARPTMVRAEGLGHGRRQTSRAASRNRRRGAQTRDHLASHVGRQHDVQLEAGDRRLGIGLALTR

SEQ ID NO: 510942 - protein, 356 aa, unidentified
MELAYDGRQVVGMDLHRRRSVLVRMTEDGRRLGTARITNSPAELRAQIARAGKNPRVVLEATYGWYWAADTLAAAGAEVHLAHPLGVRAFSYRRVKNDERDAADLADLLRMGRLAEAWIAPREVRELRELTRYRQKLIALRSNTKDQVHAVLAKLGIPVTHSDLFGTGGLQWMDGLGLPQPYAGKVTSLRQLTGELTAEITMLSEVIADLLAGDRSYQVIQRLPGIGPVLAAIIIAEIGDVTRFRTAAQLCSWAGLTPKHRESDVKVNRGRVTKQGSRMLRWALVEAVQRNGPGTPAGAVKAAIIARRGKEACGIAKVAAARRLLTLVYYGLRDGEIRCLAHAPDSPPPAEPRAAA

SEQ ID NO: 510943 - protein, 346 aa, unidentified
MKNKSFILALDAHNGQSQLAAMDETGHLLSCRFYPTTAPDLIDAVSQFRGPSRLVVEESHIADWIKRTLDPYVDELVVADPKINAWIAKGDTINDAIAAVRLAKLFRGGYINPVHHSDSKRQQFKELVLHYHDLSRQIVRFKNKLKSEFNAKAVPVQGRRVYSRDGYCEAVAKLKPFAEAPFQTDQYFDIVQKLVNCRLSTLRQIRKYYQFYPEINQMRQLSGVNQITAFSLSALIDTPHRFANKRKLWAYTGLSQSEKVSNNKVYRAGATKGGNRLLKYLLLQAAMRIIRCNKETVFKATARRLEQQGLSPKNVRRSIARKITSVIYSTWKSGKTYNPDFSPAQS

SEQ ID NO: 510944 - protein, 392 aa, unidentified
MYIVGIDIGKNHHEASIVSPEGKQIGPSLRFATTHKGADSLMSFIFKNIGNSPCVFGMEATGHYWYPIYSFLKAKGYTIYVINPIQSDTLRKMYIRQTKNDSIDSFLIAEVIRFGQFTTTSMTDENILAMRQLCRYRDSVISSRTEIKLRISTIMEQIFPEYEKQFSSLWLSTSMGILEKYLTPENIENAPIDELFEIIKDKSHNKLTMKKAISIREAAADTFGIKIAQDAFSFQLKQLIDRMNFLDKQIEALDCQILEYYEKFDCYLHTIPGIGMIAAATILAEIGDINRFKSSSALVAFAGIDPTVRQSGEFSSTHNHMSKRGSPYLRHAIFLAATTCSFHNSPLNAYYKKKRDQGKHHLTATGAVARKLTSVIYAVLRDSKPYEPKSFC

SEQ ID NO: 510945 - protein, 342 aa, unidentified
MKEKRSIGIDLHRRRFTCCVRLENGRNYLSEWSLEQLPQFIKKLRSTDDVAVEVTGNTRLFYEAVAPSVARVVVVDPNQFRVISHSVKKTDPHDARNLALYLAKGLLPEVRMKEKEQAEVASLTQTRDRLVKLRTALKNKVNNLLSGRGIDLDKESLSSEKGLTWVLEQKVEPLAQLELEVIVEQIRSLNRSIARLDRAIEEASQKLKGYRNLTSIKGIGSLGAGILLSVIGDVNDFAREGQLAAYFGIVPRVQDSNETEHRGHITKRGSKLGRTALVQCALIAKRYSPFLHRYYERIRTRRGTGKAIIALARKFLSIIYHTLKKNWIFEDFPNFVLAEAKA

SEQ ID NO: 510946 - protein, 343 aa, unidentified
MDHFAGLDVSVKDTSICIVDDTGRILREVKVASEPDALVAVLTNRSYHFKRIGLEAGPLSQWLFSALAEADLPVICVETRHMRAVLKARINKTDRNDARGIAQMMRVGLYRAVHVKTLRSQKLRMLLTHRKLLQSKAIAVDNDLRGTLRNFGLKVGIVGAAKFEVRIRELVEGFPDLAVLIEPLLIVRRVLREQIGILHRRVLTVVRDDEVCRRLMTVPGVGPVVALTYRATVDVPARFRKSKSVGAVFGLTCSRDQSGERDRPGAISRCGDEMMRTMLYEAAQSMLVRSTRWSWLKAWAMQIAKRRGIKRAIVALARRLAVILHRIWVDGTDFRWTRDAAAA

SEQ ID NO: 510947 - protein, 423 aa, unidentified
MSQKKRSVAGLGAIYGRVCGMDVHKKLVVACVRILNVKDGTVQSTLRRFGTMTADLVELRQWLAEQQVTHVAMESTGVYWQPVFNVLQGHLEVWVVNAQHIKKVPGRKTDMKDAEWIAQLLQCGLLKPSFVPDRQQRELRDLTRQQSKLVQQRNAVDNRIQKVLETANIKLGSVASDVLGVSGRKMIEALIAGEKDVGKLAELAEKRLRQKIPQLERALEGELTEHHRFLLGQLLDQYDFLDKEIARTSERVGAIAPPSFREAVKQLDEVAGVGERGARALLAETGTDMSRFPSSKHFASWAGQCPGNRESAGKRKSGKTPEGNRHLDAVLTEMAHAAVRKKDSYFKSQYHRLAGRRGKKRAIGAVKHSLLVTVYFMLRDNKPYKDLGADYFDKLNPQQQIRYHVRKLNELGHDVELSVRPAA

SEQ ID NO: 510948 - protein, 369 aa, unidentified
MTFFIGVDLHKTQFTVHVRTEEESESLDQIKQYPTSPDGYAEFLARISRYKATGADVKVGVESTGNTRYFKNQVEKAGAEVTVINTLKFRVINESTKKTDKHDASTISEFLSKDMLPESYLCGKETENIRRLLKSRERLVRSTVGQKNEIHALLVSLGLSDELRSLQSKKGRQRILDTLESNNDYVLEAQSVKLMFEIIERIEESVKIIEKQLVELTKDDEMVNRLLTIRGCGKITAWTIRAYTEDISRFATAKKYAAFCGLVPWVQDSNETIHHGKITKRGPQELRTCFVQLVLGIRRCKDTSNWRMMQRYEYMKTNKGSGKSIVAAARKMAEIVWAMLSDKKDFDAQKMIGKYKPMSLAEEALTAMN

SEQ ID NO: 510949 - protein, 345 aa, unidentified
MKVTTVGIDLAKTVFQVHGVDERGNAVLRKQLKRKDVLSFFANLQACLIGMEACGSAHWWARKLAELGHTPRLMAPQFVKPYVKTNKSDRNDAEAICEAVARPNMRFVPAKLPEQQAVLALHRARQGFVKARTAQANQIRGLLTEFGIVIPKGIGHIAKRLPEILEEGENGLPGMMRQLLRCLGENLKDMDDHVGEMERQIKLWHRENEQSCKLEAIAGIGPITASAYVASLGDAKSFKNARQVPAWLGMVPRHEGTGGRATLGKISKRGDVYLRTMLIHGARSVIAQIERKPDQADEWLKKLLARRNKNIAAVALAAKNARIAWALLAHERGYQRDYVTPRPVA

SEQ ID NO: 510950 - protein, 421 aa, unidentified
MFKEEKQYKRIMIMMMEFLFLLLFFFVDKYNFVNKYIKKEWGELSCRTDFKDLSLVLVPILSNQVTKDQIEYHFLPNKGFSQSNHNKYKIMKILDTIGIDISKLNFDVRIHSTQFYQQFENSNKGFVTMLKWVYKNSSFSKENILFVFEHTGLYSHQLSVYLTDKEVPFSLIPGLEIKRSLGIARGKNDKVDATKIALYAYRLRDEIELTVLPTEQIRSLKTLLSLRDRIVKQRAGYITSLNEQKRVLVKNKNEVILYTQEKIIKHLSKQIKVLEIEIQEIISSDEQLSNQFKLITGIKGIGTQTALFVIAYTHGFTRFKTWRKFASYCGIAPFPNASGTSIRGRTKVSNLANKKIKSLFDLCAKSAIQHSPEMKVYYTRRLEEGKNKMSTINIIRNKLLSRIFAVVERQTPYVDIMKYAA

SEQ ID NO: 510951 - protein, 390 aa, unidentified
MESTPLTQTHPYILTKNKKQKKTNKEAGDRTLLGGEHRSASKIPASLPGVEPVSLPELGSSYLSGWAIPSVFLIRRRIMTQECFVGIDISKEELVVFVYPLGETFTVAYQEAPVAALCERLLGLCPKKVVMEATGGYEREVCIAFAQAGLPVCVVNPRQVRAFAQAMGTLCKTDQVDAQVIARFAEAIKPDLTVIPDALLQELSALVARRRQLVLMASQEQNRYLQAYSARAKTDIEHHRKELAMHIAAVNDCIGELIQKSPIWKAKEDLLRTVPGVGEVTSRTLLSELPELGELSGKQIAKLVGVAPHSYESGTFKGKRSIFGGRATVRRPLDMATLVATKHNPVIRTMYERLVARGKAKKVALVACMRKLLMTLNAMLKHQTAWSAMD

SEQ ID NO: 510952 - protein, 412 aa, unidentified
MEVVYERCAGLDVHKKSITACVLWALPKGKKKQEKRRFATFTQDLRAMTDWLRECGVTHVAMESTGVYWKPVWNILEGQFEILLVNAQHIKAVPGRKTDQKDSAWIADLLQHGLLRGSFVPPTPVRELRDLTRYRVSLAQECNRIANRVQKVLEDANIKLASVATDALGASGRAMLDAMIEGETDSGELAEMSKGLLRRKRAELRLALEGRVTEHHRFLLNQLMTHLRFTEDRMDDVEREIARRMEPYQHDVQRLCTIPGVEQVTAWGLLAEIGFNMDQFPSAAHLASWAGLCPGNFESAGKRLSGKTRKGSAALRRCLSQAGWAVSTKSDNYLTAFYRRVAARRGAKRAIIAVAHQLLVIAYYLLKRKEEYRELGANHFDNINADRVRRSLVKRLERLGHVVTLQPAVQSV

SEQ ID NO: 510953 - protein, 417 aa, unidentified
MLKIIHKICCGIDVHKKFVVATIGITNDAGTTEYQTKKFSTFTVDLLALRKWLAQHSCREVCMESTGKYWIPVFNILETKCNVVVANPKYVKGIQGKKTDKKDSVWICDLHKHGLVPNSFIPPLIIRQIRDLMRYRVKLTNFKSSEKNRIQNSLTVSNIMLSSVVSDTFGKSSMRIINRILKNPEDTDFDVVPMLHSSMKKNAEDIAKSINGNLTKPQAEKMAVCLSHLQSIDKLKLEIESAVLKLIEPYQEQISLILTLPGIKDIYTAIAIIGEIGVDMAVFKSSRHLCSWAGLTPQNNESAGKKKSVRVSRAGVYIKPLLVQCANAAIKSKDCPYFRVRYEQLRKRRGHKKAIIAIAHMLLNCIYHMLSKNKPFDYNLYRIETASRPKPLPKFTPEQAIFLLESLGAQIILPVGT

SEQ ID NO: 510954 - protein, 357 aa, unidentified
MNKISAINAVVKTFSIDLAKSKLQVHGFDANGQRCFARALSRTQTTALFRDLGRPVKVVMEACSSGHYWGRQLLALGHEVALIPPQFVTPLRIGNKTDGNDADAIYEAALRLKCRPVPVKAIEQQDLMLTQLERDRLVKQRTALTNQLRGILAERGLVFGKGLKALREGLREVLAREPDQEVTAPCLDWLQAQLFDWQRLDERLKDCDTRMRHDLRDHPRCQQLMEVDGIGLQTALFFFALVGDGSQFASGRACGSWVGLTPLEASSGERRFLGAITKRGDRTLRWLLVNGGRTLAAQAQRKAKNGLPLSERDTWLLGLIQRGGFNKAAVAMANKNARILWAMLRTGEAFRSPLMAA

SEQ ID NO: 510955 - protein, 419 aa, unidentified
MKVIYRRCAGLDVHEKSVSACVRILRGKELEIIEATFSTFTEDLEKLGDWLRRNRIPRVAMESTGVYWRPVWNILEQSGKLDLILLNAKHVKALPGHKTDRVDAARIAELAQYNLVRASFVPPPEIRELRDLVRRRVHLQQDRNRASNRIHRLLELQNIKLSSVLGKMTGATARSILEGLASKMTMKPEKLALLARHKRVRDRQPELAKALNCHPDDHFRFLLSELLEEQDRLTAKMRLLEDRIAERMEPHQELIDRLCEIPGIERLTAWMVISEIGVDMSRFPTAGHLASWCGLCPGNAESAGKRHSGRTSKGNRYVRRALVQAAWAAARINRKRTFFTTLFYRISGRAGMKKAAVAVAHRLLCVIYSMILTGSRYREQGADYFDRLHPERTRKRLTARLERLGFLVTLAPKPLTESS

SEQ ID NO: 510956 - protein, 341 aa, unidentified
MRFAEGIATYGIDLGKSKFHVVGVDDKGHALVRRTFRRASLLEYFANVPAALVGMEACPGSHWLARKLTTCGHTVRIIPAQFVKPFVKSNKNDVIDAAAIAEAVTRPSMRFVAVKRCDQFDLQALHRVRDRLVSSRTRLISQMRAFLLEYGIALQNGAGMFRQQLPTVVADEVNELTPAMRALLGELWNEFKTLDERIVAVSHQIEALAARDDVARRLTSIPGIGALTATALLAAVGDGKQFRRGRDLAAWLGLVPKQYSTGGKPTLLGISKRGNPYVRRLLIHGARACVLHLDRRRDRLGAWLDRLCGRMHSNKVVRTSAWIRDSLPDLLSPKFARSKGR

SEQ ID NO: 510957 - protein, 411 aa, unidentified
MSAGVITAVGIDVSKYKSTVAARRPGGEVALLPFDVSHDVAGIKKLLEKLHSLEDEDGEIRVIMEHTGMYWRPVALALQQAGFFVSVVNAILIHNFSDNSLRKIKTDKADALKIANYGLTFWMDLREYSTEDETRQMLKIQSRLYERTTTTGIMLRNGLISLLDQTFPGANKLFLNEGRNTKGHIKWVDFVIRFWHKECVAALSLHTFADTFQKWCKRTGYRFSPSDAERIHTAARNAVATLPKNGSTKLLITQAAISLNTVYDSLHALRTEINRLASLLPEYELVMEMEGVGKITGPQLMAEVGDVRRFSHKGALVAYAGVDAPPYQSGTFDAKNRHVSKRGSPHLRKVLFEIASMILVHGNPNNSVFCFMDKKRAEGKHFYVYTVAGAAKFLRIYYARVKEYLNPQEIA

SEQ ID NO: 510958 - protein, 395 aa, unidentified
MFIVGIDIAKRSHEAIIIAEDGQVVRKAFSFRNNCTGYNLLLEQVRRLTLVKSQIVFAMESTAHYWLALYARLLKDGYAVMVLNPIQSHSLRELYIRKAKTDARDSLIIADLVRFGRCKASNVPQDKILALRELCRSRAYLVDMAADLKRKLIALLDRIFPEYESLFDSVFSKASIAVLSKYSTPQKVKNANLRKLTDILMESSNGHFGEWKAHQLKEAACSSFGIDDSGGVYSTLLGMFLEQILSLTAQADSLEKQISVFFQEFNNPLTSIPGVGTVLAATILSEIGDITRFSSADKLLAYAGLDPSVKQSGEFKSNQNRISKRGSPYLRRAIWLASTVAVHRDPMFQTYYEKKISEGLHYMNVIGHVSRKMTAVIFAVLRDGQPYQPILQSAG

SEQ ID NO: 510959 - protein, 438 aa, unidentified
MDQVELVGAESADRSKAVEAFSSLTHFGGFDWGMSNHQFAMVDRNGEVLMNLSFTDDAQGWALLREAIAPYPQLGVAIETSTGPAVERLLELGVIVYPMNPKAAERFRDRKAPSGVKSDFLDAWCFADALRTDGHGWRQLRPSDPLTAELRILCRDQIGLIEQRTALVLQLKAALHEYYPVALQAFDDWTKQGPWEFVLQFPDPHRLVSASKHKWEKFLHAHKLYRPETAKKRLELFKKAKEFASPSQAVTSAKSLLAVSLAKSLRTLEDQLAMYRKRIGELFNSHPDRDCFGSLPGAGEKIAPRLLAELGSDRARFESHESLQMYAGTAPLTRQSGNSSITRIRWLCNKTLRSTVHHWANLSRPSCAWAEAYYQQKKKSGMSHAAALRCLGQRWLKILWKMWQTRTTYDEALHTRNQIKHGSWVIALKQSPAPATAG

SEQ ID NO: 510960 - protein, 430 aa, unidentified
MKSNTQNAKIEAITEKTLVLGIDVGSEMHYARAFDYRGIEYSKKPFKFSNTEAGFATFKEWILDLKERHEKDKVVPGMEPTGHYWFNLGKFLQDNEMKPVLVNPHHVKKSKELDDNNPTKNDRKDPKVIAGLVREGRYMIPYLPEGVYADLRTASNIRFQLQAELTRIQNRISRWFNIYFPEYKTVYGKPDAKSGMLILKAAPLPEDILTLGIDGVNQIWRDAKLRAVGKARAKTLIEAAEHSVGSKEGAVSARMEIRMLLEDYESRNIRLQEVMTLIEGLVKQIPMAEKLLEIKGVGIRTVSGFLAEVGDISRFNNPKELQKLAGLALVENSSGKHKGETTISRRGRKRLRYLLFEVAMSLVAKNPEFRELHNYYTTRRLNPLKKMQSLMAIAAKLIRVFYAMLTKGVDYDPKKMVSDIKRPAVYIQAA

SEQ ID NO: 510961 - protein, 351 aa, unidentified
MKTEHTARPKLFIGIDIHKRSWKIHCSTDISGGKTFSMPPSPEGLKNYVEKYFQDHQVITAYEAGCCGYHAHRSFESYGWRSLVVNPADVHRKGKEKHTKTDRIDAQLIARELKDGRLDSIHVPDMEREQLRSLFRRRNDLVKDYRRIKSLIKSQLLYFGVIVPEQYDNSHWSHGFRDWLDALQFEYCPARATLDSRMRQFRFVDQDLRDVSTQLRRFCKTYYKKDYNLLGSIPGIGGIVACGILCELGDLRRFRSLKHLSGYVGLAPGIYQSGDNLRTTGMTRRAHRLIRSYFIEASWQAIRTDPIMQSYYRKHLGKNVKSIIVKVARKLLSRTLAVIKTETPYVIGVVE

SEQ ID NO: 510962 - protein, 338 aa, unidentified
MSIVMGLDQHRAQITADWLDTETGEVKRARVTPADRAGMRRFLERFHGPELEVALEATTGWRFVVEELRRVGAAVHLAEPAETAGLRGPKKRAKGDRADARHLRELLMVKRLPESWIAPDHILDLRARVRLRHTLSEQRSEWQQRIQAVLYHHGCPQRRSLMVGDGREWLAAQPLPQSARGQVTVAVAMIDALEAQIAPLDKELRAYARRQAGCEALMAHYGIGALTAVTILAERGDCTRFSSSRHAVRYAGMDITVHQSDQRRAPGHLSRQGPPALRWALFEAAQSACRERSPDRDYYGQAAERLGHNRACLAVARKLLKRSYHTLRELGEEALQPA

SEQ ID NO: 510963 - protein, 403 aa, unidentified
MNAVGIDVSKGKSMVSIARPLGEIVAKPFNVPHTSTGMQDLLARLATLQGDTRIIMEHTGRYYEPMAEKLSSAGFFVCAVNPKLIRDHGNNTLRKVKTDKADSLKIARYGLDNWQDLRQHTGMDKKREQLKLMNRQFDFYMKQKTAAKNNLIALIDQTYPGANALFTSPARPDGSQKWVDFVASFWHADCVRKIGAKAFSERYHKWCLRNSYYFQSDKPEKIFAASRELLPTLPKDTMTKLIIQQAVKQLNTISALVEQLRAEMNRLASELPEYPIVMAMCGVGPSLGPQIMAEIGDVTRFAHRGSLTAFAGVDPGVSQSGTFEAKSRHASKRGSAQLRKALFQVMSVLLKTAPQDDPVFLFMDKKRAEGKQYYVYMTAGMNKFLRIYYGRVKEYLASQAKPE

SEQ ID NO: 510964 - protein, 355 aa, unidentified
MAHSIKLDFAGQHFHVGLDVHKNRWSVSIYSEHFEHKTFSQPPRVDMLVKYLRRNFPGGTFHCVYEAGFCGYWIAEQLEQHGIDCVVVHPADIPTKSKERTNKSDRVDCRKLARSLRNGDLKGIFVPSRDHLEDRHLLRTRRSTVKKQTRCKNQIKALLHFYGIEIPPDFANSYWSARFIRWIESIPMRRPSGQAALAMHLQELHHLRQIISVLNKEIRQLSRSEHYGHRVRLLRSIHGISTLSAMTLLTELVDIKRFPSLDKLASFVGLVPSIHASGEREYVRGMTCRRSAILRSILIESAWVAVRKDPALMMAHQRLSQRSTKTKAIVPIARKLLNRIRYVLNNNEEYVSAHV

SEQ ID NO: 510965 - protein, 412 aa, unidentified
MEVIVDRCAGLEVHKEQVTACVRSWAGDRRRRSETRTFLTFEASLRDLRDWLIGERVSGVVMEATGVYWKPVWYMLEDAGFELLLVNPHHVKAITGRKTDVRDAAWLAQLLECGLLSGSFVPPRPIRELRDVTRYRRRLVEDHGREELRLQKLLQDAQVKLDSVVTDINGVSARLILNALCDGERDPVVLADLAQRRLRVKIPQLRQAVPGRFNDHHAVLVRELLAHLDYLDAAIARLDARVDELMGPFVAARDRLMTIPGIKKRTAEIVIAEIGVDMGRFPTPAQLASWAGVCPGNNESAGKRRHGRTRHGDPWLASALIEAAWGAARTRGTSMQVRFWRIAKRRGTEKAAMAVAHHLLIVVWHLLADEITYQEMGPDYTTRFDDPGRRQRQLVHQLEQLGLKVTVQPAAA

SEQ ID NO: 510966 - protein, 346 aa, unidentified
MTEYAGQQFVGIDLHRRRSVIVRTTESGEVLEAVQILNDVDRLNSVMERAGEDPEVVLEATYGWYWAVDALRSAGCRVHLAHPLGVKAFEYRRVKNDVRDATDLADLLRMGRLPEAWIAPPATRELRELVRHRAKLVGLRTHCKAEIHAVLAECGIQVRLSDLFGIDGNRLLDRCPLSGPYAARVQSLRGLLEDLDEEIDLFERLIRGRLVADPGYTAVQQLPGIGPILAAVFVAEVGEVGRFGTAAQLACWAGLTPKHHESDSHVHRGRITKQGSRLVRWAAVESVKALGPSSVVGAYKKRVADRRGKNIGTVAAARKQVEFVFYAMRDHHVRALHPPGPPRAAA

SEQ ID NO: 510967 - protein, 420 aa, unidentified
MRQNDKVVCGIDIHKKFLVVALLTAMGEYVIERFTNNPPGLLKLKDWLIFHDCELVAAESTGVYWFPLFLTLEGYVNIIIANARQIKAIPGRKTDIIDAQWIATLALNGLIKPSRIFCRSDRELRKLTRARQKLTQERTDHKNRIHQILESVGIKLSSVLTDIFGKAGQYIVRKLLEGTTVDEIIEHIPVAQIRKKKAALLEALNNNLSSVDKLLLEQHLDMIKIIDGKIAEIDSELMYGFKDRKEDLDILTSIPGIGQTSAVTILAEIGNFNDFPSAEKLAAWTGIVPSVYQSAEKYRTGRITKQGSRQLRWILIEVANSAARTKHSHFHQYFVRMKRKVGCQKAVVALAHKILRVIWHLLHYREHYVDPISSTTPKKEFPNPENLQRRERSAIQLLTRLNYVVTKPTNELVVHEECRK

SEQ ID NO: 510968 - protein, 420 aa, unidentified
MVELATYVGIDIGSRFHKVAIIEEEVMERGDSQWKKTPTFKVLNRRADLDSLVGHIVTASGPQQEDVVVGLESTGYYYSRPIAEYLGKRCTILFVDGAAVKDARERFFSITHKDDDIDARCIARLLYLRDSLGEPLGVSPVALDLADRSQAIKVLSRQRRAMRKMITATTNRLHRIYSAIFPEAAEQHWPAILGVAHLFPTPSELAGAQPEQLKAIRSRKRRESLIALAKETMGADATRYRPLVLFLARQLKQQRDLLEEIEDELRGELSSHPQARILLTIPGIGPWTAAEIIGLVGDVRRYPTKKKFRKMLGVYPVCEQSGISQKRSRMGRGGSRYGRGILYIAVVGLLAPNRRPNFIADYVDRRRSEGMEGKAAVIAAMGKLAGIIWSCVYHNQPFDGERATRPRSGAICGGKIVPGG

SEQ ID NO: 510969 - protein, 371 aa, unidentified
MKKSSTLFVGLDVHKDTIDVAVTTTGRAAEVRHIGTIGGDLAAVDKSLRKLISAGHSLHVVYEAGPCGFVLYRHLAKQGIEVEIVAPSSIPKPPGERIKTDKRDAMMLARLARAGELKAITVPDAADEAVRDLLRARTDIVCAQRAARHQLKAILLRNDIRYVGKSSWTAAHLRWISRLILPYPEQQIAFQEYVLAVTEANERIARLDRAIESAVAAWRWQPVVEALCALRGIALLSAATLVAEIGAIERFSSPRQLMAYLGLIPSEHSSGQKRRQGAITKAGNSHARRMLIECAWLYRYPAKVAPILQNRLEKVSPQIREIAWNAQVRLCGRFRKLAARKLQHNKIVVAIARELVGFIWAIARVQAPRPN

SEQ ID NO: 510970 - protein, 462 aa, unidentified
MAKVNKTTVPASSRAARKAAPFSVINLHAAGIDIGDKIHAVAVSPSKTDEPVRIFGTMTCDLEAISRWLKECEVTTIAMESTGIYWKPLFCYLVREGYEVLLVNARNVKNVSGRKTDESDAAWLQKLHSCGLLQSSYLPSDEQEGLRTLVRFRRTLIADSSRCVLRMQKSLELMNIKLHTVISDLMGETGSAIVEAILAGERNAEAFLPLVGKRIKADKETIKKSLQGTWRDEHIFILKQNYGLYCDYKRRISECDEQIEHQLRNYEALRNEGEIETNGIARETDTKHKKKQKNSPRFDVRQYLHRITGVDIISIPGLSDVSGLQILAETGTDMSKWPTEKHFASWLNLCPNNKLSGGKLISSKVMKGRASIAGQAFRSAANALQRSDHALGDYFRRMKAKGGNKYAIVATANKLSTIYYKMVSTQTPFTPQEMEAYQQKIRNHKIKYLERKLQQLKKEPVE

SEQ ID NO: 510971 - protein, 426 aa, unidentified
MRSRAIQYVGIDVHQATLVCVVKDEAGDLILESKVATQGDAVERFVRGLGKRTHIAFEEGSQAQWLYELIRPIAERVVVCDPRKIATKGNKDDQGDAERLCDLLRLNVLQPVFHEHRDRELKELVRCYEALVDDSAGVMLRIRALYRSRAIVVRPRSVYHPAKRAEWLEQITDRGGRYRAEQLYAQLDKTLELRRHARSAVLRQACNYGAYRVLRTVPGIGPLRAAELMAIIGDPHRFRTKRQLWSYAGLGLITRSSGEWIAEPSTGTIRRRKRAPMTRGLNPNFNRLLKKVLKMAARDVTSRPSELQQWYERALNRGVRPRDGPPNTGAKNRGRVAGRLEERSVVPSTSNRAAGLNDLSALSGGSVAVASQVDGSRVSINAASGPRVPRLTLCPLGEPESALGHESQIEPWFPPQEPMRTEDVFD

SEQ ID NO: 510972 - protein, 341 aa, unidentified
MKNLFIGVDFSKEKVDVAIILADGLAETAARVFNEFKTTVSGYRQLVKWVDQNSCGIDSSLWLFCGENTGDYSKGLCNFLYGKGYDMWLENAKSIKDASGLRRLKSDRADASMIAEYAMRNYDKAVMYEPLSESLAQLRELFLYRQMVVRHRCSFQVRRGEKRLTMEKSPVKTMISQSGRHIVSELNKEIEKIDKRIADLIKSDEELTEVFNIVTSVPGIGTQNAVCLMVYTDNFRRFNYDSRKIACYYGLAPFGKDSGTSVHSDPHVHYMANRQIKAMLTQAALAAVNFNPIMTGYYMRLVERGKKKQVALNNVKNKLVHLVTAMVRNRQKFTPEYKISK

SEQ ID NO: 510973 - protein, 312 aa, unidentified
MPIIGIDVSKNKLHCALLSEAGKLKSKVFSNSPEGHIVLLQWAERLGQCQVVRLHAVLEATGVYHEAIAVALHRAGARVSVVNPAQVKHFAQGLAVKSKTDASDPVVLARYGALVKPPPWEPPPPEITELKALITRLEAIEANMRRELNRIEKTTITGVPTAVRESLEKSVSFLKEEKARLEKTIREHIDQHPTLKQDRHLLESIPAVGPKTAWRMLTLFRARTFTRAPQAAAYVGLVPIEHQSGTSVLKRPRLSKAGDARLRAALYMAAVVATQYNPDIRRLYQRLIARGKTKMSASVLRCVSSSISALEC

SEQ ID NO: 510974 - protein, 343 aa, unidentified
MQAVTTIGLDIAKSIFQIHGVDAAGNVIVRRKLKRRYVLPFFQRLSPCLIGIEACASSHHWSRELQALGHTVRLMPPAYVKPYVKRQKNDAADAEAICEAVTRANMRFVETKTPEQQSCLMLHRTRHLFIRQQTAVINAMRAHLAEYGIIAAVGRNGVEELLGVVADPSDKRVPEIARACLAALGAQLRMLKAQILEFDRMITAWHRSNETSKRLDAIPGVGPALATALVASVPDPKAFRSGRNFSAWIGLVPKQHSSGGKDKLGSISKQGDRYLRSLFTAGALAVIRYAKIHGIKHRPWLTALLARRPAKVAAIALANKIARMAWAMMARGDRYREPVALAA

SEQ ID NO: 510975 - protein, 343 aa, unidentified
MQVTTVGLDLAKRIFQVHGVDAAGKVVIRRRLQRSEIAAFFADLPACLVGIEACATAHHWARLIGASGHQVRLIPPSYVKPYVRRSKTDAADAEAICEAVGRPSMRFVPVKSAHQQAALLHHRARDLLVRQRTMLINAIRGHLGEFGIIAPAGRHRVADLVNLLQGADDAEVPALARGALQSLFAELSALEIRIKVVEAVIMREHRSNAVSRRLTTIPGIGPITASALAGTIADPLAFKSGRELAAWIGLVPRQHSSGGKQKMGRVSKQGDRYLRRLLTVGATAVMRRLPGKTDGLSLWVRALLDRRPFRLVSLALANKMARVAWAIMVRPDTYKASAMTAAA

SEQ ID NO: 510976 - protein, 343 aa, unidentified
MKLSRVGVDLAKNVYQLHGVDRHGKTTWKRRLRRGQWLQALLDKTDPGCEIGMEACTGAHHWARELRSHGYTVRLIAPQFVKPYVKSNKNDANDAEAICEAMSRPHMRFVTVKRVEQQDIQATHRVRTELKDQRNAKANQIRGLVAEYGLVAPQTLLALRRAIPCWLEDADNGLTDYFRSLLHGLWRDLVALDDRMTELDKQIKTLADSNEVAQRLQQLRGVGPLVATALIATVGDGAQYKKGKQMAAALGLTPRQCSSGDKQRLLGISKRGDVYMRTMLIHGARAVVSQAKHRDDRLSQWVTSIAKRKHPNVAAVALANKTARMAWAMLRNEANYDPDLAIS

SEQ ID NO: 510977 - protein, 319 aa, unidentified
MPQQGRIVGIDVSKLKAEACIRSLQLRLSQPSTPAGEQELIAWLSDNRVGLAVMEASGGYERGWAQALRKAGIAVRIVDPKRVRYFAKSAGRLAKNDPIDAEMIAWFAETFATEAPPAPDPDRDGLDRLVTERRMLVRLSAQIGQLGEHQQPRVVETAHRAIIKAIGAQLAKLETAIGAQIQANAVFAARRAIIQSVPGFGAHFVAGAIAWLPELGRIGNKAAAALVGIAPYNDDSGTHHGERHIKDGRREIRDLLYMATLGAATRHNPVIKAYYQRLRARGKRAKVALVACMRKLIVILNTMLARAQMWNPAGATAIA

SEQ ID NO: 510978 - protein, 337 aa, unidentified
MNYVGLDLGLRQSSLCLLDAHGKILQRQEIKGDWNQVAQTVRQLPGPLAVCFEASCGYGRVYDLLQPHAARLSVAHPGQLRLIYHAKKKNNRLDAEKLAKLLYLDLVPQVHVPALDVRAWRALIEFRQTIVHRRVAVKNQLRALLRGLGIAAPRGLWTVKGQHWLQTLELGGMDGLRRDMLLQELEQIHQRLQSVEAELEQIAKTHPGVALLRTIPGVGLRTAEAFVAYIDDPRRFARVRQVGSYLGLVPCQDATGDLNRLGHITRDGPATVRKLLCEAAWQSIRRDPALKAYFERVMRGDPERKKIALVATAHHLARVMLAMLRTGEVYRSAKVPG

SEQ ID NO: 510979 - protein, 450 aa, unidentified
MQLVAERILIRGWRFVSVRGVSFNRLFKLLRKGVKLMLDTIFIGIDVSSQNNAVHVMNHNGDKLWQDAFSNSRKGSEDLVKKVLLTPESKHAFLRFGLEATGCYGEGLFMFLRETERIPNTRKAIHRLNPKQVKRFHDSYSDLPKDDFTDAFIIADSLRFGRLGMKEAVVEDRFLALQRLTRWRFQNAKELTREKNRYLQNLFLKFSSMAQLDGTQDSLFSNLFGATAMDFVDDFESVDQIAYTPLEELVEYLKIHGKNHFVDPEALAKDIKKAARTSYRLPKALQDSVNEVLAMQCNTIRFYEKQLKEVDKVIERQMDAIPNTLQSIPGIGPVYAAGLIAEIGDVKRFENEAALAKYAGLTWKKHQSGKFEADSTHLIQGGNRFLRYYFCQAANKVRQHDPDYQAFYNKKLRETKSTPHKRALVLTARKLVRLVYVLLRDQKLYQLRIR

SEQ ID NO: 510980 - protein, 343 aa, unidentified
MDYFAGLDVSVKETSVCIVDDAGKIVREARVASEPEALLQLLTNTIYRFKRVGLEAGPLSQWLYSVLAEAGLPVICVETRHMRAVLKAQINKTDRNDARGMAQMMRAGLYRPVHVKTLRSQKLRMLLTHRKLLQSKAIAIENELRASLRNFGLKVGMVGTMKFEARIRELVERLPDLSVLVEPLLIVRRIIREQLGILHRRLLAIVRDDEVCRRLTTIPGVGPVVALTFRVTVDVPARFRKSKAVGAVFGLTPAKYQSGENDRTGAISRCGDEMMRIMLYEAAQSMLVRTAKWSWLKAWAMKIAKHRGMKKAIVALARRLAVIMHRMWVDGTEFRWTRELPAA

SEQ ID NO: 510981 - protein, 313 aa, unidentified
MSNSLPQTIGIDISKKHLDAHAHPCGDARQFANTAPGFAALLKWTGQWQVERIAYEATGTYHRAFEQALASLPLVQINPLRARRFAQATGTLAKTDRIDAGVLARMAATLQPDVRPVKSPELAGLAELMNARDGLVRDRTALKNREKNLLLPLLKRQAKARLEQIARHIEAIDKQAQALITADLALARKREIIASIKGLGPITAAQLIATMPELGSLENKQAAALAGLAPITRQSGQWAGKAHIHAGRANVRRSLYMPALVAARFNPDIKAKYTHLISSGKPAKVAITAVMRKLIVMANALLKADRLWKESIA

SEQ ID NO: 510982 - protein, 309 aa, unidentified
MEKMFVGIDISKSKLDVFIRPTGETLLVKNDQSEVDQLAEKLIALHPEKIVLEATGGYESLVFAALAAAKLPVVRVNAKFARDFAKAIGQLAKTDKVDAKILAHYAEVINPELRPIPDSAQDELAALITRRRQISAMITMESNRLQCVPLRIKEKIQLHLNYLRAQLDEIEGETDTFIRQQPAWEEKRNLLTGMKGVGPTVSADLIGLLPELGTLSNKKITALVGLAPFKNESGKARRKQVIKGGRGMVRSILYMASLSASQHNPAIKTFYQRLVAAGKSKKIALTACMRKVLIILNSMVKNKTEWRTA

SEQ ID NO: 510983 - protein, 346 aa, unidentified
MEKSISNLSSVTTVGLDLAKLVFQVHCVDASGRLVVAKAMKRKNLLAFFGALPPCLVGLEASGSAHHWARELIKLGHDARLMPPAYVKPYVRRQKNDAADAAAICEAVTRPSMRFVGVRTLENQATLMHHKTREMLVAQRTQLLNSLRGHLGEIGVIAAQGPRHARQLADRIEAGDEMIPPPVCEALAPLVVQLRNLDEAIARLDRAIAKMAHKDETARRLMTIPGFGPITASAMVASVQDASGFSGPREFAAFLGLVPTQNSSGGKQRLGRISKMGNRYLRKLLVVGAHAVLYHRKPHTDALRMWAKKLMETKPFKLVAVALANKMARIAFAILRARTSYNAIAA

SEQ ID NO: 510984 - protein, 429 aa, unidentified
MNYNTQNAKIASITEKTLIVGIDVGSETHYARAFNWRNYEYSKKPLAFSNDEAGFSSFKDWMDDIAEKHGMKVVIPGMEPTGHYWLNLGAYLQEQGMKPVHVNPHHVKKSKELDDNNPSKNDRKDPKTIAGLVNEGRFSYPYIPTGIYAEIRNLSNLRIQTQEEITRIKNRIARWFSIYFPEIKDVYRNPDAVSGLMVIKQAPLPCDIRELGVEGVNKIWRDARLKGVGIKRATTLVTAAEHSIGNTEAPRSARKEIRNLLNDYEIYKNRMDELMEEIRETLSEIPYIDKLMEINGIGIKTVSCFIAEVGDIGRFDNPKQVQKLAGYAIVADSSGKHNGESRISHRGRKRLRYALYEATISVIGKNKEFKEIHSYYRTREKNPLKKMQSVIAVACKLIRIFYTILTKGVDYDGQKMLTDIVRPEMQLAA

SEQ ID NO: 510985 - protein, 398 aa, unidentified
MSRIWAGIDSGKGHHHGLALDADGKTLLSRRVANDEPELLKLIGDVLDLADGREVTWAIDMTGGEPALLLALLVSHGQEVLYLPGRLVNRASDSYRGEGKTDARDAYVIADQARMRRDLRPIRPGDEAAIELKLLTGRRADLVEDRTRSVNRLRGTLLSMFPALERALDVTNTGPLKLLTGYQTPAAIRRTGVTRLTKWLANRKVRNARTLAETAVEAAERQHTAIPGEKTIAKLVHTLAEEVMALNEQIREMDKLIEGRFREHELADIVQSVPGIGATLGAEFLAAVGGSLDEFDSPDALAAFAGVAPAPRDSGKVSGNLHRPVVYHRRLQRVFYTSALVSVRSDPNSRKFYDRKRAEGKKHVQAVLALARRRVNVIWALIRDRRCYELAPPVTTAA

SEQ ID NO: 510986 - protein, 373 aa, unidentified
MRRNALNKAGELVGKNIWCGRVSIRDGLDNFIKVLVPHCQDFDHVAVVESTYNWYCLADAFEERGWLLRVADPSTVSQANLKSSDDRTDAQYLAERLRVGSLKHYLPLNYSSRALRDLCRYRMAMVQDCASLKIKLINLYRNQLSKNVRVADLLERCQPHMQPNYRFNSDILEEFKDPNIRPRVAFEISRIAMLEEMIEECNAEIQKQCKDQELVKLCKTIPGCGPVLSAVICTEIGTMQRFKFAGDFVSYCRLCSTSKLSNGKSKGLGNAKNGNAYLSWAFTEVAQYASRNPVIREILQRLLRKYGGLRVKAIRTLAAKIARVTFYVLKNKQPFNAAKCFGMELTKSIVKKLPHKPLREDAAVVLPTVAGQA

SEQ ID NO: 510987 - protein, 422 aa, unidentified
MNKHRYQAKGLQQVDWGQLAQAVEGRRVVLGVDVAKEDFYGAIMLSAREVLATVMWRHPQQTRALEASLRALGAAGIDVALEPSGTYGDSVREVLRALGCSIYLVSPKRVHDAAEVYDGVPSLHDAKAAYLIGRLHLEGASSAWRQDCAQRRDRQALVAELDLYQSEQRRNLNRLEALLSRHWPELGRIAEINRCGVLHLLTTYGSAQAVHAERSAAEALLYRIGRGLANTETIEAILDSAEHTLGVPCTPGEQHLLQVLAEEVLRTREALRGVERRIAELVRRDPPLQPLADTLGKTTALVLDTALGSPLDYPNPHAYLKAMGLNLKERSSGQHQGRLRITKRGPGRARRYLFLSALRFVQRDPVVRAWYLRKVQRDGQLPRFNALVAVMRKLALALWHVARGSPFDSRKLFDLKNLGLAA

SEQ ID NO: 510988 - protein, 408 aa, unidentified
MQVEHPVCCGIDVHKDTLTACLRRVEDNGQVHKEGREFATTYTSLLALSDWLVEQHCPVVAMESTGVYWKPVYHVLAGTVEVFIGNAHELRSRPGKKTDKRDAAWIAELLAHGLIRPSFVPPPEICALRDVTRTRVALVQTRSQSKNRVHKLLEDTNLKLGSVVSDLFGVTGRRMLAALVAGERDPQVLASLALGSLKHKRPQLELALTGQFTAHHGTLLGLLLELIEMLDRQIATLDQQIGALVAPLQAQIAQLDSIPGVDIIAARDILAEIGTDMSRFGDAARLASWAGVCPGNHESAGKRYRGKTRKGNRYLRRILVQCAWGARKTPTFLGRTFRRLEVRIGKKKAALALAHKILVIVYHLLAAGTCYEEARYDQYNPRQEARERQRAIKALERLGYTVTVARAA

SEQ ID NO: 510989 - protein, 394 aa, unidentified
MVQSGRVVIGMDPHKRSVTIEVMAGDEAVLGGGRFATDPDGFTAMREYVRRWPGRVWAIEGCNGIGRHVALRLLAQNQDVLDVPPKLSARARVFATGQGRKTDATDAHSIALVGTRMAGLRPVIDDEQLAVLRTLVDRRRSLGEEHTRMVSQLHHLLLELVPGGAKQFLSAAQAKAILAKVRPRDAAGKVRRRVAAELVGDLERIYRRKKAADKELTELVRATGTSLLDLNGIGPSGAARLLVEVGDITRFPNRAHFASWTGTAPIDASSGDHVRHRLSRAGNRQINRVLHIMATVQLRNPGIGRDYYDRKRAAGKTSMEAMRCLKRRLSDVVFRTMLDDTAAHATGSKTGPGGHRGASLTSSAAGSHPHTDTSDQPLPGPVADEPRTVLPAAS

SEQ ID NO: 510990 - protein, 313 aa, unidentified
MSQNNPVILHVGLDVAKLSLQLHLAGRFYTLANDRKGHVQLLKLLRAHPNAQVVCEATGGYEQSVVRALQAADLPVSIIEASRVRYFARAQGQRAKTDPIDAALLSQYGATFQPAATPAPAPQQQQLADLSQRRRQLIQTRTAETNRREHYTDPLCVRQARQLHKLLEKQIEQCDAAITQLIAADAALAHKAKRLDAIAGVGPVVAATVLAEMPELGQLNAQTAAALAGVAPYNRDSGEQAGGRHIGGGRRPVRNALYMATLSAVRHDRILKAFYLRLRAAGKKPLVALTACMRKLIVLMNRLLKNDQFHLAN

SEQ ID NO: 510991 - protein, 348 aa, unidentified
MTNQPHIIGVDLGKHWFHVMGLDREGAIVLRKKLSRAQLRAFAATIPRSIVAMEACCGSQYWGRVFVQAGHEVRIVPAQFVKPYVKTNKNDFNDAEAIAEAASRATMRFVPLKTTEQLELQASHRIRRRLVHERTAVVNQLRALLLEYGIVTPVGRETFARRWSQTLGSASEQLSPRLLVLIQRLRAHWVTLDGQIAEATQELTAWADGSPLCQRVATVPGVGPMIATALVSAVGDARMFARGRDMAAWLGLVPRQHSTGGKSTLGRISRRGNGYLRQLFLQGAVSAYLWMKRDRSALGAWLQQLDRRRHRPVVITALANKLVRICWKVLTSDTPFRLHPARPVEHAV

SEQ ID NO: 510992 - protein, 429 aa, unidentified
MTGSNDTPQRLTLVAVDIAKHYHDVLIEPPAPKRRSRLRLANDLEDFEHLANYLRGLKSSVLVGFEATGNYHRPLAYFLHCQGFELRLIPTLALARTREAMHNSWDKNDPKDAQVILHLLNTGLAQAWHDPMVNGINDIQELSKTHFQVTLARVRVWLTLRNHYFALYFPEIDRFIRSDHSVWLVQLLASFPTPASITALSEGEFQTRAWNLVGRKVSKRALLAEIYAAAQRSIGVPVALDSAAIAMFRLVLEEYLTLHQLREHIAERAALLLEGNSDSRRLMTVPGIGPSNALTILAEVGDLRRFRHHRQFLSFCGLNLSTLQSGKSRGQSHISKYGNARLRTALWMAAQTAVRMRENSFRRKFDNYVRGNPLDADLRRKAYTAVAAKLARVIFGLIKHQADYRPFFEHQFRVEEPSRARAVGAVSTS

SEQ ID NO: 510993 - protein, 370 aa, unidentified
MSQSSTLFIGMDVHKDSIAVAYVAQEHGAEVIYLGTIGTRQCDIDQLLRKMQSKAKHLVFVYEAGPCGYWLYRYLSKKGYDGWVVAPSLIPKKPGDRVKTDRRDAMQLARLARSGDLTVVYVPQVEDEAIRDLTRAREDTLSDLKDAKFRLKAFLLRHDIRYTGRANWSLAHLRWLSEVVCPTPAQQIVFQEYVCAVNEHTARLARLEQELQEHVKAWRLHPVVEALQALRGVQFTVAVTMVAEIGDLTRFDHPSELMKFLGLIPAESSSGERRQQGSITKAGNTHARRALVEGAWAYRYPAKVSRHLQLRLETQPKIIQDISWKAQVRLCKRYRKLLARGKHANVVTVAIARELAGFMWAIAKEIPVTP

SEQ ID NO: 510994 - protein, 384 aa, unidentified
MSAHPTQIQAAAQLQANTLFASLELSKARWLVTASAPGSDKLSRHQVPGGDGQALLELLWRLQAAAARRSAPVMIIVIQEAGLDGFWIHRLLVQNGITSHVVDPASIAVNRRHRRAKTDKIDGVKLLRTLMAWMRGERQVCTMVQPPSPEDEDRRRLARERARLLKERVQHTNRIKGLLSGQGIPDYDPLHRDRRGRLAALTTGDGRPLPKRLETEIGRELDRLELVASQLAAVERERDALMAQTAEADARAAPAALIRLRGIGPELAALLWLEALFRRFENRRQIAAYAGLTPSPWKSGGIDREQGIAKSGNPRLRRAMIELAWFWVRHQPGSALSRWFVERVGAARGRVRRIAIVALARKLLVALWRYVTQGVVPEGAVLKG

SEQ ID NO: 510995 - protein, 412 aa, unidentified
MEVVYPCCCGLDVHKKSITACVLWAEVKGKSRKQKKRFGTFTHDLLQLADWLAECGVTHVAMESTGVYWKPVWNILAEQFEALLVNAQHIKAVPGRKTDQKDSEWIADLLQHGLLRGSFVPPQPTRELRDLTRYRVSLVQEINRIANRIQKVLEDANIKLASVATDALGASGRAILEAMLAGEQDAGRLAEMAQGKLRNKIPELQLALEGRMTEHHRFLLRQLFEHLRFTESKRSEIEQEIDRRMLPFEDKVTRLCTIPGVDRVTAWGMLAEMGMNMNQFPSSGHLASWACLCPGSFESAGKRLSGKMRKGNVSLRRCLSQAAWAISMMKNNYLSALYRRIAARRGAKRAVMAVAHALLEIAYHMLKRKEDYRELGADHFDRIDVNRIRRSLVRRLERLGHKVTLEPLAQTA

SEQ ID NO: 510996 - protein, 342 aa, unidentified
MDHSAGLDVSVKETSICIVDDTGRIVREVKVASEPEALLPVLKNPAYHFKRIGLEAGPLSQWLYSALAEAGLPVICVETRHMRAVLKAQINKTDRNDARGIAQMMRVGLYRPVHVKTLRSQKLRMLLTHRKLLQSKAIAIDNDLRGTLRNFGLKVGMVGKVKFEARIKELVENIPDLAVLVEPLLIVRRVLREQFVIQHRRLLAIVRDDEVCRRLMTVPGVGPVVSLTYRATVDVPARFHKSKSVGAVFGLTCAKYQSGEVEWSGRISRCGDEMMRVMLYEAAQSMLRSKKWSWLKAWAMQIARRRGMKKAIVALARRLAVIMHRIWVDGTEFRWTREVAAA

SEQ ID NO: 510997 - protein, 341 aa, unidentified
MEYIGIDVHQRESQVCIVDDGGRVLIERRVRTRRERFAALLGAHAGARVLLEASTESEWVAHAVEGLGHEVIVADPNFAPMYANRRRRVKTDRRDARTLADACRLGAYRPAHRTSAAQRTVRAQLAVREALVRTRTRYISVIRAVLRRDGVRVPSGGAATFGPRVQALALSATQRRLIAPLLALLRSLNQQLAVLETQLAREVAGHAAGRRLCTVPGVGPVMAAAVVATLDDVGRFASADQVAAYVGLVPRERSSGEQQRRGPLTKAGNSRVRWLLVQAAWAYWRSRATAGTVLRAWVERLAGRRGRLRAVVALARRLARILYAVWRDGTVYQPVRLAVVA

SEQ ID NO: 510998 - protein, 292 aa, unidentified
MNIGTRVSPAPRTFGTTTRSLKELGEWLEGLLITDGAMESTGIYWKPVLHVLRDYPLNLIVVNARHIKNVPGRKTDKADSQWICKLLISGLLKGSFIPPENIQELRDLHRYKKKLIGTIASEKNRIIRVLEDANVKLSSVVSDTSGVTATYLINGLIQGRKDLDKLVMECYHKKLHASPEQIREAINGRLNAHHAFILKSMQKHIASVEVQIVEIDVEIGKYINDFEKEIELLQTIPGVGKEGAIGIVAEIGVDMDVFPSEHHLASHSGMCPGNNESAGKKKVQEHDRETNI

SEQ ID NO: 510999 - protein, 409 aa, unidentified
MQECNAATHGIETASSQLTLSAASGKGAAKQYAAYIGLDVHKETIAVAVAEPGRDEPIYRGEIANTPKKVEKLIGKLSEAYDGGVLLFCYEAGPCGYGLYRQLIASGHDCQVVAPSLIPKKAGERIKNDRRDALKLARLLRSGDLTAVWVPDQEQERMRDLSRARDDLKAQERTARQQLNAFLLRHGQHWPKGKSRWTPAHENWLAGLKLDDPWQQVVLQTYIDAERAAGERVAQLTDQLMRALPEWSLAPVVASLVALRGIDKLAAIVLLAELGDISRFDSPKQLMAFLGLVPSEHSSGGRRRQGAITLTGNSHARRMLVESAWSYRFPARQTKHLKSKAANASPAAKQIAWKAQVRLCGRYRSMTRAGKNTKLVCVAIARELAGFLWDIVRQEMPRLAPTQAPAMSA

SEQ ID NO: 511000 - protein, 341 aa, unidentified
MEEVSTIGLDLAKHVFQAHGASASGAVVFRKKLRRDQVLAFFAGQPRCRVAMEACASAHHWGRALGELGHEVRLIPPAYVKPFVKRQKNDMADAEAICEAAQRPTMRFVAVKSEAKQADAVIFRTRDLLVRQRTQIINALRGHFSEYGLIAPQGPSHVERLIAQVEDPASGIPDAARSCLARLVKILRSLQTEIAELDREIAARAKADDLARRLMTVPGIGPLIATALEALAPAPETFRSGRDFAAWIGLTPMQRSTGGKERLGRTSRMGERTLRRLLIIAASGVVRWAKRKGVPAGSWLGRMLARKPPMLVIVALANKNARIAWALITKGGIYRAPAVAA

SEQ ID NO: 511001 - protein, 367 aa, unidentified
MMGWMAPLRHLSAKLLSDRNSSEWEPSMGEVTTIGLDLAKHVFQVHGVDAEGATVLRKQLRRAQVLAFFSRLPPCLVGLEACATAHYWARELRALGHEVRLMPAQYVKAYIKRNKHDAADAEAICEAVGRPTMRFVPVKTADQQAAVLLHRGRERLVRQRTGLVNALRGHLAEFGVIAPQGLRNVGKLIAIVRDEGDARLPDLARQVLQVLAAQIEQLEAAVAAIEKQLMAWHKSNPVSQRLASVPGIGPIIATALAATVVEPSGFRSGREFAAWLGLVPRQNSTGGKHRLGGISKRGNQYLRRLLINGASANLLRSKATKADPWVIGLRRRRPPLVVAVALANKTARIAWAVMHRHENYQRVAAAA

SEQ ID NO: 511002 - protein, 354 aa, unidentified
MAEKLISVTTVIGIDIGKNTFHVVGLDGRGAIVLRQKWSRGQVGARLANMPPCLIGMEACVGAHHLSRRLRALGHDARLMPAKYVRPYSKGQKNDFRDAEAIAEAVQRPTMKFVATKTADQLDLQALHRVRERLVSQRTGIINQIRAFLLERGIAVRQGVRSLRAELPSILATRCEALSARMVRLIEDLAGDWRGLDERIEGLSGEIDGLARQDAGCERLMSMPGIGPIISSAIVAAIGAGEAFNKGRDFAAWLGLVPKQISTGDRTILGKISKRGNRYLRVLFVQAAWVVLIRPKSWQHYGLKTWIDAAKRRLHHNVLAIALANKLARIAWSVLSHGRTFEARRIHEAAAQPA

SEQ ID NO: 511003 - protein, 314 aa, unidentified
MLESVRIVNDVERLASVMARAGECPEVVLEATYGWYWAVDALQAGGASVHLAHPLGVKAFEYRRVKNDVRDAADLADLLRMGRLPEAWIAPPATRELRELVRHRAKLVGLRSHCKAEVHAVLAKCGVQVLMSDLFGVAGTALLDGLDLPAPYAARIASLRRLMDDLDFEVDLFAGMVRGRMAHEPGYTAVQKIPGIGPTLGAVFVAEIGDITRFASAPKLTCWAGLTPKHHESDTHVHRGRITKQGSRLVRWAAIESVKTISATTPAGVLRERVADRRGRNIGSVAAARRQLEFVFYALRDGHVRALEHPPRVA

SEQ ID NO: 511004 - protein, 371 aa, unidentified
MRIIGCDLHARQQTLAMLNTETGEVVNRTLQHEGKEVREFYSQLAHPVLVGIEAIGPMQWFLDLLQELGIECQVGDATKIRAAEPRKQKHDRRDAELILKLLVEKRFPAIWMPSKELLDLRGLLLHRHQWVRLRTQIQNALQAIALANGLRRGPGLWSYDGQAKIAFLPLPPHTSYRRSALQAEYRDMEEEIENLTAQVAEQAEHRSGAQLLLTHPGVGPVTALATDVFLGDPRRFADGKALASYVGLIPQERSSGRRRRLGKITKQGNPLLRFLWNEAGAHAARRDPELKRFYRRKLVQKGLGKARVAVARKLGIRLWIMLRDHIDYEEFCRRGQKPSGAACAGMPGTRLVHADHDDLCELPSCEGRRVA

SEQ ID NO: 511005 - protein, 376 aa, unidentified
MREKLRFLGLDVHAETIAVAVAEPDGEVRNLGTIANREDSIRKFIKKLGSPEQLRACYEAGPTGFVLYWQLTQLGVDCVVVAPTLVPKKPGDRVKTDRRDALKLARSHRSGDLTAVWVPDEDSEALRDLVRQREAAKQDQLRARHRLTKFLLRTGQRPPLGLKAWTERYMRWLEQVRFTQPAQEVTLRDCLNEVEHMSARVKRLEEAILEVVKLAPQPMQEVIRGLQALRGVAHISAVTIAAELGNISSRFQSARKLMGYSGVFPSEDSSGNRIRRGGITKTGNAHLRRIVVESAWCYRHWPRVGARLRKRQQGIPAEITEIAWKAQNRLHKRYMKLSMAGKDPRKVMTAVARELLGFIWAIAIKAEQAFQQPIAA

SEQ ID NO: 511006 - protein, 412 aa, unidentified
MEGETVIAGVDTHKDVHVLCLLDGLGRKIWSGSFGADPEGYDRLAEAIGDPGSCMVVGVEGTASYGAGLTRRLVELGYNVVEVLRPKRDKVRPGEGKSDPLDAERAARKAASGKGCSVPKSQDGWVEAVRQLYVARRLAVATSTSCVACAKSMLTTAPSALRERFRGRERPKDLMPLLARGRKAGDALEESVLASLRSVAAVWKEARSQVESLDERIRALLEANAPALLGVEGCGTTTAAALVVAAGDNPGRLKGEAAFSMMCGASPIPASSGKTDRHRLNRGGNRQANWALYEIAIKRMAYDERTRRYVARRTAEGKSRREAVRCLKRYIAREVYHVLMDPNPDGAAPEGPELAKMRKAMRVTQKKAAAELGLSAATLGHLERGKRRSTKLERRYYELLCELERTLPQTAS

SEQ ID NO: 511007 - protein, 454 aa, unidentified
MGKRPGRQREFSPVHPNAAAIDIGATMHMAAVDPGCDAEPVRSFGTFTGNLHRLADWFSACGVKTVVMESTGVYWIPAFEILDQRGFEVLLVNARDAKHVPGRKTDVSDAQWLQQLHTYGLLRGSFQPKGEIAVLRAYLRQRERLLDYAAAHIQHMQKALTQMNLQLHHVVTDVTGATGMRIIRAMVAGERDPGALASYRDPRCHATLETLSAALTGNDREEHMFALTQALELYDIYQAKVADCDVRLKAVLDRLKAASGKPVGKLPPARHTTKQPNAPAFDVRVALHALLGVDLTQIHGMGPALALKLVSECGTDLSAWPTAKHFTSWLSLAPSNKISGGKVLSSRTRRSSNRAAAALRLAAVTIGRTDTALGAFYRRLSARIGKAKAVTATARKIAVLFYNTLRHGMNYTDPGASYYEERYRQRVLTNLQRRAKALGYVLQEVATPEAGGVS

SEQ ID NO: 511008 - protein, 413 aa, unidentified
MEVLYPRCSGIDVHKRFLVACLSLVQTNGHRHKELRQFSTMTNEILALKEWLKASGCTHIAMESTGVYWKPIFHLLEDSFEIVLVNAQHMKAVPGRKTDVKDAEWIADLLQHGLLTASFIPSGEQQAVRDLTRTRVRLIQERNRLINRIHKVLEDANIKLASVVSDLMGMTGQAILTALLAGEVDPECLAHLARGSLVKKQDELQAALEGELTAHHRALLEELLQLIATLDRSIARFDREIAERLRRFDALIERIDAVTGLARRSIEVLLGELGWDMSRFPDAAHAASWVGICPGNHETGGKQLSGRTRQGNRWAKTALIQAAHAAGHTQTYLGEQYRRISARRGAKRAAMAVGHSILVIFYHMVKTGEPYHEKGIDYFTDVNKQKIQQRLVRQLERLGNTVILQPKAEAIHA

SEQ ID NO: 511009 - protein, 353 aa, unidentified
MKRDKYMGLDVHQAMTVAVVMDAEGKVVLETMVATEAAAVLRLVKSLSGPLRVTFEESTQAEWLYELLRSHVTQVVVCDPRRNKLLSEGSKADKVDARKLADLLRTGMLRSVYHGHQATRKLKELVRAYETFSLDTQRTMNRIKAIYRGRGIATPGRGVYQARTRDQWLAKLAEPGLRQRAAWLYQQLDQLKPLRKQAKQVMLAESRAHRAVSLLRTIPQLGPIRAAFIVATVDTPHRFRTKRQFWSYVGLAVVTHMSAEYEMKAGKVVRRRKPVATRGLNRCCNHRLKEVFVSAATGGTRDESYKLYLERLINNGMRADMARITLARKIAAVALILWKKGKEFDPRELNRTT

SEQ ID NO: 511010 - protein, 399 aa, unidentified
MKKNLPLELRVGVDVGCHSHNVAIGLSTGEILEEFSIAHEPEGFRQFFSRIEKNERNYGCPVAVAMEGYNGYARPLDTLVRTRNYRLFNINNLKLARFKEIFPGAAKTDDIDARKALELFQLRDHLPIAKDVLQEVKTTPQENDILKRISRRRRRLVYERVRVLNNLQADLQSVCPGLLEITGEAGNLWFLRFITSTDDLRKLTRLRETTIRKIPGIGAKYTSIILKWQKAAEFSHETEWVSDMIQQDAERVLALHDQIETLETQMAEMAANSNIAQLLTTMPGFGPITTAELAGEIGTIERFESESSLALYLGMSNLDNSSGKHKGSKAPKQVNERAKAAMMIAVDRHRKSVAQSQKYYEKKRAEGKKHNQAVRALGRHLCRVIFKMLKENRGYFFTQ

SEQ ID NO: 511011 - protein, 396 aa, unidentified
MQLGPAEAGPDTNSGGPMNSIDYIGFDIHKKTISFCAKEQDGQILDEGVIPARREDLASWAEKRPRAWVGAMEATLFTGWVYDQLKPAARELKVAHPLMLRAIAASKKKNDKVDARKIADLLRCDLLPECYMAPSAIRELRRILRYRNLVVRQATRMKNRISGLWMETGTAYNQGRLHGKAYFSELLRSLRETPPSVVELLKLSRKQLEFFTTIQKRLLKGLSEHPQLKERVERLQSIRGVGEILALTWALEVGEVKRIPSISPAVSYCGLTSAQRNSAGKEQRGPISKQRNKHLQTMLIEAAKLAPRYNPRLAAVHERELKRGDCNQATLEVARKLVAYWMAVDQSGKRFAVRAVAGEEIEGSGRSGPGKKIVGGGAGNRPKQRRPVTAGDPRCA

SEQ ID NO: 511012 - protein, 403 aa, unidentified
MSSSVALAPAAAVVAVDVGKTTAAVLVTDAARRRLLGPLEFPMTAAGLGRVISQAQAMVAGTPLIRVGVEAAGHYHRPLAAPSVWPGWEVVELNPAHVSEQRRVMGRRRVKTDALDLEAMTELLLAGRGLVVTEPPKLIGELTAWAAHRHRRVATRAATKNQLLGQLDRCFPGLTLAVPDVLRTKVGRLVAEHFADPRRLAGLGASRFIRFAAVRGLQVRRPVADRLVAAAHDALPSADAAVARQVLAADLALLASLDEQVQAAETRMAELVPASPFAPLLSVPGWGVVRAGNYGAAVGDPARWPGHRQLYRASGLSPAQYESAGRRRDGAISREGSVQLRRALIDLGIGLWLSEPAATRYGQALRARGKNGGVIACAMAHRANKIAYAMVRDQTGYQPLRWA

SEQ ID NO: 511013 - protein, 391 aa, unidentified
MIYIGIDVAKDKHDCFITNSDSEVLFKAFTIFNNLDGFNDLYQKIESVMDDVTKVKVGLEATGHYSYNLLGYLIDKGLPTYVINPLHTNLYRKSLSLRQTKTDKVDARTIASMLMSDVNLKSYSDTSYHNEELKSLTRYRFDKVKERAKLKTSVSRLVCILFPELEKLVPTLHMASVYALLSEFPSAKHVATAHLTRLTNLLSESSKGRYGKDTAITFRNSARASIGSNMPAKSLELKHTIKLIQELDSEIDEIENEIKIIMDEINSPILSIPGINYRMGAMIIAEIGDFNRFDSPDKILAYAGFSPSTYQSGQLDGAYAHMEKRGSRYLRYALYNATKYVCHWDPTFAAYLAKKRAEGKHYNVAISHAVKKLVRVIYHLEKTKQQYIKAA

SEQ ID NO: 511014 - protein, 384 aa, unidentified
MNKHNMIFIGLDTHKEFHEVAYCEEQRGAVPIHYGRIPSSKVSVKKLLRQFESKYPGATLHVVYEAGPCGYWIYRLITSLGHCCYVVAPSLIPKKPGERIKTDRRDALKLVRSLKSEDLTPIYVPEPEDEAVRDLSRARETAMKDLKEAKYQLKALLLRNNIRYEGTANWSKKHLRWLTELILPHPAQQIVLQEQLQTIEERIRRLERLDNELTHHVHQWRYYPVVKAVQAMRGVRLLVAVGVVAELGDLHRFDHPRKLMAYLGLVPSEQSSGGKRHLGAITKAGNGRARRMLIEGAHSYRYPANVSTELQLRQEGLPKDIVDIAWKAQLRLCKRYQRMSKKGKHYNLIITAIAREMAAYIWAIAKEVVLTPVNPKLRLSRVPA

SEQ ID NO: 511015 - protein, 414 aa, unidentified
MALRRWVGRAIGLDVHRDFCVVAICEDGKVRSAGRVPSTPEGLGLLAESLLPTDRVALEVTGSCWEVARILEPVVDRVIVVSPDDTGISSARAKTDKLDSRTLASLLWKGELDAVWVPDERCRILRRRLARREQLMRARTRSKNEIQAVLQRRLQAKPPFADLFGVKGRQWLAGLELPVEERESVDAGLRQIAFLDAEVAAVDRLVAQQALAWPEIRRLMTVSGVNLICAASFLAAIGEPSRFLTSRKLVAYLGLDPKVRQSGEAPARSGRISKRGSANARWALVEAAWSVVKQPGPLRAFYERTRGRRGHGKAIVATARKLTVLFWCMLTRGEDYAHQRPALTKKKQRQLELTAGAPARTKQAAGIWSTNRAILHAERALAEQAEVSYQRIVTDQKAGRPSRKAGANATPQRA

SEQ ID NO: 511016 - protein, 310 aa, unidentified
MTLHPDVIGIDISKDHLDIHDAERGTGCRIANTAAAIADWVERLAPRACQIVMEATGRYDAALRAALAAAGIAYARINPEQARSFARATGRRAKTDAIDARMLAEFGRRLAPRAAAPDDPARARLTALSRRRDQLVASRKQERTRRSEETEPLIAADLDRHLAWLDTAIVDLDRAIAATIRASQTLAQEAALLRSAPGIGPVAATVLAAHMPELGRIDAKAAAALAGLAPYNNDSGAFRGKRSVRGGRTRVRQALYMAALAAARSDTVLGRFHQRLRHAGKPPKLALIAVARKLLTILNAIIRQQTPFAR

SEQ ID NO: 511017 - protein, 343 aa, unidentified
MKLSYVGVDLAKNVFQLHGVDRQGNAVWRRRLRRHQWLEVLLATIDTDCIVGMEACGGAHHWARELQARGITVRLIAPQFVKPYVKSNKNDRNDAEAIVEAMTRPSMRFVAVKTVEQQDIQAIHRVRSTVMSQRIAKANQVRGLVAEYGLVAPLQIVHLRSAIPVWLENVENGLTDCFRALLNELWVDLQQLETRLKALDKQIEAIARSNPVTQRLQQLRGVGPLVATALVATVGDGSHFNKGRQMAAAIGLTPRQHSTGDKRRLLGISKRGDTYLRTLLIHGARAVVSQAKHRDDRLSRWVTDIAKRSHTNVAAVALANKTARIAWVMLREQSDYDPARAVA

SEQ ID NO: 511018 - protein, 415 aa, unidentified
MNRLIERCGMLDIHKSQITACVRVPDDAGGRRQEIREFASTTSGLLTLADWLRSWSVTVVGMESTGVYWRPVFYLLEDEFECRLYNARHLRHVPGRKSDVQDAEWGCQLIEHGLVRASFVPPRPLRELRDLVRYRKAKIQERTREVQRVEKTLQDAGIKLSSVASEVLGVSARRMLDALISGTHDPEILAELAKGKLRKKIPALREALQGRFTGHHALLISQMLAQIDFLDETIATLSEQIEELTRPFSRQLELLDTIPGVDRRAAELLLAEIGPDMSRFPTEHHLASWGGMCPGQRESGGKKHSAATRKGSKWLRGTLTESAKGIVRTKGTYLSARYHRIKSRRRHAKATTATAHKILTAAYHVLTQGVSYHELGEEFFYRRDTENTERYRRRLIHQLERLGHKVTLEPLPEAS

SEQ ID NO: 511019 - protein, 313 aa, unidentified
MNVSLGSIFILARASRTGKHYLVVGGVNAGQEVVVPPRRVNLENWLKWAEANLKPTDAVVLEATTNAWEIYDQVLPLVGRAVVANPVQVKWIASARVKTDRVDVGRLACLLAAGLVPEVWVPPMEVRELRSLLAHRRRLVKMQATIRNRLHSMVHRHNLTLPKGEVFSCEHRSWWLGLEISRTEDLRIRQDLATLDHLEPQIAEIEGELNRLSTCAPWAEQVPYLLQLPGFGLITTMTLLAAIGDITRFESARKLVGYSGLGAGVHASGETHHSGRITKQGRSELRWALVARPGDPGQESRMGCGVPPCALEA

SEQ ID NO: 511020 - protein, 411 aa, unidentified
MNPVVGLDVAKGESQVQMFLDKKMPYKSSVKVDHTVDGLEELHSYLLDLERQTGMKPPVVLESTGHYHAPVLQFLEAREYIIIIVNPLVSYRAKSSSLRKTKTDAIDAYHLGELYYKEDLAPQKKRGVQLLNLRHLTRQHENMTGIMIQTKLQFQAVLDQIFPEYKGVFGDLYAEISIKTLQAYPTSESVKEAGVEEIAQFIDTHCKARSFNWALERSEKLIGAAERNPFQSTLFQSLLVSLNMYIDLLQVYHQQLSTLEREIDELAAQLEEYELLQSIPGIGEKIAATIISEIGEIDRFNHPKKLVAFAGLDPSVFESGRFKGTKNHITKRGSARLRHMLYTAVRCSIRDSRKKKTTPETIARNKRLRAFYDLKREEGKPYKVAIIACANKLLHWIYAILKTKTPFQETM

SEQ ID NO: 511021 - protein, 355 aa, unidentified
MSQEKYIGMDVHQATISVAVMDAGGKLIMECLLETKAATVVEFVQGLQGTLSLTFEEGTSAAWLHDLLKPHVSRLVVCDPRKAALLKDGNKSDRIDARKLAELLRTNQLKPVYHGEHGVRTLKELGRSYLTLTKDVTRVMNRIKALYRSWAIPCSGTTVYAPRHRAEWLAKIVEPGVRVRATRLYQQLDVLQPVRQAARHDLLSESHKHPAVKLLRQIPSIGPIRAALLVALLQTPHRFRTKRQLWAYSGFAIETHDSGEYRCVRGKLQRNRERITVRGLNDNHNKDLKSLFKSAAISASTRPGPLHDFYAARIAKGMRPTMAHLTLARKMAAITLTMWKKGAGFDPQQLHRQAA

SEQ ID NO: 511022 - protein, 337 aa, unidentified
MSVYVGIDVHRKRSQVAVVTEDGTVELNKNVVNGSEPMLRLIGDLPAGTPVAFEAAFGWGWLAGLLEDYGFEAHLVHPLRCKAIASARLKNDKVDAAILAQLLRADLLPEAWIAPPAVRQLRALLRHRTGLVRLGTQQRNRIHAVVADFGYDRSGSYLSGPGRGWLAGLELPAASREIVTDCLAVIDGLAPLTDRIDGELRQHAKADPRVKVLTTLPGVGQFTALVILAEIGDITRFGSARKLASWAGLTPTVRGSDLTVRHGHISKQGSAWLRWVLNQAAQTAKRSPEFAGTYATIAQRRGKKIATIAISRKLLTRAWHLLSQLEPAEASTPPRRP

SEQ ID NO: 511023 - protein, 317 aa, unidentified
MSTPLHFCGIDVSKDRLDVALSPSAESWSVSNDPSGLKELVSRLREHGPALTVLEATGGYERAAAAALAHAGLPLVIVNPRQVRDFARSTGQLAKTDRIDAQVLALFAERVRPEPKALPDEDAQLLDALLTRRRQLIEMITAEKNRRGFAPAALKKSITKHITWLERQLSGVDGDIEQMIEKSPLWRAKEDLLRSVPGVGPVLSRTLVAELPELGTLGRKQIAALVGVAPLARDSGKLRGRRSVWGGRAGVRATLYMGALVAARHNPVIREFYERLIAAGKPRKVALTACMRKLITILNAMVRTQTPWDASFAQDSC

SEQ ID NO: 511024 - protein, 290 aa, unidentified
MISWVGIDISKSNLVVWVQPQGEGFDLPNTSEGFVELIERLSQYEVDRVLLEATGGYESKVMAALQGADFKVLRINPRRARAFAVAMGKNAKTDPIDAAVLADFAEVLHASRDKIISPEREALRELIQLREQFVQQRDDNKRRLQQVQLPAVTEAIKGLVQYLQVQIKQLDKTIHQSMHELDAEKAERLISVKGIGTVATASLLVYLPELGALDRREVAALAGIAPYNDDSCNHSGKRQIYGGRARVRRALYMSCWVVIRHQPDFKARYDALRERGKSAKVALLPACGSY

SEQ ID NO: 511025 - protein, 448 aa, unidentified
MQSKCFLGIDVSKGYADFLLLDQKKQEIEESFQLDDNHAGRQYLKTLIQEWFSKGMQQLYCGVESTGGYEDNWYSLLKNLSIQHTELYVSRLNARAVKAVSDASLKRTITDAVSAHNIASYLISFPEKVDYGHPDDLPGPFKDGRQHYCYIQMLQKQKVQLSNQLEKLLYRHFSEILLYCRHGIPGWLLRMLSRYPCAAAVVKAGPAKLAEIKGITKDKAKALLQKLHPPLQSVSPQIQHVVAKTSKEILHKEQLIGEEHSYMVEMYENDEQVKLISSTPGIGIQSAVAIMLEVEDVRRFASAKKMASFYGVHPTFKQSGDGTWGSRMSKKGRGQIRAILYMAALSGIRCNPILKKLYARYRAKGMKHYQAMGVVMHKLLRIIYGILNNKTAFDCTVDEKNTKTPGNEEQKNNSKESNKHRYQVESADAPISNQAARKRKKQAASQAS

SEQ ID NO: 511026 - protein, 451 aa, unidentified
MRKGRKKKVQKIQPAINRYAAGADIGAREIYVAVAYELTDQPVRCFRTFTEDLKQMVSWLRELKITTVAMEATSVYWIPLAELLEEAGIAVCLANPRHVQNVSGRKSDVMDCQWLQYLHSVGLLRGAFRPAAQVRGVRALWRHRAALVRQSGWYVQHLHKALDQMNLQVHHVLTDITGVTGTAILKAILKGERDPRVLAGFRDKRVKASEQILVAALTGDYRREHLFCLKQAYEAYEFTVRQITEVDRQLAEELGRLDPTPAHQEPAAPAARSKASTKHPPAYPAQARLAALCGVDLTTIPGIHVLTAHTLWAELGSDLSAFPTSKHFCSWLSLCPDNRTSAGNCLSTKTRASANRVAHALRMAAQSCHHAKHEFGDYYRRMRAKLGAAEGLVATAHKIARVVYAVLMTRRPYDPTIHQQALALNQQRRIRKLHSLAKNLGFQLIPNQQPG

SEQ ID NO: 511027 - protein, 368 aa, unidentified
MNTIKFIGMDVHKKTITIATVDEGRKEQPRIYGTIENELDALDKFCRKMVSNASRLLFVYEAGPCGYGIYRHLTRKGFDCMVAAPSMIPKKSGDRIKNDNRDATMLARLHRAGELTAVYVPDTRDEAMRDLTRAREDAVSATRKAKQRLNAFLLRNGLTFTGRSKWSKAFFNWLSDIAMPYPAQQVALQEYIDAVHESCNRVDRLTDQIRQLVPGWRLGPIVSALQAARGVSLIVAVTVLAELGDLSRFDKPSQLMAYLGLVPSEHSTGLSIKRGSITKTGNSHARKVLVEAAWSYRMQARVSRSLSKRQEGVPTRVCQIAWKAQLRLCARFRRLAAKGKTKQKVVTAIARELSAFLWAMAKQVQPVV

SEQ ID NO: 511028 - protein, 417 aa, unidentified
MPTGDYDFFVGVDWGSERHQVCVLDPARQVHGERAVEHSGPGLAALADWLVAVAPGAPARIAVALEMPRGAIVDALLARGLHVFSINPKPLDRFRDRHSVAGAKDDRRDAFVAADALRTDRWAFRRLEPDHPLILQLRECTRLDQEMQQELTRLANRLRDQLLRFYPALLRLAPAADDPWLWAVLALAPTPAAGAHVPRARLTRLLQTHRIRRLSAEDVHAALRAPALPVTPGTVEAAARHVALLLPRLHLIHAQRAQGTRHIDPLLAAYLAEAPAAGPPRAHHDVAILQSLPGVGRLVVATLLAEAAPLLAARAYPALRAQAGIAPVTRQSGKHRSVLMRYGCNHRLQQAVYHWARVSTQCDAHSRAHYTALRQRGQSHPRAVRGVADRLLALLIAMLKSDTLYDAARPRRREMAA

SEQ ID NO: 511029 - protein, 375 aa, unidentified
MREKLRFLGMDVHAETIAAAIAEPDGEVRSLGTIPNRMESVRKLIKKLGPVEKLRVCYEAGPTGYVLYWQLAELGVQCEVIAPSLVPMKAGDRVKTDRRDAERLARSYRSGDLTAVWVPDEGSEALRDLVRAREAAKQDELRARHRLGKFLLRSGQRPPTGVRSWTHLHLIWVSQIRYAQMAQEATRLDYLHEVEHMRERVLRLEQAIAEAVKLASPALQEVITDLQALRGIAHISAVTIAAELGQVSRFAGARELMGYCGVVPSENSSGERTRRGSITKTGNAHLRRIVVEAAWSYQRPPAIWAGLRKRQQSASEEAKEIAWKAQHRLHKRYARLAAKGKDKRKIVTAVGRELLGFIWAIGTKAEATVMQRIAA

SEQ ID NO: 511030 - protein, 342 aa, unidentified
MNDVNIIGVDLAKRVFHAHGAHSDGSVAFRKRLSRSQMLTFFAKQPHCTVAMEACATAHEWGRAIGELGHKIRLIPPAYVKPFVKRQKNDTSDAEAIAEAAARPTMRFVAVKTEEQQARSMIFRTRDLLVRQRTQLINALRGHLAEHGVIAPHGPANVKLLAAALNDADRSLQSLVRDIGAVYLEQISMLNGKIGDLEKVLRREAQRGADTSRLQTMPGIGPITAMAIETFAPPMQTFQRGRDFAAWLGLVPVQHSTGGKQRLGRTSKMGQRDIRRLLIVGAMSVIRWASRRGAPEGSWLSRMLARKPLMLVAMALANKMARTAWAMLVKQENYRVPVMRAT

SEQ ID NO: 511031 - protein, 444 aa, unidentified
MACSRMILIREGADAPIIMGISKPAGLKSPCGEVKIVNPLFVGIDVSSRNNVVYLMNPDGSKYSSFSVQNNLGGAKLLSERIVSALSSMRLSDVVIGLEATSIYGDSLVYALREDGSLGRFQRKIHVLNPKQVRKFKEAYPDLPKNDFVDAFVIADHLRFGRIAREVYMDDYRYQALRTLTRARFDVIQNLTREKQRFANYLFLKCSGMAQDKDIQNTSATTIALMERFETVDDLANADLDELTAFIAETGRGRFADPDATARVVQAAAKGSYRLPKTVNDTVNQAMSVSIASMRALKEQVKVLDKAIEQQFEIIPNTLTSIPGIGKVCSAGIIAEIGDIHRFNSQASVAKFAGLVWHKNQSGDFEAEHSQMIKSGNRYLRYYLLEAANSVRRCDSEFRRYYDLKFNEVNKYQHKRALALTARKLVRLVFRLLKDNRLYIPPEN

SEQ ID NO: 511032 - protein, 411 aa, unidentified
MDNFYFIGVDVSKKKLDFCVLFEGKVLREEQVSNHQQAVARLIGELKNDLEMDNEQFLICAEHTGQYTFPLVCACKSVECKLWLENPSQIKYSSGMQRGKNDKVDAKRIAIYASRFGDKVKYYDRPTEEIERLKQLERERALYVTDLAKYKGQMYDQKDFMPAALYRKKTKRMKGLIQELQAAIDAITAEMEKIIGSTEVLARQMELLMSIDGVGKVVALNVIIETEAFSRFDNPRKFCCHAGVAPFSYTSGSSQHSKNKVSHRANKNIKKLLHMAAVSVTHRKEGELKAYYMRKVEEGKNKMSVINALRAKIVARMFAVIKKRPGRAGRTDGLRAHHLARRVRAVNASAATFEFEGERLTYTASRDVDYQNEDLAVGVYYNDGAGFTAGTYRVEVYADGRLAGQSDIVLR

SEQ ID NO: 511033 - protein, 344 aa, unidentified
MTFYAALDVSVRTVAICIVDQEGAIRLERSVRSELPDILKVLSEFGEPIAKVGFEAGVLTQHLTYGLRAAGHEVVCMEARQVSAALAAMRNKTDKNDARGIAQILRTGWYSRVHVKSIESHYVRALLASRKAIFNKCIDLENEVRGLLKVFGVKLPPRVYHGAFDGEARKAIESDAALSDAMVPMLDARLTLLRAFRELDARVKQIARQDQVCTRFMTVPGVGPLTALTFKAAVDNPARFASSRTVGAHFGLTPRRFQSGETDNPGRISRAGDADVRAALYIAANSMLMRSIRWSWLKAWGTRLIKTKGRRRAVVAVARKLAVVLHRMWVDQSDFRWSNTEATA

SEQ ID NO: 511034 - protein, 373 aa, unidentified
MEERTKVHVGLDVHKDSITVATAEAVGREKARLIGKVAHDVPKLLKVLARIGAVEELHIVYEAGPTGYGLQRALAARGYVCEVIATSKTPRQAGNRVKTDARDGMELAEYSRAGKLAPVWIPDPADEAIRDLARAREDAVNSRRTARQQLKGFLLRHDRRYGGKTSWCGAHDHWLARQSFEARAAQTAFTEYWQAVKSCDERVERLTKALQGSIAGWRFEPVVNALQALRGVAAVTAIGLVAEIGDLSRFEHPRKLMGYLGLVPSEHSSGEHTSRGSITKTGNGHARRLLVEAAWNYRFKARVGKEIHARQEGLSEAVRTLAWKGQLRLTGRFAALQKRGVQANKVCVAVARELAGFVWAIGMQAQRERGTAA

SEQ ID NO: 511035 - protein, 411 aa, unidentified
MSLPESSFYVGVDWAAETHAVCVLDATGKIQTEFTIAHTADGFADLLRRLGRLTDDPMDVPVAIERPDGRLVDALLEAGYPVVPVSPNAIKTWRDGEVLSGAKSDAGDAAVIAEYLRLRAHRLRPATPFTVETKALRTVVRTRDDIVEMRVAATNQLAALLDAHWPGARAIFADIESPIALEFLTRYPTAAHAQRLGEKRLTAFCVKHGYSGRRPAAELLHRLRQAPAGTTDDTLVEAVRDAVLALVTVLKALGAARKDLDRSVAAHLGEHPDGPIFTSLPRSGQVNAAQMLAEWGDSRVAYDGPDAVAALAGLTPVTNQSGKHKAVHFRWACNKRFRKAMTTFADNSRHASPWADQVYRQAIARGHDHPHAIRVLARAWTRVIYRCWLDGTPYNPVKHGNANEINQPTAA

SEQ ID NO: 511036 - protein, 357 aa, unidentified
MRRYRLAVDKRKPQRTSQIFIGIDVHKIQWHITIRTEDVELFSGSIPGKWEALKKLVDRYADCQKQAVYEAGYFGFRLYDHLMDYGVDCVVTPPSLVPQEYGNHVKTDRRDSRKLAHLLAKGLLKRVWVPSPEQRYERQVIRRRKQLVADRVRTQNRIKAELCFYSIELPAPTGQWSKAYVGSLQHLRFDNRWMQESFARLLEEYEFLTQQIERQTKLLRELAETDQYEERVKILRSTPGIGLISSMEYLLELQDLKRFQRGNRLAAYVGLTPSQYSSGEKLRMGRITAIGKNDLRGTLVEVAWRLIAKDPAMREKYERIKARAGSKRAIIAIARITLLRTRRMLLDRQPYVVGLAA

SEQ ID NO: 511037 - protein, 453 aa, unidentified
MPGSKKTRGRSSGRPSTINPDAAGIDVGSTFHVVAVPGDRDDEPIRTFRTFSSDLHRLADWLEATGIKTVAMESTGVYWIPVFEILEARGFEVLLVNARDVKNVPGRKTDVNDAQWLQQLHQHGLLRGSFRPRDGVVRLRAYLRHRERMVDYAAAHIQHMQKALMQMNVQLHHVVSDITGATGMRIIRAIVTGTQAPERLAEFRDVRCAASEETIREALTGNYRPEHVFALRQALELYDFHQVKIAECDTEIEAVLHTLNEERTTPEQPLPSVRHAKGRNEPGFDARPALYTLLGGDLTQIHGFGPYTVLRLVAECGDDMRKWPTAKHFTSWLCLAPGNKISGGGLLSSKTRRSSNRAAALLRIAAVNVGKTQTALGAFYRRLAARTGKGKAVTATARKLAILFYKALRFGMTYVDSGASYYEARYRQRVIQNLHRRARDLGFSLVADSAANG

SEQ ID NO: 511038 - protein, 315 aa, unidentified
MNQSTDSVKFLGVDVAKDTLQLFSRTLKVPAQIENTPKAIAAWLKALGRHHSQLHIACESTGGYENALLRACWKVGVRVSRLNPARVRDFARCRGLLAKTDAIDAEAIAEFASTFPPQPTPEPSAQQVLLNELVARREDLKTQRAAESNRSRDIQDKSLCRMLEKHLKFLDAQIKQIDQLIEDTISQDQEMSRKRDILVRTKGVGKTSAAILLSCLPELGTISGAAISALAGVAPFNRDSGTLRGKRSIRAGRATARKALYMCALVGSRTNSILKEIYQRLTSKGKPPKVALTALMRKLVVHLNSSLKTLQSTTA

SEQ ID NO: 511039 - protein, 338 aa, unidentified
MNITRIGIDLAKQVFQLHGVDHHGKVLVRKQLRRAQMLAYFGKLTPCLVGIEACGSAHYWARELGRLGHDVRLMAPQFVKPYVKRGKNDANDAEAICEAVSRPNMRFVTVKTVEQQVMQAEHRIRARLIKTRTALSNEIRGLLAEFGIVVPPSLGQLRRALPELLEDGENGLLGHFRMLLAELAEELRSLDDRLKVYDVRLAQHARADDRVKRLLAVEGIGPVSASALVAAVGDGKQFGKGRDLAAWLGLTPREHSSGGKQRLGGISKQGDKYVRMLLIHGARAAMNAAVNKGDPRSRWVVSLAARRNKNIATVALANKNARIAWAILSRGEDYRVSV

SEQ ID NO: 511040 - protein, 357 aa, unidentified
MESQEVKYVGVDCGKKSIEVVRINSENSLERRQFSTTESGINNLLQWLTLNDIVGLEAGSQSFRIAKSILNKGIQVIVLNPGDLATIYQSLKKTDKEDSLKIVRLIQRFPIEELPVVPIPNDEEEDNRRLCTEQENWTRQLTQSKNRLHSLFTQAGLTHITKKHLRTKANREISVALLPSRYQKEAERILKVLDLVEQNLKLIEEEIKEALKKNKAYAQTIMSMPGIGMITSLAIMSYMGNCKRFSSAKQAAYYVGLVPRVDISGDSAYYGRIINRGCHSIRRVIVQAAWSLVRCQHGGKVKEFYQRLYLKKGAKKSIIATSRKMIEVLYVMIRTGKLFDSMPENILNRKLAQYGLM

SEQ ID NO: 511041 - protein, 356 aa, unidentified
MVVVGADVHKRSHTFVAVNEVGRKLGEKTVKATTAGHHTAIMWAREQFGTELIWGIEDCRNMSARLERDLLGAGQKVVRVPTKLMAQTRKSARVRGKSDPIDALAVARAVLREPDLPVASHDETSREFKLLTDRRDVLVAQRTSAINRLLWHAHDLDPERAAAVGSLSAVKQQQTLMAWLTELPGLVAEIARAELTDIIRLTSEINALAKRLAASAHRSAPALLEIPGCAELTAAKIVGEAAGVTRFTSEAAFACHAGVAPIPAWSGASAGQMRLSRAGNRQLNTALHRIAVTQIRMTGSAGQIYYHKLVDAGKTKAAARRCVKRRIARRVYQALRRDAGHPDHQTPSQPPQSAAA

SEQ ID NO: 511042 - protein, 340 aa, unidentified
MELYGGIDLHSRNHWLAIINEEDRRIFKKKSSNDPQIILRTLKPYKDDLVGIVVESTFNWYWLVDLLMEEGYQVHLANPSAIKKYEGLKHSDDKHDAFWLAHLLRLGILPEGYIYPKQERPTRDLLRKRGHLVQLSTSLILSLQNIISRNCGFKLNVNEIKKITENRIAPLLSGQEDLELSGMVSKETIDFLTRKIRQIETAVFNKVKLKMPFIYLQTVPGIGKVLSLTIMLETGPIDRFPKVGHYVSYCRKVPVTWTSNSKAKGKGNKKNGNKYLAWAYSEAAEFARRYDPYARAYYNRKAAKTNFMVAHSALAHKLSRAAYYVMRDQVPFDHKKLFAQ

SEQ ID NO: 511043 - protein, 404 aa, unidentified
MAATCKKDSTKTPPVVSVPVGQGTLYLAFDLGWTEWSLAFATAPADQPRLRQVGARNLTELLKEISKAKARFGLPADAPVVSCFEAGRDGFWLHRYLTAQGISNVIVDAASIEVSRRKRRRKTDKLDAAKLLSRLIRWHQGEGKVWSVVQVPSVVEEDRRQLHRDLLEMKGERTQHVNRIKGLLATCGLAVATVDADFPAVLARLRTFDGQAVPAELQRRLLREHARWQFVDRQIKDLENERARKIRTADEEPMDKVRQLLNVRGIGLNSAWLYVMELFGWRRIRNRRQLGALVGLTPTPHASGDDQRELGISKAGNRRLRTMAVEIAWCWLQYQPGSALSRWYQQRWAAGNSRQRRIGIVALARKLLVALWRYLEAGEVPEGAVLVDWRSKRRSPKRAQPVLA

SEQ ID NO: 511044 - protein, 361 aa, unidentified
MKKVSRELPKMEAGIAKPEMTVGLDLGDRYSHYCLLNSDGEVVEEGRVQSTEAALRRHFEGEDCLRIALECGTHSPWVSRLLNALGHQVIVANARQISAITGSESKNDRNDAEKLARFAAFDPKLLSPLEHRSEERQVDLNLIHARSTLVRARTMIVNALRGLVKSAGGRLPACSTEFLPARALAAIPPALSAVATPLVEQIGLLNAQVDGMDKQIAKLSAKYPEIVLLRTAPGVGPIVAAAYVLTLGQPDAASNRSAGAFLGLRPAQSQSGAADPQRRISKSGDSFLRSLLVQSAQYVLGRFGPDSELRRWGLKLAATGGKRGKKRAIVAVARKLAVVLHALWRSGQRFQPFPQQAAVAA

SEQ ID NO: 511045 - protein, 347 aa, unidentified
MDHIGIDVHKKESQICILAEGGELLEQRIRTEPARFAAVLGARPRGRIVLESSTESEWVARCLEGLGHEVIVADPNFAPMYATRTRKVKTDRRDARALAEACRLGAYRPAHRLSDPQRHVRARLLVRDALVRTRTRYISLIRALLRQHGYRMPSGSAEGFLGRVRAVALPGPLRSQIAPLLAVMCHLNRQLTYSDATIEHLAVQDPRVQRLRSVPSVGPVTAAAFVATIDDVQRFHHAHQVEAYLGLVPREYSSGESQYRGHITKVGHARMRWLLIQVAVSILRRRPPEADALRAWALRIAVRRGKHVAVVALARRLAGILYALLRDGSVFTPRAAPHPDAVAAAPA

SEQ ID NO: 511046 - protein, 480 aa, unidentified
MNVKTNKTKKQANVENQAVNLLSKEELCKRIEGVEKELKSYTWRELKTNGKFAKNDKLSFITDDMLIVGCDIGSETHYIRAIDIRGRELSRKAFEFGNTAEGFEAAKAWMLELAVQNRKSQIVLGLEPTGHYWFTLAAWLITAGISVVQVNPYAVKQSKEIEDNSQLKDDRKDPKLIANLVKDGNYGMPYLPEETYADMRKLSMFRDQLTEDRIRNINRLHRELKIYFLEYMDAFGKIDGTFALEVLKVSCIPSEITELGTEGLRNIWHEAKLRGRGYSRASEIVEYAEKSVGLKDGSSVGRETVKWFAKEIMKLDEQLAWIENTLHKKCMEIPYAENILEIKGVGENILAGIVAEMGDISRFDDVKEIQKLSGMSLVACSSGKHKGQTKISHRGRKRLRYWLFQAARSAVSHAEEFKELHVYYTTRADNPLKKMQSLIVIACKILRVIYTILKTGKDYDPQKMLKDIKRPKAALAAKAA

SEQ ID NO: 511047 - protein, 394 aa, unidentified
MIYAGVDIAKTDHVIGAVDERGAETCRPMPFKNTEAGLERAVAWLEGLAGSPSDVVVGMEATGHYWMACYSFLVARGYSVAVINPMQVKAVRKLKGLDKVKNDRVDAGLIAEALRIGQYDETRLATDEVASLRSLSRYLQSLRGMVAELKTQCVCLMDAHFPEYAGIFSDMFGAGSRAVLSKSPLPFELARRRADSLARDVAEASRRGGKSAGYAARIKAAARSSIGVRLGQEAASFQVKSLIRQIEFADSECAKVEARVRALLDEVEPLVLTIPGVSYATGAQIVSEIGDVSRFRNAPALVSYAGLNSSVSQSGQFDSGGGPITKHGSPYLRRALWLAANRARQYDPGLRAFYDKKRAEGKPHRVAVTAVARKLCHIVFAVMRDQVPYDPGRE

SEQ ID NO: 511048 - protein, 307 aa, unidentified
MFVGIDVSKDRLDVHLRPEGQAFAVPRDSEGVEALAVRLQELSPELIVLEATGGFETVVAAGLAAAGLPLAVVNPRQIRDFARAVGRLAKTDPLDAAIIAHFAEAVRPQARVVPDEAARALGELVARRRQIVEMMVAERNRRRQLTQPKAIRTVERVLATLQAQLSDIEREIDDAVRGTPAWRAKEDLLISVPGIGPKIARTLIAELPELGQLDRRKLAALAGLAPFNRDSGKMRGRRCIAGGRGPVRSALYMAILVSIRRKLPLAQTYHRLVASGKPAKVAIVACMRKLLAILNAILRDQTPWQNA

SEQ ID NO: 511049 - protein, 465 aa, unidentified
MRTVGIDLSARDEHKAVIVDEAGHFVSLVFRFGTTPASLRRLLEMAQENNPDQQIQAVMEPTGMAWFPVAVFLIRNGVTIYLVNSQQVADLRKYFKKHAKSDRIDARVLAKLPFVDEEKLHRLELSDAQTLACQRGCKQLERLMKQRTACQNRLIALDRFAWPGLEEVVFPDLFCRAALWFREHWYSPLRVWQAGAEAIRQEWLSSGLDSTDSGEWIRYLVQLAEQILEIYDKDCAYLDYELLQAEAIREQGYFAFVHEMHHRLLLKTVRPLYRQLHPSRNLETIPGVGQDGAAVYLSFIGNPKRFHGLRELRGWSGMVPNSKQSAASQASGLKITQAGPGLVKKFAFLDANAARQCDPQIAAIYYDQMVHHGKHHVQALCTCSAHLLDRVGVVLREDRPYQLQDVDGTPITPERARQIIAERYTVSEEVRKRNSKARRRERMEAHAEKKYKRGKAAPGDSGARA

SEQ ID NO: 511050 - protein, 408 aa, unidentified
MFVGIDWASEEHEVFVSKDDGGRADGFRFAHTQQGFDGLVRRLGRHGEPADVPVAIERPDGRLVDRLLEAGHPVFPVKTNAIKAWRESEVVSGAKSDAGDAEVIADYLRIRRHRLRALDPFSDATKALRAVVRARTDLVEQRVAAANQLRATLDAFWPGAKAMFSDITCNIALTFLETYPTPAAAAPLGEGRMAAFLKKHGYTGQRSATELVERLRAAPAGVIAGSAASAQGDVVLAMVRVIRALNQSIKDLDRSLNARLDEHPDAAIFTSLPRSGRINAAQMLAEWGDSRQAYDSPGAIAALSGAAPVTKRSGKHHVVSFRWACNKRLRNAFATFADNSRHASPWAADVYARARARGHDHPHAIRILARAWIRIIWRCWIDQVPYDPTRHGAARAFAEHDLVTGAAA

SEQ ID NO: 511051 - protein, 344 aa, unidentified
MNTIKVVGIDIAKSVFQVCVWMVDGSVAWNRKISRQKLLDTLRQFEPGTLIAMEACSTSHFWGRTLVSMGYSVRLIPAQHVKAFVRSQKNDANDALAICETACRPGIHFVPVKTTEQQDIKALRNTRQLMVEQRTALANQLRSLLAEYGLIIPVGIQCLQQQLPELIEDASNDLTFTLRRLLSSLREDMQVLNERVTCLDKEIAALSSQQTAYRHLLTIPGVGPLIAAAFISEVDAVQFSSGRELSAWCGLVPRQHSSGGKQKLSSVTKNGNRSLRTLVIHGARSVMRCVKKRDDNMGHWLKRLEARRGFLKTTVALANKLTRIIWRILTDGVDFNMNKAFAVS

SEQ ID NO: 511052 - protein, 368 aa, unidentified
MPRMAEQAGPVTGGVDTHADVHVAAVIDPVGRVLGTQAFPATAAGYRAALAWMKLHGELARVGVEGTGSYGAGLARYLADCGVEVAEVIRPNRQARRQRGKSDTADAVAAALAALSGEASGMPKSRDGAAESIRALKVARAGAVKARTQAGNQLRDLILTAPEPLRQQLAGLPTGRQVETAARFRPGDPARPAEGAKAAMASVARRHQQLTAEVTRLDTMLDELVRHAAPEQFLAKRGVATQVAATLLVTAGDNPARVRRETSFAALCGASPVDASSGKQIRHRLNRGGDRQANSALWTIAMTRLAHDPRTKAYAARRTTEGKTRKEIIRCLKRYIAREIYKALCRPSGPGRPSTPQIKQDLSVPVLT

SEQ ID NO: 511053 - protein, 424 aa, unidentified
MKVTFQTCCGVDVHKSFLVATIIKTSSGIEPSYQKRRFSTFNNSILEFKKWLLENECLYVCMESTGKYWIPVFNLLEDEINVTIANPKWVKAVKGNKDDTKDSKWIGDLFRLGLVRGSYIPCKKIRILREFTRYRYKLVSCRSSEKNRYQNALTVCNVALDSVVSDIFGKSSTSIIDYLLEQSGTSIDHEVIASKLLKRLKAKEDAVIESIEGYQMTDSQKYRMHLVRAHMDYITAAINDVDSEIESLIASDPDYENAVELLCTIPGVKYDSAITIISEIGIDMSQFCSSKRLCCWAGLTPGSNESAGKKKSVRITRAGVYLKPALVQCAHAAVKSDKSPYYKKKYESLVKRRGKKRAIIAIARMILTAIYQMLSTGEQWNPSDLYKIDMPEALLEKQKQKAIKQAQKLLIREGLLPPTEPIAS

SEQ ID NO: 511054 - protein, 366 aa, unidentified
MPSEYVGIDLHRRRSVIVRLTPDGEVLEQVRIDNDPVALALEIAKAGPNPDAVLEATYGWYWAVDVLEASGAHVRLAHPLAIKAYAHRRVKNDSIDARTLADLARMNRVPEAWIAPPEIRELRELVRYRAKLVALRSGLKAQVHSVLAKHGVRVPMTDLFGLAGNRLLDELSFPAPYAMRISSLRELIGIYDSQVARFDAEIRTLLAEHPGYRAIQAVPGVGPILGAVFVAEIGDVTRFSSAPQVCSWAGLTPRHRESDTVVHRGAITKQGPRLVRWAAVEAVQKLRTSTKQHRDFRRIARRRGKNIARVAVARKLLTLVYYGLRDEEVRCLPRPKEAARPASGSSQGARSRSRMTPDPRRGRHGD

SEQ ID NO: 511055 - protein, 409 aa, unidentified
MLFVGDDWAEDHHDVEVVDESGRRLMRRRFPEGVTGFAGLNALIADHVPDDAEPGDVVIGIETDRGPWVTALIAAGYRVFAINPLQASRYRERYSTSGAKSDQGDAHVLAEIVRLDRAHHRQVAGDSDLSEAVKVLARGHQNLIWTRQRQTNQLRSMLREYYPAALAAFPELAGRDALAVLAAAPTPAAGHALTLDAITDLLARAGRQRNLEPTATKIHTVLHAEHLAALPLTTQAFAFSAKALIAVITTLTTEIAALQDKVDAHFGQHPDAEIYLSQPGLGVILAARVLAEFGDDPDRYATGKARKNYAGTSPVTRASGTRTVVLARYARNHRISDALFHQAFSALTTSPGARVCYDTMRTRGISHNDALRRLANRLVGILHGCLRHHTTYNETTAWPTTQQDQQHAA

SEQ ID NO: 511056 - protein, 355 aa, unidentified
METNTQNVTVQDVAVWIGLDVSKDSLDACLLRAERKPQHKTFPNEPAGHQKLLGWVQHLTADRAPGQICHFALEATGAYGQAVATFLADAAQRVSVLNPARVKYSGIATGQGNKTDKADALTIANYCRLHAPPVWREASHEVRHLRALVRRLADVQSQLVQEKNRARVPGLLPAVRESLENSFTFLEAEIQRLRQLIKEHIDHSPQLKADQELLVSIPGTLWVIGEATAQLLLAELPDVKQFGSAEQVAAWAGLCPQEHRSGVSVRKRTRLSKAGNGHVRKALYFPAIAAVQHNPPVRALYQRLKDAGKSGYPRNAWVMAALGAAMRKLLMLCYGVLKGRQAFDPDWAKPVQISA

SEQ ID NO: 511057 - protein, 337 aa, unidentified
MKITRIGVDTAKQVFQLHGVDAHGKTVLQKQLSRGRVLEYFAKIEVCLIGMEACAGSHYWARELSKLGHDVRLMAGQFVIPYRKNGKNDANDAEAICEAVARPNMRFVPIKSTEQQAVLTVHRARTLLVEERTGLVNQIRGLLGEFGVVTAQGIDRLRHDLPEMVEHEGLPTLARETFIELHERLRAIDIRVREYDRKIEALSKSSEPARRLMAIEGIGPITATALVATVGDATIFTSGRQFAAWLGLTPRQHSSGGKSKLGKMSKRGDVYLRTLLIHGSRSVLRFTERKTDRKSCWIESLKQRRCTNVAAVALAAKQARIIWAMLARGSEYRLAAV

SEQ ID NO: 511058 - protein, 377 aa, unidentified
MKRIKFVGLDVHAETIAVAVAEQDGEMRSLGVIPNREESIRKLVKKLGPVEQLRFCYEAGPTGYVVYWQLTVLGAKCEVVAPTLVPVKSGERVKTDRRDALKLARNYRAGELTAVWVPDAAHEALRDLVRAREAAKKDQLRAKHRLGKFLLRHGRRPPTGVKAWTLNYLAWVKKEVHFEQPAQEATLLDYLHEVEHAESRIDRLDLAIEEAVKSTPPKMRAVIEALQALRGIAQVAAVTIVAELGEISRFPGARQLMGYGGIVASEHSSGESTRRGGITKTGNAHLRRVVVEAAWASRHRPNVGGALRKRQELVSEEVREIAWKAQHRLHTRYRKLTARGKDKGKVVTAIGRELLGFIWAIGVKVEAAQKETERRAA

SEQ ID NO: 511059 - protein, 426 aa, unidentified
MPNCLFIGVDVALKGNQFCVMNFDQHVFFNLKFPNNPEGNDIVIDKIKDIEDKFFFEKIIIVMESTGMYSFHPACYLSSNEYLNNFHTEVYQINACDFDKYKKSFHDLEKEDGIDAYILADYARVGRTKALYPFRGSQYIALQRLTRQRYHICKELIREKTYVMTNLYLSFSGLLSLNKNELPFSNMFGATSSAILEEFISPDQIAESSIEELMDFISSKGKNHTKNPENKVTALQKAIRSSYRLDQTAYEPINIAIASSINTIKFYQEQLKNIDKAILNTVLGLDSNVYNILLSIRGIGKVYAAGIMAEIGNIDRFPHNSKLAKYAGLYWKRNQSGKFDSQDKKSSKKSNKYLRYYLIEATASCVRQGFPFIKDFYNIKYNEVTKHQHKRALVLSARKLERLIFGLLRKNQYYKPLNSVQNSKNI

SEQ ID NO: 511060 - protein, 334 aa, unidentified
MTYATGEVQRGKIHPGAREAVREWLERFEAGTDAHFALEGTTGWRFVVEEIERRGFTAHLADPAELNMLRGPKRRAKTDHADCELMVNLVLEGRLPESSIPPAHILELRALVRLRKTLVDQRIEWQQRLQAQLFHQGVVPGLHLCRPEDRRRLAEMQMSPAGRQTMGTGLIMLDDFDAQLNPLSAQLVALAKSQPGCRALEHELFGVGWLTAVAIVAELGDCRRFHSSDQAVRSSGLDITVHESNGRRPGGHLARQGPAVLRWALFEAAQCAARKASPDHAYYVRVRDHIDHNRACLSVARKICRRACHILKDLGDAAMAPPRPPSVSRDPKAA

SEQ ID NO: 511061 - protein, 422 aa, unidentified
MKAFVVEDFAALIGIDWADTKHDICENPSLSKAYHYSIISSKPEAVHKWASELATRYPNQKVAVGCELQKGPLIYALSKYKHIVIFPINPSSVAKYRKVFSPSGAKDDPTDAFIQVEILSLYMSKLRALSPESNSVRTLAQLVEYRRKLVQDRVDITNKITTTLKNYFPQPVEWFKEKDTAIFCDFLTRWPTLAVVKKARKSTLNAFFNQHNARYSLVNESRISAIKSAIPLTEDEGVIAPNKLYTQALVPQLKALNESIDTFDKAIKQYYKPQRDKAIFDSFPGAGPQLSPRLFVAFGTNRERFKDASELQKYGGIAPVTERSGKKQWIHWRYSCPTFLRQTFVEWAGQSIKYSFWAKAYYEQQQAKGKPRNTIVRALAFKWIRIAFRCWQTRTPYSESKYLEALKLKGSPLLKYALESKI

SEQ ID NO: 511062 - protein, 351 aa, unidentified
MLIIGLDYHPSFQQIAFIDNETGEYGERQLLHKGGEAESFYRELKQQGVEVRIGMEATGHARWFERLVAELDFELCIGDPAQIRAKRVRKQKTDREDARLLLTLLMEGRFPRIWVPGPENRDLRQLLWHRHRLVQMRTRIMNQLQAVAMNEGVRRKKRLWSDAGRAQLESFSLAPWATQRRRDLLQLMDQLNLTIEELTTAVKKEAEKIPEVLRLMTHPGVGELTALAFVLIIGTPQRFQCGKQVASYLGLIPSEESSGGRQRLGHITKQGNSLVRFLLVEAAQAAARSDPEWRGRFLRLAMRRERRIAKVAMARKLAVRLFWMWRRQWDYQQLMKFGSYAGESEYVHGVQ

SEQ ID NO: 511063 - protein, 391 aa, unidentified
MRKPKQQKKPLNDLSRSPTPFDPNQTLTVVVELSKESWLVAGILPGVERQPLKKLAADENGLLKLLERWRAEAEKAGHKIDRIAVAFEAGRDGFWLARWLRARGIEAHVIHAASVAVPREHRRAKTDRLDTEHLKRAFLGWLRGERNHCKMCPIPTSAEEDAKRPHRERETLVGEQTTIINRIKATLARLGIRSFNPKLKKAPERLEHLRTPEGEPIPPNTLAELQRDMARKQFVAEQIRQIEKARLEQLKQAPKTGPNLMVLVLMRVIGIGIETADMLVKEILSRNMRDRRAVARYGGLTGSPHESGSKSREKGLARSGNARVRRGMIQLAWRFLDYQKDSALAKWFEARTKNGSRKKMIVALARKLLIALWHFVRDGVVPEGVVLRPAH

SEQ ID NO: 511064 - protein, 320 aa, unidentified
MLSFCGIDVSKDRLDVIVLPEEQCCSVSNDRTGWADLVERLRGRSIAGIGIEASGGYERGVTRALLAAGMPVRQVNPFKLRQFARASGVLAKSDPLDARMIASFVAIMPTRPAQRTPAGAAQVAEMLAVRRQLSAEKVAAENASRLLEDAMLRRLSRRRIGRLAGDIDLLDKRMVEIVANDPALAHRYRLLTSMPGVGSLLACTLIALLPELGCISRKQVAALVGVAPYAFESGTLKGRRCIWGGRANVRQVLYMAAMSASNWNPALKPFHDRLNAAGKKPKVTIVAVMRKMITTLNAIVRDDVLWADRHSGRPSVTTTR

SEQ ID NO: 511065 - protein, 371 aa, unidentified
MTDYSTFIGMDVHKNSIDIATAQSGRKGQVLHYGKIDGTLSALDKVIRKLVSRGSRLNFVYEAGPCGYQIYRHLTGQGFACTVVAPSRIPKTSGNRIKNDRRDALMLARLHRAGELTAVYVPRPEDEAIRDLTRAREDAKSDEKRSKQRLLAFLLRSGLRYTGSGFWSQAHMRWLSDIKMPHRSQQIVLQEYIGTLNQCKERVQRLTEQIQLLLPEWQLFPVVQALQSMRGISMIVAATTIAEIGDLKRFHNPSELMSYLGLVPSEHSSGQKTRRGSITKTGNGHVRRVLVEAAWAYRLRARVSRVLLKRQEGLPQSVCDIAWKAQLRLCSRYRHLWAKGKSKQVVVTAIARELCGFMWAIANEIEVPVNA

SEQ ID NO: 511066 - protein, 418 aa, unidentified
MKTNKTKKVTKINNKTLIATLDIGKNVQYGYFRAPNGNDIKPFAFYNTKKSFNAFWAKLVEFKNKERLEDIVIGFESTGPYAEPLFHFLRKKPVKLVQVNPVHTKRVKELTGNSPNKTDKKDPRVIADVICLGHALTLVVPEGPAAELRRLSQARERAIKTRTAMINQLQHLMFVIFPEFFTVLNISTKTARYFIKHYTTPEKIYALGLDSVSQIMKKVSRGKLGQQRAKQLHEAAGDSVGISEGKQSIVFEIEHLVARIEAEDQFVDCLEQQMCDYLQQIPYSQNILSIKGLAEVTVAGLIGEVADFNKFDTISEVMKLAGLDLYEISSGKHRGQRRISKRGRPLMRKLLFFAAINVVKSKGIMHKKYQQMLDRGTLKMKALVAISRKLLAIIFALVRDQTRYVENYSNSNHYKLAA

SEQ ID NO: 511067 - protein, 414 aa, unidentified
MEIVHKACAGLDVHKKTVVAAIIVPGEQGGLRKEVRTFGTMTSDLLALSDWLMDCEVSHIAMESTGEYWKPVFNILEHNYEVLLVNAQHIKVVPGRKTDIKDSEWIAELLRHGLLRASFVPPLGQRELRDLTRARSTFVRTRATLVNRVHKVLEGANIKLGSVASDVMGVSGRAMLAALVEGQSSPLEMAELAHGRMRDKRDLLAKALEGRMQAHHRFVLGQLLLQIDSLDETIDRFNEQIETYCRPFEEAVTLLDTIPGVGRETAEVIVSEIGTDMNRFPTADHLASWAGVAPGNNESAGKRRSGKTRKGNKVLCAALNQAAHAAACTKNTYLSAQYRRLAARRGKKKAIVALEHTILVMAYHLIQRNEPYHELGVNYFDNRRPEATAKRLVKRLEQLGYAVSLHQAPALAPA

SEQ ID NO: 511068 - protein, 389 aa, unidentified
MFYVGIDVAKDKHDCCILGSDGEVLFSPFTIPNTLYGLDELYEKICSLTDDYSEIKVGLEATGHYHLNLLRSLLDNGLPSFVINPLHTNLFRKGQSLRKTKTDKVDAASIAMMLLTDKTLKPYSETSYHNEELKSLTRYRFDKVQERSQLKVSVSRLVSILFPELEKLVPTLHMNSVYALLSEFPGASHIASAHLTRLKHLLYDASKGHYGRDMALSIRDAALSSIGTAMPSKSMELKHTIHLIQVISEEIDEIETAINEIMDSLNSPITTIPGLKNRMGAMILAEVGDFSRFDSADQILAYAGLSPSTYQSGQLTSSHSRMEKRGSRYLRYALFNATQYVCIWDPTFKAYLAKKRAEGKHYYVAISHATKKLVRLIYRMQLTGEAYRG

SEQ ID NO: 511069 - protein, 368 aa, unidentified
MDKAITFFVGLDVHKESIAIGVAAAGDAPPRFVGTVGPALAELLTALGRIGPPAGLRVVYEAGPTGFHLARELTGRSYDCQVIAPAKIPRRPGERIKTDRRDCQKLARLARAGELVAVVVPDARDEAIRDLSRAREDAVAARLKARQQLKAMLLRHGHRYSGKTSWTAAHERYLAAVSFPHPAQDLAFAEYRQAVGAADAQVARLTGALRTQVETWRMQPVVMALCTLRGIDFIAATTLLAELGDLTRFAHPRELMGFLGLVPAQYSTGETRRLGAITRTGNGHARRVLVEAALNHRFPARMSRRLQQRQTGQPEAVRAIAWKAQIRLCHRYRRLVDRGVPKNKVGVAIARELAGFVWDIARHVAPTR

SEQ ID NO: 511070 - protein, 412 aa, unidentified
MDVYCGIDWAEDHHDISVVDRDGQLLARRRISDDAAGLAALLGLLAEHGDNPGDLIPVAIETPRGLLTACLRATGRKVYPINPMSVARYRDRHSVAGRKSDHGDSFVLANVLRTDMHAHRPLPADTELAQAIAVLARAQQDAVWDRTTAHNKLRSCLREYFPGFLAAFADARGGITRPEARITLAAAPTPADAATLTLTQLRGLLKKAGRIRGLDTEATRLRDAFRVPQMRQLPLVEDAMGRQALALLGQLDAACAAADGLEQAATQSFNLHPDAGIITSFPGLGALTGARVLAEIGDDRSRFSDAKGLKAYAGAAPITRASGKTKSVTHRRVKNNRLNAAGYSWAFSALTASPGARAHYDRRRDDGDRHAAAQRNLFGRLLGCLHHCLTTGQRYGETIAFPAIGKELPQAA

SEQ ID NO: 511071 - protein, 345 aa, unidentified
MKKVVAGMDLHGNNVVIGVMDMDGERVAHRKVPCELKEVVKFLAPYKKRLEQVAVESTYNWYWLVDGLRGLKYSVVLANPAGMQQYSGIKHADDTNDAFFLAELLRLKILPTGYIYDEQLRPVRDLLRRRMTLVHHRSALLLSFKSLYTRTTGQEMSLSELKGLEVKAAQELYDHPANQLIAGMQVGHIEQLTESIEKIEKVVLASARELPYYAKLATLPGVGRILGMTITLEVGDIKRFAGAGNFASYCRTVEARRTSNSKQKGENNSKCGNKYLAWAFVEAANFARRYDEQCRKWYDRKAAKTSKVIATKALACKLAKAAWHVMSQETDYDARRVFGQPSSTK

SEQ ID NO: 511072 - protein, 331 aa, unidentified
MNYIGMDIHKQFTVAVVKDEQGNKLAEDKFTNSEENFGSFMRQYKPEETRIVIESTCVWEYIYEILEAKNYEVKLANPSKTKAIAFARIKTDSVDANTLADLLRANLIAESYIPPKEIRRLREITRERRTFVKQTTQIKNRIHAILIKRGIEIPTATLCKSTLLWIRDKFEDDTSMLHYMNLLEYHTTELKSVDATIKNLAEENSNAKLLITIPGIASIRAMDLVAEIGEIKRFPTADKLCSYAGLVPAIRQSGNTLRFGSLIKQSSKSLKGTLIEASWNLVRTKESNLLQEFYKKLAKKKGKQKAICATARKLCCVIHAMLKNKEEFRYS

SEQ ID NO: 511073 - protein, 348 aa, unidentified
MKIIGCDLHARQQTIAMVDTETGEFTEKTLSHEGNALREFYAGLESPVVVGIEATGAMQWFLELLEELGIECQVGHPAKIRAAETRKQKHDRRDARLLLDLLVMNRFPKIWMPSIEQRDLRTLLRDRHQWVKIRARLQHTLQAIALNHALRRGPALWSAAGQNALQALPLPDYSSQRRTELLRLYVQLQKRIQALDKEVDVQARQRPHARRLLTHPGVGAVTALATEVFLGDPNRFATGNQVASYIGMIPCEHSSGKRQRLGKLSKEGNSLLRYLWTEATMHAVGKDPELKRFYRRKLIQKGMGKARIAAARKLGIRLWIMMRDQIDYEEFCRRGKLRQEGKAQCGDA

SEQ ID NO: 511074 - protein, 410 aa, unidentified
MKLLYQRCCGLDVHKDTVVACLRIVSDGKVTTEVRTFKTTTAGLLQLAAWLAANNCTHVAMEATGVYWKPVWHILDDGEFELVLANAAHVKNVPGRKTDVNDAMWLAELLAHGLIRSSFVPDTQTQEMRSLLRTRKQLIREQSSHTLRVQKTLEDANIKLDSVLSDLMGRSGRAMIEALIAGETNPAKLASLANRGVKASHEELREALRGRVTNNHRFLLRLHLNQIDALDAAVATVDAQVEGILGPFRTAVELVMSVPGIKNLSAQVIISEIGTDMSRFPSDQHLISWAGMCPRNDESAGKRRSNRLRNGAPWLKTTLVQCAWAAKNKKDSYLQAQFYRIKARRGPKKAIMAVAASILTAIYHMLKDGTMYQDLGRKHFDRRSNDQQKRSLVKRLADLGYMVELKPLAT

SEQ ID NO: 511075 - protein, 355 aa, unidentified
MKRIAQKKKKVELSGSRCYVGVDAHKVTYYVALLSEEGARLQFSTPADPHGLLSKLNEMGVEVLSLAHETGPTGYGLAWACQELGVPVLVAPASKIPRPVSAGGKTDRLDAMKLAEFLAKGMLKSVAIPTHEEHGLRELERRRQKLIGSRKKMKQSIKSFLLRNGLSAVVDVEKWTKTAVKGLKNLPLENAYLRMTLDSLLAELDSLDVQIKTMEEVLNKETIRQGKGALLRNLKTIPGVGKTVAQTFVAEIFRPERFERAEEICAYVGLAPILSQSGQSQGKAFLRRVGQNYFRSILVESAWTSVRRDSYFRDFYARIRSKTNLSQKAIVAVARKLLIILWRVAVENRVYTPVR

SEQ ID NO: 511076 - protein, 358 aa, unidentified
MDNQHITDPVVGGVDTHKDLHVAPIVDGQDRFLASESFPTTRQGYRRMLSWMRSFGELQRVGVEATGTDGAGLLRHLQQAGIEVLEVTGPDRHDRRKRGKSDDFDAEAAAHAAFAGKRTVTPKTRDGMIEALRVLKACRKTAVQARRIALQMIGNTIVSAPDALRDTLRKMTRMKLIRTLAAWRPDMTGYREMEMAYRIALKSLARRYLELHDEIADLDAMIKPIVDDLAPDLVAQNSVGYCSAAQLLITAGDNPGQLKSEASFAALCGVSPVPASSGKTDRPRLNRGGDRAANSALHIIAICRLRCDARTQHYVARRIADGMSKLEAIRCVKRYIAREVFALIRNRYREINEAQVAA

SEQ ID NO: 511077 - protein, 409 aa, unidentified
MEILYPRCAGLDVHKDSVMACILTPGAGAEPRKEIRQFGTTTAELRALAAWLGEHAVTHAAMESTGVYWKPVFNILEASCELIVVNARHVKQVPGRKTDKADCAWLASLLRHGLLEASFVPPVEVRELRDLCRMRTTLVRECVQVGNRLRKVLEDANVKLDSVASDVLGVSGRLMIQALITGEDDPAVLAQLARGRMRSKQAALTAALEGQVRPHHRFLLQQWMGLLDTLEQHIAAVEDEIERHMPPFAWAAELLETVPGIQRTAACALIAEIGADMGRFPTARHLASWAGLCPGNNESAGKRRSGKSHRGNRWIKGLMTEIAWAASRTKNSYAAAMYKRLAPRRGSKRALVAVANALLQSVWHMLTHHRPYQDLGANYFDRLREDQLTRALVRRLEKLGHKVVLESAA

SEQ ID NO: 511078 - protein, 373 aa, unidentified
MGHTITIVGLDAHKNSIEIVTAETAGNQEVRHYGKIGGDMTSLDKAIRKLISVRSSGAELRFVYEAGPCGYEIYRHLIKQGFQCAVVAPSMIPKKSGTRIKNDRRDAENLARLERAGELTKVYVPREEDEAMRDLTRAREDAVKAQRSARQLLGAFLLRHGHRYAGKKTWTPAHMRWLSDITMPHPAQQVTFQEYIHAITESTGRVARLTDQIQKLLPEWRLEPIVKALQALRGVAPIVATTTVAEIGDMTRFEKPKQFMTYLGLIPSEHSSGESIKRGGITKTGNGHVRRALIEAAQAYSFPARVSRPLLKRQEDLPQSIREIAWKAQVRLCGRFRRLMARGKQRNKVVTAIARELAAFMWAIAKEAQVACG

SEQ ID NO: 511079 - protein, 346 aa, unidentified
MLYAGLDLSRKRVDVCLLDEDGERIAVTAAPPDADGLRGLARRLAACGEPIYAALESMNGARFVHDELERCGWEVELADAQKVKGLAPLAAKTDRIDAYVLAELARRDLVPAIWLPPPGVREARERARFRLHLVRHRAALKARIHASLIAHGHPCPVSDLFGTRGRALLDGFELPAAWRASTEASLRVIAHLDAEIDACERELRRQGADHPYVPLLMSAPGIGWVLAYTIAAEIGEIERFASPKKLCGYTGLCPRVYQSGQSDRRGPLAKNGPTYLRWALVEAAVHAARHPAYAAHYQATKQRLGRQRGAKVARVEVARKLAEAVWYMLTRSQTFAPQGPTAALVA

SEQ ID NO: 511080 - protein, 453 aa, unidentified
MEILYTNCAGLDVHKKTVKVCLLTQGSNGQPHKEFRTYFTTTEELLKLSDWLKEQEVTHLAFEATGVYWKPVFNLLEGNFEILVVNAQHIKAVPGRKTDVKDAEWIADLLRHGLLKASFIPSGPQRELRDLTRYRVKLTEEKAREINRVQKTLEDTNLKLGDVVSDIMGKASRMILHAIADGETDPVRLAAFAVGRVRASQEQLEAALKGHVTDHHRFLLGEHLTQIRHLEQAIDRVTSEIIRRFTPPPSPEEPPSAAEKEDETTPERTSDPSSASQETPVPPPAALSWAQAVVLLCSIPGISERTAIGILAEIGTNMQQFPTAAHLASWAGVCPGNRESAGKRLSGKTRKGNLFLRCLLVQAAHSASHQKHCYLAEQYRRIAKRRGAKRAAVAVAHSILVIIYHLLSDQTTYLEKGETFFEERDREGTQKRLVRQLSRLGYQVELQPLAQAG

SEQ ID NO: 511081 - protein, 361 aa, unidentified
MNASKEQPKMTAGLDIGDKYSYLCLIDQQSGEVVEEGRLRTTPEALRRRFASEQPPMRIAMEAGTHSPWVSRVLKECGHEVLVANARKLRLIYANKRKTDEVDAENLARLTRLDPKLLYPLKHRGEDSQTHMALIRSRQALVGARTQLVNHVRGAVKSFGARLPKCPARSFHKRAPGHIPEALLPALGPILEQIGSLTERIRDYERKLEAIAKERYPQETQLLRQVEGVGPLTALTFVLTLEDPYRFEKSRSVGAYLGLVPASDKSGDRDPQRRISKEGDEMLRKLLVGSAHYILGPFGGDSDLRRHGQKIASRGGKNAKKRAAVAVARKLAVLLHRLWVTGEIYDPLYNAHRSQKREEAA

SEQ ID NO: 511082 - protein, 357 aa, unidentified
MRCIPTDAKGITLGVDTHKDTHVAVALDDLGRRLGTLSIPTTRSGYEELAEWANGFGPLEGVGIEGTGSFGAGLSRFLRAEGTRVFEVDRPKRRDQYRSGKSDPIDAELAARAVLAGTATGKPKDGDGQVEMIRTLRVTRRSAVKARAQAVNQLKNLLITAPEGLRSELRGLSTAKLLAKVSGFRPGANPSEVEAATKFAMRSVARRHQRLSEEISELDEQLDRLVAEAAPELVAMEGVGTDTAASLLIAAGDNPERLRNEAAFAHLCGVAPIPASSGKSVRHRLNRQGNRDANRALYVIAVCRMSREERTRSYVVKRTAEGKTKKEIIRCLKRYIAREVYRVLASASLNGAPILAP

SEQ ID NO: 511083 - protein, 346 aa, unidentified
MMLIGCDFHPSWQQVSWLDVETGETGEQKLVHAGGEAKQFYEQLAAPVLIGMEATGNSQWFIELVEDLGHEIWIGDAAQIRASYVRKQKTDKRDAAHILKLLVEGRFPRLWTPDREQRDLRQLVLHRHKLVLIRSRVKNELQHLSLNKGMQRKRRLWSQAGQQLLRELPLKKWAACRREDLLGLLTMLDEQIGKLDGAVQHAAEENPQSKLLMTQPGVGPNTALAFVLTLGDVGRFPRGKQVASYLGLIPREESSGGRQKLGAITKQGNRMLRALLVEAAQVAVVHDPGLRKQYRHRCHQKPKAVAKVAVARKLAVRLYWMLRTNVAYPEIVRIESSSGLALVGAS

SEQ ID NO: 511084 - protein, 433 aa, unidentified
MINAVLSIDVSLDRLDVALRTDDTGWQWPHRAYPNNWPGYQQLKADLQTELGTHAAVQLTIVAESTGPYWWPAFYHLAHDDDLADYQPQLAVLNPKQVKRLRQALPEQDKNDLLDPQLIDRYYQAFGIKHAYQFNDRYLPLRFLSRAYARLIHTLAAEKTYLRSLLFTSASEYQRLPPFSHLCGVTSLRLLDEFADIHTLANIPLDDLTDQLRHFSGHTLPHPDLKAQRLHQIADQSYPCPPHLVDSLHAIIQLSVAHIRFLSDNQKTLRRLIEQQLQQLPEAEPALQQPGLGPILVAGCLSEIQDTSRFITGTKFDRKLKSTRPRTYRDGQAAVAKLAGLWWPQRDSGRFQADDRHLARERNSYLRYWFIQAAYTLQRYHPDYADFYRRKFDEVRTHQHQRALILTARKAVRLIFALLHKGQRACREEGLIA

SEQ ID NO: 511085 - protein, 352 aa, unidentified
MRRPRHQVTTEEELFIGIDLHKHRWHVTIRTFDVELFSGSIPGNWEGLHRILARYAGHQLQAVYEAGYFGFRLHDRLVAHGIPCIVTPPSLVPQEYGNRVKTDRRDSSKLAHLLAKGLLKRVWVPSEEELYHRQVIRRRRQLVRDRVRIQSRIKAELRFYGIHLEEPRGRWTEIYFETVRSVRFGNRWMQESFNRLLEQYEFLSAQISKQTQLLRELSETAMYRDRMAILQTIPGIGVISAMELLLELQDVSRFRRAEQLAAYVGLTPSQYSSADKVRMGRITGIGKNTLRSLLVEASWTLIRKDPAMRDKYDRIKIRSGGKRAVVAIARTLLLRMRRMLLDKQAYALQRAA

SEQ ID NO: 511086 - protein, 369 aa, unidentified
MIIIGCDYHTGFQQIAYVDTETGELHERALQHREEAEKFYRELAAQGMKVRVGMEASGHARWFERLLAELNIELWIGDAAEIHRKRERKQKTDRQDAQHILRLLLKDDFPKIWVPSWENRDLRQLLWHRHRMVQARTRMMNQLQAVALNEGLRYKKRLWRDAGRKQLEAFRLAPWASRRRHDLLELLDRLNPTIAELTQAIEREVEKCPEARRLQTHPGVGPLTALAFVLIIGKADRFQCGKQIASYLGLVPLEDSSGNRRRLGHITKQGNSLLRFLLVEAAQVTARSLPEWRSKYVHLTMRRGRKIAKVAMARRLAVRMYWMMRKGWDYEQVKKFGSHAGQPGYRHGVKSNIEQLIGASRSSSQRSSK

SEQ ID NO: 511087 - protein, 429 aa, unidentified
MTRISAGVDVSKNRSTVCIIDQDGKFIMRPFLVWHSTEELDFLADTLKRLNGEVRVIMESTSIYQYPIALQLKERGLFISIVNAYKVKKFANTDFRGGKTDKKDSRTIASYGISYWDKLVEWQIPKDTYFNLDLLNRTYMNAKKHRQIILQELQHYIDCAMPGMDKELHSLNLSTKKGFMLDFVEKFWHRDEIVNMTEAEFTEVFTAWAKKKGYRPVEGKAAKIYAIAKSCIPYYPANPTVKTILQCIVDKLSGVNRTLVTIVTQMIEEAKKLPEYQIVREMPGVGDPLAARFFGSAGDIRRFKNSKALVAYAGIDSPPDESGDFSSTHRHITKKGSKVFRDTGYEIMMALRAQKRTWEKVRKNPEVYDYMLKKEAEGKPRKVAKIAALNKFLRIVYARIKELYDNMALAERAKAKTKSKTKAKTKATA

SEQ ID NO: 511088 - protein, 409 aa, unidentified
MPDYELYVGIDWATQHHQICLVDPQGQRRDERQVAHSGAGLTGLVEHLTSLVSDPPRIAVALEVPRGAIVDTLLERGCHVFALNPKQLDRFRDRHTVAGAKDDRRDAFVLADALRTDRGAFRRLAVEAPAVIQLREMSRLHAELVEEHGRLTNRLREQLWRFYPQALTLCPAADESWLWSLLAEAPTPAQAQRLTRSALAALLTRHRIRRLSADDVLAALRTPSLHVAPGTAEAASEHVGLLLPRLGLIHEQRTRCEHRLDALLEAAARTADDEHLEHRDVTILRSLPGVGRVVAATMLAEASRPLAARDYQTLRTHAGVAPVTRQSGKVRNVVMRRSCNPRLRAAVFHWARNSIRLDARCRAHYDRLRQRHGHARALRGVADRLLGVLMAMLVTGSLYDSERRRALAA

SEQ ID NO: 511089 - protein, 347 aa, unidentified
MIIIGCDFHSRLQQIAMLDTETGEVVEKRLDHESEEAKRFYEGLKEPALVGIETTGYTRWFAEMLAELGHELVVGEAGKIRAKDPRKQKHDRRDAQLILDLLVRGDFPKVWLPPPEERDVRVLVEHRHQLVELRTRAKNGLQAMALSYGLRRRGRLWSERGREELQKIPLREGMGRRRADLLQLLAQLDVWVKELDQRIGEEVGRREDAQRLMTHPGVGPQTALATVLVLGPVERFPDTRRLTSYLGLIPQEESSGSRQRFGHLTKQGNRLMRFLLVEAAQTASRFDPGLRRMYRRLAFRKGAAIAKVAVARKLAIRLFIMLRDRIDYQEFCRRGSHAGMLGDVALA

SEQ ID NO: 511090 - protein, 408 aa, unidentified
MNTLYVGIDVSSKSNVVYLMLPNGDKHSNFSVANSHEGSTQLVKRILSALTSHSLDTVLIGLEATSVYGDNLVYFLREDATLAAFNRKIHVLNPKQVKKFHDAYNDLPKNDYVDSFVIADCLRFGRINKEVYMGDYRYKALQNLTRARFFAVQNLVKEKQRFMNVLFKKYSTMTQEKVFSDTFSTTALAVYDEFESAEALANMDLHELTDFIIEKGKNRFPDPDAVAKAIQKAARNSYRLPKTVNDSVNQVLSISITSMKALESQIKEFDKAIKAQMELLPNVLISIPGIGPVYSAGIMAEIGDINRFNSQAALAKYAGLAWKQHQSGGFESEVTRLIPSGNRFLKYYLCEAAFSLVRCDKEYSDFYHLKYKEVNRCQHKRALALTARKFVRLVFRLLKDNRLYCPAK

SEQ ID NO: 511091 - protein, 343 aa, unidentified
MTQYVGLDISLKETKLHVLDEAGNRVWRGRCATEPAAIAAAVRRYAPTAVRIGLETGPLTTWLWTALTAEGLPMVCLDARHAKKALDMKVNKTDANDAEGLAHLVRTGWYREVRVKSRGAMLAKALLGARSQLLSMSLALENQIRGILKTFGRIVPKGAGGLFEKNVRALITDDAEIAAVILPLLQARQMARSKCAALDRRLIGSVQGDATCRMLMTMPGIGPITAVAYLAALEKPDTFKRSRAVGAWLGLTPRRFQSGEVDYDGHISRRGDGQLRALLYEAAAVLMTRVRRESALRSWGLVLWKRLGFKRAATALARRMAVVLHAMWKSGTPFNPTLGAATP

SEQ ID NO: 511092 - protein, 419 aa, unidentified
MRSNLSKRTGIINRQTLIVTVDIGKSTHTGYGRCPDGTEIPTFAFFNNGRGFTKFWAKVMAMMHAKQLTEVIVGFESTGPYAEPLMHFLSKKGVRLVQVNGAHTKKFKDVCGNSPNKTDAKDPNVIADLLEMGRFLSVVIPEGSAAELRRLSHARERHLERLKTLYNQLHALVFLMFPEFLEVMKKLKSKSSRHLLEVAPTPQAILALGCDELTRILRRISRGRLTEKRAQALCVAASESVGLVAGQKGMVVELEQLLQLIARCEEFSTQLEQDLAAGLQAVPYSRCLLSIKGVGVVTVAGLIGEVGEFSNFTTIDQLMKYAGLNLYELSSGRHQGRRRISKRGRPLMRKLLYFATLNVVHKGGILHRPYQSYLERGMPRLKALVAICRKLLGIMFALVRDHSEYQTKYSNYPLLKQAA

SEQ ID NO: 511093 - protein, 394 aa, unidentified
MRYAGIDIASEAHVVAVVDERGEVLVKPASFAEDAGGYGKLRGLLGAAAEVLVAMEATGPYWQNLFAVLAAEGYTLALLNPLRTRRFAGEDLERAKTDAIDALGIARFAAQKRPQPTRLPDAATGELRELVRHRDRLVQDLGDRVRQLHRLVALGFPEFTRHVHTLDSDLATAILLQYPTARAFRGISPRGLAKMRYDGRHKVGEELARTLVDLARVSVGQHHGPAYRIQVRHFCQDIRLLKERLKALDEDIASTLKEHEVGSLLTTIDGIGTKTAAKLIAELGDPSHFRSAAALASYVGVVPATSQSGKRQTQRARLSPLGNARLRSALWMPVLTAVRKNPWLRAYYEGLRARGKLPKVALVAAMRKLLTAVHSVAKNRRAFVPMLAHQEAPA

SEQ ID NO: 511094 - protein, 348 aa, unidentified
MTHFVGLDVSVKETAMCVVDEAGTVICEHKVPSEPDDIVTLLTSVGVDYGRIGIEAGPLSQWLVNGLAEAGLPVICVETRHMKSLLKAQQVNKSDRHDARGIAQMMRVGLFKPVHVKTLASQEQRMLLTARKLVQRKMLDVEGDLRGTLRNFGLKVGVISTGKFEARINELVEGLPRLAAIVTPLLTIRRVMRQEFARLHKMLLDAVRHDPICGRLMTAPGVGAVVALTYRATIDQPQRFIHSRAVGAHVGLAPRRHQSGEIDFDGGISKSGDAMLRTILYEAAQVLLTQSRHWSWLKAWGTRVAQRRGMRRAIIAVARRLAVVLHRMWVDGTDFRWGSEPAATVAVA

SEQ ID NO: 511095 - protein, 410 aa, unidentified
MSESPYAFYVGVDWASETHQFTVLTPERHLEAERRIEHTGRALGEMADWLTALADGEPARIAVAIEVPRGPVVETLLERGFHVFAINPKQLDRFRDRHSPAGAKDDRRDGFVLADSLRTDRPAFRQVHVDDPLLIQLRELSRAEEELQTELRRLSNRLWEQLQRFYPQVLRLSPAVDEPWIWALLQLAPTPVAARALRRATLARLLARHRIRRVTAEMVLAELHSPALRVAPGTTEAAREHIALLLPRLQLLHEQRGQCARRIEQLLDALEGSDAEHRDVTVLRSLPGVGRVIAATMLAEAARPLAERDYHAVRTQGGVAPITRQSGKSVLVSMRYACNHRLRNALYHWGRVSAQHDPSTRRHYRALRQRGHGHARAIRGVIDRLLVVLMAMLRTGTTYDPARRRVPAAA

SEQ ID NO: 511096 - protein, 366 aa, unidentified
MRKHHHFGTFDAVRRGHPLHHYAGIDVSLELSSVCIVDAKGKIVREAKVASDPDALVAFFKQLGFRVVRIGLEAGPLSQWLYAGLAQAGFEAVLLETRHVKAALSAMTVKTDRKDARGIAQLIRMGWFRPVHCKSLGSQEVRALLVARKQLLGKLLDVELSIRGILRGFGLKMGVVTRKTFEARARELSSGQTMLETVVGAMLTARAALQSEYAKLHKTMLVIVRDDKICRRLMTAPGVGPVVAITFKTAVDDPTRISKSKAVGPLFGLTPKKYQSGETDVTGGITCVGDTMVRTALYKAANILLSRVTRFSALKRWAVEVAKRRGLKRAKVALARKIGVVLHRMWVDGTDFRWTKAELGSGVAAH

SEQ ID NO: 511097 - protein, 390 aa, unidentified
MIVIGADTHKRSHTIAAVNETTGRVIADRTLATTHGAFEDALRWARRLDDRDRVWANEDCRHVSGALERFLLARGERVIRVPPKLMAGARDAARERGKSDAIDAVAIARAAIREGLDTLPVAQLAGPELDVRLLVDHRERLVGQRTALINDLRWQLHDLWPEDDVPSRALITGRWQDRVARRLAATMQTARVRIARDELRRVRDLTRAITQLEHELAALVAQLAPRLLAEQGCGVLTAAKLIGEIAGIDRFATDAKLARTAAAAPSPASSGRTNRHRLDRGGNRQINCALHRIAITKARVDPETAAYLARKQSEGKSRREALRCLKRHLARRVFKLLQPAPPTSPVQLGKQPPTLTRPGVIVPRQGIRMVWRVGAVAMTASEDIASGSAR

SEQ ID NO: 511098 - protein, 426 aa, unidentified
MIHSKIHPKMKLTFVGIDSHKDTHCAVVLNCFYEKLGEVTFKNAPSAFNGFITEIGKFKPKGTSFIFGLEDVTAYGRSLAVFLTNRKYQVKHVNAALVASERKSVNILNKTDSFDAECAARVLLNRFDQLPEADPQDKFWVLSNLVVRRRSIVKMNTALKNHLHSFLTGHYPSYSLFFSDIGDDTTLLFYEKYPSPSKLKGVLVEELAEMLEKNSKKRVGREKAAQILDCVKRDGDTTSEFQEIRDQVVRSTINQIRNNKKELETIDGMLEDFLDRFDYKLTSMRGIDTVIAASLIAEIGDISKFATPAKLARYSGVAPVTWSSGKTDVQYANQRGNRKLHSIFHHLAVLVTMTAGKNRTVINPYFYEYYLKKIKEGKTKGQALKCVQRRLVNIIWNMMTYKTEYINPPTMRCPKQPEEKKASKKA

SEQ ID NO: 511099 - protein, 364 aa, unidentified
MDVHLRSTTVCALDAETGEAVTRRFRGNPWGEVAEWMSGFPGPSLAAYESGYLGFAPQRELSGLGVDCVVAAVSKVPRSAADLSSKNDRNDAARMAKAILSHDVTPVWVPSPEIEGLRDLAAAHDAATARLAAAKRRLLAFLARRGYAYGGTTPAGNPRRYWTYGFLRWLDGIHPADDGGIRALAALRSEVEAADETREALLAEYRAAVAAGPLSAEVEALQSIKGCGFALAAAFASEVGDFSRFRSGRQVTAYFGLAPKQRSSADSVRLGGISGAGNALVRKLAVEGSWCYAQAGHQPKLMPKGSGVPLEIRMHGRKGSERLLRRREEMLERGMPQAKANAATAAELVRWLWALGAMCREAGE

SEQ ID NO: 511100 - protein, 473 aa, unidentified
MKKTESRKRPLAMGSMNRKQRREMARKIQADDLSLEVIHRDAAGIDIGNESHYVAIPPRQGVESVRRFGCTTAELKELVGWLKQSGIRTVAMQSTGVYWIPAYDLLEAGGLEVYLVNARETKNLPGKKTDVQESQWLMKLHTYGLLRNPFRPPQEIRMLRNYWRQRHDLVGSAGRHVQRMQKVLTQMNVQLANVISDLSGVTGQAIIKEILAGERDPWALAALCDPRIKASAEEVARSLEGNWQEDLLFVLKQEQAAYEFCQQQMSECDAQLEAYLKQGEDRSGGGSLPLETRKHRRKKKKGNAPQFELREALFRMVGIDLTQIDGIDVVTAATIVSEAGYDMSKWATPEHFVSWLRLCPDNRISGGKVIGKGRLVTNNRLTSAFKMAASTLRKSDTYLGAQFRRLRTKLGAPVAIKAMAAKLARLVYRMLRYGMQFVDKGAELYEAQHRARQIRSLRRKAAQLGFQVLEAAA

SEQ ID NO: 511101 - protein, 417 aa, unidentified
MGWLVEEQDGQPVLVPRRLAGIDLGIASRHSVRVLEADGRVVGRSSCVPTVESLSAVEQAALAGAPEGTRLAVVFEPTGPAWMPIAVFFARRGHAVFRVSSAKAADLRRFLRRHAKSNGIDAETLARMPLADPRGLQCLELPGPDAAALDRRVRACGRLTEAASKHKVRIKDLVRQLMPMTPLAGDLGKADLAVLERYADPRSLLAAGAAELTRLITTVSGHQQGTGRARQWLTAATAAVELYGDHPAVPYDELAAEVATEIRLLRAIGAELAAHAAARELHYRQVDPGQLARSLPGFAEISAPVLVAAMGRPGRFRDGTRFKSYVGLAPRASETGETDRKGQPMSKAGPSQLRSAFVRAADTARRQDPQLARIYYQQMTERGATHLKACCVCIGGSRTGPCRHARRREGSDEGGPR

SEQ ID NO: 511102 - protein, 345 aa, unidentified
MKTLQTIGVDLAKNVIRVSVVSNSNKELMNKDFSRAKFASFLANQKCSLVACASAHYWARHAKSFGHQIKILPALAVAPYRQGHKTDKNDALAVAECAVRPNIKIAPMKTIEQQGMQSIQRSRAFIVQERTALSNHIRGLLMEFGIVIRQGFCALHENVPLILEGGENELPDMYRPTLQLLYQRLCQLREDLNFLDDQIKGLVRQNASCNELTEIEGVGPISAVLLFATLGSGDAFKSGREFSAYLGLTPKQYSSGGKTTMVGLSKKVANKRLRAVLTQGARAYIHRIKEPKTPKDKWLLGLIARAGYGKASVALANKNVRTAWALLTKGGEYNRFQGEQVMGPV

SEQ ID NO: 511103 - protein, 338 aa, unidentified
MEVIRQNVGVDIAKDSFVATFTILLKGQIIKHVKTKKFKNSKDGIDEFFSWSTELRKDGSEVNFTMEATGIYYENLAYYLFDRDVTVHVLLPNKAKKFAESLNIKSKTDKIDSRVLGQMGVERVLEKWELSSKIYRHLRTLSRERQQLIKERTIIKNQLHAEEHTGDPIKTTITRMKNRIKYLDKQIDSIERELEAVVSKDDYVFGKVKKITTTPGLAFKTVVAVIAETQGFANISNIRQLNSFAGYDVSIKESGKWKGKARISKKGNSHIRQAMYMPSWSSVKYSETYKSFYNRLNEKKECGLIAGTAVQRKLLGLIYTLWKNDTEYIENYEMKKVS

SEQ ID NO: 511104 - protein, 370 aa, unidentified
MMGWTPRPTASMCQSGGAEHHLREASVSEVSMIGLDISKHVFHAHGVDGRGRAMFRKRISRGKLLDFFATQPSCTVALEACGGAHHWARQLAQLGHQVRLIPPAYVKPFVKRQKNDAIDAEAICEAAQRPSMRCVAVKSEEQQAAGMVFRTRDLLVRQRTQLINAIRGHLTEYGWVAPKGPSHVAMLADLIDEEEMASSLPGAARMMFRVMLDLLSGLSRKIADLDKEIARRAREDEVSRRLMTVPGIGPISATAIVALAPPAESFAKGRDFAAWLGLTPLQRSTGGKQKLGAISKMGERTLRRLLIIGSSAVVKQASKRGAPRGSWLEQMLARKPRMLVTVALANKMARIVWALLVKQETYRAPVATRA

SEQ ID NO: 511105 - protein, 405 aa, unidentified
MAEPPNIQRWIGLDIHKAYFVAVGVDAKKQTVFGPHKIPNDQLEIWIAKHLQPSDAIVIEMTTNTYLFYDALVPHVSSVIAVHPPNVRLVTGVKVKTDNKAALALAQLHAAGLLTGVWIPPVEVRELRAVIAQRTKMVRMATQAKNRLSSLLIRLQRERPAQPFKPEQRSWWEALPLAPIEKSVLRSNLDTLESAEKQIKAIEEVLRQEAARDERVPLLTQLPGIAMLNALTILAAIGPIDRFEDAKHLVGYAGLGASVHDSGQMHATGHITKAGRRDLRYAMVEAANVAVCHHPFWKKEFARLEFRLGRSKAIVAIARHLLVAVWHILNSETVDRHADVTSVAASMLQLAYQIKKRNLPKGVSGRAFAREQLDRLGIGQDLAAVPAGKKKLNLPPSRLLLPEKE

SEQ ID NO: 511106 - protein, 370 aa, unidentified
MKKYSEAFVGVDTAKKKHAVAIADAGRDGEIRYLGEIDSSPETVARVIRKLADRYETLHVCYEAGPTGYGLFRDIRALGHDCIVVAPSLIPKKPGERVKTNRRDAVTLARLLRAGELTSVWVPDAVHEAVRDLVRAREAAAQDFRKKRQQLLSFLLRHGRIFMGHKHWTQAHRRWLAGQKFERPAQQIVFQDAIDAIEDATTRAQRLEEQLALIVPSWSMAPVVAAYQAMRGVSFVVAVTFAAEIGDVRRFDKARQVTAFVGLVPSERSTGESVRRGGLTLAGNRRARRALIEAAWTYRYPARVSKVLQTRIEGLPKAVREIAWKAQIRLCARYRKLIARGKKKPVAVAAIAREIAAFLWAIARHVAPAA

SEQ ID NO: 511107 - protein, 353 aa, unidentified
MKCDKYMGMDVHQAMTVVVVLDADGRVILETMVPTEAAAIIRLVQSLSGPLRVTFEESTQAAWLHEVIRAYVTEVIVCDPRRNKLLEDGSKADKVDARKLAELLRAGLLRSVYYGHEATRNLKELVRAYETLSIDTQRTMARIKAIYRARGIQTPGRGVYQPKQRERWLQLLREAGIGQRVAWLYEQLDQLQPLRRKAKQAMLAESRRHRAVALLRTIPQMGPIRCAFIVATVDTPHRFRTKRQFWSYIGLAVVTHMSSEYEMTAGRVVRRRKPAATRGLNHNCNRRLKEVFISAATGGSLHEPYKPFLERLKQSGMRAEMARLTLARKIAAVALIVWKKGVEFDPKKLNWTT

SEQ ID NO: 511108 - protein, 309 aa, unidentified
MKEELVYLGVDIAKSYLDAAIGSEKRRFANEAVGHRELIRWIKAMKRSVQVICEPSGGYERGLVRALVGAQLKVSLVQANRVRQFARAAGILAKTDRIDAEVLCEFGRVMRPQTVTAATLEQEHLRELESQRRHLTHLLVMEQNRSARVSDGSVQKLNRSLIAQIKKQIDKIDLLIKQHIEQSPRLSAKAEQLTAISGVGLRTAALLLAQLPELGQLNRREVAALVGVAPFNRDSGKMRGKRAIHGGRRFVRHGLYMAALVAARHNPILRVFYQRLRAAGKPAKLALTATMRKLLIALNSSLKTDLSYA

SEQ ID NO: 511109 - protein, 374 aa, unidentified
MKIVGCDFHPSWEQVAIFDSEIGEVEERKLLHGDGEAERFYRELEAPALVGIEACGNSQWFIELLERLGHVVWVGDAAQIRASYVRRQKTDRRDAGHILRLLMENRFPRLWTPTVEQRDLRQLLIHRHKLVEIRTRVKNGLQHLALNRGLQKKSSLWSARGRACFEKLPLQGWTARRREDLLRLLAELDRHLNELDEAVSRAADEHPQARLLMSQPGVGPITSLAFVLTIGDVSRFKHSNQVASYVGLIPCEHSSGGKQRLGSISKQGNRFLRQLLVEAAQSVTRLDEGFRKQYQARCHHKAKGVAKVAAARKLAVRLYWMLRQHVGYPEIALIESSPRVPLTGTGGASGSPLRGSPGAASQAEGLNERSRIRQ

SEQ ID NO: 511110 - protein, 411 aa, unidentified
MRIVHQRCCALDVHKNSITACVLVWDGQEAVEERKKEFGTYKKELERLRFWLMACKVTVVAMESAGVYWKPVWHVLERQRQFKLKLVNAQHFHGVDGQKSDQIDAAWLGELLQCGLLKGSFVPPQWQRELRDLTRLRVSLLQDQNRIQNRMEKVLEDANLKLGSVASDTLGVSGRRIVKAVIAGDKDPGWMADYAKGTLRAKRKQLEQALHGFVTDHHRTLLAMLLRQFDALESDIEYLEAEIRRRLTPHQDVVDRLAEIPGFGEVSAWTVIAELGLDMNVFRTPERAASWSGLCPGNRKSAGKRGHGRTRKGNRWIRRGLTQSALAVSHSKESYLRSFYWRIASKRGAKQARIATAHKQLKIAFLIIRDGVRYQDLGSNYFDRRNAERTKRRLVERLEGLGLKVTLEPAA

SEQ ID NO: 511111 - protein, 343 aa, unidentified
MKLHVIGIDLGKTVFHLVGLDSTGKAVIRKKCSRKQLLGFTANLEVQLIGMESCSGSHFLGRALREQGHEVRLMPAQYVKPYVQTNKSDYLDAEAIAEAVQRPRMRFVPIKTEEQLDLQALHRVRERWVMRRTAVVNQIRSLLLERGLTLPQGRRYVDQQLPRILEDAELKLSGCFRVLLAQLKLELEQLGARLEEMDGVIQKTAKENEDCQRLTEIPGVGPVTATALIAAVGNASAFPKGRKLAAWMGIVPGEYTTGGKQKLLGISKRGNKYLRTLFIQGARSVLQQRDKQAPGLSLWLAQLLARAHQNVVIVALANKLVRMAWAVLCKNERYRTSVLAVTA

SEQ ID NO: 511112 - protein, 341 aa, unidentified
MGRWIGVDLHKNRFTVSYLGANGEYELLEFTVSAKGIKSFKETLTKFDEVAVESTGNAGYFVRQIEDAVKVVKIINPLQFKIISSSVKKTDEHDAVIIAKYLSKGLIPEVRMRTKEESQMASLISTRDRMVKLRTALKNKIHNILNANGIVTKREVFSSAKGLDNVLSLDIDKAYLFELRIIVEQVHSLNKSIDEINKELTNRGKKIDGHKNLTSITGIGDISAAILLNTIGNINDFDSDKKLAAYIGIVPRVYVSNETSQYGKITKMGNKIARTALVQSTLVAIRYNPYLRSFYSRLKAKKGSGKAIIATARKLLTIIYRTLKNDWVFEDFNKYKLAVSI

SEQ ID NO: 511113 - protein, 361 aa, unidentified
MPGTMTYVGFDVHARSTHAAAIDVMTGELSRMRFGRDVQAPVEWLGTLSGPVRACYEAGPTGYGLYRAAIAAGIGMDVVAPGLTPRGRADRVKTDRKDAELLARCLMAGSLHRVVVPAPAVEAARELTRAHDACRRDLMNARHRVSKMLLRHGRVYPEASTWTQAHRRWLAAQQFPEPMSTFTYADLIATVDGLTARKKMLAEQIGILATDPQWWPTVARLRAFRGVDTLTALAIHLELGADWARFEKPTRVGSWLGLTPSRAQSGETDRQGAITKTGSTLARRMLVESAWQYAREPRIGATLVNRQAGQPDHILQISNRAQQRLHHLYTRMRARGKQHNVTIVAVARELSCFLWAAATAP

SEQ ID NO: 511114 - protein, 355 aa, unidentified
MAVTIVEEARPVTCRTAITGGVDTHADTHVAAALDPVGGLLGVGEFPATRAGYAGLLGWLGGFGTVALVGIEGTGSYGAGLARHVTAAGIRVVEAARSDRQDRRRQGKSDPLDAVSAARAAQSGRARGAPKGRDGAVEAIRALMVARRSAAGERTRTINQARALILTGPDDLRARFTRHTPAALVTGLASLRPRPGDVTGYAVRVALRELGRRAQFLDGQLERLDELIVPLVTAHAPGLLTVYGLGPRTAALLLIAAGDHPGRLRSEAAWAHLCGVAPIPASSGKVTRHRLNPGGDRRANHALWRIVFTRLGSDPATRAYAERRTAEGKSKAEIIRCLKRYAAREVYRHLRPAAG

SEQ ID NO: 511115 - protein, 449 aa, unidentified
MTNGSGVSRGDRNRNARLVRLREAVPVSNAIVGIDLADRKQMVVVCDHDSRVLARKTFRCKAWAMGTALDWAADRAKRSGFVGVTVACEPTGHRWRVLSQLTADRGMPFVCVQPAASSWARRSEDLTSDKTDDKDAVLIARLTAQLRCYLPEPVDETWGRLRHLGSRRTQLLDAHTRCIQQVRDLLECVWPAALTTAKHPFKSITWVAALRVLMLRDGGDLTRTRRLGRARFERQVRAEVVRRGRIKPCLRILNLLWAALEDPAGVEAHRAGVFERIGWILDDWDAARTNQAEVEQHMTDALDQLGLTQLVTSIDGLSPVGAAAILAETGDLTRFTSARAIVKLAGLAPRERLSGTFAGKARLSGAGRPGLRTAAWRAVWGCLPNNSVYATRYRHLTTRDQNKLKPTQAQTVLAAALLRQLWAVITTGQAWNPAVATNGLTRVEEAYVA

SEQ ID NO: 511116 - protein, 353 aa, unidentified
MNSLTDLRAVVDVVIGVDTHVHTHSAAAVDTATGGVLDEITVEATAEGYAELVEFGNNHAMLRAWAIEGTGGHGAGLSRHLLETSEIVIELDRPKRAARRNGAKSDPLDAIRAAREAMARPRLGTPRTGGERQALSVLLAARRSAINASTEAQLQVFSLVIAAPEPIRTRFRGQKLAAMLNTAANLRAHASWDTETTSTVVALRTLARRAHAMLKEARELQKAIVAIIRSWRPDLLEEFGVGPIVAATVLCAWSHPGRIHSEAAFAMLAGVAPIPANSGQVTTRYRLNRYGDRNLNTALHTVVRSRIQYQQATRDYVARRTAEGKTSREIKRCLARYVARDLYRLLENGAAAA

SEQ ID NO: 511117 - protein, 336 aa, unidentified
MYKSMNNFYFIGVDVSKKKLDFCVMFENKVVHEEVVANHPKAITALIHHLEDEFGISNAQMLVCAEHTGQYTYPLVCACEAVECKLWLENPSDIKYSSGVQRSKNDRVDARRIAVYAARFEDKVRLYERPDQKIERLKQLEAERSLYVVDLAKYKAQMKDQKEYMPESIYKDKEKRMKKLVKDLQEVIDSITEEMEDIVNSTEVLSRQYKLLQSIDGVGPVVALNMIVVTEAFTRFDNARQFNCFAGLAPFSYTSGSSQHSRARVSHRADKSIKTLLHLSAVSIISRADGEMKEYYLRKVEEGKNKMTVINALRAKIVARMFAVIKRNDFYKPIFS

SEQ ID NO: 511118 - protein, 431 aa, unidentified
MKFKYADKQNEKIKAITEGTLVIGCDIAKATHVARAFDFRGIELGKSLQFDNTQDGFNSLALWAKKIMFDNNKPNVMLGIEPTGHYWLSLSQFINESKMAQLVIVNSYHTKKAKELDDNSPTKDDVKDAKTIAKLVLEGRYSIAHIPTGDYAELRAGMCQRQQLQKGLQAIKGLIITWLDRYFPEFTSVYKSFEGKAALTILKHFSLPQDILRPKNETEMEIWRKQIVRYAGVKKTLALEAVARRTVGLKSAHEFARMEIGYLLMQYEIINEQLTALMEKIKAILVRLPEAKAMLDIPGIGVITVAGFLAEVGDLKNYRHWRQIIRLAGLNLKTNSSGKHKGKTGITKRGRHELRALLYRCALALIANNPEFNALHQHLTTRKENPLKGMQSVIAICGKLIRILFAIGKNQSTYRPEKAFGELIQKQNQAA

SEQ ID NO: 511119 - protein, 430 aa, unidentified
MLFNAKRFPDGWKRAKTIHFSSDAKGFKQLQRYLDSFSTDPTQFLILSEPTGGYYGLALQMYLIMKSYRLLQVENFAVKEYREDIYGSETKTDGTDARLMARMGFLHEWVGEEFSIQPVHIATPDESVIRLMSRDLTKLGKEISRRKNQLHQILAFTFPELKTFFKSDISGGAARDLIKKYPTPQELQKASVEEIAEVLHASHAYRHEKRAQELLTLAKNSVGIQLVSHHVWRQAWMLEQLDMLETARNDLIAHLRQITISHPYTPIIESLPVKSPIWTATLISMIGDINRFHNYGEFRAYAGWYPKIAQSGTSVHSSSLANDGARSLRNVFGQMSQILITPSFQSTPFSIYYKRLVTRGMKPSNALGHMAGKLASVLYQCLKTKTPYDTEKHRSQMGLTAEAIRKLQSTSVEVKIEDEIQNDTSLPVTT

SEQ ID NO: 511120 - protein, 435 aa, unidentified
MKRIRKNASGIDIGAKKVFVALENQPVVSYFTFTEDFETLRDYLLENKIESVAMEATGVYWVILYAILEESGIDVWLVDGRETKQVPGRKTDVKDCQWILQLHCYGLLNRCFVADPDIKELRSYMRLREDHIRSASMHINHMQKALTEMNIRLKEVLSQIQGKSGLTIIEAILAGERDKDVLVNLCHGSILKNKKELILKSLQGRYSSTGLFALKQAYEAYLFYNNQIKECDSQVNRVVNRMGDYGNEQLETRSRKPIRHHKPKIEKFGSNMLSIFDGKDATLISGITDYTWLQLLSETGRDLTKWTTEKHFTSWLGLAPGQNNSGNKRKRPRKKGRPAAGQIFRIIAQSLINSKDIAIGAYGRRLRARKGPSIAIKAMARKLAELYWRTMVKGLDYAEYGVKKYEQQLIAQKMKTTLRLAKELNLQIIDNQVYV

SEQ ID NO: 511121 - protein, 438 aa, unidentified
MRAKCNDDLSTVNFSTIGLDVHKNRLVACAVHVQHDAKGREVHEKEYFESTGTYSGRQRLTEWCSSQNADLILMESTGIFWKAPFRDLEKADLHPVLINPRIFNRGSDKRKTDKSDATWLANLARLGLYRASFIPAEPYRSLRLVQSQIKSLVAERQRLKNRLVKVLDDSGFRFTVAFADIGGASSQSLIAGILEDAPREELALMIDPLCKKSIEEILDAVSGELSQINKDIVQSILRLIETHTKEIETLEQTIIRELKKCEKVKQNIRLMTTIPGVSEKSAQLLMSMIGPDFVENFSSPHAFARWLGVCPGNNESAGQIKSGRTPHGQRLIKKVLTECAQAACHTKGSHLSVLFGGWKHKGFCKAVMAVAHKLALLIHWVVVNQKPYIDKEFDYTGVFKQDGQRRPRWIRALRRYGLMTLADVEKEKAARGWIIAKA

SEQ ID NO: 511122 - protein, 394 aa, unidentified
MEREDIRLEQFRRLRKEIRGSEDYLIVGIDVGKDKHNAYLGTPRGKTLYRRLIFENSREGFEKLMFQVQAIRVQQSLNQVVFGMEPTANYHKPLGEFLINQEHQVVLVSPEAVKQNRKLLDGRWDKHDGKDCANVADLIAQGKCLYYEYPLPALRDLRNLLSLKRKLKKLEQGLRLRIRNHLVAQYFPEMDQYCNWGEQEGLALVRWCLDPAVMARLSEAEEKIEQVCLRFKEYPCLLSIPGFGPSLSAMVLGAIGNPWRFQNGAQVIKMVGLDLSASQSGKSQGPPSISKKGKAEIRYALYQAALVASSRDKHFVAYFTDQLRGREKEKGIKTKRRVKLAAKMLMIAWTLMKKQELFDPRYLSPQAEPINARKTMKTENRGIPEVQRGSDRGL

SEQ ID NO: 511123 - protein, 337 aa, unidentified
MRFCGIDLHSNNSVVVVTDETDKVLLSRRCPNDLSKILALLAPHQSELSGVVVESTYNWYWLVDGLMAEGYAVKLAHTVAMKRYDGLKHSDDETDAAYLAHMLRLGILPTGYIHPPAERALRDLARKRIQLVRSRTQHVLAVENILARQTGACVGAGTIKRWAASDVDTLGLPADVALAMKSNVAVINALNLEIGRLESRLLEGVKLRPEYARLKSIPGIGDVLATIIMLETGDIARFAQVGNFASYARCVDSARYSNGKKKGEGNTKNGNAYLVWAFIEAANFARRYSEEAKRFFERKKAKTNGVVATKALAHKLARASYHMLKAGQDFDVKRCFA

SEQ ID NO: 511124 - protein, 407 aa, unidentified
MRLFAGDDWAEDHHDIEVMDEAGKVLVKRRLPEGAAGMTQVHALIGRLLPEDADDAEVVIGIETDRGPWVAALIAAGYTVFPVNPLQASRYRERHGVSGAKSDGGDAHMLADMVRTGSRQLRPAAGDSPESQGIKVVARAHKTMIWDRTRATQRLRHQLREYFPAALQAFEDLDAPDALELLGKAPDPARAAKLTRAQVAAALKRARRRNIADKTGAILAALRGEHLGQPAALTAAYAATARSLIAVITTLNAQVKILEEQVRDHFGRHPDAEIYQSQPGLAAILGARVLGEFGDDPRRYVSAKARKNYGGTSPITRASGKKKVVAARFIHNDRLVDALMSWAFASLNASPGARAFYDEQRAKGHDHNDALRRLANRLVGILHGCLKTRTPYDEATAWSHRESSLAA

SEQ ID NO: 511125 - protein, 325 aa, unidentified
MQTQTNYTGIDISKSFFDVAFLQAGRYTYNKFSNDRDGFKALLKVLPPDSWVVMEASGPYYLQLACFLHATGIAVSVINPLVIRRFSQMRMSRAKTDKKDAKMIAEYGKMEQPVLWQKPERHVIILQQTEALVARLQTEHTALGNQLGSFDSGGMLTTQLRKEINRELLHKDRLIKKLTKQMDQLAQEHYSGMLADLESIPGMGKKTAMMLIVLSGGFTRFDDYRKLSSYIGICPRIFESGTSVKGKARICKMGMSRIRATLYVCSWSASRCNKACRELYERLLAKGKAKKLALIAVANKLLKQAFAIATKQAKYQENYSNIICF

SEQ ID NO: 511126 - protein, 344 aa, unidentified
MIYYAGLDVSLRTVNICVIDGEGELVAETKLASDVQDIIAYLDGLELDLAGVGLEAGTLTQYLTYGLQAAGFEVVCMEARQVKGALSAMRNKTDKHDARGIAQILRSGWYSRVHVKSMESHHIRMLLSSRKAVLSKCVDLENEVRGLFKIFGIKLPPKLGHGAYDIAVRDIIETDETLSQALLPLLDARLFLYQTFRVLDNRTRKMAHADPVCVRLMSVPGVGFITALTFKAGVDDPHRFKRSRTVGAYFGLTARRFQSGEMDIDGHISKCGDADVRGTLYTAANALLTRSSRWSPLKAWGMKLAKTRGHRRAVIAVARKLAVILHRVWIDDTQFRWGTEGARS

SEQ ID NO: 511127 - protein, 410 aa, unidentified
METVFERVAGLDVHKAQVTACVRVPAPSGGREQHLAEFSTTVRGLVALRDWLEAHGVTDVAMEATGVYWQPVWHVLEDAFELMLVNARHVKQVPGRKTDCSDAAWICQLMEAGLLRGSFVPPKPQRALRTLTRYRKTQIQARADEANRLHKALEDTGIKLDCVATNILGKSGRAMLDALVGGTTDPEVLAELAQGKLRPKIPALREALEGRFEPHHALVIGAILAHLDFLDEHIDRLSEAIEEQLGPFAPGVPLAATITGVADRTAQVMVAELGTDMSRFPTAGHLASWAGRCPGNDQSAGKRRSGHTRKGSKWLRIALEEAALAATRTKDSYLQAQYQRLRPRIGHRRALVAVEHSMLVAYWHMFTTGETYQDLGGDYFRKRDPERATRRLIAQLEALGHKVTLEPTAA

SEQ ID NO: 511128 - protein, 351 aa, unidentified
MKNATARKRTQITIGLDLGDRRHTYYVLDGAGKMAREGSLGNTREQLATMARSYPGATVVMEAGTHSPWVSRFLQELGLRVIVANPRKTRAIYQNERKSDRRDAMMLARLARMDPTLLHPVEHGSQEAQQDMLQLKLRDSLVRARVALINAVRFTLKSLGYPVSNPSSERFHKLVLSEVPESIGEMIAHNVAAIAELTQRIKALDVSISRLAAERYPETIYLQQVSGVGPITSLYFVLKVGTPGRFQRTRDIGAFLGLCPRRDQSGETDKELRISKCGDQYLRGLLVNAAQYILGPFGTDSALREHGLRLAQEGTARAKKRAVVAVARKLAVLLLTLWKSREPYESFPTMA

SEQ ID NO: 511129 - protein, 345 aa, unidentified
MEITTIGLDLAKNVYQVHAINGAGEVVVRKTIRRAQVLRFFERLDPCLVGIEACGTSHYWAREISTFGHEVRLMPPAYVKPYVKRGKTDASDAEAICEAVSRPTMRYVAIKSCEQQAALTIHRTRDLFVKQRTQLVNMIRGLLAEFGIEIRRGITHALSLAERIAVGDMPGIPALAAKMIASLAGQILDLEARLREIERELLAWHRSSEIARRLATIPGVGTVCATAFAASVTDPHQFRSGRQFAAWLGLTPLQHSSGGKERLGRISKMGDKYLRRLLVVGMTSLVRRAKYKPDAVDRWLTDLLSRKPARVVTVALANKAARVIWAIMARGGTYRAPQPAGAAVA

SEQ ID NO: 511130 - protein, 328 aa, unidentified
MNKDCFQVGIDVGKDELVVAVEKGKPRVFGTSTGEIKRLARWVLRQAERRPVHIGMEATGVYSRGVAAALSRYERFAVSVINPAQIKAFGRAMLKRTKTDQVDARIIREFVRSQAPEPWTPPQPARQQLSAMVAQADAVRRQIQQWRNRQHAQKHDINVPKTVIDSTSSILRALEDECQRLDKAITQQCQTEPILAEDMALLTSICGVATRSAAQILGYGGDSLTTRSRRQLDAHAGLVPAERQSGTSVRGKSHLAKQGNARLRAALYMPTLVAVQFNPLLKAHYQRLLERGKPKKVALTACMRKMLNIIRAMLNKRQSFNPKYLPLT

SEQ ID NO: 511131 - protein, 334 aa, unidentified
MEKVTTLGIDLAKSVFSLHGVDEKGQVMLRRTVRRDQLVKVVAGIAPCLIGMEACSGAHEWGRRFQEFGHTVRLMAPKFVVPYRKSGKNDGNDAEAICEAVSRPSMRFVPVKSAEQQALLAMHRVRQGFVVERTATINRLRGLMSEFGVVLPLRSITVRRQAATAAENLPELARRAIGDLLDQLRVLDERIDGYDREIEAQAKLCEPAQRLMKIRGIGPTTALAIVATLCNAREFKNGRQFAAWIGLVPGQYSTGGKTRLGHISKRGDAYLRNLLVQGARSVLHTAAAHRDPISRWALELQPRCGYYRTLVAIANKNARIVWALLAKNESLRTV

SEQ ID NO: 511132 - protein, 341 aa, unidentified
MSIITIGIDLAKNVFAVHGVNEAGRAELVKPKVSRDQLLPLIAQLPPCVIGMEACTGAHHWARQFRQFGHTVRLIAPKFVTPYRMSGKRGKNDAADAAAICEAVTRPQMRFVPIKDEHQQATLTLHRTRQGFVEERTALYNRIRGLIAEFGIILPQKVERLRREIGAHLEDLPSWANRCVGDMLEHADRLDERIHEYDRAMAESARADDRCRRLMQLPGIGPTSATALVASIGHGHDFKHGRQLAAWLGLVPGQYSSGGKARLGRITKAGDGYLRSLLVLGARAVLNSLGDKQDRHSRWARALVERRGYWRATIAIAAKNARLCWAVLTYGEAFRLTADAA

SEQ ID NO: 511133 - protein, 339 aa, unidentified
MELYAGIDLHARNSYFAVVDAAGARVLLKRVANDSESVFSVLEPYREQLRGVVVESTFNWYWLVDGLRDGGFTVHLANPSRMQKYSGLKHADDKSDAVWLADMLRLGILPEGYIYPQQDRPVRDLLRKRMHLVRLRTSLINSLQNILARNGPARLGASKIKQVTQDHISPLLEGDDDLAMSGRVSKQIIDYFTAQIGTIEKFVEARVEVKQEYDLLRTIPGVGMILSLTIMLETGPIGRFAKVGNYASYCRKVPVCWTSDGKKKGDPNKRNGNKYLAWAFSEAAELARRFDATVKAYYNRKASKTNFMVAHSALAHKLARAAYYIMRDQVPFDKERLFA

SEQ ID NO: 511134 - protein, 330 aa, unidentified
MNLSPHDQSRLHCAVLGLDVAKESVQAELRPISGGKRRFAFANKQSGFKQLGRVLEQHPGAMVHAGLEATGPYSQALALWLHLQGHRVSLLNPRRVKEYARSAGLRNKTDALDAGVIADFLYAHRHLPTWRPPLEELQQLQDLMRRRAQVQVLLLGEQNRLEASSETVRASIQRLIVTLRGELASLEKAIAQQVRSHPTLARNHQLLCTIKGIGSLTASVLLAEMLGPDQVRRARQAAAHAGLSPRREESGRTVRRHKGIGKEGSRHLRKALYMPALVAIKHNAPLRHFACKLRAARKAEKAIICAVMRKLIHISFGVLKHQQPFNPSLA

SEQ ID NO: 511135 - protein, 323 aa, unidentified
MNAPIYCGIDVAKRNFVIGFSHQKKTKTETNNAKGIQHTLDYLSQFNVALITLEATGGLEIPVAKALARAGYRVFIANPLKASEFAKSQTRAKTDAKDAVNLAFYGLTCELKGEVEHQLYVPLSEQEEQLEALVVRRRQLVDMRVAELNRLQQSHETQLDNIQQHIEMLDKLIAELDKDIDDQSKHFSDKADLISDIKGVGKNCVAVMMSSLPELGKLSSKRIASLVGVIPHPQESGQWKGKSFCHGGRAIVRNALYMAALSAIRFEPVFKAFYTRLVAKGKAKKVAIMACMRKLLTIMNALVRRNEKWDATRYLSTESVGQN

SEQ ID NO: 511136 - protein, 363 aa, unidentified
MQTCERAKTLFVGVDVHKDTHTAVGLSPFGEKLFELTIGNYPQDFAELAEKVKSMAETANLSPRIGPEDCQGFGQRLAAYLDNDGYAVTHVAPILVDHKRKKAAHPEKNDSLDARGVAEVMIQKIDTLPVNKITQDSQIAKDIQELSLDREYLVKEQTRLKNQLHLLLHRIWNTEYREKFKDPFSVKGLRFWKKSVPKNTSSFLSKNMKRKVKKLEALRLEIKELESDMETLIEKSGHKIHTANGCGTVLAAMIIGEIGDISRFKSPSALAKYAGCAPREHSSGKTHRHRKTRSGNRRLNCAFHRLALSQISRMGNEKAKTYFLRKISEGKSKQQSLVCLRRQIVNIIRMIMKHKIDYNLQKS

SEQ ID NO: 511137 - protein, 328 aa, unidentified
MQGKELSEHQTATAADCSVGIDVGKSWLDGHILPAGEHLRVANTATGIRQLKRWLKRAPAAPIAIEATGKWHRALHRSLAAAGLRVAVVDPYRVRMFARAHGILAKTDRLDARVLAMFAALIDPYARAPAPIAVEELQELVRARASACADNTALKNQRGSAQTTYLRRQLTRRIVRLDKDIDSLETEIERRIKEQPDLAQRHRILTSIPGIGPVTAATLIACLCELGNASAKQITLLAGLAPIPNDSGEHRGYRRIRGGRQIVRNMLYLAALSAARYNPTLRTFYRRLIDHGKPKKLALIAVARKLLVLANALIADNRLWTPQSPKHA

SEQ ID NO: 511138 - protein, 384 aa, unidentified
MEQSIIYVGLDVHKDTIAVALAEAGERARERGLRGEVREHGKIPNTPAALKALSVKLAGKNRALRFCYEAGPCGYGIQRHLSAIGHECAVVAPSLIPRKPGDRIKTDRRDAINLAKLHRAGELTPVWVPDPAHEAIRDLVRARQAAVRTLRQARQQLSGFLLRHGHHYHRPAWTLLHRRWLATLKFDQANHHIVLEDCIAAIEAATARRDRLEAHIEAALPEWSLAPVVQALQALRGVGLVAAATLMAELGDITRFSNPRQLMAYLGLVPSEHSSGRTRRQGGITKAGNGAARRMLIEAAWSYRFPARISREQLLRQERLAQPIRDIAWKAQERLCRRYRKLARAGKLPTVITAAIARELVGFIWSIAKQVQSTAGQRQDGVSK

SEQ ID NO: 511139 - protein, 321 aa, unidentified
MTPPTTFVGIDVSKSQLDVAQLPERRSWSVSNDVEGIGDLVRDLATLAPALVVLEATGGYESSVFAALITARLPAVVVNPRQIRAFARAKNRLAKTDKIDAQVLAEFAEAVRPEVRPVPDEALQELSGLLRRRKQLVEMLTAERNRSLMATPAVRKDIRAHIHWLERRLQDIETGLDQAIRSTPAWQERDKLVQGEKGVGPVLSMTMLADLPELGRLNRKEISALVGVAPFNQDSGRFRGKRKVWGGRRSVRAVLYMAALAASRHNPEIRPFYQRLLAAGKPKKVALTACMRKLLIRLNAIVREGQSLEIMSVRLASQDSC

SEQ ID NO: 511140 - protein, 457 aa, unidentified
MSQRRRKSRKSQFNMNSLPPHLRHINMHAAGIDIGSDRHLVAVPEGSDKVSVRQFGAFTSDLHDIADWLKRCGVTTVAMESTGVYWIPLFELLEQRGFEVKLVDARHVKNVSGRKSDVLDCQWLQQLHTYGLLQGAFRPSDEICVLRSYMRQKEMLTQASSMHVQHMQKALQQMNVLLHNVVSDITGVTGMKIIKAILVGERDPNVLALNRQKECRNTQQTIAKSLVGNFRDEHLFALKQALDLYEFYQAKIAECEAAIVKHLGSRPDITDDQPPASGKTVRARERMRAGMDVRNKLFKMTGVDLFATPGFAADTLLTLASEVGFDMKSWPTVKHFTSWIGLCPGTKVSGGKTLDRRTKRNANRAAQAFRMAASSLARSQTSLGAFYRRIRSRTGGKQAITATAHKLARLYYFMLTRGTTYVEQGQLQYEQMFKERRIKALKKQAHSLGYQLLQLAS

SEQ ID NO: 511141 - protein, 343 aa, unidentified
MNEVTTIGIDLAKNVFQVHGIDGSGETATRRRLRRSQMIAFFEKLSPCLIGVEACATSHYWSRELQALGHTVRIMPANYVKPYVKRNKNDAADAEAICEAVTRPTMRFVAVKSAEQQSLMMLHRTRSLLVRQRTMLVNAIRAHLAEFGVVAPVGLRGMKALLAVIADAKDQRLPPLGRTCLDSLAASLMNLEQEIAFAERHIHAWHRSNEASRHLESIPGIGPIIATALVASVSDPSIFKSGRELAAWIGLVPKQNSTGGKERMGRISKQGDKYLRWLLVAGAMSVIRHGRKTNFKNNPWLADLVYRKPAKVAAVALANKNARTAWALLANGEIYRQPAAAKA

SEQ ID NO: 511142 - protein, 370 aa, unidentified
MRDGSTLYVGLDVHKDSIAVAYASTEGPTDPVPVGAIGTRQCDIDALVRKMHSKSAQLVFIYEAGPCGYWLYRYLTRKGLTCFVVAPSLIPRKPGDRVKTDKRDAVTLARLARSGDLTAVYVPDVPDEAIRDLARAREDALHDLNAARFRLKALLLRNDIRYVGRANWGADHIRWLARLVLPTPAQQIVFQEYVRTITERTELLQRLEAELLAQAKPWRLYPVVEALQALRGVQFTVAITAIAELGDLTRFDNPRQLMSYLGLTPSEYTSGDRRRLGGITKAGNSHARRVLIEAAKAYRHRAKVSEQIQARQQHLPTSIRDIAWRAQVRLCGRYRKLRARGKHPNTIAAAVARELAAFMWAIARTQPASA

SEQ ID NO: 511143 - protein, 352 aa, unidentified
MVPNPFQTDGMGSIKGRRRSRHTMSAVVCGLDVHKDSTYATILNTEGKIINQTRMINEKVLSYLSHFKVGKVAMEASTSVASLYRQLVSEGFDVVVSHPKKTRYIAEARIKSDRVDSKVIAELARLDALPLAYVPSKETSDLREKVRRRAFLVRERVKLRVKIKSFLTYEGIKWPSEHGLFSRKGVEWLGSLKFESVDSYLRIMGIFDEEIRVLSRHLEGLAREDEDVKLLMTVPGIGYYSALLVKSEIGDINRFPFGERLCGYAGLVPSTHASGGVVRHGGITKEGSRWLRWVMVEAAQTHVHKYDTSITRAYQGIAERRGRRAATVAAARKLLLCCYSVLKNKRPYYDQA

SEQ ID NO: 511144 - protein, 368 aa, unidentified
MAATRFIGLDVHKDTIAVAIAGAGREEARFFGQIANTPAALAKLAAKLGKDGGELHFAYEAGCCGYGVYRHLSNLGHQCDVVAPGLIPVRRGERIKNDRRDALTIARLLRAGELTAVWVPDESHEAMRDLVRTRDDAVITLRRSRQQLGGFLLRHGRVYPPGKRWGTVHKRWIRNQVFEHETQTLVLEDYFQAMERAEVRVQEITARIQEHLPTWSLSELVESLQAMRGISIVTAAVLAAEIGDFSRFDRPSQLMAYVGLVPSEDSSGNRRRTGGITKAGNNAVRRVLVEGAWNYRMPARISKNMMEQQKHLSPEVREIAWKGQVRLHQRYRSMIARGKKSTVVATAVAREMLGFVWAIGCHVQIARP

SEQ ID NO: 511145 - protein, 348 aa, unidentified
MAHFVGLDVSVRETSVCVVDDVGKVILEQKVLTEPDAIIALLASLGATYGRIGIEAGPLSQWLVNALTAAELPVICVETRHMKALLTAQQINKTDRNDARGIAQMMRVGLFKPVHVKTLVAQEQRMLLTSRKLLQRKLLDLESDLRGTLRNFGLKVGVANRSRYEARVRELVEGFPRLAAIVEPLLNVRRVMRQQLGVPHKMLLDTVRDDPVCRRLMTAPGVGAVVALTYRATVDQPQRFLHSRAVGAHAGLTPKRYQSGEVDYDGRVSKCGDALLRTVLYEAAHSLLTHNGKWSWLKAWGVRVAQRRGMRRAIVAVARRLAVVLHRMWVDGSEFRWSKDSAAVPTVA

SEQ ID NO: 511146 - protein, 392 aa, unidentified
MIFIGIDIASSKHDCVIMDQHRKVLEEPFTIKNNIYGFTKLKERIEKNKDNQEIRIGLESTGHYGNNLITFLSTNDQYIVYVVNPLLTSIARRSSSLRKTKTDKTDSIAICVFLIINFSTLKPYTLKSYHTMKLKSLSRFRLDLVKQQSLFKVEFSRLISLTFPELKGFTQKMNSQSNYVLFTEIGLPEDISRTRIDKLTNVLYKASHGHFSLDKAIQLKRLAKESIGTCGNFYKIQFQIVTNSIKHFNEQIKLIDKEIKLIMNIQYKYIMSIPGIKYTTGAAIVSEIGDISNFKSPDSLVAFAGLDPSVYQSGNFSSTRNKMSKRGSKYLRNAIWTSSSVIVHHDPVFSAFYSKKIKQGKHHNNAIGHVCKKLTRVIYSIMKSQNNFVSLN

SEQ ID NO: 511147 - protein, 424 aa, unidentified
MPQRTLTERVMMVKPGMLLVGIDLGRDDNVAVVLSDTAQRLARFKFPHTRAGYDFFYHQLEQLRAQHPGQGLLIGMEPTNHYWKWLAADLEAHQPPLPYRLVNAYTVRKHREGEQLERAKDDVRDAFQIAELLRTGKFTETQLLQGTYAQLRQYATLHMRLQHDAAQLQNVLTTAVDLGFPELRQVFKDLSGETALALLRTASCASTIRELPLSEFLAQVREQLPGQRLSVSKLKQAHALAQTSVGLVDTGALHFTIQVYSEQLVHARESLKRAETALVELFLTMPEAPYLLSLPAIRPLFAALLLAELGDPRDFSCASQWVKLAGVQPVADSSGHRTRSPTPMSHQGRSRLRELLYWLVLRWVQHDPYFKAEYERLQTRPQHPLTKMEALGALMNKALHVIWAVLRDRTFYDPQHRQSGAGAH

SEQ ID NO: 511148 - protein, 436 aa, unidentified
MTSPCRFYLNKIQEVILLSFKIFRFNCCGLDVHKTWIYACIGITDSNGRTDYKQARFSSFSKGLKELCDWLAKYNCSEVCMESTGKYWIPVFNVLEKANNSVILAHPKYTKPQKGNKTDRKDAKWICDLFMCEMIKPSFIPPADIRHLRDLVRYRFKLTCMITGEKNRAQNCLTVSNLKLDDVFSDVFGKSSRSITEYMLAHPGEIFDVAPFVDSRCKTPMEEIQAAVDGAISPEQAIKLRQCLNHIDELEKHLEEIEREILRLSDKYQAALDLIRTVPGFDKNPMTAIQILSEIGGDMSVFPSAKHLVSWAGCCPRNDQSNKRIKSTRISRAGNYIKPILVQVANALIKSKKNPEFTTRYRRIKARRGHKKAIIAICRMLLTAIWHILTDLKPYTPEGFLESRPVNESKVLTTSQALNLLKQRGYIIKDDVVPVS

SEQ ID NO: 511149 - protein, 347 aa, unidentified
MSTHGSSVLGIDTHKHTHVAVILDGLGRHQGSLQFAATDDGAAELLTWSRAHGSPLTAGVEGTGSYGYQLTRSLQAAGITVAEVNRPDRANRRRKGKSDPVDAEAAARAVLAGQATAVPKNREGAVEALRALTIARNSAVKGTTTASNQIKALLVGADQDLRDQMRVQSLLQLARRCSQLAPVSGLHAALASLGRRWLLLHDEIVELDRAIRDLVRRTVPQLIERPGVGIHSAAQLLVTAGGNPDRLHSDAAFAALCGASPVQASSGQRHRHRLSRGGDRQANNALWTIANNRMIHDQRTRDFADRRRQKGDSRKDTLRVLKRYIARETFNIIRAALRDDQVLTEAA

SEQ ID NO: 511150 - protein, 423 aa, unidentified
MKNTAARKRKQVPEGYLIIGVDPHKKKHAAVAITQDFTIRDRFKFDNTREGLEFLLRRIRIEMVKSDCRGVMFAIETGGHYWRNVAYYLDEKGIPFRFINQYTLKRRREGKDLNRRKNDYRDSEVAAQLLCTGEFVESVIPQGVYAELRTAHNAYRRLVKERTRIINLVKGLLDGLFPEFTHVFKDPCGLTALSVLSTCSIPGVIAGMTEDEFVATIETRHRGRLMRKKLMALHYAARSSIGIAAGAKSVSSEISFLVEKLELIRGHICAIERTLVRLVDETEEGKYLLSIRGLNYIAVAGLLAELGCFKSYRSAKQMIKMAGSNPTESESAGKRKSRTPMSKQGRPVLRYCAWTSVIPMLRFNSDFRAWAKQRRERPAHANPLNGREVVGAALNRLLRLSFAMVKNQTYYQVPEPELAPATV

SEQ ID NO: 511151 - protein, 491 aa, unidentified
MGHARARKIPAQLVEDEEYQLRHERVAGIDIAKAKADVCTRLPPQRDGGRRASRVEEVPATAKAILALAVRLIADGAELVVMESTPDYWRMWYYLLEGAGLSVQLVNPAHARQLAGRPKTDRLDAQWLARLAEMGLLRPSFVPPPEIRALRDLTRTRLQLVRDRSREWQRLEKLPEGALVKLSSVVHSLAKVQSARAILEAIAAGERDPKALAALAHPNVKGGRAAVEEALGGMALGDHHPMLIRVHLDHITLLDRSVAEVEDEIEAALDAIPAAWGTDPGGETGPDAGRGPDPAVLPAAERLAEIPGVSPALARAIIAETGLDMTRFQTADHLVSWAGLAPVARQSGPRTRKPKKGQGDAYLRGYCTQAANGAARTDTFPGERLRRLSRRLDGNRARCAVARSILGQVAGARYRAPAPSEPDLPVIPASGSSKPLRTLRVAAAVLCPCAAGPCGRGCRRRVPGLWRSSRSARRPARVFLARRVRAGCPGA

SEQ ID NO: 511152 - protein, 343 aa, unidentified
MEIRAIGIDLGKTLFHLVGVDAGGNVVVRKRCSRRQLLTYTANIKVGLIGMEACSGSHFLARALREQGHDARLIPAQYVKPYVKTNKSDYIDAEAISEAVQRPAMRFVPIKTEEQLDLQAVHRVRERWVMRRTAVVNQIRGLLLERGIVLPKGRTHLEEGLPEILADTSVRLSDSFRVLLAQLRLELDALAKRIGEMDRVMEETAKENEDCQRLTTIPGIGPVTATALVAAVGNASAFRRGRDLAAWVGMVPREYSTGGKQKLLGISKRGNSYLRRLFVQCARSVMQHRNKQPAAMSNWLAQLIGRAHQNVAIVALANKLLRTAWAVLRKNETYRIPVLATAC

SEQ ID NO: 511153 - protein, 344 aa, unidentified
MKALKSHVAGIDVHKEMLAITVLIGELDGEPKEYQFESSTFTDDLMALGLKLKEMGVTDVAMESSGIYWKPVFNVFNPLGLKVVVANAAPIKNVPGRKTDMNDSRWIAELHRFGLIRASFIPDGEFQRMRLLSRHRTNLTEDLARVKNRIQKVLEDGNIKLSIVVSDIFGVSGLKVLKQIAGGYTHPNILITEVTTKIKRMEEMKKALTNCLTTEHCFVINVLMKQYEELKNRIEEGENELCKKVEPYAHLVEELDKIPGIDAILAMGIIAESSANMSSFKDERAFAAWSAVASGNNESAGKKKRAKCRKGNPALRKMLIQAAQKATTARNPFIDLNTTNSAFA

SEQ ID NO: 511154 - protein, 353 aa, unidentified
MVVIGVDPHKSSHTASALDPQTHRPLETVRIDAALPEYRRLLAWAKQFSERRWAVENARGLGRHLAQWLIARGETVVDVPPTATARVRELSRGGRRKNDALDAAAAASVAALQGDALPVTAEGASTVLGLLDERRLNLTQQRTRTVNQLHALLRDLLPGGVPTDLTADQAAAALTRSRPQSSVERARKDLARELITDIRALDRRLKANKQRMEEAIKDSNSRLTDIAGVGPVVAARLLGRTSLASRFPTAAAFAVYTGVAPIEIASADKARHRLSRQGDRQLNNALHTIALTQVRMHGSRGRLYYDRKIAEGKTHNEAMRCLKRRLADHVWRTMIGDEQRHAPSTPPPLHAAA

SEQ ID NO: 511155 - protein, 336 aa, unidentified
MTIIRIGLDTSKHVFQIHGVDENEKPVLRRQLRRSEVEKFFAQLPPTRIGIEACGASHHWARLLRGLGHAVLLMPPQYIKGYVKRGKNDAIDAEAICEAMSRPTMRFVPVKTAEQQAALTMLGVRDLLVKQRTMLINALRGHAAEFGVAAAKGPNKIVELLQRLAAGEGVPTLAREMLGMLASQLEAVNDKLKAIEARLMAWHRQDQTSQCLATIPGVGPIAGVSFALKIPDARAFRSARHFAAWIGITPRESSTAGKHRPSKISHEGDESLRRLLVLGATAVIQRAKRGRVSPWLLGLLARKPKKLAAVALANKMARVIWAMMISGEVYRRPQEA

SEQ ID NO: 511156 - protein, 449 aa, unidentified
MAAVMIGVDPHKGSHTAVAISAAEEPLGELRVGACAAQAERLLEWAAAWPERTWAVEGAGGTGHLLAQQLLSAGERVMDVQPKLGARVRLLAAGDVNKNDPNDARSVAVAALRSAGVREARPDDHAAVLKIWSKRHRDLGRTRTQVACRLHAVLCELVPGGVSRHITAAQAATVLRSITPPDAVAAARCELAAAFIDDLRRIDGQLRDTRNKLTVAVRASGTSLTGLFGVGPVIAAAAFGDVRDVSRFAGRDHFAAYNGTAPIEVSSGQRKVHRLSRRGNRRINHAIHMAAVTQVSHRHSEGRAYYDKKLAEGKTPKEALRALKRQVTDAVFARLRADAQRAAARAEDPGGQQGNDSATSAAGSHPRRRLFGQATPGSRHHPTTTAASPVPGNPAAPGTPGHSPVAATPPPAKPQVQVERPQRSEDERPGGTARRRPHSAARKARNHAS

SEQ ID NO: 511157 - protein, 326 aa, unidentified
MTLSHSTDNTFVGIDVGGAGLDVAWHRGDSAHYANRPDAIATLVERLRTGPEVTRIVLEPTGGYEKALVKALRQAQLPVEVIHTTRFNAYRALVGVKAKSDTSDAKLLASYAAAPDEVRGRKAGHVELPEDAVREELSELASRRDQLKHMIHAETCRLGTVRNDELRQMITTHLATLRAEDKQVHRMMLELVRQRDDLRRDQRLLKTIKGIGVKSALVLLAAVPELGRIDNKAAAALIGVAPFVRKSGTMNAPARIHGGRAPVRSILYMAAVTASKHNPLLSPFYDRLIAKGKPPKVALIAVLRRLVVFANAVLRSGQPWKGASAT

SEQ ID NO: 511158 - protein, 326 aa, unidentified
MVSALGMDVAKAKLDVVLVNDAQQEYSGLFANSPKGFEQLQHWLSKRVKGDLHACLEATGQYGDGVAAFLYAAGCTVSVVNPARIKAFAASRLSRQKTDQTDARLIALFCQSQQPEAWTPPAPEQRALQAMVRHLRDIKAIRQQEYNRLTSGVSADVVVHALQQHIAFLDQQILELERQIHDHLERFPLLKQQRDLLDTIPGLGETTIAILLAEVPDIRAFDSASQFAAYAGVTPRHFRSGTSVRGRTRISKCGNATLRAALYFPAMVALRHNPLICSFGQRLRANGLAPKAIVVAAIRKLLHLVYGLLKSGRPFDPHYLIQVSNA

SEQ ID NO: 511159 - protein, 320 aa, unidentified
MQTLQPPLDVGADVSKDQIVVACAEQSFTTRSIANTHAALLSWLKELPTGTRVGMESTGTYHELFAELAHKLGLIMYVLNAKDVRHYAKGVGLRGKTDRVDAQLIARFVAKEHPNLHPWLPATREQRQLERLLKRRAMLTRTKAALGQSLKGLSGCGTQLKALVSRLDVLVGYIDTRIQALIQAHPARRDGYARLQSIAGVGPVVGSALVSALQRRCFVRADAFVAFCGWDPCAHDSGHKRGRRRLSKRGPSELRRLLYNAAMSASRTKTWKPRYQRERAKGLSRTAALVVLARHITRTAWSIYTHKTEFDPKRLTKGLT

SEQ ID NO: 511160 - protein, 403 aa, unidentified
MFYCGIDIAKYRHEATVIDQAGAAVQESISFANSKEGCEKLLALFQRLDISKEGLLIGMEATGHYWLSVYGYLLEQGFEAKVINPIQSEAFRKMYIRQTKNDRKDSFIIAQIMRFGQFSATNLAEEGIVAMRQLSRYRLALVDTCGDCKRRVIALLDQVFPEYDSLFSDTFGVTSKEVLSQYPTPEGMLTVSIRKLTTLLEKASHGRFGKEKAEQLKAAAASSFGVNFAKDAFAFQIRQLIEQLEFLERQVAELEEQIFSLLKQTGSYITTIPGIGDTLGAIILSEIGDIHRFDAPNKLVAFAGLDVRVTQSGEFTGTRQKISKRGSPYLRRAIWLAASRAAFCDPILSEYYQGLRARGKHHLTAVGAVSRKLCNTIYTILKEDRPWQPIPPKGKKVSNYTEE

SEQ ID NO: 511161 - protein, 401 aa, unidentified
MNAVGIDVSKGKSMVAIVRPFGEIVSTPFEIKHTTSDIKSLVKLIKSVDGESRIVMEHTGRYYEVLARQLSEANLFISAINPKLIKDFDNDSLRKVKSDKADAVKIARYALDKWQNLKQYSVMDELRNQLKTMNRQFSFYMKHKTAMKNNLIGILDQTYPGVNAYFDSPARSDGSQKWVDFASTYWHVDCVRKMSQNAFINHYQNWCNRKKYNFSKSKAEEIYGKAKELVPVLPKDDVTKLIIKQAVDQLNIASETVESLRALMNETASKLPEYPIVMAMKGVGPSLGPQLMAEIGDVTRFTHKGAITAFAGVDPGVNESGTYEQKSVPTSKRGSSGLRKTLFQVMDVLIKTKPQDDPVYQFLDKKRAQGKPYYVYMTAGANKFLRIYYGRVKEYLASLPE

SEQ ID NO: 511162 - protein, 327 aa, unidentified
MNNSFLGIDIAKETFDVHLIRGQETWSGQFDNSSQGFNQLQKWLKKRRIDQLHACMEATGSYGEALTYFLHEQGYQVSVVNPKIIKHYGQSKMQRNKTDKLDARLIAQYCQKEVPRLWQPPTEAERTLQALTRRLDALMADRTREKNRLTAKTHPDAVKQSIEETIAFYTQQIEKLEAQIQDHIDHHPDELKEKQQLLTSIPGIGNKTAAILLAELPDIALFQSAKQVTAFAGLTPKQLQSGKMNRTGGIYKLGSRRLRTALYFPALTGKIHNPILRDMAARLAERGLTGMSAVAALMRKLLQLVYGVLKSQRPFDPDFVVNVQVTA

SEQ ID NO: 511163 - protein, 343 aa, unidentified
MKIIRIGVDLAKNVFQAHGVDRDEKPVLRKKLARENWVKAVLAKIEPGCEIGMEACGGAHHWAREFQKHGYTVKLIAPQFVKPYVKSNKNDANDAEAICEAMSRPNMRFVRPKTVEQQDVQAVHRVRAEVSTHRKAKANQIRGLVSEYGLVAPKQLLHLRQAIPCWLEDAENGLTGRFRRLLEGLWQDLIAMDKRMAELDIEILEIAKTDPVAQRLQQLRGVGPLIATAMVASLGDANQFANGRQMAASLGLTPRQSSSGGKERLLGISKRGDCYLRSLLIHGARSMMFAARNKDDRLSQWVKALAARSHPNKAAVALANKTVRIAWAMMKNGTDYEPNLASA

SEQ ID NO: 511164 - protein, 441 aa, unidentified
MQILFSRCCGIDVHKDSVTACVLIYAEGQEPEVRKKEFPAHFKSLGNLRFWLMAQKVTHVAMESTGVYWKPVWQALEGHFELILANPFQIKTVPGRKTDARDSQWIAELLAHGLIRPSFVPPRATRDLRDLTRYRVKLVQERNRVHNRIHKVLEDACIKLDTVASDILGATGRAIIQAIIDGQEHPDWLADKARGKLRGKRAELRLALRGRITDHHRLMLRELLEDLEFVERKISRLETEIATQVDHGKLDRLCSIPGVDLITGCTLLAELGSDMSVFNSPHHAASWAGLCPGNQESGGKRLSTRTRKGNQWLRRALCQAAWAATRKKNSYIAAFFYRKAGKHGMRKAIVATAHKLLIISFCILRDGTQYQELGDNFFDRLHPQRTRNRLVRRLQRLGLEVVLQPRSDTPLALEPPDRSSARKRGRPCKCIERGIPCKHVP

SEQ ID NO: 511165 - protein, 334 aa, unidentified
MNNMTLIGIDLGKHSFHIHCQDKSGKALLHKKFTRTKLMEFLAGCSSTTVVMEACTGAHFMARRITDLGHEAKLISPQFVRPFVKSNKNDFIDAEAICEAASRPSMRFVQPKTEAQQAMRALHRARESLVRDKVKTTNQIQGFLLEFGISLPKGAAVMKRLSLVLAEHELPDYLLRLLMRLHAHYLYLVGQISELEAELKQTVVIDDVAQRLRTIPGIGLITASLLSSQLGNGRQYAKSRDFAASTGLVPRQYSTGGRNRLLGISKRGDKNLRKLLVQCARVFMQRLDSNSGKLADWVRGQLERKHSNIVACALANKLARIAWAIATHGTVFEK

SEQ ID NO: 511166 - protein, 405 aa, unidentified
MFEIEDVGVFLGLDVGKSAHHGHGLTPGGKKVFDKPLPNSEPRLRAVFDKLRDKFGTVLVIVDQPASIGALPLTVARDAGCQVAYLPGLAMRRIADLYPGEAKTDAKDAAVIADAARTMPHTLRSLELTDEITAELTVLVGFDQDLAAEATRTSNRIRGLLTQFHPSLERVLGPRLDHQAVTWLLERYGSPAALRKAGRRRLVELIRPKAPRMATRLIDDVFDALDEQTVVVPGTGTLDIVIPSLAASLTAVHTQRRTMEAQINALLEAHPLSPVLTSMPGVGVRTAAVLLVTVGDGTSFPTAAHLASYAGLAPTTKQSGTSIHGEHAPRGGNRQLKRAMFLSAFACMNADPASRTCYDKQRARGKTHTQALLRLARQRISVLFAMLRDGTFYEPRTPTDVELAA

SEQ ID NO: 511167 - protein, 451 aa, unidentified
MSVKSVSSGLPMVQAYAAGIDIGSRFHVVAVPPELAADSVQTFETYTCELHRLADWLVQLGIRTVAMESTGVYWVAVYEILEDRGLEVVLVNAREAHNVPGRKTDVNDAQWLQRLHACGLLRASFRPGREIMALRTYLRLRERHLDYAAAHIQHMQKALTLMNMQLQNVVSDITGVTGMRIIRAIVAGERDPAKLAQMRDVRCRASLKTIEASLSGNDQPEHVFALAQALASYDFYQARVQECDIEIERSLAALNQDKPEPATPLPKVRRQPRRANGIKFDVRASLYQLVGTDLTQIDGIGPYLALRLVSECGLDLSRWPSAKHFTSWLRLSPGSKKSGGKVLSAYTGKTTNRITAHLRLAAATVGRTNTALGAFYRRLATRIGKAKAITATARKIAVLFYNAVRYGMAYVDPGADQYEQQYRQRALKNLHRRAAEFGFKLQAVGTEESVS

SEQ ID NO: 511168 - protein, 334 aa, unidentified
MEVKILGIDIAKRVFQLHGINCFGKVVLKKRISREQLSNFIANIPPCLIGMEACGGSNYWARKFTSYGHEVRLMNPHYVKPYIKTNKNDAADAEAICEAVSRPTMRFVSIKSVEQQDIQALHRYRQRLIQGRTALVNQIRGLLTEYGIVIPQGITSLRLRLPQILDDQGNELTYLSREIINTLYQEFSIADQRIKDLDKRIMLLCKESTNCQRLMKIEGIGPLSASALLSAIGDIHAFKNGRHLAAWLGLVPRQHSSGGKQTLLGISKRGDRYLRTLLIHGARAFISFAKRKSVWLEALIKRCGKQKAYVALANKNARVVWALLTKQVDYQSTH

SEQ ID NO: 511169 - protein, 408 aa, unidentified
MKRYYMGVDWGDRLHQVYVGDEDGKKVREMKLQESPEGLAEIGRWLDEKRAEGFELWAAIEKPAGRIVDFLLDHGVEVYPVNPKAVDRARDRYRMSGSKSDAFDAYVLAEFLRTDQAHLRALRPSSEKAQELKMLSRDQRRVVRHKTRFLNQLTTTLKEYYARPLEVFDDLEAEIALDFLKQYPTPAHLSALTRKQFNRFATKQHHLSTQRCEELWEKLQKPQLAVPEHVVRAKAQLVEVLIEQLRASIKAVKIYNHKVESFFASSPAAQFAKTLPGGKSGTLVAAVWAELGDAQGRWESSRHLQAEAGAVPVTKASGKSRLVHFRFACNKHLRHTMYWFSFVSLNHSEWAKLYYRGQRDNGHSHHQALRALGAKWLKIIFVMWRDHKPYDENYHLANIARQKMRQAA

SEQ ID NO: 511170 - protein, 365 aa, unidentified
MSFVFPSTCPKRYLATFDTTTKGLRAYHDFLSQFHVEAVGMESTGVYWRLVWHALCDDFELILAQPAHMKAIPGQKTDKKDAHWIAKLTRIGLLPRSFVPDETIQELRELTRQRKHYVESRNRETNRIHKFLQSGGIKLTTYIEDIMGLSGRNLLQLLVDGTPITPRIVHQSVYTSLKKKVPQLLEALDGYFSDHHRFMLKQSLEIYDFYQKQIELLEERITVYLSQYENHVETLDSIPGIDVITASVIISEVGVDMSQFPTSGHLASWAGLCPGNNESAGKKRSTKIRHGNSYLKKCLCQAAFAVKRQKGSPLAERYYQIQSRRGSQKATIALAHQLLKIAYILLKEQMTYPEFLAQKKLLGTS

SEQ ID NO: 511171 - protein, 412 aa, unidentified
MDTLYAVCCGLDVHKTTVTACLRQVDRGGRVTKEVRTVGTTTAALLALCDWLVGAGCTHVAMESTGVYWKPVFNRFEGHFVQVLVVNAQHGKAVPGRKTDTLDAEWLAQLLQHGLLRGSFIPPAPIRALREATRDRKQVIRARGDEANRIQKLLEGANLKLASVATAILGVSGRAMLAAVVRGETDATVLASLAKGRLRRKQEQLVAALTGRITVVPRTLLGQQLAHVEYLDGAIAALDQLVGQLLAPYQAEAERLRTTTGVDRRTAEVVIAELGVDMTPFPSDRHCAAWAGICPGNDESAGKRKSGKTRKGSKWLRAALTEAAWAASRTKSYLGAQYHRIARRRGKKRAAVAVAHSILVIAYHLLKDGTTYQDLGPDYFDRRDTGQLQRRLIGRLEALGLRVIVEPLPQAA

SEQ ID NO: 511172 - protein, 412 aa, unidentified
MQTIVERPAALDVHKAQVTACARVPGRRGGREQHVAEFPSTVRGLLALRDWLAGQAVTQVVMEATGVYWKAPWAILEDEFECLLVNARHVKQVPGRKTDVSDAAWLCQLAEAGLLKANFVPPKPIRQLRNLTRYRKTQIQERAREVNRLHKALEDAGIKLDTVAADILGKSGRDMLDALVAGETDPAVLAELARRQMRKKIPALREALAGHFDAHHRLWVGAILRHIDFLDEQIEQLTGMIEEQIRPFAPAVELVCTMTGIQRRGAECIIGEIGTDMSCFATARHLASWAGRCPGNDKSAGKRRSGKTRNGSKWLDFALEEAAMAAIRVKGHYLEAQYRRLKPRRGHKRALGAVKHTMICAIWHILATGETYRDLGGDYFTNRDPERQTRRLVAQLERLGHHVTLTEEAAAA

SEQ ID NO: 511173 - protein, 387 aa, unidentified
MLQPNDLSRSLVALAQDSTIIAVVELSQSSWLVGGVLPGIERQPRKKLEPSPERLLAVLHRWRDEAIRAGCNITRIALAFEAGRDGFWLARWLAARGVEAHVIHPSSVAVSREHRRAKTDRLDTELLKRGFLGWLRGERGHCSMVRVPTLAEEDAKRPNRERECLVKERTRLVNRMKGALARLGIRNFRPTLRNAAEHLAGLYTPEGSPLPPNVAAELERDIARLGLVIGQIKQLEAARRQRLEEQPESRPHAMVRLLVRVVGIGTETADMLVNEVLSRPLRDRRAVARYAGLTGAPDESGAKRREKGLAKAGNARVRRGMIPLAWRFLRFQKDSALAQWYQARTADRRAGTRKTMIVALARKLLIALWRFVTTGETLEGVVLRPAG

SEQ ID NO: 511174 - protein, 319 aa, unidentified
MAQNDLVVAGIDVAKDKVDVCIRSLSLKRTFASTAEGRRELASWLRRQKVGKAVMEASGGYERDWAKVLRNAEIEVRIVDPKRVRSFAQSAGRLAKNDTIDAEMIAWFAETFDEARGQAYDETREQLHQMVNARQALKGMQAKLESQGEHGLPAAVQRMHARILKTITVELVKFEAAIAAMIQATPRFTELAEIIESVPGIGRTTSAALIAAMPELGQANNKIVAALLGVAPYDDDSGRRRGERHIKGGRRRTRNVFYMACLGAATQHNPVLKAFYDRLVAKGKEKKVALIACMRKLISILNIMIERRQKWDASPYAVS

SEQ ID NO: 511175 - protein, 312 aa, unidentified
MDALFVGIDVSKDQLDVAMRPAGECFTVERTAAGIDRLIERLKLLSIKLIAIEATGGFESIIAAGLAGAGLPVLVVNPAQVRAFAQALGKRAKTDPIDAAVIAHFVEATKPQLRPFPDATTQLLSELVARRRQIVEMIAAEGQRARQVSAPRLKKSIARLHKALQKELTELEKEISDHVRGSPVWAEKEDLLASVPGIGPTIARSLIADLPELGSLDRRQIAALVGLAPWTRQSGKWRGKSFIGGGRSNVRRVLFMGAMVAARFNPELKQFRDRLVLAGKPKLVAIVAVARKLLTILNAILRDKTPWQPKSA

SEQ ID NO: 511176 - protein, 400 aa, unidentified
MNYFLGIDIAKTNHVASLINNNGDVVIRAIKFTNSNEGFNKLLNTIQSKLGDLSNIEVAMEATGHYWLSLYSALTDNNFNVSVYNPYQIKSYRGVYNNRKQKNDIIDSIIIADYLRVFGSKESKFPEEKLLSLKQLTRFRANIVANVSSLKVQVIGLLDKVFPEYKKLFCDTFGNTSKQLLLNCPTPDDIINISTTKLANLLSKNSKGRFNKDTALHIKEVAKSSFGIKFTTDACSFEIKQLINQIVFLESQIDAVSKEIKELYNKLDSHLLSVPGIGDNLAPIILAEIGDINKFDKPSKLIAFAGTDPSENQSGNKLSSNDKTSKRGSPYLRHAIYTASLVAISNEPELRAYYDKKISEGKHHFVALAGISRKLLTIIYYILKEDRDYIRYDNIKDKLN

SEQ ID NO: 511177 - protein, 345 aa, unidentified
MKITTVGIDLAKNLFQVQGIDERGKAVLRKQLRRAQVAVFFGNLPPCVIGMEACASAHHWARTLQRFGHTVRLMAPQFVKPYVKTNKNDAADAEAICEAVGRANMRFVPIKSIEQQAILSVHRVRQGFVKARTAQGNQIRGLLGEFGLVIPQGIINVAKRVPEILEDVSNELPVPFRHLIDRLTEHLKELDRQVKEFEREIIAWHRSSELSRRLEKIPGIGPLAASALVASIADAHSFDNGRQVSAWLGLVPRQSSSGGKPTLLGISKRGDTYMRTLLIHGARSAIVAATKKVDNTQGWLTDLLKRRHPNIAAVALANKNVRTVWAILAHGREFKADYVPTLMAT

SEQ ID NO: 511178 - protein, 369 aa, unidentified
MKKDTIFVAIDDSKRTLVMGILRPGADEPETRSIPNEPRHVRRFFARLTREGPVRVCYEAGPSGYDLYRQLTALDVPCQVMAPALTPRKPGDRIKTDRRDAAKLVRLFRAGELTPITVPDEAGEAGRDLLRCREDVQEDLLRWRHRLGKFLARHGRVYREGRNWTQRHWTWIRRQRFDLPALERTLAEYRCAVEQLLARVADLNREIAALAETAPYREQVGWLRCFRGIDTLAAMTLLAELGDFQRFDHPRQLMAYLGLVPSEHSSGDRTQRGSITKAGNTHARRILVEACWHYRHPPRIGAALARRSQGQPPRMLAHAWKAQLRLHRRYRHLVGHGKRPPVAVVALARELVGFLWAALTHPDPVALAA

SEQ ID NO: 511179 - protein, 310 aa, unidentified
MDEIFVGVDVSKDRLDVHVLPLEERFAVERTSAGVAALAERLAALSPTLVAMEATGGFETLVAAGLAAAGLPLAVINPRQIRAFAQALGRQAKTDPLDAQVIASFAQAVRPAPRPVAEAHAQALGELIARRRQLVEMMVQERNRRRTLVQPKLIRSVDRILAALQQELAALEQEIDHTIRGSPVWREHESLLTSVPGVGDKTARTLIAELPELGRLDRKQIAALAGLAPYNRDSGRYRGQRRIGGGRAPVRTALYMAATVAARHNPVLKPFALRLKAAGKRPKQVLIAVARKLLTILNAMLRDQKPWLAA

SEQ ID NO: 511180 - protein, 347 aa, unidentified
MKVTTISIDLAKSVFQVLGMDNQAKQVFNKRLNRAQLTEFMSQQSVCNVVFEACYSSHYWGRKFLAMGHEVKLIPAQHVTPFVRGSKNDKNDAMAIYEASFRPNIRFVPIKTEAQQEILMLHRVRERLVKQRTACTNQIRGVLVDFGICIAQGHSAFERAMWDIICDEAQRPLIKLMANDFWEEYQALTKRLERINSLLKQLVERDPNGKILLSIPGIGPIIASAFAAAIGAGQAFNSPKELAVWLGLTPKQFASGNKSVNGGITKRGDGYLRKQLIHGARTVVSHASKKNDDLNQWITQLRGRKSICSTVVATAHRLARLMWILLQKQVPYAPQYAASQGANHGTC

SEQ ID NO: 511181 - protein, 362 aa, unidentified
MDGSKQQPQVTAGLDLGDKYSYLCLIDTESGEVIEEGRLRTTPDDLRRRFEPEQQLHIAIEVGTHSPWVSRILEECGHEVLVANARKVRLIYSNKRKTDKLDAEKLARLARADPELLYPVEHRGEDSQAHLALIHSREALVRSRTQLINHLRGTVKSFGYRLPKCSATSFHKKVRDQLPSEFVETLGPIVETIGLLTEKIEDYDRRIEELAAERYPETKLLRQAPGVGPLTALTFVLTLEDPQRFAESRSVGAYLGLVPGTDQSGEQDPQKRICGEGDEMLRRMLVGSAHYILGPFASDSDLRRHGEKIAGRGGKNAKKRAAVAVARKLSVLLPIVSIVCGFRRRSTSHYITPGAWGFKERR

SEQ ID NO: 511182 - protein, 344 aa, unidentified
MEHFAGLDVSVKETSVCIVDDAGRIVREAKVASEPEALLAVLNNPSYRFGRIGLEAGPLSQWLYSALGEANLPVICVETRHMRAVLKAQINKTDRNDARGIAQMIRAGLYRPVHVKTLRSQKLRMLLTHRKLLQSKAIAIENDLRGTLRNFGLKVGVVGAAKFEARISELVENLPDLALLVEPLLVVRRVLREQIAVLHRRLLHIVRDDEVCRRLMTIPGVGPVVALTFRATIDVPARFRNSRAVGAVLGLTPCRHQSGESDRTGAISKCGDEMMRVMLYEAAQILLVRSTRWSWLKVWAMQIARRCGLKKAIVALARRLAVIMHRIWVDGTEFRWARQAAAAA

SEQ ID NO: 511183 - protein, 410 aa, unidentified
MAHNIAGIDVHKKMLVVVIADAAKPDVVLQSRRFGTGSAELRHLATWLCQYAVLEAVMESTAQYWKPVWMELEPHMRLHLAQAQSNKAPKGRKSDLADAKRLVRRFAAGELMLSFIPEPEQRAWRLVTRGRLQLIRERVQLQNQVESLLEEGRIKLSSVITDLLGASGRRILRSMARGETSPEALAALGDKHLKCGLPVLVDALTGSMGDVHCRLLTQHLDRIELIDRQIDEVNKVAAAQMLPYQDAITRLIEIPGIGAEAAQEILAEIGPGAAAFPSSQQLASWIGVCPGSNESAGENHSGRSAKGNRFLRRLFCQAAQAAARTNGSHLQSVFKRLVVRLGYVKAIWAIAHRICKIVWNVLRKGARFTEFSQARNPKAVQRAINHHLKALRRLGYSIPSVPQPATAPEA

SEQ ID NO: 511184 - protein, 389 aa, unidentified
MIYVGIDVAKDKHDCCILDSDGEMLMPVFTFRNDRDGFSDFYSKLSYVCMDKDNIKVGLEATGHYSFDLLASLLDKGLPTYVINPLHTNLFRKGLSLRKTKTDKVDAHSIAMLLMSDRTLKPYSHISYHNEELKSLCRYRFSKVRERAKLKTSLSRLVNILFPELEVLVPTLHMASVYALLSEMPGASFIAASHLTHLKKLLHDSSHGRYGRDEAIAIREAALSSIGTIMPAKSLELKHTIALIQTISLEIDEIEQAICSIMDELNSPILSIPGIKYRMGSMIVSEIGDISRFSSPDQLLAYAGLSPSTYQSGQLTSSYSRMEKRGSRYLRYALFNSTKYVCMWDENFAAYLAKKRAEGKHYYVALSHAAKKLVRVIYHLLMTGETYSA

SEQ ID NO: 511185 - protein, 448 aa, unidentified
MIKKELRSYTWRDLETNGKFAKNDKLSFITDDMLIAGCDIGSETHYIRAIDVRGRELSSRAFEFSNTSEGFANAKAWVLALAAKNDKKQIVLGLEPTGHYWFALAAWMVSNGISVVQVNPYAVKQSKEIEDNSQLKDDRKDPKLIANLVKDGNYGMPYLPEKVYADMRRLSMFRDQLTEDRIRNINRLHRELKIYFPEYMDAFGKIDGAFTLEVLKVSAIPSDITALGAEGIKNIWHNEKLRGRGYSRANEIVSYAEKSVGLTDGTDAGRETVKWYAEQILKLDEQLAVIESTLHEKCREIPYAENILEIRGVGENILAGILAEMGDISRFDDVKEIQKLSGMGLVACSSGKHKGQTKISHRGRKRLRYWLFQAAKSAVSHADEFKQLHEYYTTRTNNPLKKMQSLVVIACKILRVSYTILKTGTTYDPQKLLKDIKRPTASQAPMAA

SEQ ID NO: 511186 - protein, 346 aa, unidentified
MMIIGCDFHPSWQQIAVLDDGTGELAERRLKNGDGEAERFYRALAAPSLVGIEACGNSEWLIELLEQLGHEVWIGDAAQIRASYVRKQKTDRRDAAHILRLLVEGRFPRLWRPSAGERDVRQLLIHRHKLVEIRSRVKNGLQHLMLNRGVQKKHRLWTEAGQRALCELPLEGWAACRRRDLLQLLKQLDCMIGKLDGAAQKAAEEDEVARLLMTQPGVGPITSLAFRVTIGDAARFQRGKQVASYLGLIPREHSSGGRQQLGSISKQGNRFVRGLLVEAAQTAVRLDEGFRKQYQHRCHSMEKGVAKVAAARRLAVRLYWMMRTHTAYPEIVHNESSSRVALVGAS

SEQ ID NO: 511187 - protein, 349 aa, unidentified
MIARSDAACFVGIDLHKDTLTACTIAAKGGEITYRKISCVAREKVREFLAHLPRPSVVAIETVGFYRWLWTEAEPIVDQVLLADARGARALAGRRIKTDREDAFNVADLLMTGRLPLAWAPPGQVQRLRDWTRHRNSLSRDHAKTLHRVKSIMNRLNRPGPARMDAAGLQRYLLTSVERIETDDLTMLWQHQRRLVEIEQDISASERRIVDLMKAPEFRPLRVILESIPGVGLITAATAIAEIGNFSRFPDSKAIGRYAGLTPIGYSSADKNRLGRICKTGSPDLRWALQQAAWTAIRCDASIKKNWLKISKTAGKKAAAVAIARKLLVLMWTLVRKDEPYKAREPLAA

SEQ ID NO: 511188 - protein, 413 aa, unidentified
MRFIGLDVHKDFCEVAVVEEDACWSGPRVHSTPEDLEVFGQSLGPDDQVVLEATGGALAIARILEPHVGRVVMANPMAVRAIASAKAKTDRLDARTLAKLLAAGFLPVVWTRHAQLIRQRTRAKNQVHAVLQRTLKGRPPASDLFGKRGRAWLDDQDLPADERETVQASLRHVDFLDGELRLVDRTIAQQVLGWPEVRRIMTIPGMGAMAAAGVMAAIGDIRRFPTPRHLVGYLGLDARVRQSGSAPARHGGISKHGSSEARHLLVEAAWAAIRTPGPLRAFGERIRARRGANIATVAVARKLALLSWHLLTREEDYAFARPSLVRQKVRLLELTAGDVRRIGYRNPVRVFATPAQHRLEREVGAQAEKAYRRFVKDFQATGKKGAGAITGARISVPRKGQAPRQEQAPDPAL

SEQ ID NO: 511189 - protein, 412 aa, unidentified
MDVVYRCCCGVDVHKNSITACVLWVETKGKGRQEKRMFGTFTQDLLAFSDWLRGCGVTHVAMESTGVYWKPVWHILEGQFELLLVNAQHVKAIPGKKTDRKDSAWLAELLQHGLLKSSFVPPEPIRELRDLTRYRVNLAQECNRIANRIQKVLEDANIKLASVATDALGVSGRAMLKALIAGEQDGEKLAEMSRGLLRRKIPQLQQALEGHVTAHHRFLLKELLDHWEFIESKMTRLEEEIAERLRAFEDTVRRLCTIPGIDRVSAWGIISEIGLNMDQFADAKHLASWAGLCPGNWESAGKRKSGRIRQGSVWLRRHLCQSAWAVSTKKNNYLSALFRRLAARRGVKRATIAVAHALLCIAYRILRDPVQYRDLGPDYFDQLHPMRLKNRLVKRLEGLGFQVTLEARPLPA

SEQ ID NO: 511190 - protein, 420 aa, unidentified
MKKINQVKESTLVVGIDIGSTTQYARAFDWRGIELGKVFTFSNSREGFEAFKAWMQRLQDKYRKSDVIVGIEPTGHYWFDLGAYLEDEGILLVMVNPYAVKQTKELDDNSQSKNDRKDPKVIAKLVTEGRYSAPYTPDGVYADLRIMVTNRKRLIREMTQIKNRFARWFAIYFPEYTDVFGDYEAQSSMLLLKKVCTPEAIVELGAEKINQIWRDAKLRAVGMKRATTLCETAKRSIGLKKGSSAAQYEMKLLLEDYEYKKAQLDAVIEEIEKLCRKIPESEQMLAIKGIGVITVAGFLAEVGDVRRFESPRQIQKLAGLSLRENSSGKHKGQTTISKRGRSKLRAVLFNAAIPLIATNPEFKSLHEYYTTRANNPLKKKQSVIAISCKLIRVFYAILANGVTYDAQKMLSDIHRQPQAA

SEQ ID NO: 511191 - protein, 352 aa, unidentified
MNATTVAVDVAKNVFELAVADGAWQVVERHRLTRSQFERWFNNRKVDLVVLEACGSAHHWARGFRDRGIEVRLLPAQHVRAYVKRNKTDAADATALLEACRASDIKPVAVKSVEQQALQALHRTRSAWMSTRTRRINTLRGFCREFGLIVPEGAVRGIAQIARYLADEHCGLPAILRGSMRLMLEEIRLMEARIRQLEQELAQLAQQSPACQALTSVPGIGLLTSTAMVAAVGDPRSFDSGRRYASFLGLTPREFSSGEHRYLGRISKRGDRYIRMLLTHGACSILRSATVAQRTGRQIDRLKTWALAVQERTNHNKATCALANKLARIAWAVWMKHEKYRGEPAPTLPLSV

SEQ ID NO: 511192 - protein, 372 aa, unidentified
MPQKSKVFVGLDTSKLKISVAVAEDGRQGEIRFLGEIDNTPEAVRRLVHKLASRHGELLFCYEAGPTGYGLQRQISALGHECAVIAPSLIPKRPGERVKTNRRDALTLARLHRAGELTAIWVPDPGHEAVRELVRAREAAMEDLREKRQYLQSFLLRHGRIFSGRKPWTRAHARWLAELIFEHPAQYLVLGEYRQAIADAEARLERLTQQVAEVVSTWSMAPVVEAYQALRGVALLTAVTFVAEIGDVRRFESPRQLMAYLGLVPCESSTGERVRRGGITKAGNPRVRRVLIEGAWTYRFPARMSRLLQERQEGLPQIVRAIAWKAQVRLCARYRRLMGAGKRHTVVTTAIAREMAAFLWAIGREIQPRSAA

SEQ ID NO: 511193 - protein, 412 aa, unidentified
MEPIYTSCCGLDVHKKSIQACVRRVGKDGKIQQEIRPFGTMTRDIRDLADWLSQQEVTHVAMESTGVYWKPIYNILEGRFKILLVNARHVKHVPGRKTDVKDSQWIAHLLQSGLLKGSFIPDRAQREFRDLTRHRAKLVDQRTSVVNRVHKVLEDANIKLGAVATDIMGKSGKDMIRALIEGEKDSAEMADLARRQLRGKIPELRLALDGHVTNHHRFMLGELMDQLDLLDGQIDRFSQRIEEISRPFAKAIEEVARLPGFEKRAAENTIAEIGCNMDQFPSADHLSSWAGVCSGSNESAGKRKSGKTTKGSKWLRSTLAQAAWAASRKKNSYFHAQYGRLAGRRGKKRAVIAVAHSLLTVIYYVLRDHVEYKDLGQDYFDKLNSKRLVPYLVKRLKNMGYEVNLVPLQSAA

SEQ ID NO: 511194 - protein, 323 aa, unidentified
MTYIGIDISKDSFVAAFPTVSGYQTQTYPNTVKGIRKFIGSLSVTEHHCVMEATGNYGFLLLYLLDRQGIASSMVNPKQIKHFSRMMMTVTKTDPKDACMIAMYGEKMNPPVYKMPSEAVILLKQKKTIIRQLKKQLTASKNLKSSLVVLPFQDKHGMKALDKTISFLASQIESLESELADLASSEFDRQVKLLTSIKGIGITLATALIVATGGFSYFNNAKQVSRFIGICPTYQQSGTSVHIKGGINRNGDASLRSLLYVASWSALRGNTTCKECYARLKANGKPSKVALIAVANKLVRQAFAVIKSDTPYVDGFVSTHQTK

SEQ ID NO: 511195 - protein, 360 aa, unidentified
MQIVHEYCCGLDVHKDTVVACVITPEGKSLRTFGTMTRDLMALADWLAEKGVTAVAMESTGVYWKAPYNLLESFEFTLVVANARDMKAVPGRKTDMKDAEWIADLLRHGLLKESYIPTKEQRELRELVRYRRTLIRERSQVVNRIQKVLEGVNIKLSSVVSDVMGVSGRAMIEAMVAGEEGPEALAGLSKGRLRAKQVTLEEALRGQVGQHQRLVLDSLLRHVDFLDKEIARMDEDVSSWLGSSDDVIGRLDGIPGIGRRTAEDIIAEIGLDMSRFPTSAHLASWARICPGNNESAGKRRDSSTRSGNHWLQQALVEAAQQPLARRRATSRPCSTVWQEAGAPSVPQSPWPMPSWSSYTT

SEQ ID NO: 511196 - protein, 365 aa, unidentified
MKEDTKVGPRLTIGVDLGDRYSQLCVVDEQGEVSEEGRIATTARAMRKRFEGIARCRVVIEVGSHSPWVQRLLEELGHEVITAHAQAVRLIHGGTSKSDRLDAERLARLGRVDPKLLHPIRHRDGAAQADRAVIGSRHVLVGCRTSLINHARGLVKSMGGRLPACSAESFHKRAGEELPEELKPALLPVLETIAALTQEIRRYDQRIEILASERYPETALLRQVSGVGSVTALSFVLTVEDPRRFRRSRSLGAYLGLQPRRSQSGDNDPELRITKAGDGDLRRLLVNAAHYVLGPFGPDTDLRRWGLTLAARGRKNAKKRALVAVARKLAVLLHRLWITGEVYEPLRTHHRQANTSASVALAMSA

SEQ ID NO: 511197 - protein, 395 aa, unidentified
MGHSYSVLYKDDTCLFEDEIEHTQRGFHALLEEIQHLPERPLIVFEATGIYSRPVEKFFQDHHFSYCLLNPLEAKKQMEESTLRSWKTDKSDAHRLAQTHLKNQRQPKEVQSNFYLEMRDLARFYQEIEKKITRLRMDLHNCLQLTFPELEQFFSNRLTPYALTLIRLFPHPDFVLASTRTKIKNKLINETRKKISANRAEQKADQIIHYAQCAYPAVEKDSIHCQKTIYYAELLQDLLEQKKALATQMIKKAEGSPCFLLYQTFPGIGALTAALLLGELGDITRFKTHKQLNAFVGIDIRRYHSGKYTGQDRINKRGNPKARKIIFFTIRNMIRQQRAAPNHIVDYYYKLKKQPIPKKDKVATVACMNKLLKCMHAMVRAHTEYDYAYAVSVDH

SEQ ID NO: 511198 - protein, 455 aa, unidentified
MAKKNPTTRQSQGKVRENSLERINLHAAGIDIGANFHFVAVGEECTEENVRKFDAFTSDLHRMADWLSEHHIQTVVMESTGVYWIPAFQILEQRGLEVKLVNAAHVKNLPGRKSDVSDCQWLQQLHSFGLLNGSFRPKDEVCVLRSFLRLRDTLVKDSSSHILRMQKALTQMNIQVHRVITDITGYSGMAIIRAILDGERNALKLAQMKHPLVKAPTEVIVEALQGDYRTEHLFELQTALDLYDVYQGKILECEAQVEQHLQQWETKVDFEQALAQTAALQTRSASVRLELHRQAQLLSVCGVDLTRVPGLSTLAVRTIIGETGLDMNCWKSEKHFCSWLKLCPDNRISGGKVLSSRARRTRNRATAMFRLAAQSAMRSQTAIGAFIRRIKARLGAPIAINAGAHKLAQLFYRMLKFGETYVERGQTYYETKYKERLLRNLNRRAKEFGLQLAPS

SEQ ID NO: 511199 - protein, 354 aa, unidentified
MSSTKESYFIGMDLHQKTSTFSVKEKEGKVIEAKTISTTKEDVEKFLSPYSGSTLTLEPVSQWYCYADFIESLGIEVKIANPMRVKAIASARIKTDTIDAGVLADLLRANMLPESYHAPANVRAWKEEVRLRMSLVRLRVQVKNKIHALLWKQGIRSPYTLFSKRGLRWLDTQIFSKEITIALATYRETLALLDRQVTDAEVRMIEDNKHREEVKLLITIPGISYLSALTIMAEVGTITRFPSAKKLMGYAGIVPSTYASGGTVRHGRITKTGSSWLRWVLIEVAHHQLLCTRQKGLTKYYNDVKARKGSKAAAVATARKLCAVIFRVLTDKRPFVSPEEWDNRRAHHRFIAIN

SEQ ID NO: 511200 - protein, 405 aa, unidentified
MDMIIARGCGLDVHKKTIAACIMGTGMNKETRTYGTMTNDLLRLKEWLKQEGVTHVAMESTGVYWKPVFNILEDSFDVILVNARHVKNVPGRKTDVQDSEWLCKLLRSGLVKGSFIPPVEVRELRDLTRYKKKLIQNIVSEKQRIEKILEDANIKLSSIASDTFGASGTRMIEELMKGDLNAEEMAELSKGRLRSRKEELKEALVGNMRENHTFMIQASLGHIRAIEEELVSLENKIQKKIETHFKVAYELLKTIPGVKDNASVIIGEIGVNMDIFPTEMHLSSWAGMSPGNNESAGKKKPGTTTHGNKFLKSILTEFAWVAAKTEGTYLSAKYRSLVGRRGKKKALVAVGHKILIMCYHILKYKVPYKELGGTYLDDRKKDRITKSYIKRLNNLGYTVTLKEAA

SEQ ID NO: 511201 - protein, 351 aa, unidentified
MTSLQQIAEVVIGVDTHVHTHSAAVVDARTGGVLAEITVTADADGYQELIDFAGQHSGQRAWAIEGTGGHGNGLARVLAQRDEPVIELDRPERAKRRNGAKSDPLDAVRAAREALSRDNLGTPRSHGDRQALSVLLAARQSAVQGAGDAQRQLFSLVIAAPETLRKRFRGHKLPAMTRLAAQLRGSPRWDTETATTAAVLRALARRALDLATEAAQHEKDIRAIVAAWRPDLLTQRGVGPITAAVILCAWSHPGRVRSEAAFAMLGGVAPIPADSGSGTAPKRFRLNRYGDRQLNRALHTITLSRLRYDPTTQAYAKRRTAEGKTPRDIKRCLKRYIARDLYRLLEHPAAT

SEQ ID NO: 511202 - protein, 456 aa, unidentified
MGKARPQVIEDDEHQRVFERVAAVDVAKASGMVCVRVPGADGRPRASRVWEVTAVMGAVTGLGRELARDGIQMVTLEATSDYWRIWYYVLEMCGLAVQLVDPSQARAIKGRPKTDKLDAMWLARLTEWGMLRPCFVPPAPIRVLRDYARARTDLVHERTRCFQRLEKLLEDALVKLSSVASKLTTVSAQDMIKAMIAGERDPAVLAGLARTRMKARHAGLVAALDGMFDSHHGELAQLELDQITFLDTRIAWAEDRITAVLAGIPAAWGIDADGSTGPDAGHGPDAAVLPAVRRLAEIHGITVLTAAQIIAEIGLDMTRFPTAAHLVSWTGLCPIDSQSGRRRSKRKGHGNTYLRGYLGQAATGAASTGTFLGERYRRLARRRGKAKAQVAVARSILIIIWHLLADPTARYTDLGPDYAASRTSRDKKIRNHIRGLRALDLTDQEITDILTAHQAA

SEQ ID NO: 511203 - protein, 364 aa, unidentified
MTDGICFAGLDVHARKTAAAAVQLGSGEVFRAQIVGAPTEAIGWLQTLPGAVRAVYEAGPTGFGLARAARAAGIEVMVCAPGAIPRQPGDRIKTDTRDALKLARLHAAGQLRAVLVPEPELEALRDLVRCREDLRGDLMACRHRIGKLLLRRGLIYPGPGATWTRRHAAWLSSLTFDEPLVQTVFAELLACHDVLLARRDRLDGLIAAQAANGPWAARVARLRCLRGIDTLTAVGLVAEIGDFAAFAHPRRLASFLGLVPSESSSGTRRRQGAITKAGSTHARRLLVEAAWHYRRHPSLSVDLRRRQAGQPPAAIDAAWRAQLRLHRRWAHLDGARAKKRTTVAVAVARELACFVWEIANQPDI

SEQ ID NO: 511204 - protein, 350 aa, unidentified
MSVIHYIGFDVHKKSVSYCVKDGAGKIIEEGKLRATCQVLRQWAGDRTEPWHGAMEATLFSGWIYDTLKPFATVLEMGHPAMMKAIGASKKKNDKIDARKTADLVRCNLLPACYVAPVEIRELRRMLRYRNVVVAQAVRMKNKMSGLLMEVGAEYNKQRLHGKNYFTELLGSLEEVPESVKDLLRLSRGALELFETTQKQILDRLQKEPRLVRRLEVLQSIRGVGDVTALSWALEICDPHRFASIADAVSYCGLTSALVSSADKQQRGPLSKQRNAHLQTVLIEAAKLAPRWNPQLAAVHEREANRGNRNRATLAVARKLVAYLLAVDKSGKPFQLQTPPATKTEVPAVA

SEQ ID NO: 511205 - protein, 304 aa, unidentified
MFLIGCDFHPSWQQVCWLNRTTGETEENKLVHAPGEVERFYRRFPVPARIGMESTGNCQWFVEMVTALGHQLWIGDAAKIRASDSRQQKHDKRDARLLLRLLMEERFPRIWTPSSEQRDLRQLLVHRYKLVLLRMQAKNGLQHLALNQGLQKKRRLWSRAGQKLLRELPLRPWASRRREDLTSVVKLLDQQIQSLELAVIGAAEKDANARLLMTQPGVGPITSLAFVLTMGDVSRFRRGKQVASYLGLIPREYSSGEHQRLGSISKQGNRFLRMLLVEAAQGAVRCDPQFRSEYLHRCHEKPKE

SEQ ID NO: 511206 - protein, 356 aa, unidentified
MSQKLNSEIAIIGIDIGKNSFHLVGQDRRGALVLRQKWSRGQVEARLANLPPCLIGMEACVGAHHLSRKLQALGHDARLMPAKYVRPYSKGEKNDYRDAEAIAEAVQRPTMKFVATKTADQLDLQALHRVRERLVGQRTGVINQIRAFLLERGIAVRQGLHFLRAELPSILAKRTDVLSPRMLRVIEDLAGDWRRLDERIENLSDEIAALARQDKGCERLMTVPGIGPIISSAIVAAIGSGDAFSKGRDFGAWLGLVPKQMSTGDRTILGSISRRGNRYLRWLFVQAAWVVLVKITPEGWERYGLRSWIEAAKQRLHRNVLAIALANKLARIAWAVLHKGRAFECVKTNATASQAA

SEQ ID NO: 511207 - protein, 343 aa, unidentified
MERLYYIGLDIHKKTISYCVKKIDGSVVQAGIIAAQRKALLKWMEGLPGEWLGAMEATMFTGWVYDFLKPHAIELKVAHPEMLKAITAAKKKNDRADAEKIADLLRVNLLPECHMLSQELRELRRILRYRNMIVRTGVKMKNKISGLLMDVGATYDKAKLHRRKYFSNLLERVEDIPDSVKEMLRLSRSNLEMFEAVQRKLINTLREDNLIHERVQRLMSIRGVGEVMALTWVLEIGEVSRFSSARQAISYCGLCSAQRESAGKEQRGPISKKRNKHLQTMLIEAAKLAPRWNPQLATLHEKEVNQGNRNRATLAVARKLVEYMLAVERRQKDFVPSASVLAA

SEQ ID NO: 511208 - protein, 429 aa, unidentified
MNSTQNKKIEQVKETTMIVGIDVGSEKHYFRAFNWRGIELTRKPVAFSNSMEGFNSFYNTIVELMQKSEFEEALVGIEPTGHYWFDLGQFMGEKSIKFVMVNPHHVHKTKELDDNSPSKNDRKDPRVIAELVRDGRYFYSYMPTGVYAELRNASNRRFVLVEEQTRAKNRLQKWIAVYFPEYKGIYTRIDAKGGLLVLKQAPTPEEIVRLGVEGIIKIWKDAKLRGNGHKKAMLILNAAMKSIGLKSGLTEARMEIQDLIEDYELQTKRLERVNDLIKELCQQIRYADKLLEIKGIGITTVAGFIAEVGDITRFDSTKELQKLAGLELVADSSGKHNGKTKISKRGRKRLRYLLFEAAISVVGKNEEFKEIHRYYTTREKNPLKKMQSLIAVACKLIRVFHVILTKGVSYDASKMLEDIRHPGEQLKAA

SEQ ID NO: 511209 - protein, 349 aa, unidentified
MNATIVAVDLAKNIFEIAAADVDWRIAQRSRLPRSKFFGFFVQLAPCQVVMEACGSAHYWARRIASLGHTVRLLPAHYVKAYVRRNKTDKADAGALIEAARCAEIREVPVKSVEAQQIQSLHRLRSQWMSTRQRCVNTLRGILREFGFAIPLGVNVAKAQIGIALNDTDTEIPAALRATLAEMFQEIAVIEQKILTVEHQLNALTRTDVRVQQLREIPGIGALTSTALRAIVGDIHRFPSGRHFASWLGLTPNERSSAEKRRLGKISKQGDVYLRTLLVHGARSALLAAHRALRAGRPLDRLRWWALECERQRGHNKATVALANRIARIVWATWKYERPFDGNWSQEAN

SEQ ID NO: 511210 - protein, 438 aa, unidentified
MEILHGITKFDTTNKLVVANDIAMDKINYYSELKGKVSRTHCREYLAIQDEYENSPISIRQTLRELEGYALNNGYDGLHIVCEPTGVYSDLLLKTAHQLGHTTAYINGEVVHKAKVIENNDNSKDDIKDARVIYMLAMMGKEQYYRTLPPEYQALRELNKLYSNADKDCVRAKDQIHAALKKLFCYFPMGNSFIYSPSGNALYDEYQLNPWKITADSYNLFSSKIRARLAKTKNFTYEKSLKKIYQAAKESSLHLISLEVLTIIEQSYSFLLNDYKRATNRKMLLKKQFEDIYDNLIKTEMVIPLANEKIKAYNIARILGETGPLSDFKSIKELEKYAGLNLRTRESGKFKGKLKLSKKGRAPLREILGKMVFGSIQHSRIFGEYYHKRKTEENISSAQLIAILERKLLKLLFGMAKNKEAFNNDKMINCETQYNKVA

SEQ ID NO: 511211 - protein, 410 aa, unidentified
MQTLVERGCGLDVHQATVVACLLVVLKNGTVRKNMRTFGTTTRELLSLRTWLLSEDCTHVAMESTGVYWKPVYAILEGGLEIVVANAHHVKKVPGRKTDVKDAEWIADLLCHGLLRSSFVPPKPIRELRDLTRYRRKLVESQTAERNRLLKLLEIANIKLASVATDVFGVSGRLMLRALIEGQATTQEMANLAQRKLRKKIPELELALEGKLEEHHRFLLRLQLDRLETSEKDLAVLEQRIQEKLRPYEAQVTLLDEIPGVDWTLAAVIIAELGVDMKVFENVAQLASWTGVSPGNNESAGKRKNSRIPKGNMYLKSALVEAATAAARTKGTYLRDKFYRLKARRGYKRAIVAVAHKILVAIYHMLSHRVCYNELGDLYLDKLNKHHLTRNLIRRLERLGYTVKLEPKAA

SEQ ID NO: 511212 - protein, 315 aa, unidentified
MAMPVSVLTPIVGVDVAKNELVIFQAELDLLETIPNNKTAIKRWLKDLPGAVEVAIESTNIYHLEFADLAHEAGCTIYMVDGYELSHYRKGVKIRAKTDALDAKLLARYLKNEHEELHPWIPPSPLYRRLLSLFRRRSALVQARVGLVQSWSNEPLLKTAFAAQVASMQKLEVLVEKMINDHLKEAGLLAQLKRCMKVEGIGFLTGARLIAAFQRGDFRNADAFIAFLGMDLRVSKSGQKDGRRSLTKRGDPEARRLLHNAAMSASRTSTWKGFYQEQRDRGFSTTQALVILARKLARIVFALLKGQSEYQPKAG

SEQ ID NO: 511213 - protein, 319 aa, unidentified
MDMVSQEQIIGIDVSRDCLDVHCLPDGSRLRIANTAQGHEQLAEIAHDRRALVCFEATGGQEWRLWAALDAAGIEARQLPPAQIKAFATSRGTRAKTDRIDAELIARFMAFRPDAGRTLPAQKLRLLRALTGKRGQLVETRKRLLLQIKARQKQGLGEQFKKMDDALHLLLDAQISELENKIERLVAADEALAENARILRSVPGIGPVASTMLIAEMPELGQISGAQAAALTGLAPIARDSGALRGKRAIGGGRHLLRHVMFQAALVASHHNPVLKPFADRLRAAGKPHKVVITAVARKLVTIVNALCKSRQNWTVPAT

SEQ ID NO: 511214 - protein, 421 aa, unidentified
MALKIVYKICCGIDVHKTFVVACIASTISKGVTTYESHRFSTYTSGLKNLLQWLITRNCRDVCMESTGKYWIPVYNVLENDCTIVLAHPKYVKAIRGKKTDKKDAKWIADLFKHDLVAGSFMPPADIRQLRDLMRYRFKLTCFKSSEKNRLQNCLTVSNIQLGNVVSDTFGKSAQAILDKILENPADTSFDLEPLVYKSLKKKIPELRDAIDGYITPEQAGKLKVIKTHYEDLESRKAELEELILALAAPYQQELAILQTAPGISSTFTAIGIISEIGTNMEAFPSAKHLCSWAGLTPTNNEKCTANKFAGKKKSVRVSKAGCYIKPLLVQCANAVVTSKKHPEIRNRYLRLKKRRGHKKAIIAIARMLLTALYHMLKNGENYNAELYRKSDLPPVDREITVEQAVIIARNQGYKIKSATA

SEQ ID NO: 511215 - protein, 333 aa, unidentified
MKRSQSTTKKRTKKPGQATTTKTMRVGGVDVGKDWLDAAIHGIAAKPLRRPNTPQGRAALIEFFIEHGVTLIGIEASGSYEFEMVDAIRAAGLKDIVFQPRQVRAYATFRNLRAKTDPIDAALIARCAAAQEEMRDSPDPRLAPLAEHLTFIDQIKEDIARLRTRLDRFRDKRFITAIRDQIAHLKKLERAELAKLRTAVRAHADLAKKLDLLITIEGLGGPTALTLVIRMPELGTVSREQAASLAGMAPFTRKSGRWQGESHVEGGRARVGKAVFAAAQAASQRWNKALVALYTRIKAQGKHHSVAVVACARELIIYANTVLARGTPWIAQN

SEQ ID NO: 511216 - protein, 342 aa, unidentified
MDHYVGIDVSLEASSICVINGSGKIVQEAKVLSELEPLIVFLRSLGLQLTRIGLEAGPLSQWLYAGLKSEGFSVELLETRHVRDAFKAMAVKTDRKDARGIAQLLRLGWFKPAHCKSAAAQEIRALLTARKLIQSKLYDIEMSLRGILRGFGLKVGPTTPKRFAGRVAELTRDHPALRTVAQALIKVHEVLMDELCAFEKQVRSIARSDGRVKLLMTTPGVGAIVALTFVSAVDDPGRFSSSKRVGAHFGLTPKKYQSGETDVTGRISKTGDGGVRAVLFEAAHIVLTRPVKGGALKSWASRLAKRAGMKKAKVALARKLAVILHRMWSNWTAFDAVKAASA

SEQ ID NO: 511217 - protein, 358 aa, unidentified
MKIVGCDLHARQQSIAMLDTETGEFPEKIVRHEGNAVREYYAALEGPIVVGIEATGSMQWFLQLLEELGIQYRVGHPAKIRAAATRKQKHDRRDARLILDLLVMKDRFPEIWMPSMEQRDMRTLLRDRHQWVKMRARLQHTMQSIALNPGLRQGPGLWSGAGQSALQALPLAHYTSQRRNALLSLYAQLQKRIQELDKVVEAEAQSRPQACRLLTHPGVGPVTALATEVFLGDPKRFRTGKQVASYIGMIPGEHSSAKRQRLGKLSKEGNALLRYLWTEAAMHAVGKDPELKRFYRRKLIAKGMGKARVAAARKLGIRLWIMLRDQIDYEEFCRRGRLRQEGEAHAGMPAFNSGPAMQ

SEQ ID NO: 511218 - protein, 478 aa, unidentified
MDDRRLVGIDLGITSAHTVRVLAGDGTTVCRRKAVPTVQSLGEVERAALAGAAPGTRLEVVIEPTGPAWLPIAVFFCSRGHTVFRVSSAKAHDLRRFLSRHAKSNGIDADTLARLPLVDPAGLHPLQLADAPRAALDRRVRACDRLTQQAAGHKRRLKDLVRQLLPASPLVGELGMADLAVLERYADPHTLVAVGRARLARVIAKASGGHLGAARAEQWLAAARAALELYADHPAVAFQDLAAEVATEVRLLRATQAELAAHATQRAACYRWVDPAGLARSLPGLAEIGGPALAATMGPASRFPAASNFRSFTGLAPKASETGQTDRKGQPISKAGNRLLRTTLVRAADNARRVDPQLARIYYLQMVEPGKDHLGAVCVVAAHLAERAWVTFNREMPYVICDTDGVPVTPTQAKQIIAERWTVPEEVRRRRRSKKGKAPQQVLQGHAHGAHGATRRPSPSPSSLGRRPGRVKPAQPRT

SEQ ID NO: 511219 - protein, 410 aa, unidentified
METIVERCCGLDVHQATIVACLLVGRASEKPRKQVKTFRAMTQDLLVLRDWLLSEGCTHVGMESTGVYWKPVHAVLEGAFQIVIGNAHHIRNVPGRKTDVKDSEWIADLLRHGLIAKSFVPPKPIRELRDLLRYRRKLVESRSAERNRLLKLLETANIKLASVATNVFGVSGMLMLNAILKDDSSPAQMAELAKGRMRDKIPDLKLALEGSVQEHHRFLLRLQLRRLKRTDEDLAELEQRIDERLGPYREQQALLVQIPGIDRILAAVMIAELGTDMTVFHSAKHLAAWAGVCPGNNESAGKRKSDRVRNGNAHLKTALVEAANAASRKKGSYLKDKFFRIKARRGPKRAAIAIAHKILIAAYHMLSTGSAYKDLGEPYLDRVARYRVTHQLVRRLERLGYDVHLIQKVA

SEQ ID NO: 511220 - protein, 458 aa, unidentified
MNRKRSKPKSDHTMPMVHPNAAAIDIGATMHMAAVRADRTPEPVRSFGTFTTDLHRLVDWFTECGVETVVMESTSVYWIPIFELLDARGFVVFVVNARDAKHVPGRKTDVSDAQWLQRLHSYGLLRASFRPKGQIAELRAYVRQRERLLEYAASHIQHMQKALTEMNLQLHHVVADVTGATGLRIIRAILAGERDPKVLAHLRDYRCHAGAETIEKALTGNYRAEHLFALEQALSLYNAYKEKASACDARIEAVLKELCISRGLNAGPLPSPRRRLHGKANGPDFDVRAALFKLLGKDLTQIDGLGSYLSLKLIAECGDDLSAWPSAKHFTSWLCLAPSNKISGGKVLSSRTRRCGSRASALLRLAAVTVGRTDTALGAFYRRLSARIGKAKAVTATARKIAVLFYNAVRHGMEYVDPGASFYETRYRTRIIDNLHRRAKAFGFVLLPTELVPGAAVS

SEQ ID NO: 511221 - protein, 399 aa, unidentified
MLAVVITDAAVEGELPFERRRFGALGTDLKALAEWLAVQQVQEVVMESTAQYWKPVWRQLEGQCQLHLAQAHSNRARRGRKDDFRDAERLARRHLAGELILSFVPDPEQRLWRTLTRTKHQLTRDRVRLHNQVEALLEDARIKLSTCVTDLLGVSSRRMMEQLAQGATDPAVLAALADPALRATAEQLIDALSGAPEMSTLHRQILRLFLDRLELMERQMEVLDRTIAATLQLHQSAVVRLAAVPGLGADSAQQIIAELGPQAATFHSPQELASWVGVCPGREESAEVSKSDESPKGNRTMRRVLNQGANSARKTKGSIFQALYQKWVPRLGHNKTIWAIAHRLCRVVWIILHRGEQYIEFGNSRDPKSAAKRTAKLIHRLRSLGYQVTPPMPTPRVAG

SEQ ID NO: 511222 - protein, 461 aa, unidentified
MKTRLQNRKNKKTKIKLDSLPVLEPNAAGIDIAHREHWCAVPPDRCEKPVRPFGTFTEDLEKMADWLQECGITTVAMESTGVYWIPAFQVLERRGFKVCLVNARHVKNVSGRKSDVLDCQWIQRLHSCGLLNASFRPADSMCVLRSYLRYRDDLVSARSVQCQHMQKALQQMNVQLHQVLSDVTGASGRRIIEAILAGERDARKMAALADRQVRASVTTIEKALRGDYRAEHLFVLRSAFDLYQTYERKIHLCDEQIIAQLAQLPARVDLKDKPVPPPKPGRPRLLDMVAGTDLRAELYRCTGVDLTAIEGVGVLTAQVVLSEIGLDMTRWRSEKQFASWLGLCPDNRISGGKVLSSHTRPVVNPVADALRIAATTLQHSKTALGAFYRRMRAKLGAASAITATAHKLARIVYRLLKYGELYVRQGMEDYEKKYRERVLHNLKKTAASFGFELTPTQQLAS

SEQ ID NO: 511223 - protein, 403 aa, unidentified
MNSVGIDISKGRSTVAVMRPFGEVVISPFEVRHTDSELSELARQLKSLNGETRVVMEATGNYHAPVAKLLHDAGLYVSVVNAKLVHGYGNNDLRRVKTDRKDAVKLANYGLDRWFTLPRYVPEEDTRLLLKNCYRQYRQYSKVQTILKNNLISLLDTVFPNANRLFSSPIRGDGSEKWVDFVAEFWHCKCVCEHSERAFTNKYQRWCRKHGYNFSEAKAHTIHAEASGHIGVMPKSETTKLLVEQAVAQLRATSAALAALKREMQSLASMLPEYPVVMDMFGVGPTLGPQLIAEIGDVRRFYSKKALVAYAGLDAPPNDSGDVTGRHKSMSKVGASSLRRTLFLVMSVYLQNAPLDEPVYQFMDRKRAEGKPYRVYMMASANKFLRIYYATVKAYLESLEHTA

SEQ ID NO: 511224 - protein, 397 aa, unidentified
MLAVGIDISKSKSVAAILNQDGSMHTSPFEFHHTQPELDAFIKYILNSNQSATILMENTGHYHYPVLKAFREAGLPVCMVNAYQIKKFGDMDLRKAKTDKKDAVRIARYALEKSYSLVPYTSMEQKYEDLRFLARQYNQRMLTLKTNKVFLLNLLDETMPGITNILPLTTRTPETSLSVLFINRFKSYDRIKKMGKSRFLDAFEKIARKSRNRQTKTYGLAIYEAALRNITTRGENEYTLAAQDQCLELVCESQKAADSIIPKMQTLAETLPEYAVLRSMAGVGDRLGPLILAEIGDIRRFHSGKALNAYAGNDAPPYQSGTFESHNRHISKRGNAALRKYCFEVMQALKLTRPQNDPVYLFLLKKEQEGKPYNVAKMAGVNKFLRIYYARAMETLK

SEQ ID NO: 511225 - protein, 303 aa, unidentified
MDISKDNLDIAINTEKGSRRLNNNAAGIKKVIEYLRGVSPILVVFEATGGLELPFWQELTEAGIAATPVNPRQIRDFAKAKGVLAKTDTIDAQIIAQYASAMQPQAQAFPDTQELKEMIARRSQIIEMLTAEKNRLKAARRSRIQQDIKANIEWLKSRLDGVDKDLQEAIKANPEWRQKFEILESTPGIGNTTAASLVAGFVELGQLNRHQVAALAGVAPINRDSGTMRGKRIVWGGRPRIRAALYMATLVATRYNPVIKAFYLRLCAAGKAKKVALTACMRKLLLILNSMLKHNLSWRYSPS

SEQ ID NO: 511226 - protein, 377 aa, unidentified
MKAPSTRPAAVLGLDVGKSSHWACLIDRDGEVLASAPVRNREAELDALFASAPAGTLVVVDQFRNIGSLAVRRARAAGLAVAHLPGLAASRAAGLFAGEAKTDERDAAVIARTALGVPDSLSGVPGRGEALEAARALSSQRDHVVACAIRDKNRLRAVLLESCPALEAAVDLSDRRWLELLAGFGGAWGIARSGAEGPRAEAAGEAAAASTAPPPALVEAENRQVRFLAARISEALDEAGALEAETAALLEGDETYACLLTVPGIGPRTAAQLAVSVDIGRFPDHDHLASYCGIAPRVRSSGTSVRSVRASRRGDARLKSLLIFSCNSLVRSSGRYGEYYRACRARGMGHGRALKAVARKRLRAIYAVMRDRVPYRE

SEQ ID NO: 511227 - protein, 456 aa, unidentified
MRKKNKGKNKAGTATSINTRLYPDSAGIDVGAEEFVVAVPPDRWEQSVRSFSSFTSGVEELCGWLVACGIKTAAMESTGNYWITLYDRLVASGIDVWLVNARHVKGVPGRKTDVCDAQWLQQLHCAGLLKKSFRPDGEIVPVRFLMRHRREMVDKSSRHLILMQKTLTEMNIKIQHVFSDIDGVSAQNIIKSILSGERDPAKLAALRDSRCRSSQEKIIEALKGDYREEYLFVLGQSLKAWELNNEAIAECDKKIEGMMAKVSVEPSSGPLPPAAKEQQHKISKNCPKMPVFKEGWRFYGVDLSEVPGVGGALLATLMSEMGTGEQILKRFASASHLSSWLGLNPDNRISGGKVLTAKTRKVPSRLAHALRLGVFGLQKSETQMGNYVRKMKARLGKAEGIVAGAHKLIRVIYGMIKTRKKYNEAEAFKISPQSSARQRRKLEKQAEKLGLQLVPA

SEQ ID NO: 511228 - protein, 371 aa, unidentified
MEHTRFVGLDIHKERISIAVAESGRSGAVEYLGEISNDPVAIGKLCDRLERRGNALAFCYEAGPCGYGIHRQLTSLGHRCDVVAPSLIPHKSGDRVKTNRRDATMLARLHRAGELTPVWVPDADHEAMRDLIRLRSVVRQIVTRTRQHLQGFLLRHGRKHGRGTAWRMAYRRWLSTLAFGHPAQQIAFQDYTDAVMDAERRLKRVEEQISGLLPEWNLRPVVDALQAMRGIALINAVVLVAEVGDFTRFSKPRQLMAYFGLVPGERSSGETIRRGGITKTGNTHARRALVEGAWAYRMKARIGRHKVDRIEALPKIIRDIGWKAQVRLCTRYRRLRARGKTANVVNVAIAREMVGFIWSIACTVQSTLKTA

SEQ ID NO: 511229 - protein, 374 aa, unidentified
MSRSIIYLGLDVHKDSITIAVLPAGAPAPTRLERLPNDLAKLRRFCERLAVQGELRACYEASGAGYVPHRAMREWGYPCDVIAPSLIPSKPGQQRKHDKHDAAQLARLYRAGELTTVRIPSEAEERVRDLVRCRETLQREVLKSRHYILKFLARRGFVYRDGTNWSTAHYHWLRRLAAVSSSLVAEDQIVFGEYLGLLEYKLSRRDELDRRIAELALTPALAPAVNRLQCFRGVQRHVAMVLTTEIGDWRRFATPRQLMAYLGLVPREHSSGDRERRGSLTKAGNAHCRHVLVQAAWAYRFQPKVGIALKARQRGQSPVVIAHAWKAQHRLHTLYRRLAFRTRPQIAVVAVARELVGFLWAVMQDQDCGSHAAA

SEQ ID NO: 511230 - protein, 332 aa, unidentified
MKKVSTGAGRQAKNFSEQKLTIGLDLGDRSSWYWVLDEAGVILLEQRLSTTPKAMREVFGGMPHSRIALETGMHSPWVSRVLNELGQEVIVAHARNVRLIGESRKKDDRMDAQTLARLARIDPELLCPVKHRSAKAQADLTVIRARAGLVRARTALVNTARGLAKSYGERLRGCNVRNMNPEKAQGLSPELRTALEPLLAGIESLSERIRECNEGIERLAQESYPQVALLKQVKGVGTLIALTFLLTLEDPHRFRKSRDVGCYLGLQPGRRNSGQSEPQMHISKEGDPYLRTLLVQGAHHILGPFGADCDLRRWGLKPRLVAYGYFWLSEGA

SEQ ID NO: 511231 - protein, 342 aa, unidentified
MAIVAGFDVHRAQITFDALDTATGEVVRGRIDATPAAVAGWVARFAGQRIDVAVEACTGWLFVCDALTGAGAVAHLAEPVETRALRGRKRRAKTDREDARWLRELLADGRLPEAWIPPEHVRQWRSRARMRHTLLNERTQWLQRIRATLFHHGVDSTPENLRTDQGRAFLQRLELPPDARERIEIALAMIDAIDAQMAPLERELRQLARRQTGCRALMGLYGMGELTSLVTLCELGDVGRLSASRKAVRMAGIDIGVHRSDRRSRVGKLNRQGSPHLRWALYEAALAACRPSSPDHADYLALKGRGLSHTRASLTIARKLARRSFHVLCQLGPAALEPVPTR

SEQ ID NO: 511232 - protein, 374 aa, unidentified
MENTITYVAMDTHKKQHKIALHYPCQEEIIEFTVNNTVRDIKKMVNKIKKQAPGKVEFCYEAGVCGFTLKRRIEQFDCRCCVIAPSLVPRKPGDRVKTDRRDARKLLMMFKAGLLTEVHAPNEHQEAARELTRLRETAKDNLKRIRHQLLKLLTRHGYVYTEGRHWTQKHIAWLRTIQFAESTLTGVFENYFNEMIYCIGRLENLDKEVGLLAGSQEYKEIVGLLCCFHGIDTLTAITIITEIFEFGRFESPRHLMSYLGLTPSEDSSGEKQRKGAITKAGNKRIRRLLNETSWHYRHRYVPSAALKKRRKGQPQWAIEIADAAGRRLSKRHRYLTNKGKMPCKANIAVARELAGFIWFTVTQYQARKNTNDAA

SEQ ID NO: 511233 - protein, 342 aa, unidentified
MAIAIVGLDLAKHVFQVHAVDETGRAVLRRQLRRAGVEAFFKTLPPCVVGMEACASAHYWARRISALGHEVRLIAPAKVKPYVQRGKKNDANDAAAIVEALMRPHMVFVPIKNEEQQAVLMLHRTRDLLVRQRTMLVNAIRAHLAEFGIVAAQGRRKVKDLITGLDNTEIPELARLALWQIADQIDECDNHIDTLERRILAWHKSDEASCNLATIPGIGPITASAIAATVPNPSAFRNGRQLAAWLGLVPRQHSSGGKDRLSGITKAGNPYIRRLLVIGATSVIRYARSKAPGTAEWLKKLLDRKSARLASVALANKMARIAWSVLTRGEVYRNTYPIPKPT

SEQ ID NO: 511234 - protein, 371 aa, unidentified
MQDTIKYIGLDVSKEKIAVAIAEEGRGEPRYYGMIPHKPEAIRKLVKKLGGPHSLRVCYEAGPTGYPLYRLFLTLDIHCEVIAPSLIPKRPGERIKTDRRDSVRLAQLYRAGELTSIHVPKAEDEALRDLVRAREDAKEDELRAKHRLTKFLLRNNLNPPEGVNKWTKKYREWLNALKFKHSALKVVFQEYYHQLKELEQRLLSFEEEINKQATEGIHAPMIQALQGLRGVALITATSLVAEISSFERFATPKQFMSYVGLIPSEFSSGEKRRQGGITKTGNRHVRRLLVESAWSYRHGPAVKGNLKKRLDGLPPSIQAISWKAQKRLHSRYYRLLSRGKEQGKAITATARELAGFIWAITREVEAMKTSG

SEQ ID NO: 511235 - protein, 444 aa, unidentified
MEDERNWFVGVDWASKTHHVRVSDAKGRKVGERAFAHGGQGLAEMAAWILKSTGATPDAVFVAIEVPHGPVVESLMERGFRVHAINPKQLDRFRDRFSPAGAKDDSRDAEVLADALRTDPHCFRPLAPIDPTVVELREWSRIADDLRAERNRLGNRVRELLWRYYPQFLELTDDIAAGWFLDLWRLIPTPDKAMRVREATVDRLLKRHRIRRLTAAGVLERLKAPAIPAAAGTVNAATAHLEAIAQRLDLVNRQIGEANDRIDHLTERLADGEENAKGQLDEQRDVTILRSLPGVGRIVLATLLAEATDALRRRDYHALRCLSGVAPVTKRSGKSKIVLMRQAAHVRLRNAVYHWARTAVQHDQRSRVKYAALRARGHGPGRALRSIADRLLAVACAMLETTSSIQPPRKGLQPPHDPTLQTVGSPPPLKIRCLRPNTGERTII

SEQ ID NO: 511236 - protein, 411 aa, unidentified
MHERQKHFYVGVDLHKQHHVAVIIDCWHKKLGEIKFENKPSAFSTFLLDIYKYMEDGLTPIFGLEDVGGYGRALAKYLADHDQIVKEVNPALSYAERKSHMTTHKSDSWDAECVAKILVNKLDQLPDAKPQDLFWSIQQLVTRRSALVKAQGALKNQLHIQLSHHYPSYKKFFSEVDGKTALAFWERYPSPPCLEGISVEQLTIFLLEASSNTCSVKKASEILKLFKEDGNTIKEHQETRDFLVKSIVRDISFKKQEMRYVERELKGLMSLLDFQLDTMPGIDLVTASALIAEIGDVRRFPNANKLARFAGIAPVYFGSGGKGKEQKSKQGNRALHALFYNLAVQQVQVAKGSKLPRNPVFHAYYQRKLKEGKTKGQALVCIMRRLVNIIYGMMKYKTAYELPIIKEEEVV

SEQ ID NO: 511237 - protein, 360 aa, unidentified
MSNSIAPDVHTAKVIVGVDTHKLVHVAVAIDLLGARLATISVSADRAGYAVLVAWARALGIVEAFGIEGTGSYGVGLASFVRRQSIKVVEVSHCDRRKRRNNGKSDTIDAETAARSVLSGIATAVPKTADGASEMVRQIKIARDTAVKARSAAMITLKTLIVNAPGELREVLEPLTDRKLIDRCAALEPGDLVDPSESVKHALRALASRWLMLSTEIGTHDEALDTITLAAAPTLREAFGIGPDSAAEMMIVAGDNPQRVRSEAAFAKLCGACPIPASSGVTNRHRLFRGGHRQANAALYRIVIVRMRWHQPTIDYVTRRTTQGLSKKDIIRCLKRYVAREIYNALIADHQARVEFAEAA

SEQ ID NO: 511238 - protein, 343 aa, unidentified
MLNSNVIGIDLAKNVFQVCHISIHGELLSNKAMSRQKLKEFLAMAKPSIVAVEGCASCHYWGRFAEQFSHDVRIINPKKVKGYLEGHKTDANDALAVANAALQIGLKYSKPKTVDQQGLHSLETSRQLLTRSMVSIGQHIRATILEYGVVNAKGEIGLKKSVTSVLDGQSEMPTPLVTTITMMWQQYLNLKSELKQLEKTKNALTRQIEPCRRLMELEGIAETTASMLYVTLGNGDQFKNGRQASAFVGLTPKQHSSGGKTIMLGINKTGGVKDLRSLLYLGAMSYLARLPEVPTTQKQAWLIELVKRIGFKRACIALANKTVRTAWAMLRYETKYQSIPATV

SEQ ID NO: 511239 - protein, 319 aa, unidentified
MKAYIGIDISKPRLDVDWQGKSISFENKKKGITQLITKLKKINEKGELGLAVLEASGGYENCLVKACHENHLPVHVAHANKVRAFAKSKGILAKTDKLDASVLSEYGSLMKVEPDKVLLTENGEKIGVLLGRREQLMNDRQREKNRLDKIDDEVIKTSVESHIKWLSDEIKNMDQQLNEHSQMIDIKPKHDLLISIPAVGGLVANYLIANLPELGLLTHKAIAALVGVAPYNRDSGSFSGKRFIHGGRKELRNVLYMSAIVSVRCNVDMKVFYKRLREAGKPAKVALIAVLRKLLSVINSVIRRQTPWQEKMETTVSLG

SEQ ID NO: 511240 - protein, 361 aa, unidentified
MPAAKPLIPPLKYVVGIDIAKSSFVACFGQVDGHQQLLFGKETTFENTLGGFASLLSWVTRQQAATVPLWFVVEATGVYYEELAYFLADQQQLLSVLLPNKVKHFARSTELKSKTDQLDARLLCRLGLERALPAWQPPTPALRQLRALARERQVLTKQGAQLKARVHAYQHSYQPDSRTLARLAAQQQLVLTQLAALDQDLAELLAAEPELARKLQQLTSIPGIGLTTAVIVVAETSGFALVENERQLASYAGLDVVQRQSGLSSHATRISKRGNTRLRTALYLPALSSLRYNPRQIAFYARLRTRHPSGKPGVIAVMRKLLVLCYSLWKNDQAYNPDYPTAHQSGHEIAPATEVSRGYTG

SEQ ID NO: 511241 - protein, 350 aa, unidentified
MLIIGCDYHPSFQQIAFVDNETGELSERRLVHREEAEQFYGKLKEQGRKVRVGMEASGHGRWFERLLRDLQFELWVGNAAEIRTKRVRKQKTDRQDAQLLLRLMMEDRFPRIWVPDAENRDLRQLLWHRHRLVQMRTRVMNQLHVVALNEGLRRKKALWRPAGRQELESLALAPWASRGRQDLLDLLDQLTPKIQELTRALEEEVERRPVTRRLRSHPGVGPLTALAFELVIGTPERFHCGKQVASYVGLVPSEESSGDRRRLGHISKQGSALLRFLLVEAAQVTVRSQPEWRSRFFHLALRRGRKIAKVAMARKLAVHLYWMWRQGWDYGQFEKLGSHAGEPGNRDGVQ

SEQ ID NO: 511242 - protein, 409 aa, unidentified
MSTAIRDAVFVGLDWATRTHTVCVIDAAARVLDRFEINHDRDGLAELLRRLARFGASLRIAIERPSGLIVDALVEAGHQVVPIHPNAVKASRPRYRSHGAKSDASDAYLLADLLRTDGHRWAALSPQSDSIRALRALVRARDDLVASRLALTNQLNSTLDAFWPGAANIFAAVDSPIALAFLSRYPTPASAARLSEAQLRRFCRSSHYSGHRSSTELLARLRAAPQGHTGELCTAAMADVVRALVAVLERLVEQLAKLTRRIEHFVESLPDGQIIMSFPRAGRVCAAQILAEMGDVRERYPSDERLAAEAGVVPLTYESGKTRCVGFRWACNHRLRRAITTLADNSRHANLWARGIYIAARQRGCDHPHAIRILARAWLRVIWRAWFDRKPYDPALHLGALKAESGSGG

SEQ ID NO: 511243 - protein, 331 aa, unidentified
MQITTIGIDLAKTVFQLHAVDADGATVVRKRLRRAEVLSFVSGLEPCLIGMEACATSHYWARELTKFGHTVKLMPPVYVKPYVKRGKNDATDAEAICEAVSRPNMRFVPVKSADQQAVLMLHRTRALLIRQQTMLANAFRAHLAEFGIVVAQGIRHVRALIERVFGEGAGTIDLPALARIALRPLVAQLMELRLQIKTIEKELLAWHRTSQESRRLETIPGVGFITATAIAATVTDPSHFRSSREFSAWLGLTPRQKSSGGKDRLGRISKMGNGYLRSLIVVGATAMIRYARGKGAGQRSMDQCAAGEETGASRLGCDRQQDGKDRLGASR

SEQ ID NO: 511244 - protein, 407 aa, unidentified
MLFIGDDWAEDHHDVEVQDEQGRVLRRARLSEGMAGITEFGELVGRLLSEDGQAADVLVCTETDRGPWVNALIAAGYRVFSVDPKQAHRHREILSSSGAKSDKGDARGLADMVRTRRHQLREAGGDSEIAEAVKVVARAHQTMIWERTRHMLRLRAALREYFPAILAVCDTVDLSLTSRPLLVLLDKAPTPELAAKLTARQILPMLKGCRNKDVKAAQIQQILREENLGQPPVVTRAYAASVRSSVAVLMVIVEEITHLETEVKAHFGQHPDAEIILSQPGLGPILGARVLAEFGDAPGRYRNSKDRKNYAGTSPITRQSGKMRIVAARYIHNNRLVDALQGQASCAILHDPDVRGYYDQLRARGTKHNAALRQVANRLVGVLHGCLNTRTRYDRNTAWAHRHTAAA

SEQ ID NO: 511245 - protein, 339 aa, unidentified
MEHIAIDLGGRESQICVRSEAGEIIEERKHATRSLRRYLKTRGVSRVVIETCAEAFSVADIAMELGHEVRVVPASLVGSLGIGSRNLKTDKRDARILSEVSCRVDLPSVHIPKQDSRNRKTMCGMREQLIGARTQLINCVRGWLRGQAIRVRTGATASFPTRVRQAANDMPPYVERLLRSVEQLTEEIRLADQELKELVKDDALLQRLCTVPGVGPVTAVRFAAAIDDVDRFKNAHQLESYLGLVPGEKQSSAKQHRLGITKAGSSAVRRVLIQAAWAVRRVRSPQPMMQWALGIEHRRGKFVATVALARKLAGILFALWRDGTTYDARLGAKTLAQPT

SEQ ID NO: 511246 - protein, 297 aa, unidentified
MDHFAGLDVSVKETSICIVDDTGRIVKEVKVASEPEALLKVLVNPAYRFKRIGLEAGPLSQWLFSALAEAELPAVCVETRHMQAVLKAQINKTDRNDARGIAQMIRVGLYRPVHVKTLRSQKLRMLLTHRKLLQSKTIAIENDLRGTLRNFGLKVGMVGKVRFEARIQELVENLPDLAELVEPLLIVRRALREQIVILHRRLLAIVRDDEVCRRLMTTPGVGPVVALTYRATVDVPARFRKSKSVGAVFGLTCSKYQSGEIDRSGSISRCGDEMMRVMLYEAAQSMLRSNPHVSNMP

SEQ ID NO: 511247 - protein, 307 aa, unidentified
MTAVGIDVGKASLDVAIEGRPAVMRVANSTAAIRKLVRKLADLDQARIVVEATGGYEEPLLEACCDAGLWVARVNPRQARNFARAAGDMAKTDAIDARLLCLMAGMFADRLQRYQAPLPWQRELRDWLRRRGQVVTALQAHRQQMAMCPPSIRTLAAKTVAALRRELAAIDRQMQALLDAHATPALGSCKGLGPIFQATSLALLPELGALSRRQIARLVGVAPMNRDSGQSSGVRRIRGGRAPVRVALYMATLSAVRWDETMKAHYKQLRARGKLAKVALVACMRKLLTIVNARRRDELRMEAAVPI

SEQ ID NO: 511248 - protein, 368 aa, unidentified
MSKAEENGRLCVGIDLHKTQFTTCALTEEGECLLEKKYRTIEEGYTEFIQEMHNQEQEGLSIEVAVETTGNARFFKNQMEKEGFLVKVVNTHKFKVITLSTKKTDANDAATLAYYLMKGMLPEAHLCSQTSEEIRRMLKTRSILVQSTVKIKNQIHGMMLGYGIETKAAQFQSKKKRQELINDLADHNYSDYTASSLKVMLKILDDLSAEIKDIEKHLEEMVERNEDVELLMTIPGIGINTATTIAAYTEDLERFEGNYKKFAAYVGIIPSVHNSNESTHYGRITKHGPQELRTAFVQAAMGMIRLTNVTSEWRLLKEYQRRKDEKGSGRAIIALARKITRIVFVMLSKRERFNPDLMRCDEQIQQMA

SEQ ID NO: 511249 - protein, 388 aa, unidentified
MQVIGDRPEAASAIRTNLGAIFVSLELSQSTWLITSLLPGSSEKMSKHVVHGGDIAGLLERFARLQEKARARTGRNFPIIVIHEAGLDGFWIDRALKNEGIESNVVDPASVATSRRRRRAKTDKIDGEALVRTLLAYKRGEPRVCAMVKAPTPEEEDRRRLCRERKVLVTERVKHVNRLKGLLFSQGVCGYEPLRRNRRRRLDELRTGDGRPLPKNLKAQISRELDRLELLLEQIKVVETERDALLAAQQIAAPTSAAMLLAIKGIGPDFAAILWSEGLFRHFDNRRQIASYAGLAPTPWKSGSIDREQGVSKAGNPRLRTTLIQLAWLWLRHQPQSALALWFKERVVRNGGRLKKVTIVALARKLLVALWKYVTAGVVIEGAVMKVA

SEQ ID NO: 511250 - protein, 343 aa, unidentified
MERELYIGVDVSKRWLDLAYYDGVTVDWRQGHIRVDNKESGFLLIGRWLKKIGADKDSVLFCMEYTGLYCQDLRMWLEKEELVYGMVNPRKMHRFEPDLEAGERALDRIKTDEMDSFRIAMYCEKHCRKIRSQPSRLPAPAYFKLKRLIAERRQYVVQSAIYKQQLHDVCDYDTDGSVCRKKEELKSLMSHVHQTDAEILSVMEEDAAIKKSYDLLRSVTGIGIVVATETIILTENFTSITNPRTYACYIGIAPAKKESGDSVRGGEHVSRKGFTQAKADLSMACLKAIQTDANIKSYWQRRKTEGKKGGVVLNAIKFKLVLRMFAVIKRQKPYVEIDGYKKN

SEQ ID NO: 511251 - protein, 353 aa, unidentified
MANPMANLTIGVDLGDRYSELYVVDAAGACVETGRIRTTVAGLEQWFGGRPPARVVLEAGTHSPWASRVLQRLGHEVLVANPRKLRGLYENDSKADRVDAEYLARVGRLDPALLKPITHRGEAAQADLAVLSSRDVLVRARTLLINHTRGVVKALGGRLPRCSAEAVARRVGPHVPPALRPALAPVLEQLQQLTTTIRGFDRAVEQRCAQSYPETARLRQVTGVGPVTALAYVVVLDDPTRFRRSRAVGAYLGLRPRRSQSGEQDPQLRITKAGHPFLRRLVVQAAHYILGPHGPDCDLRRHGERIAARGGKNAKKRAVIAVARKLAVLLHVLWIRGEVYEPLRQRLVLAQAS

SEQ ID NO: 511252 - protein, 336 aa, unidentified
MTIIRIGLDTSKHVFQIHGVDENEKPVLRRQLRRSEVEKFFAQLPPTRIGIEACGASHHWARLLRGLGHAVLLMPPQYIKGYVKRGKNDAIDAEAICEAMSRPTMRFVPVKTAEQQAALTMLGVRDLLIKQRTMLINALRGHAAEFGVAVAKGPNKIVELLQRLATGEGVPALAREMLGMLASQLEAVNGKLKAIEARLMAWHRQDQTSQCLATIPGVGPIAGVSFALKIPDARAFRSARHFAAWIGITPRENSTAGKHRPGKISHQGDESLRRLLVLGATAVIQRAKRGRVSPWLLGLLARKPKKLAAVALANKMARVIWAMMISGEVYRRPQEA

SEQ ID NO: 511253 - protein, 340 aa, unidentified
MPVIRIGLDVAKNVFQAHGVDEQGTVVLRKQLRRREVLSFFASLPPCLIGIEACSASHYWARELTALGHQVRMMPARYVKPYVQRGKSDALDAAAICEAVSRPTMRFAAIKSVEQQSALTLHRAREILVKQETMLANLIRGCLGEFGIVAPLGIRRMAELVGIIRDEADSRIPPHARIAMTAVADQLGDLQRRIKEIEQAIRAWHRNNDASRRLATIPGVGVITASAIAATVATPTEFKSARHFAAFLGLTPKQHSTGGRQRLGRISKQGDGYIRRLLILGGTALVRYARGAGGTAWAKQLLARRPARVVTVALANKAARIIWALLVRGGVYRSAAPQAA

SEQ ID NO: 511254 - protein, 361 aa, unidentified
MFIERTSVGLDVHARSIVACGLDTVTGQVVRRRLVASAEAVLEWVRVLPSPVAVAYEAGPTGFGLARQLTTAGVRCVVAAPSKLQRPPADRIKTDARDALLLARLLRMDQIVEVRVPSIEQEAARDLVRAREDVRGDLMRCRHRLSKLLLRHGIVYSGGQPWTGVHETWLRRQRFTQRSVQLALDTELEAMLLTLDRRDRLDTAIIELAVDGEYTALVRRLGCLRGVSILTAFGLAVEIGDWHRFTGATIGAYLGLVPTESSSGQHRAQGSITKAGNTHARRLLVEAAWHHRRHYRTPGATMRARWKLASSTAQARGHAGNHRLHQRWQTFIARKKRTVIANVAVARELAGWCWSLAVLDD

SEQ ID NO: 511255 - protein, 404 aa, unidentified
MYSIGIDAAKGKSTVCILSETGEVILPPKDYKHDSEGLSSLYETIEKLTKGKESRAVMEATGIYHWPIFLFLKEKGFFVSIINPLKMKSFVKDHNFRGVKTDKHDSKLIALYGCERWYSLADHRIEDDVYEKLRRLSRSYSSFQKPKIHLKQALDAQLEKSMPGIKEVFFDDMKLYDFVLRYVHFEKIRKLSKKKFMDNFDLWAKKKGYRFVSSTPAKIYELALTAIPTVPSDDSAKLIQESLISSLKSIEEGINTILARINELASSLPEYEILRKIPGAGEVLTPLLIAEIGDIRNYHDKKSLVSTAGIDVPPYESGKLHGSKRVITKKGNGHLRRHLYLLVKLIYMSRSQSDPAIHDFMMRKSAEGKLYKQVLVAGMRKFLHIYYARVKEEYKRRGIWKIER

SEQ ID NO: 511256 - protein, 413 aa, unidentified
MDVVHPRCAGIDISKRDAKVCVRIQGHDNRRTTSTVTTWGAMTNQILALREHLVEQKVTCVVMEATGAYWKPFFYLLEEAVPVMLVNARDARNMPGRKTDVSDSAWLADLGAHGLLRGSLVPPEPIRQLRDLTRARTAITRDRARQVQRIEKILEDAGIKLSSVATDIMGVSGRAMLQALIDGRDDPAVMADLAKRRMRSKIPALTEALTGRFTPHHGFLIGMHLNLIDEYANSLAELDARIEETMKPFRAARELLVSIPGISTTVAEVFIAETGADMSVFPTAGHLASWAGTAPGSNESAGRVKSTKTRPGNRYLKNALGIAALAASRSENTYFSAKYKRIATRRGPMKALVAVEHAMLVAAWNMLTNGDFYRDPGADYFTRRIPAKTKARAIGQLESLGYRVTLEPLADTA

SEQ ID NO: 511257 - protein, 341 aa, unidentified
MNVKTIGIDLAKNVFQIHGVDEHGKRLFNKQLRRAQMASFFDNIPPCLIGMEACASAHFWANKLISMGHNVKLMAPQFVKPYVKTNKHDAADAEAICEAVTRPNMRFVPVKTAEQQAVLALHRSRQSFIKQRTAQANQIRGLLAEFGIVVPRGIQQLQRRLPELVEDADNPLPVLFRTQLSLLQHHMAYLFDVIATLDKQIEQCYRQNALCQRIGKIPGIGPVTASALIATIGKANNFENGRQLAAWLGLVPRQHSSGGKQVLLGISKRGDTYLRTLLIHGARAVLQSAKHKQDAVSSWANQLMARRNNNIASVALANKNARTVWALLAKEREYCAPIISA

SEQ ID NO: 511258 - protein, 437 aa, unidentified
MEEAQDEPLFCECAAGIDIGKQMVSVTIRVPSDTRKGGRQQETREFGTTRRQLLEMADWLRCWGVERAGMEATSDYWKPVYFLLEQQGLDLLLYQASQVKALPGRPKTDKLDSVWLAKVTERGSLAGSFVPPEDIRRLRTHTRYRRKLTQARTAEKQRAEKLLEDAHLKLSSVISDIHGVSGRAMLTAIIAGERNPRALAALARGVMRRKLALLEEALDCSFFTPEHAFVLQMMLDNIDHYTAQIAVLDARIAVLCEPYERQIAQLDAIPGFGVTTAQELIAEIGVDMSVFPTAGHLCSWARVAPRAKESGGRRKGKSATGRGNPYIGAALGEASSSAGRTQTFLGAKLRRLCRHMPKKKAQGAVMRTQLAIAHALLSDPAAEYRELGPGYYDQQAGTRRQARGHVRSLERLGYEVTLKPRAGADPETGEIITSAAG

SEQ ID NO: 511259 - protein, 355 aa, unidentified
MNSEKYIGLDVHQATISVAVLDSTGKLVMESILETKAATILDFFAGLRGTLSVTLEEGTWAAWLYDLLKSHVAKLVVCNPRKNALLKDGNKSDRIDARKLAELLYLNKLSSVYHGETGVRMLRELARSYLTIVKDLTRVMCRLKAVYRSWAIPCAGRDVYYTRHRAEWLGKIKEAGVRRRAERLYQQLDMLQYLRQQARRELLAESRKHAITVKLRQIPSLGPIRSALAVALIQTPHRFRTKRQLWAYSGLALETRTSAEYCYVKGGLRRSKKQISIRGLNKDHNHDLKGLFKGAATRASVLPGPFQDFYQRSLAKGIKPTMARLTLARKIAAITLTLWKKGENFDADKLKSQAA

SEQ ID NO: 511260 - protein, 457 aa, unidentified
MNPKRSKPKNDRTMPMIHPNAAAIDIGATMHTAAVRADRTPEPVRSFGTFTTDLHRLVDWFAECGVETVVMESTSVYWIPIFELLDARGFAVFVVNARDAKHVPGRKTDVSDAQWLQRLHSYGLLRASFRPKGQIAELRAYVRQRERLLEYAASHIQHMQKALTEMNLQLHHVVADVTGATGLRIIRAILAGERDSKVLARLRDYRCHSSAEAIEKALTGNYRAEHLFALEQALALYNVYQDKASACDARIEAVLKELSISRGRDACPLPSPRRRLHGKANGPDFDVRAALFKLLGKDLTQIDGLGSYLSLKLIAECGDDLTAWPSAKHFTSWLCLAPSNKISGGKVLSSRTRRSGSRASALLRLAAVTVGRTDTALGAFYRRLSARIGKAKAITATARKIAVLFYNAVRHGMEYVDPGSSYYETRYRTRVVENLHRRAKAFGFVLLPLESKAGAVS

SEQ ID NO: 511261 - protein, 343 aa, unidentified
MESIYYIGLDVHKKSIAYCIKTVTGGIVCQGMVKAQRRALRKWLVDLPGSWAGAMEATMFTGWIYDFLKPYAVELKVAHPAMLKAITSAKKKNDRADAEKLTDLLRVNLLPECIMMSEELRELRRILRYRNMIVRTASKMKNKISGLLMEVGAVYDKRKLHGKRYFGQLLERVEDVPDSVKDLLKLSRSNLELFVAIQKKLLKVLREDSLISKRVELLQSISGVGEIMALTWVLEIGDPGRFSNSRQAISYCGLCSAQRESAGKEHRGPISKQRNKYLQSMLIEAANIAPQWNPQLAMLKEKELTRGNGNRATLAVARKLVKYMLAVDRRGEPFIAEKESLVA

SEQ ID NO: 511262 - protein, 339 aa, unidentified
MNSMAVGVDIAKNVFQVHYVDQGSGEIVNKPIKRAKFLEHFANRARCLIGMEACGGAHHWARELTRLGHEVRLMPAEFVKAFNIRNKNDAADARAIWLAVQQPGKPVAVKTEMQQAMLALHRMREQLVKFRTMQSNGLRGLLTEYGEVMSRGRAKLDKAIPAALDRLAERLPAALIDTLREQWSGLARLDGQIAEIERRMREWKKEDEAVAAISEIPGVGLLTATAAVAMMGDPKAFSSGREFAAWAGLVPKQTGAGGKVNLHGISRRGDTYLRTLLIHGARSVLSHAKEPGPWVEQMKKRRPANVVIMALANKMARTIWAVLAHDRPYRKDYVSVKPA

SEQ ID NO: 511263 - protein, 499 aa, unidentified
MRHSGWEACDDPSGGLVLKREPRLEYSILSERASSLSILLTTKCFKMKEQNQISMDIVNPKAAGIDIGSRSHFVAVGQKEEHVREFGVYNEDLKAISNWLEENGIQSVAMESTGTYWQALYAVLLNDGFQVILCNGKFTKNIKGRKTDVQDCQWIQKLHSIGLLSGSFLPDLQTEQLRTYCRHRASLIDVAADTSKKMQKYLRLLNLRLDVIVKDICGLTGLKIIEAVCNGETSPEKLAELRNGNCKKSEQEMAKALQTNGRKDYLFGLNQEFKMYKNLQSQIKECDLEIEKLLHEQIDNDHNKKQHYTDPKIHKRVNKNTPKNIDINLRGYQYFEGVDLLKIEGFSHQTLLTLMSEVGLEGIKKFSTAKQFASWLRLTPNNKISGGKVLSSRIPKGSNRLKIALRNAANAIGNLKESTPLRDFFHRINFRKGRVSAISATARKLGVIIWNMVVKNIPYHNPKEYLYLDEKRKLAVQKRLQKQVENYQFSANDFNFTTT

SEQ ID NO: 511264 - protein, 344 aa, unidentified
MKKNLFFIGLDIAGADFAASIYKTPGESIITKEAIPNDRKGFKMLLLWLSDHHINKKNCRICMEATGVYSQAIAYYLLFQGFPVSVEPPLKVKRAFDPVGHKTDPVDSKQIAEYAYRFQDELTSWKPRDEILEKIRQLLSIREQFTKQKVALDNSIQAYNKQRVQVALIKKAQKETLNQLKKQIARIDKELEKLIKQDPQIFQRASNLDSIPGCGMLLAAHLLVITENFTKIQNSKRLASFVGIVPYQHQSGTSVYKRAKIRHFGPGPSRKLLRLAAQSVATHNATFRRYYLRKLDQGKPKPLVLNNIANKLLKIACTIIRNNTRYIKDYRSINPMYLKSLKSA

SEQ ID NO: 511265 - protein, 341 aa, unidentified
MLFSGIDLHKRSLVIHTLDADGTTTREAQLKSDRGAVLAYFGTLGGPHRAVVECVQSWYWLRDLLAPSGIDLRLAHAKYVKAISYAKVKTDRVDARMLAQLLRAGLVPEAHMIGAEHRETRDLLRSRLQLVTRAVRCRHAVGSLLEKYNVPTPDELPELARMQAALQEEQRTLIRTHVRRVEAVLKERLLPTPDVQRLVWVPGIGKLSAYALVLEIDTIARFPTVRHFHSYCRLVPGADNSAGKVRHKRSRDGNRYLKQVFHTAAIRAAQYHPAIRQEYRRLARRKGKIVARALIAKELASIVYWVLRKQEAFNGKFRRHVLTPKPAQWPRLASPESLTDA

SEQ ID NO: 511266 - protein, 366 aa, unidentified
MKKNSTMTTSRKQIFKGKKPTIGMDLGDRFTYYCILDEAGEVVVEQKVATTKQAIQQVFSKIPRSRIALETGAHSPWVSRLLTALGHEVIVAHARNVRLIGESSRKDDRLDARKLAQLARLDPRLLSPVQHRSAEAQIHLTVIRARAALVGARTALVNAARGLAKSYGERLRKCGTQQVSKNLAAGLSTELRTALEPLLAEVASLNQRIAEYDRRIEHIATEVHPEVALLKQVKGVGTLIALTYVLTVADPHRFRRSRDVGCYLGLRPGRRNSGSSQPQLHISKEGDRYLRTLMVQGAHYILGPFGQDSDLRRWGLKLCERGGSNAKKRAVVAVARKLSVLLHKLWVNGEVYEPLRNHPTTTSAAA

SEQ ID NO: 511267 - protein, 425 aa, unidentified
MKIQTIHSKTISDNKLVVAFDVGKDKLNAYCEYGQHCFQDSFANNTLKIEQKLITFSGIAESTGYEGLRIIAEPTGIYHLKLFRTARRLGHHTAIVNPESVHKFKVVENNDAGKTDAKDPRVINLLAKYGKTLVDRNLRDEYLMLRQLNAMIIDEEKAYTSTRCKIHRVLAELFCDYSFKKDFLYTNTGRIFMEKYHANPYRVVQKGYSAFWQRLKRAAPRIRDITIQRLWQDAQCSVRNQLPADYVQILESRLNYLWEELLLREYRMAEIEDAMISVTNELRLKDPKIPAPVKGVVTAFRIAQLLAETGPLSDFKSIDQLMRYAGLNIRERQSGYYRGNNKISKKGRSNLRRVLGYIVLPIVKKKSLYGRVYHAKKDLGMVGNKAMVVMMRKFLRMFYGWYKSGLPFDENRVFNDDVNYVQITK

SEQ ID NO: 511268 - protein, 354 aa, unidentified
MIIIGADYHPGFQQIAFVDTDSGEFQERRLQHREEAEKFYRDLAAQGMQVRVGMEASGQARWFERLLSELHFELWIGDAADIRTRRVRKQKTDRQDAQLILQLMLEDRFPKIWVPSWENRDLRQLLWHRHRMVQARTRIMNQLQAVALNEGLRCKKRLWRKHGREQLEAFRLAPWASRRRRDLLELLDRLNPTIAELSQAIEQEAKKFPEARCLMTHPGVGALTALAFVLIIGRADRFQCGKQIASYLGLVPLEDSSGNRRRLGHITKQGSSTLRFLLVEAAQVTARSIPEWRSKYFHLAMRRGRKIAKVAMARRLAIALYWMWRKGWDYERVKKFGSHAGQLEPGHGVQSNTE

SEQ ID NO: 511269 - protein, 420 aa, unidentified
MNHPKMSYTYVGIDSHKDTHTAVFLDCFFEKLGEIKFDNLPSKFPMFLTEAEKFRMKGTAFLFGLEDTSMYGRSLAVFLTDNGQQVKHVNAMLVARERKNQTITQKTDSIDAQCAARVLLSKFSELPDADPDDRHWILKTIVMRRAFIIKNNSSLKNHLHSILTQHYPHYRTLFPTMDSNVSLAFFMRYPSPSTLVGTTVEELADFFRAASLGKFGFGRTPAERAGMILDTIEDTTVPLQEIRDEAVRSTIRQIQFNLAEIKQLEATLAKVLAGFNTTLTSMNGMDTVSAAQMLSCIGDIKRFSTPAKLARYAGIAPVTYASGKKDKQFSNQRGNRELNSIFHMLAIRHIAVVRNSHEIKNPFFYEYFHRKVSEGKTKRQALKCVERRLVNIIWSMLTHGKEYINPPMIDNPEKNEKRIL

SEQ ID NO: 511270 - protein, 400 aa, unidentified
MTDRSARIWVGIDAGKAHHWAVAINGDGQMTLSLKVANDETEILELIATVCEAADEVSWAVDISGRASTLLLTMLIGHGQSVVYIPGRTVNRMSAAYRGEGKTDAKDALVIADTARLRRDFATLSLPDEQVATLQLLTAHRADLVADRVRLINRMRDTLVGISPALERAFDYSASKGAVTMLTEYQTPAALRRLGANRLAAWLRRRAVRKAGDVADRAVEAARSQATVLPGEDRAARQVGVIARQLLDVDEQIKETEREICEVFRTDERAAVIESMPGMGPILGAEFVAIVGDLSGYADAGRLASHAGLAPVPRDSGRRTGNFQRPKRYHRRLRHIFYLSAQTAMMRPGQSREYYLRKRAEGQTHVQAVLALARRRVGVLWAMLRDGRLYDSGPSVAQVA

SEQ ID NO: 511271 - protein, 348 aa, unidentified
MQGRGTRGLAYHQGGRGLKRFNRVGVDVSSKELVVAIEASGRREAPIVLANDAEGHRKLIKLTTKRGASARVVLESTGTYGLDLALALHRAKRIDVMVANPRAIAHFARASLQRSKTDRLDAETILEFATRMPFESWSPPAPQILELRALSRRIEALSKTVVQEKNRLHANDQSEELSEFVKQDIRELAGLLERRIERLRQQALLVIEQSEDLARAFAHITSIKGIADASGIAILAELAVLPADMTTRQWVAHAGLDPRQHQSGTSIHKPARISKTGNAHIRRALFMPALVAVQWEPNIKAFYEHLLASRKTKMQANVAVMRKLLHAIHGMLQHDQHFVGEKFFRMKT

SEQ ID NO: 511272 - protein, 352 aa, unidentified
MEHIAIDLGSRESQICVRDVAGAIVEERRVPTARLGSHLSRRKPGRVIVETCAEAFEIADRARACGHEVRVVPATLVKSLGVGARGIKTDQRDARTLSEVSTRVDLPSVHVPSLQARDRKALCNSRLTLLTSRTTMTNYVRGYLRRHAITLGPRSPSRFVDRAREALQAHPLGLPSHVERVLVVIEALNSQIESADAELTEMAEGDELCQRLMTVPGVGPVVAMRFVAAIDEHQRFHSSHDLMSYLGITPGENSSSQRKRRTGITKAGAAEVRAVLVQGAWSAMRSKVKDPMMCWALRIAERRNKQVAAVALARKMAGILYALWKNGTRYEPRRAALLPQDATVTTEANTHA

SEQ ID NO: 511273 - protein, 463 aa, unidentified
MGECGFYPWIPNDSEVNRPMAKHTPVPVETEVSSFDVSFRQTRGSLREQEKQRRKLARVQGRTLLVGLDLAQEKQAISFVYKGRHLGRKRMDCAPQRLGEALGPYIRQLCEAEGLDRAVIGIEPASYFWELAAESFEAAGLDCVILHTLSVKRERETVRYTPEKTDPRDADLACSLMERGQFTDARLPRCEKRAAMAALAREYLMLRARSASELARLKSFWGRVLPELGELLKEPGGITGLAISRAMLPFSELVQLREEEWLARVRAHAGGRVMARVSAGVLQRVSEAHAAAHRRSGEGVPRRIRLCAERRAMLERQKHDVSEALLALYDGFPESVLMDSVPGSNRLYSALTLGLAGDLSDYDCGRALVKQAGSEVNEYASGEWRGRSRISHRGRAGLRTAAYQQAKMLVRTTEGFRERFVRLSGRLTPKQAYVAVANAWLRLVHTLVTTGQPWRADAGERGT

SEQ ID NO: 511274 - protein, 466 aa, unidentified
MENNYILYVGMDSSKGKADAAILKVSDRRSVKPKFLRKKLSFKFVKSEVTSFLETVRSYSDDNCTSICFALEVTGIYSTNVYNFIKDNLNDNESIKFLNTDFVNQWRNAHNIAKSDPLDAQTISTIIGTDSDVQYVNDNVFENKNGYQDLKALVHRHYQIKKIYSQEINRLIAQCDCLFPELQYVFEPKSAAFIAVLSSYPTTHDIINASRLEVFNVVYEATKHRCSMDKIDKLFDLCHDTLVPDNISSYGRSIILDLVENIKNIKGQLKMIERYIRDVASLNPVYKLLLTITGCGPLTAATVIAETGDIKRFKNADCFVSYSGTSPRNKRSGTSVETMGKISKKGSRYLRHAIYMIAEFARRHNPVLKHQFERIKNGNKKRHKLANIAIANKIARYIYSIMKNESSFVILHEHIMRLPEETQNTFFNSISLDFPENTRKQIYQYSDIDGEVHKFVYTKLEETMII

SEQ ID NO: 511275 - protein, 348 aa, unidentified
MNATPKSVVGVDTAKSVFQLYTLDKETGEVINQQIKRAQFLQWFANRVPCLVGMEACGGSQHWARKLRELGHEVKLMSGKMVKAFVCGNKNDAADARAIYMAAQQPEVKAVAVKSEGQQAVLAMHRIRQQLVRVRTAQINELRGLLGEYGEVFGTGRKAFDTGMKAALERLAERLPVPLIDTLRDQWNELARLDERIARIEASLLAWMRQDRAAKAIFAIPGVGLLTATAAVATMGDAKAFRSGREFAAWIGLIPGQTGSGGKVRMLGMSKRGDTYLRTLLIHGARAVLRHAKEPGPWLKQLSQRRPPNVVIVALANKIARTIWAVLAHERAYHKDHVSVRPLAAAPA

SEQ ID NO: 511276 - protein, 410 aa, unidentified
MQRMFRVCAGIDVHKKMLTVCRLRVEWGAEVAKEIRTFGTTTRELLALLDWLVAEGCESVALESTGVYWKPVFNLLEAAVPVVLVNAQHIKALPGRKTDVQDCEWIAELHLHGLVRASFIPPREIRELRDLVRTRTKLIAERSQHANRIQKVLEDANLKLSSVASDVVGASGRAMLDRLIAGQTDPQTLADLARGRLRSKRPQLREALTGRVRPHHRLLLRTHLTLMDQLDAAIAALTEEIEERMRPFAEIRERLDAVTGIGREVATVYLSEMGADVSAWPSYQHAASWAGLCPGHHESAGRHRSGRTRKGNRWIRKAFVQAALCTQRAHGTYMQAHYRRLRARRGPKKAAVAVAHSLFVRCFVLVETGQQYRELGANYFDEHRQEAIAKRLVGRLKELGYEVSVTTNAA

SEQ ID NO: 511277 - protein, 351 aa, unidentified
MKTTGKAVPVTIGLDIAKNFFQVHAVDAAGQVVLRRKLGRGEVLRFFEAQPKTLVGIEACGTGHHWAREIAALGHEVKLLPPTYVKAYVKRGKTDAADAEAICEAVTRPNMHFVPIKTPEQQAALMMHRARELLVGQRTALVNALRGHLAELGIVTAKGIHRVSDLVAELVGMEDTKIPPLARASLRCLAAQIEAVEAQIEELEALIIEWHKGNAASQRLARIPGVGPITASAVVAAIGDASNFTSARHLSSALGLTPRQNSSGGKARQGGISKAGDTYLRRLLFIGAIAVIRSKRPQEAGSWLARLLERRPAKVVAIAIANKTARVIWAMLRRGEAYRAPTTPIAAAAAA

SEQ ID NO: 511278 - protein, 318 aa, unidentified
MPALTIGLDIAKNVFQAHCIDRHENVVMQRKLRRAEVLKFFAKLEPSLVGIEACHGSHFWARELTVLGHTVRLLPTQYVKPFLVGGKNDANDAAAICAAVTRRDIHFVTIKSAEQQSLQSVHRMRERLIQERTAKSNQIRSMFAEEGIIFPTGLAQLRKGIVALVSENETETGITPLLRRLGSMYLDQMKVLQQWLDEINSEIAAIFKKNEACQRLATIPGIGPVIATALVSCVGDPSQFRNGRQFAAWLGLTPKQRSSGGKTRLGGITKRGDTYLRTLLVQGSRAVIHFVNRREDSHSLWIRRLMQRRHVSIAVSRQ

SEQ ID NO: 511279 - protein, 339 aa, unidentified
MKYTPVGVDIAKHLIQVHFINEHTGEVVDKQLRSRDFLTFFSNREPCLIGMEACGGSQHWARELTKLGHKVRLLQARFVKAFVMGNKNDVMDARAIWMAVQQPGKEIAVKTEEQQSVLVLHRTRRQLVKFRTAQINSLHGTLLEFGESIHKGRAAMGRELPEALERMKERLPPYLITVLENQYNRLSELDSLIDDIEKQLTSVARQNETCKRLLGIPGIGPLIATAAVATMGEASAFKSGREFAAYVGLVPKQTGSGGKIRLLGISKRGDTYLRTLFIHGARAAALLTREPSPWITELKKRRPASVAIVAMANKLARTVWAIAAYGRKYDKNHVSIRPY

SEQ ID NO: 511280 - protein, 349 aa, unidentified
MAEKFNSVITVIGIDIGKNSFHVVGLDERGAIVLRQKWSRGQVEARFANMPACLIGMEACVGAHHLSRRLRALGHDARLMPAKYVRPYSKGQKNDFRDAEAIAEAVQRPTMKFVATKSAEQLDFQALHRVRERLVSQRTGIINQIRAFLLERGIAVRQGLRFLRAELPRILAAPRDVLSPRMVHVIEGLAGDWRRLDERIEGLSSEIEALARRDVSCERLMSVPGIGPIISSAMVAAIGGGDAFTKGRDFAAWLGLVPKQISTGDRTILGKISKRGNRYLRVLFVQAAWAVLIRPKSWDRHGLKSWLEAAKKRLHHNVLAIALANKLARIAWSVLAHGRAFEAIRIQAA

SEQ ID NO: 511281 - protein, 462 aa, unidentified
MKHKAKSQAMHSGFAVVNPNAAAIDIGATMHVAAVGADRASDPVRSFGTFTADLHRLADWFAECGVKTVVMESTSVYWIPIFELLDERGFEVILVNARDAKHVPGRKTDVSDAQWLQRLHSYGLLRASFRPKGEIVELRAYLRQRERLLDTAASHIQHMQKAMTEMNLQLHHVVSDITGATGMRIIRAIIAGERDPAVLASMRDTRCHSSAEVIEKALTGHYRGEHLFVLEQALALYDVYQQKVAACDIRIESVLKELSSIRGRKEDARADGSGSPRRRSRQSNGPDFDVGKALHSLLGKDLTRIHGMGPYLALKLVSECGDDLSAWPSAKHFTSWLCLAPSNKISGGKVLSSRTRRSGSRAASLLRLAAVTIGRSDTALGAFYRRLSARAGKSKAVTATARKIATLFYNALRHGMDYIDPGASYYETRYRERVVKNLHRRAKAFGFILQAAEIPVAEQAVS

SEQ ID NO: 511282 - protein, 315 aa, unidentified
MGQSVSFPVHFVGCDVGKAEIVVFDQSTGKTTTLANQPDILAGFADSLDETSLVVCEATGGYEAALLSALVTAGRAVHRADARKVKAFIRSFGTLGKTDRLDAQALARYGCERHQDLTRWTPPAVAQSRLQALVLLRRDLVADHTAWNNRSQAPNAEHAQHVHAAMIAALQTQIQTVDQQIKAVINASSTLKTLEKTLRLVAGIGPAVSAGLIALMPELGTLNRREVASLAGLAPHPQQSGQSHGYRSTRGGRPEVRRLLFMAAMAASRSKSELAAFYKRLVANGKKPIVALTALMRKIIVIANAKIRDQRTQLS

SEQ ID NO: 511283 - protein, 355 aa, unidentified
MNDAKYIGLDVHQATISVAVLDFAGKLVMEAILETKAETILQFIRGLRGSLHVTFEEGTCAAWLHDLLKPHVAQVLVCDPRKNTLGIVGNKNDRNDARELAELLYRNKLKPVYHGKHGVRTLKELARSYLTITRDLTRVMSRLKALYRSWAIPCAGQQVYAPRYRAEWLGKIAEPGVRRRAEFYYQQFDALATLRQQARRELLHESQKHFAVKLLRQIPSIGPIRAALLVALIQTPHRFRTKRQFWSYIGLALKTYGSGEYRFVGGQLQRSKKALAIRGLNLNHNHDLKNLFKSAATWAAASSGPFQNFYEARLAQGMKPSTARLTLARKIAAITLLVWKKGVCFDAEHLKQQAA

SEQ ID NO: 511284 - protein, 396 aa, unidentified
MDRAWAGVDIGKQHHHAVVVDDQGSRVLSQRVANDQAALVELIGRVTALAGVVTWAVDLHSSEAALLVALLLAHDQTVAYVPGVMVNRAASAYRGAGKTDAKDAYVIADQARMRRDLQVLGADDELIVELRLLVARRQDLRADRTRAVNRLHDRLVAVCPALERVLDLGNRGALVLLTGFQTPAALRAQGVAGLEAWLRSRKVRGAGKLAAAAVGGANAQTISLPGEQLAARLIADLAEGVLALDEQIKDVDELIEGRFRRHPAAEVICSLPGMGVLLGAEFLAATGGDMTAFGTPDRLASLAGVAPVPRDSGRVVGNLHRPQRYHRGLQRVFYTSALISIRCCAESRAFYDRKRAEGKRHTQAVLALARRRVNVLWALLRDGRHYALTPPESRAA

SEQ ID NO: 511285 - protein, 498 aa, unidentified
MKKTVYPLRSQVVERIFSGENRFDKILIVPLDHAKRNHTVQFCFATGEYILKRAITVYNDSAGALFLTDRIAKISRNYHLKRENVIICCEDPPEYMVNFIYTLRLSGYNFVSVNAAEAAKYRSNSRASSDALDLNGITQAVINRRAMDIRPVDELYTNLKAAGRNRRRLVMNETALKNRIHKCVDILFPGFLNEKNTGITSFSATCLWLMEKNFSVIKIRRMPAKTLMAGLKRFHISRPEIVFETLKKYSNNVLVPPPELITYYQKSLAVKIKLFRSIKETTYFEENEAVRFLVQTPGFYVLSIPGIGVKYAMHIIGEYGNPCFWKDTDRMASFGGIVSRQKQTGGAENKEPHNQHLPKNCNRILKDYLLQAAQHTGKTLHPFRKISETFKGEHTLQEHFQHVENHEGKSRLRNAKYLIKIIRCLVKEQRFYYPGKHWLAEDFVPVSDEHIQLFSCTIESIRGKLKGYDLSGIKEENNYFFREEEALNALIELRKNNC

SEQ ID NO: 511286 - protein, 343 aa, unidentified
MHITSIGIDLGKTTFHLVAMGERNKILVRKKFSRAGLLAYTANLPVSLIGLEACAGAHFLGAALREQGHQVRLIPAQFVKPYRKSNKNDFLDAEAIAEAVTKQNMRFAQIKTQEQLDIQAMHRVRDRLVQRRTALINEMRGFLLERGITFAARPIHLYKNLLAVIEDAEQNLSPRMRWLLQRLWQEWKQLDADIKTITDELERLSKEDPLCRRLRQIPGFGPLVSTATVAAIGNGAAFRRGRDFAAWVGVVPRQYSTGGKQKLFGISKRGNVYLRRMLIHGARAVLLRIKYDTAGFGQWVHRLEARAPRNKVIVAIANKLARIAWAVLSSGNEYRHQPLHSAA

SEQ ID NO: 511287 - protein, 392 aa, unidentified
MVVSVGIDVSKDKHDCFIVISDGEVLADVFTISNTLDGFHGLLQRIQECSAPQDKIRVGLEATGHYSYNLLGFLLDNGLPTYVLNPLRTNLYRKSLSLRKTKTDRVDARTIASMLLSDAGLKPYTNTAYHNEELKSLTRYRFDKVKERAKLKSSISRLVCILFPELEKLVPSLHIASVYALLAEFPGAKQIAAAHLTRLKALLETASKGHYKRDMALEIRDAARNSIGSWMPAKSLELQHTIRLIRELDDEIVEIEEQIQAIMDELHSPITTIPGLGFRMAAMIFAEVGDFNRFDSPDKLLAYAGMSPSTYQSGQLKNCYPHMEKRGSRYLRYALYNATKYVCHWDPTFAAYLAKKRAEGKHYNVALSHAAKKLVRLIFAMEKSRRPYCLAA

SEQ ID NO: 511288 - protein, 362 aa, unidentified
MTNFIFAGCDLHEETLVNRIAIGQQPSERKTVGNSRAGREKLIAGLKRESDKHGGARIIFGYEASGQGFGLHDQMVEAGIECYVLAPTKMESSVKQKRNKNDDRDAERILKRLRAHKLAGEELPSVWVPDPQTRDDRETVRARQDLGDKLSSVKVQVRSLLQRHGIEKPTGVGKPRTKSHQQWLEQLSCDSQQGIGVRTALGSLLRQVRHLEQEIQQLDEAVDQLSRKPHRQAVVDALDQETGIGRLTATAYAVEVADFTRFRRGRQIGAYWGMTPSSDESGEVNDRKGHITRQGSPRIRKLLCQATWYRVQKDPQVRAIYQRLVIRNPKKKKIAVVACMRRLAVRLWHIGRQAQLAMKEAK

SEQ ID NO: 511289 - protein, 412 aa, unidentified
MDVLHTHCAGLDVHKQTVVAAVRVPEPKKKRGWQVITQTFGTMTADLLALSDWLLTQGVTHAAMESTGEYWKPVYNILEANFELLLVNPHHIKAVPGRKTDVSDAEWIAELLQYGLLRASFVPPRGQRALRELTRARTTFVRERATLVNRVQKVLESANLKLGDVARDVLGVSGRAMLDAVIEGHTGPEQMAGLARGRLRNKHDQLVKALEGRVEAQHRFILTELLGQIDHLDAALARFDTQILDACAPFEHAVALWDTIPGVARTAAEIIVSEIGTDMSRFQSAEALSAWAGVAPGNNESAGRQRSGRTRQGNAALKTILVQAAHGAIHTKGTYLGAQYHRIAARRGRKRAIMAVAHSILVIGYHLVQRDEPYRELGADYFDRRNPETTAHRLVRRLEHLGYQVALQSPSP

SEQ ID NO: 511290 - protein, 462 aa, unidentified
MSTIQPFRAKRVKKSTVRVRPVERPDAAGIDLGATVHFVAVPPDRDERPVRSFATDTAALHLLADWLVACRIKTVAMEATGVYWIPLFQILEARGLEVVLANARHVKNVPARKTDVQDCQWLQYLHSVGLLQASFRPPAAVCAIRSLVRQRDNLVRTGCEHILRLQKALDEMNVLLHRAVSDITGETGQAILDAIVAGERDPAVLARLRDRRCKKSEAEIAAALRGDWQPEHLFVLRQSLEAWRYHRKLAAECDAQIQLLIQELTPVAPPATVSMPSSPRPASPTTSAGDADEPLRRLLLAKLGTDLTAVDGVGAGTALVWLSEVGPALDKFPTAAHFASCLGLCPDNRVSGGRKLATATRPVANRLATALRMAAVSLSRSDCALGLWYRRLRAKLGPAPAVTATAHKIARILYAMIKLRLPFDPAKLGNPSLLRSRHERSLRRQAASLGFALQPLLPDAVS

SEQ ID NO: 511291 - protein, 343 aa, unidentified
MQAIRTIGLDIAKSVFQVHGVDVEGNVVLRRRLKRRYVLAFFQKLSPCLVGIEACASSHHWSRELQALGHRVRLMPPAYVKPYVKRQKNDATDAEAICEAVSRPNMRFVETKTPEQQSCLMLHRTRHLFIRQQTAVINAIRAHLAEFGIVAPVGRRGVEQLLGVVADADDKRLPEVARTCVAALGAHLQMLKAQILQFDRLITAWHRSSEVSKRLDAIPGVGPALATALVVSVPDPKAFRSGRDFSAWIGLVPKQNSSGGKDKLGNISKRGDRYLRSLFTTGALAVIRYAKIHGTTHRPWLTALLARRPTKVAAIALANKLARMAWAMMARGEQYREPAALAA

SEQ ID NO: 511292 - protein, 392 aa, unidentified
MFFVGIDIGKNNHVASMMDESGKVVFKAFSFPNTSDGGHALFSKLTSYSSNTDDFEIGMEATGHYWLSVYSFLFEKEFLLHVINPIQTDGWRRGTEIRKRKNDIIDSVLIADLIRYGQFVETRLADEDLFSLRTLTRFRTYLVESISDLKRKVVCVLDPVFPEYQSIFSDIFGKTSKEILLPFSSPIDFESVSSQTLAELLAKLSRKQVGSAKAAQLKAAASCSFGVTFAKSSFTFQLKALIEQIAFIEKQVKETETEIAGIMEKLESPITTITGIGNVTGAAIISEIGDISKFDSPRKLVAFAGLDATVTQSGEFEAAHNVMSKRGSPYLRKAIFQAALVAAFKDPVLSAYYQKKRAEGKHHLTCIGAVARKMCNIIYAVVKNNQPYVPKA

SEQ ID NO: 511293 - protein, 355 aa, unidentified
MNDAKYIGMDVHQATISVAVRDSRGNLAMEAILETKAETILQFIRGLRGSLYVTFEEGTWAAWLHDLLQPHVTRVLVCDPRKNALLKVGNKNDRIDARKLSELLYLNKLSPVYHGEPGNRTLKELARSYIAITRDLTRVMSRLKAIYRSWAIPCAGKQVYAPRYRAEWLAKIAEVGVRRRAELYYQQFDALAALRQQARRELLAEARKHPAMKLLRQIPTIGLIRAALLIALMQTPNRFRTKRQLWAYCGLALRTYTSGEYRFVGGQLKRSKKVLAVRGLNINHNHDLNNIFKGAATRAASIVGPFQDFYQACVARGVKPHLARLTLARKIAATTLLVWKKGVRFDAEHLKQQAA

SEQ ID NO: 511294 - protein, 316 aa, unidentified
MTDTPNFVGIDVSKAQLDVALRPSDEQDTLVHDAAGIDTLVARLRRVRPTLIVREATGGWERPLVRALVAAALPVIVANSRHVRDFAKATGQLAKTDRLDAVVLARCAEAVRPTLRPHPDAATEALAALLARRRQLLDMRTAEKNRLSTAPTRVQRRIRAHVTWLTAELARLNEDLDEAIRQSPVWREQEDLLQSTPGVGPVMSRTLLADLPELGTLNRKQIAALVGVAPLNRDSGTLRGKRQVWGGRAPVRAALYMATLVATKCNPVIRSFYLRRRGGGKAPKVALVASKRKLVTILHAMMKHRTPWRALVAQGA

SEQ ID NO: 511295 - protein, 425 aa, unidentified
MHFINAVELDQKAVFGHLEEPLIVAPILEARRGKSHVERCPVGDLSRNLFDQCAGGTAMEVVYPRCSGLDVHKRFVVACLSVVEKGQRQKELRRFSTMTNELLVMKEWLKAAGCTHIAMESTGVYWKPIFHLLEGEFEIVLVNAQHMKAVPGRKTDIKDADGIADLLQHGLLKASFIPSSEHQAVRDLTRTRMRLLQERTRLINRIHKVLEDANLMLASVGTDIMGVTGLAILTALLAGEEEPEHLARLARGSLIRKQDQLPAALEGKLLPHHHVVLEELLPLITTINRSIARFDREIAERLGRFDALIERIDAVTGLSRRSIEVLLGELGWDMSHFPDAAHAASWVGVCPGNHETGGKQLSGRTRQGNRWAKSVLIQAAHAAGHTQTYLGEPYRRISARRGAKKAAMAVGHSILVIFASFGEDW

SEQ ID NO: 511296 - protein, 399 aa, unidentified
MEGPCIAIDVSKDESHIQGYMTLGEPIGDAASIGHDKEGFTRLEELGKELTMRVGRPPAAVFEATGIYHRGLQSHLESIKMTYYIVNPLLAAKCRKQELRTKKTDVRDCKNLAKVYYTTELRVTTTADENYYRMRQLSRYYEDLLNHLRKCKVGFTEALDVVHPGYRDIFDDPYTATSFALLKVYPHPSTLERRKPETVARILEKQGDHGVVWCFEKAEQAIRHAQSCVSGCKATDVNVDILLGELEQVEAYQKRIAEVLKQIVEQAKTLPEFRLLTSVPGIGENLAARIMAEVGDIKRFARSKQLAAYAGLDPIVYQSGQMDGLHLRISKKGNKRLRCLVYLAARCGLAQRTTNVIRDFYNKKTRQAHPLCAKAASVACAHKLLRIIHGVCVTGTQFR

SEQ ID NO: 511297 - protein, 410 aa, unidentified
MEALLERCAGLDVHQASVVCCVLIGVPGRKPQKLLRRFGTTTRELEALRAWLAEQGVTHVGMESTGVYWKPVYAVLEGHFELIVGNAHHIKNVPGRKTDVKDAEWIAQLVRHGLVAKSFVPPPAIRDLRELVRCRRALIETRTAMRNRVLKLLEGANIKLAGVASDVFGVSGLAMLEALAAGTTDAAEMAGLARGRMRRKAAELEAALEGRMREPQCFLLAMHLRQLEAVEGDLEALDARIDAQLAPFRAQHGLLLQIPGVDWVTAATILAEIGPDMDVFGTARRLAAWAGVAPGNYESAGKPKGAGTRKGNVFLKSALFAAASAAVKTKGSYYRDKYNRLRARRGPVRALMAIAHKLLLAAFHLLATGEAFHDLGESYLDQVARRRSTARLVQRLSNLGYDVTLVPKAA

SEQ ID NO: 511298 - protein, 341 aa, unidentified
MDIKTVGIDIGKTWFHLVGCNRAGTPVARHKFNREKLLQFTVNLPRCLIGMEACPGSQHLSRLLERHGHEVRLIAPKFIKPYVKGQKNDFNDAAAIAEAVARPTMRFVNPRSIEQLDLQAIHRIRSRWVGERTAVINQIRAFLLEYGLPVRKGPAALRSELPTMIEDAENGLSGTMRQILARLREHWLYLESQIEGCRLELEAVAQRSNECHRLTSIPGIGTLTASAIIAAVGNASAFRKGRELAAWLGLVPGQRTTGGKPTLLGISKRGNPYLRRLLIHGARSLVQHLRRDRHEIGRWITQLERRAHKNVVIVAVANKMARIAWAVLTKHETYRPVPLAP

SEQ ID NO: 511299 - protein, 379 aa, unidentified
MKKHCNSAMESEVRAKRVKSRGPVRRETRDVMAELVGKLSKKMDAKALSARLGEEYRRNAVCPNLDRLTVGMDLGDQWSHYCILGLRGETLAEGQMRTRQQEMAEFYGGLAESRVVIEVGTHSAWVREGIAECGHEVLVANPRLMEGSKRRQRKNDRIDANKLARLGRVDPQSLHPIEHRSKEVRQDLLVLRARDALAAARTELINTTRGLVKSMGARLPKCSSPSFAAKVEEAVPSEVREALLPLVRLAAALSNDIQAYDQQIEKLASKKYGHTKLLRQVKGVGPITALAYVLTLEHPERFAKSRDVGPYLGVVPKQEDSGDSQPQLGISKAGDTMLRKLLVGSAHYILGPFGPDTDLRRYGQRLCERGGKTRRNGPR

SEQ ID NO: 511300 - protein, 373 aa, unidentified
MSNLIRIGMDTSKSVFVLHGVDAAEQPVLRRKLRRQQVVGFFAKLPSTQIGIEACGASHYWGRELAALGHEVKLLPAQRVKPYVARNKNDAADAAAICEAMGRPHMRFVPVKSAEQQAALMLAGLGDQLTRRHTQLSNTIRGHAAEFGLVTAKGHDKIAPLLARLAADATLPALARELFGVLGEQYAEVSRARRALQARLLAWHKHNELSRRLAEVPSIGPIGAALLVMKVPDPRAFRCGRNFSAWIGLTPKDHSTAGKQRLGVISRAGDETLRSLLVVGATALIQQARRGRGHPSPWLVELIKRKPPKLAAVALANKTARIAWKLMVSGERYKAHHQPNRRNPSSPPAASLAPCSRRQGRFAPPAAVPCGQP

SEQ ID NO: 511301 - protein, 334 aa, unidentified
MEQITTVGIDLAKNVFSLHGVDGAGRTVLRRTVRRDRLVETVAALSPCLIGMEACSGAHEWGRRFQQHGHTVRLMAPKFVAPYRKSDKNDGNDAEAICEAVSRPSMRFVPVKSLEQQALLALHRVRQGFVVERTAVINRLRGLLSEFGVVLPLRSVTVRRQAAAAAEGVPELARRAIGDLLEQLRVLDVRIGGYDREIEAQARLSERAQRLMKIRGIGATTALAIVATVGDAREFKNGRQFAAWIGLVPGQYSTGGKTRLGHISKRGDAYLRNLLVQGARSVLNSAGMHQDRMSRWILELQPRRGYYRTLVAIANKNARIAWALLAKNETLRSA

SEQ ID NO: 511302 - protein, 412 aa, unidentified
MEAVYRCCAGLDVHAKTVVTCLMKDGKKEIRTFSTMTDDLLALSDWLVAVGCTHVAMESTGVYWKPVFNLLEGLLEVSLVNAQHVKAVPGRKTDVRDCEWLADLLRHGLLKASFIPPLDIRELRELTRYRQTLVKEEAAVANRIQRLIESGNIKLGQVASDVLGVSGRLMLKALADGERDAAKLAQLAKGSLKQKEVELRRALHGRLTTAQCFVLRELLARIDELDAARARVNEEIKREVEAGANPFVQEAIELLQTIPGVGLRVAEVIVSEIGVEMSCFPSDGHLASWAGVCPGNHESAGKRKSGKTTKGNVCLRTALVQAAWAATHTKDTYLAAQYRRLVKHKGKQRALVAVGHSILVIIYHILKNKVSYQELGGDYFDRQNVERQRQMFIRKLEALGLKVTVEELPQAA

SEQ ID NO: 511303 - protein, 320 aa, unidentified
MTILTSPTVIGIDVAKAEIVAYREDAKTTEAVNNDRETLGRWLKALPAQSSIALEATSIYHLDTVELAHEMGHRVYVVDAYRLSHYRESIGQRAKTDPCDARLLARYLSSEQERLRLWSPPPQAYKVLKSLLHRRAELINVRVGITLSWSSEPLLKDELARQLKSFKQAEQAIQKLLHKVSKEAGITENIKRCKAIEGIGELTAMGLATAFMRGHFANGDAFIAFLGMDLRAKDSGKKNGPRHLSKKGDTELRRLAHNAAMAACRSPIWKPFYESYLARGLAKTQALVILARKLCRVAFALMKNQSEYQPNLRLQGSPAT

SEQ ID NO: 511304 - protein, 455 aa, unidentified
MPGKKTRGTSSGRLSTVHPDAAGIDIGSTFHVVAVRSDRDERPVRTFRTFSSDLHTLADWLSAMGITTVAMESTGVYWMPVFDILDARGFEVLLVNARDVKHVPGRKSDVNDAQWLQQLHQHGLLRGSFRPRDGVVRLRAYLRHRERLVDYAAAHIQHMQKALMQMNVQLHHAVSDITGLTGLRIIRAIVAGNHAPEELAAHRDRRCAASEETLRAALTGHYRPEHVFALRHALALYDFHQAKVAECDVEIAAVLGVLNEPRMTPAAPLPAVRHAKGHNEPAFDVRQALYTFLGADLSQIHGFGPYTVLRLVAECGDDMTKWPTAKHFTSWLSLAPGNKISGGRLLSSKTRRSSNRATALLRIAAVNIGKTQTALGAFYRRLAARTGKAKAVTATARKLAILFYNALPYGMTYVDPGVSSYEERYRQRVIHNLQRRAKSLGFTLTAALSAAEGVS

SEQ ID NO: 511305 - protein, 359 aa, unidentified
MAIVAHLYRFIVGVDTHARNHVLSILECATGAEIVCQTFANTSQGHVRAQAWITKHTRADLREVLVSMEGTASYGTRFRVALDQAGYRVVEAPRLLVRGRKKLAKNDVIDAFQIAARTLGKDETELTIPKQGDYREALRILVAARKQLTRATTVNINSLTALTRCTDLGIDARRALSVKQVHQIAALEAQPGDAIDVLVAKQEAKRLAKTIIDARTQLAENQNQLAMIVQLVTPALLEMPGVGPVTAAQMIISYSHVCRIKSEAAFAALAGTSPIPASSGNKVRYRLNRGGDRALNNALHTVALVRLRNDDQTRAYMKKRLAEGKTKRETIRLIKRYLARKIYRLLTKELTRTQVTLAA

SEQ ID NO: 511306 - protein, 363 aa, unidentified
MIIIGADYHPGFQQIAFVDTETGDCGEQRLQHREETEKFYRDLAAQGMKVRVGMEASGHARWFERLLAELNIELWIGDAAEIRTKRVRKRKTDREDARLLLRWVQEDRFPQIWVASWENRDLRQLLWHRHRMVQARTRLMNQLQAVALNEGLRCKKKLWREHGREQLESFRLAPWASRRREDLLKLLDQLNPTIAELTQAIEQEAENCPEARRLMTHPGVGALTALAFVLIIGRAERFQCGKQIASYLGLVPMEDSSGERRRLGHITKQGNALLRFLLVEAAQVTVRTIPQWRSKYFHLAMRRGRKIAKVAMARKLAVRLFWMMRQEWNYEQVQKFGSHVGQPENRHGVQENTELLTGASRSS

SEQ ID NO: 511307 - protein, 412 aa, unidentified
MQTLVEVGCGLDVHQTTVVACLLRVRRDWRVDKQLRTFGTTTRELVQLRSWLVAEGCTHVAMESTGVYWKPVYAVLEGDELEIIVANAQQVKKVPGRKTDVKDAEWIADLLCHGLLRPSFVPPLPIRELRDLTRYRRKLVESRSAERNRLLKLLESANIKLASVATDVFGLSGRLMLEALIADKTSLSEMAGLAKGKLRRKIPQLELALEGKLQEHHRFLLRLQCSRLEAVEKDLAILEQRIQQKLEPYAAQLALLQEIPGIDLTLASVIIAELGVDMSTFQSVSQLASWAGVCPGNNESAGKRKSSRVPKGNVYLKTALVEAANAAARVKGTYLRDKFYRLKARRGYKRAAVAIAHKILVSIYHMLSQNVSYNDLGDLYLDKLNTHHVTRNLVRRLERLGTVTLSPQPTAA

SEQ ID NO: 511308 - protein, 410 aa, unidentified
MRLCVGDDWAEDHHDIEVMDEAGQVLARKRLPEGVAGIGQLHELIGRFVPADGDAQVQVGIETDRGPWVRALLAAGYQVFPVNPLQASRYRGRHGVSGAKSDGGDAHMLADVVRTDAHQLRPAAAGTAAAEAVKVLARTHKTLIWERTAVVLRLRAQLLEYFPAAVAAFEDLDAPDALELLGKAPEPARAAKLTRAQVSAVLKRAGRYKITERTDAILAALRSPRLGQPPVLTGAYAATVRSLNAVIATLNEQVASLQGQVEAHFGRHPDAEIYLSQPGLGAITGARVLGEFGDDPHRYASAKARRNYAGTSPITRASGKRKIVAARFVRNDRLIDALMIQAFATLRVSPGARAFYDSQRAKGLEHNDALRRLASRLVGILHGCLKTRTRYDEALAWSHRENIPRSDAAA

SEQ ID NO: 511309 - protein, 356 aa, unidentified
MEPAHTTMGILIKRTMQTTKYYIGFDISADDFSASCITSPDNLVFSTQKFLNNFDGFSSFVSLLSKHNIQPSEVIICMEATGVYSENLSYFLASKGFIVCIEAPHKIKNKTKDSPRKNDFVDALAIAEYAYRYTDKLSAWKPKDEILEQIQVLLSTREHLTVQMTANVNALKTLKYKYYQTPLANQIYEQTINKLKEHIKQIDQEIKNLIDKDDSFKSKISLAKSVPGVGLLLAANLLVLTKGFTEHTNYKHTAAYSGICPYEQTSGTSLHKPPRSMKCGPAKLRKLLYLAALSVRTHNINFKKYFLRKVAEGKNKRLVLNNIENKLLKIVFAVVNSGVAYTENFKSINPALLKTA

SEQ ID NO: 511310 - protein, 406 aa, unidentified
MSDIFALDVSMGKSYCVWYRGKHCLKEFSLVHTKAGFNALRDMIKKAQKPIIYFEATGIYSRVMEHFCETNGLRFCRLNPLELHLKSESLRRVKTDQKDAHRIALTVQENAFRLTVPWKKDYLQLHELSRFYNQLNADWNYRLNHLHTALEQVFPELKQLFVNRTSKLALNIVELFPHPALVRPYSRVKLKNILIASTDKRISKMKAYKYADRLIDLAQKSYPAVSGDAIQVDEVRYYARQLIALTRKREEVIKRMESIAQRLPEYILYCSFPGIGKQTAAQLMGELGDISRFDNANQLNAFVGIDIRRYQSGTYLGQDHINKRGNPIARKLLYFTVGNMIRQQHANSNHIVDYYYRLKEKRPHPKLNKVAMVACMNKTLKCLLSMIKHHEKYHYRYTDSMVPVKA

SEQ ID NO: 511311 - protein, 378 aa, unidentified
MDRATNSTAPADRLFCAVELSKNSWLLGIQFPDRQKASVYPLKGGDSEGLMAKLFAACDRWTKVSGKKPSIILCYEAGYDAFWLARFLKARGIECLVVDSGSMQVNRRSRRAKTDRIDLAKLLRALIAWCGGEQHVWSVVRTPTVDEEDLRRSHRERNRLITERTAHVNRIKGLLFAQGIRGINVKARYKTLRIDKLVTGEGRSLPPRLAREIKREIDRLALVQQQIAAIEEERDESPTTCTRTEKKRAQLLLLKGIGPTGSAVMAREVYYRQFSNRRQIAGFLGLATSPYDSGQVERSQGISRAGSGPVRATMIQIAWLWIKHQPKSEISRWFVQRTADQSGRIKRIMIVAVARKLAIALWRYLEQGLVPQGAALTR

SEQ ID NO: 511312 - protein, 382 aa, unidentified
MHDSTDLPFPERTAIRGDSATLFVSLELSRSTWVATSLAPGSKKMSKHTLVGGDGRKLLDLLARLKTRAEQRIAAPVKVVAIHEVGLDGFWIHRLLEANGVESHVVDPASIAVPRRHRRAKTDAIDGETLLRTLMAWQRGEPRVCAMTVPPSPSEEDCRRVSRERATLLRERIQHTNRIRGLLFGQGITNYNPLHKNRRECLEELRTGDGRSLSTHVKAEILREIDRLELVLRQISEVEAERDEMLRPAEASSPAALLMRLKGIGAEFATVLYLEGLFRHFENRRQLAAYAGLAPSPWKSGSIDHEQGISKAGNPRLRTTMVELAWMWVRYQPDSALSGWFRQRVGSERGRTRRISIVALARKLLIALRDMSPMARSRRVLS

SEQ ID NO: 511313 - protein, 344 aa, unidentified
MKRYIGLDVHAASCTLAVISESGKRLKDFPVETNGQALVEAVRLIPGEKHLVFEEGLQSAWLYETLSPHVDEIVVAGIRQSQGNKADRSDSYGLAEDLRAGSLKKRVFKAPREFTLLRELSRTHMTVSRDLVRARVRIKSLYRSRGIRTPGTEVYSVRRREEWSKQLPVSVEKRADCLYDQLDFFIEQKKEAEADLVREARKHRVVRILETAPGFGPIRSARLASIVVTPHRFRTKRQFWSYCGLGIVTRSSSDWVQTDEGGWVRARVPKTRGLSRQHNRVLKDIFKGAATTVVMQGSKDPLYGRYEQMLDGGTKPTLAKLSLARIIAATVLRMWKDGEVYKPN

SEQ ID NO: 511314 - protein, 339 aa, unidentified
MNQVSTIGFDIAKHVFQVHGTDAQGQLFRRKLRRKEVLAYFASLPPSLIGMEACGSAHYWARKLQALGHEVRLMPPAYVKAYVKRGKNDAIDAEACWEAVTRPTMRFVAIKSEEQQSVLMLHRARDLLIGQRTQTSNALRGHLAELGIVAKQGRGGTDELLALVQGDEEGLLPEHARTALLVLADQLHELRVKINKIEREIHAWHRSNAQSRRLETAPGVGPITASAIVATVPDPSRFKSGRQFAAWLGLTPNEDSTGGKQRLGRITRAGDPYLRRLLVVGAHAVLRYSGNAKSAPTRWAAELKGKKPYTVAAVALANKMARIIWAMMMKGEAFRTAEA

SEQ ID NO: 511315 - protein, 388 aa, unidentified
MTHLPVLYPVPATPDYDRTLVLAIELSNKSWVLAAQVPGLPRVKAKRTIEPTAEALLTAIQDYRERAKAAGRQVERVIATYEAGWSGFWLARWLSTHGVETHVVQPSSVPVDRRARRAKSDGIDAELLLRTLLAWLRGEPRVCSMVPIPAEADEDARRCIRERTELVAERVALVNRIGAVLATLGVGDYNPLLRNRRERLDALRTAQGTPLPPHAHAKISRMLDRLDLVRTQITALEQERDAVLEDEVPDRAGAMIQQLATLRGIGVQSVTVLVREAFVREFASGKALGSYAGLCATPYSSGGTEREQGISKAGNRRLRTVMVELAWLWQRYQPGSAEVSWFRERVGGTGARMRKVMVVALARKLLIALWRFATQGVVPGGAVMKPAF

SEQ ID NO: 511316 - protein, 382 aa, unidentified
MRIVALDLGSKISYCEVKESKVVERATETSLSALERLLGPNTPPSKVAFEACREAWAVHDQLEAWGHEPLMLDTTRVRQLGIGQHKRKNDRIDAETMARALEIGRIPLAHVLSPHRRELRLQLSVRRALVATRAEYVTQIRGLVRAHGQRVPSCDTENFVERVREMPLGEEVRALTEPLATLLEMLTPQIALVEAKLEQLCAGEPVIKRLGTVPGVGLIVAAAFVSVIDEAKRFRRAHHVEAYLGLVPSENTSIHRRLGSITKQGNSYVRALLVQAAHSVFRLRGDDPLKRWGEAIEQRRGKRIAVVAVARRLVGILWAMWRDGSLYSPTKLGLATASGLSSHARELTVEAEEQRAAVTPTGNRRPSPRAAARKTPREVTMS

SEQ ID NO: 511317 - protein, 338 aa, unidentified
MKLFGAIDLHSNNNVTVLIDERDEVVYRKRLPNDLTLIIEQLSPYQSTLEGIVVESTYNWYWLVDGLMEKEHRVHLANTAAIQQYEGLKYTDDDSDARWLAHMLRLGVLPEGYIYPKEQRAVRDLLRKRSQLVRQKTANLLSIQNLYSRNTGWSLSANRIKKLTSEQVDGVFTLGDVGLAVKANLSVMRCLEAEIKTLEQVVKGRAKLKPAFRYLLTVSGIGQTLALTIMLETGDIRRFPSVGNFASYCRCVGSEKISNGKRKGKGNTKNGNKYLSWAFVEAANFAIRYEPLIARFYQRKKAKTHAVVAIKAVAHKLSRACYYVMRDKVPFDVGRAFA

SEQ ID NO: 511318 - protein, 425 aa, unidentified
MGLDEPLLFRRIGREASPAFAYKNNMEVACMYSLFVGVDVSKDSFSVAGLDEKAKVLFSLCPTMNAQGFSELLKILTSHCGDLSSVIVALESTGSYHLNLFSFLVAQGITTIVVNPLIIANFTKLSLRKTKTDKKDAVTIARFLFFTRDSINRLPSTQLTTDLRDLARERESILKMIASMKNDVKRILQTTFPELEHLVDVLGKTMLRFLTVFPSARLITQATPEAVAQGFLQGDGRRRITVHYATIIELAKMSVATTSPSKELILPGKIETLFHLQERADEITRMLVKLCKSIRQEELAILTSIRGIAVKTAAPFLAELGEHQNFSSYKKMLAFAGLDPTIHQSGKFEGMSMISRRGNRHLRKVIYNMAFCVVRYAGPFRDYFFRRKKEGLPFRKALLATAHKLVRTIFAMLNNRNYYTIAEVV

SEQ ID NO: 511319 - protein, 411 aa, unidentified
MKVVVERCAFLDVHRDTVMACARTPDGSGGRREEVAEFRTTTSQLLLLADWLIERQVTLVGMEATGVYWKPVHWVLEDAVGSVWVINARHMRNVPGRKTDVADAQWGAQLIEHGLVRPSFVPERATREQRDLTRYRKSVIEERGRETQRLHKVLEDAGVKLSSVASSVLTKSGREMIDALIAGQRDPAVLAEMARGRMRSKIPELQDALAGRFNEHHALLCRSMLARVDQADATIAELTERIVELQHPHEAAVALLVGIPGVSYRTAQVILAEIGTDMSRFPTAGHLSSWAGMCPGNNESAGKRGSGRTRHGDKWLRIALVEAGQAAGRSKNTYLSAQYHRIRGQRGPGRAAVAVGHSILVICWHLLTTGETYNDLGGDYFDKRRNSPARERRLIAQLEAMGHRVTLEPAA

SEQ ID NO: 511320 - protein, 403 aa, unidentified
MNMNAVGIDVSKGKSMVAILRSYGEIISKPFEVKHTVSGIRSLIEQIQSIDGESRIVMEHTGRYYEPLVRELSKADLFVSAINPKLIKDFGDNSLRKVKSDKADAVKIARYTLDSWMELRQYSLMDEIRNQLKTMNRQFDFYMKHKTAMKNNLISILDQTYPGANTYFDSPAREDGSQKWVDFSATYWHVDCVRKLSLNAFIDHYQKWCKRRKYNFSRSKAVEIYEASKELVSILPKDDLTKLIIKQAVEQLNTASQTVEQLRTMMNEAASKLPEYPVVMAMKGVGKSLGPQLMAEIGDVSRFTHKGAITAFAGVDPGVNESGSYEQKSVPASKRGSSTLRKTLFQVMDVLIKTKPQDDPVYLFMDKKRAQGKPYYVYMTAGANKFLRIYYGRVKEYLSSLPE

SEQ ID NO: 511321 - protein, 449 aa, unidentified
MGNYAGVDWAGDKHDVRVCDQAGEELVSATCAHDEKGLRALCRTLLRLKVELVAIERPDGLLVERLLDAGLRVLPMHPKQVAASRARFRASGGKSDRFDAFVLSELARTDNHRFRVLEPDSDQTKALRALTRGREDLVHARVALSNQLRAELERFWPGPIGLFQKLDSPISLAFLERYPGPADARGLGAQRLAAFLARQHYAGRQKPAELLAKLRRAPEGRVGETELGTRRMLVLALVAAIKPLVDQIKQLDGQIATALREHPDGEIFLSLFRDPRSVVTAAELLSEIGDCRARYPTRDALAADAGQAAVAVESGKRKTASFRWGCNKRLRGAFCTLADSTRHWHPWAQDRYAAARARGHEHPRALRTVGRAWCRIVWRCWQDRTPYDPARHRGLQQHLLVTIPGSSGSRPDLAATQRMAGAAVTEMAARRAEREALDGKPTTATAPGG

SEQ ID NO: 511322 - protein, 388 aa, unidentified
MESLVAIGIDVHKDKFALVAVLLILGAQDQILGEIEVGPDYKEILAFIESIKQKSLPGQTYSFVCGYEAGCLGYVLYHQLTAAGVRCVIMAPTTMLSEQGKRIKTDRRDARLIAKCLCCNGYHPVHVPNAEDEAVRDYLRMRDDHQGALKKLKQQINAFVLRHGCSYVGTKWTARHISWLTGLEKELDEMLAETLKEYMTSYAEQEAKIERFDAKIEEIARRDRYRKLVSKLVCFLGIKTHTALSLIVETGDFMRFAKGNIFAAFLGLAPGEHSSGSGVHRLGITKAGNTHLRTLLIEAASGICKGAVGHKSKALKARQAGQESEVIAYADKANTRLRSKYYRMIRHGKKRNVAVAAVARELACFIWGMATGNTGLTRQAQASAKAGV

SEQ ID NO: 511323 - protein, 411 aa, unidentified
MRSNSFTAVGIDVSKCKSTVAARRPGGEVVWLPFDISHDTKGIQRLLEKLNGLDGEIRIVMEHTGMYWRPVALALQQAGFYVSVVNAILIHDFSDNSLRKVKTDRADALKIANYGLTFWMDLREYSVEDETRQMLKIQSRLYERTTTTGIMLRNGLISLLDQTFPRANKLFRDESRNTKGHVKWVDFIIRFWHKECVAALSLNAFADTFQKWCKRTGYRFSTSDAERIHAAAKNAVATLPKNDSTKLLITQAAISLNSVYDTLQALRTEMDRLASLLPEYELVMGMEGVGKITGPQLMAEVGDVRRFSHKGALVAYAGMDAPPFQSGAFDAKKRHVSKRGSPHLRKVLFEIASMMLVHGNMENPVFCFMDKKRAEGKHFYVYTVAGAAKFLRIYYAKVTQFLNAQAVAYQR

SEQ ID NO: 511324 - protein, 509 aa, unidentified
MITIPAVRECCAGIDVGKRGIAIAVLTGPADKEAAIQTRWLGTTVPELEALREWLLQEKVSSVAMESTGSYWIPIKNILEKSVEVMLVCSRKHHPKKGEKTDFRDAIQLAHLHRHGMLTGSYLPERGVVELRDLTRRRKKLLGNLAGEKNRIQKVLEVANVKIGNVMTDVFGVSGQEVLEALLSGREIGEQEIAEMAKTQLKTKIPQLTETLKGHQMNDHHRWLIQQSIEHIVLLDRQLEELEDRIMMKIEPYRQQFDLICTVPGFKEMNAAALLAEIGPDMSVFPSGDNLCSWGGACSGNNRSAGKSKSGRAKKANKFLRCALGQAAVSAAKKKGCIMRRKFQRWVKRMGGKKANVAVGHSLLKVVWCVLKTGTPYREPDPGVMHEMERQKLVRHHARRLRALGAEPEAVEAIVDQLLSPAQTAEESQSSVAIVEACQVEEAQVAAPRKPRRACPPKGRGEVCRGKLGFRVRQGRKPIPVVKERVGDVSGNKRRNRTVRRKEFDNDSA

SEQ ID NO: 511325 - protein, 313 aa, unidentified
MIITLRCIGIDVSKRHLDIFDEGIGVSERVANAPHAITELVARWRCDALVVFEATGVYDLGLREALRAAGIRFARINPARARDFARASGQLAKTDPIDARMLAAFARAMRPAPEQVSTPARNALARLAKRRDQLVHMRAQEKNRRSEAGDRAMVERIGRLIEVLDREIAEIEADISALIKAEPEISHDAQLIRSLPGVGPVACMQLIAQMPEIGHVGPKQAAALAGLAPFNVDSGAYRGKRKIGGGRKRVRNALYMAALNAVRRADRFKAFYARLRQAGKPAKLALIAVARKLLTILNAMMRDRKAYIPTQQT

SEQ ID NO: 511326 - protein, 429 aa, unidentified
MNYNTQNAKIASITEKTLIVGIDVGSETHYARAFNWRNYEYSKKPFAFSNDEAGFASFKAWMNDMAEKHGMETIIPGMEPTGHYWLNLGAYLQEQGMKPVHVNPHHVKKSKELDDNNPSKNDRKDPKTIAGLVNEGRFSYPYIPTGIYAEIRNLSNLRIQTQEEITRIKNRIARWFSIYFPEIKDVYRNPDAVSGLMVIKQAPLPCDIKELGVNGVNKIWRDARLKGAGIKRATTLVTAAEHSIGNTEAPRSARKEIRNLLNDYEIYKNRMDELMQEIKETLSEIPYIDKLMEINGIGIKTVSCFIAEVGDIGRFDNPKQVQKLAGYAIVADSSGKHNGESRISHRGRKRLRYALYEGAISVIGKNKEFKEIHSYYRTREKNPLKKMQSVIAVACKLIRIFYTILTKGVDYDSQKMLNDIVRPEIQLAA

SEQ ID NO: 511327 - protein, 474 aa, unidentified
MDTGEGMMEGARNGRRLGLRLVRQSPQLSLTWTPTGTTKCGHEHARENLESYGVLRSARRRSVMEILHRRCAGLDVHKDTVMACVLIRESASGRKRKEWREFGTMTQDLLQLADWLRDCGVTHVAMEATGVYWKPVWNILEGEFKVLLVNAQHIKRVPGRKTDVKDCEWIAELLQHGLVQASFVPPVEVRELRDLTRYRATLLGERARVVNRMEKVLEDANLKLASVVTDILGISGRAILEAIVRGEEDPERLAEMARCRLRAKLPALREALRGRVTEHHRFLLGRLLAHVRFVEAEITELEGRIAEQMRPFEKEVEQWVSIPGINEVAAWSLIAELGPRLEAFPSEQHLSSWAGMCPGSNESAGQRRSGKTRKGNPWVRRMLCQIGWGAARSQGTYLSAKYHRIAARRGKKRAIIAVAHNVLVIGFHLIRNQRRYNELGPDYFDQLHRHRLERYLVRRLEALGNQVVIEPLHA

SEQ ID NO: 511328 - protein, 365 aa, unidentified
MDQLTHIGLDVHKDTIAVAVVRPGGIEVDERVIPNTPEAVRKLLRRHDPSLTSVCYEAGPTGYDTHRLVSALGFPCDVIAPSLIPRRSGARVKTDRIDARNLARLHRAGELSCVHVPTPAEEAVRDLIRVREEVKRDRRVARQRIRSFLARYGKRYPQPSDKWSSRFEVWARALRFDEPCASEAFSHLLAAYFMRDAQLAEMGRRIEELAGLEPLCGPVTLLGSLRGIATLSAATIVAETCDFTRFPEAGSYMAFTGLTPSEHSSGNTRHQGSISKTGNAHIRRVLVESAWAYRHAPAVRGRLRERLEGQAPEVAAYSWACQCRLHRTFRTVSARKGAHTAVVATARELSGFVWGLMTGNLGPAR

SEQ ID NO: 511329 - protein, 378 aa, unidentified
MHSMTQQDSLVVGGVDAHADAHHAAVLDDRGALLSTRSFPTTTPGYRQLLDWLTGFGEIDVIAVESTGAYAAALVRYLREHDIAVVEVNQPHAHTRRRVGKSDPIDAEMAARLFLAGKAKAVPKQTDGIVESIRLLRVARHSAVKSRSAALVQVRDLIITAPQELRDQLSVRKTLRGKVTVCARFRLSGRELRSPSQAAKFALRSTAQRIETLDQEITALDRELEQLVATAAPRTVQLLGISTGHAGQLLVTAGQNIDRLRGESSFAMLCGASPIPASSGKTTRHRLNYGGDRQANRALHLIAVCRLRYCERTRAYAKRRTAEGKTQREIMRCLKRYIAREVFNSLQADLAETTPPRPAVSTTIMCGNPGFGINRTRT

SEQ ID NO: 511330 - protein, 344 aa, unidentified
MKDITTIGVDLAKNVIQVHGVDQRGQVVLKRQLPRGRFVDFFANLAPCLVGMEACSSAHHWARQVEKLGHQVKLMAPQFVKPYVKTNKNDAADAEAICEAVSRPNMRFVPIKNGEQQAVLALHRARAGFVKARTAQANQIRGLLGEYGIVIPQGIGHLTKRLPAILEDGENELPGAFRRLLVRLGEHLKELDRQVGELEAQIQDWHRENAASRKLAQIPGIGPLTASALVATIGDANSFKNARQLAAWLGLVPRQHSSGGKTLLLGISKRGDAYLRTLLIHGARSVVRVAEGKAGDSPTWLTQLIGRRHKNVAAVALANKNARIVWALLAHGRAYQAEYLPVAA

SEQ ID NO: 511331 - protein, 364 aa, unidentified
MTTYCGVDFHARQQLVKWCNTADGEIHERQLWHQSKDEVREFYAQFASRVIVGFETSGYSSWFETMLEQLGHEVWIGHATEIRRRARSRQKTDRRDAELILDLLLKDEFPRIHRLSAESREVLRQLRYRHRLVQLRTKSYNSLQAMALSAGVSLKARLRTRKGKERLLGLSLSKAGHSQREEWLLLISHLNTCIERVEQELELVAASDARVQRLRTHPGIGLLTGLALVHTLAPVSRFANSRKVAAYVGLEPREYSSGERQSFGGISKAGSRLLRFLLVEAAQKAVHKDEHLKKLYHRLGHRRERAKAKVAVARQLLVRTYIMLRDEIDYAEFVRRGVAVRSARVSYRPQVPGKLIERLASEQP

SEQ ID NO: 511332 - protein, 405 aa, unidentified
MTENLPMPQRFIGLDVHKHYLVAVGVTPDRQPVLGPQRVELSRLEAWINKTLTPQDAVGLEMTGNTYQLYDELLPHVHSVTVVHPPHVKLITSMPVMNDKIAAARLAELHAAGLLDGIWVPPQEVRELRALIAQRAKMVKLATQAKNRLHAVLHRYHLAPPDGDPFSAAQRDWWTHLDLTPTEQVRIHCDLTTLDCAQTQCAHIETLLKALAAQDARVPFLVQLPGVGLLTAMTLLAAIGQISRFPSAKHLVGYAGLGARLHDSGQTTRRGRLTKAGRRDLRCALVEAAHSAASTHPHWRAELARLEPRLGYNKAIVAIARKLLVSVWHVLSEQCVDRFAQPELLARKLFTFAETLTRANRPDGQTAAAYTHQLLVRLGCGAELPAFQRGAKTIRLLPRDADTAQ

SEQ ID NO: 511333 - protein, 417 aa, unidentified
MFWRLAPVGAPLEQGELENTPEAVDVWATDLYQRFGGRPIAVCVEQCRGALVYMLAKYPHLVLFPVHPTTAARYRETFCPSGAKADPSDAASLLDLLMRHRERLRPLQPDTAEARLLQRLTEQRRRLVDEKTRQKLRLTACLKLYFPQLLDWFDDVDSPLVGALLQRWPSLQELKRAHPGTLRKFFHEHNCRGEERIQQRIQAIYAATPAVEDAAVLEGEGMSACNWAAVLATLREQIAGLEQRIGQLVAVHPDSGLWASLPGAGAALLPRLLVAFGTRRDRYDSAYQMQCLSGIAPVTQASGKSQWVHFRYACPKFLRQTFHEFAYCSLRKSVWAQAYYQLQRSKNKSHHAAVRALAYKWIRILYRCWKDGKPYDEQVYLENLQKRNSPLRAGFASTTGPAWKVVSGLHKISENFS

SEQ ID NO: 511334 - protein, 343 aa, unidentified
MRHYAGLDVSVKETSVCIIDESGKVCRETKVPSHPEDLARALHDRAWCLERVGLEAGPLSQWLFSGLAATGLPVVCIETRHTKAFLQAQVNKSDRNDARGIAQMMRVNLFRPVHVKTLTSQKRRALLTARKLLQEKALAVDNDIRGLLRNFGLKVGPIGASRFETRTRELVDGMPELAEIIDPLLEARRKLRELFAVLHRKLLAIVRDDTVCRRLMTVPGIGPVVSMAFTATIDVPARFKSSKAVGAALGLTPILNQSGESKRLGRVSLCGDGMTRTLLYEAAQVMLTRTTKWSWLKAWAMKVAARRGIQKAIVALARRLAVILHRIWVSGTDFRWTREVQST

SEQ ID NO: 511335 - protein, 447 aa, unidentified
MWKLNSIKQEVSMNYVNDSRLEQFRQLKKEIRGSEEYLIIGIDVAKEKHRAFFGTAQGKTLLKNVVFDNTIEGFEKLDAYVERIKVQYSLPKVVFGIEPTADYHKPLAEHLLKCGLMVVFVGGTAVKNNRQLLHGRWDKNDDKDSANVADLIAQGKCMFYEYPLMTLRNVRILNALKRRLTKREHGISAYIRNHILAQYFPELDKYYGSSETLAVVRECLDPSAIAGMEYDDFCRTVAPGKMTLARERRVGAIWRTAVNSVGCTMGEAAFHEAQLAVDSLKRVRQEIKAVDDKLENACLEFPEYQYLLSIPGFGPDVSAKVLGAIGDPHRFTSGKEVLRLAGLDLCAQRSGKMANRATPIISKQGKADLRCALYQAAFIASIKSKDFIPYFTNKLAGRAKEKGIGTKMRVKLAAKLLIIAWTLMKKKECFDPKYLKLENRVERKTAA

SEQ ID NO: 511336 - protein, 341 aa, unidentified
MTLVMGIDQHRAQISAEWIDTITGEISRARVAPADRVGVRTFLARFDGQDLEVALEATTGWRFVVEELRRVGADVHLAEPAETSALKGKKKRPKTDWADARHLRELLLIGRLPESWIAPAHLLDLRARVRCRHTLSHQRTEWQQRMQAVLYHHGIAQRRDLLTLEKREWMAGLALPAAAREQINISLQIIDALDLQLAPFDLDLRAYARKQTGCRALVDQIYGVGGLIAVTILAELGDARRFANSRDAVRYSGLDITVYQSDQHRAPGHLSRQGPPALRWALYEAAQRARFPTSPDRTYYLQAAERLGGNRACLALARKLLKRSYHILKELGDPALQPVAS

SEQ ID NO: 511337 - protein, 342 aa, unidentified
MQITTIGLDIAKSVFQVHGIDAQGSVVVARQLRRSRLIAFFEKLGPCLVGMEACATAHFWAREIARLGHEVRLMPPGYVKAYVKRGKNDAADAAAICEAVTRPSMRFVPVKSSEQQSALMLHRTRDLLIRQRTQLINALRAHMAELGLVAAKGREGVKKLMVLVAEESEACLPVLARFACQVLTMQLVDVQNQIGALERRIHAEHRASEASRRLETIPGIGVITASAITATVTDPKAFRSGREFAAWVGLVPRQNSTGGKERLGGISKQGDRYLRRLLVVGALAVLKQAHARPDKHPWLTQLLARRPAKVVAVALANKMARTAWAVLARGESYRVPTLAATA

SEQ ID NO: 511338 - protein, 413 aa, unidentified
MELEVMVERCAFLDVHRDTAVACARTPDGRGGRTEEVAEFGTTVSQLLALGDWLCERGVTRVGMEATGVYWKPVHWVLEAVIAEVWVINARHMRNVPGHKTDVADSVWGASLLEHGLVRASFIPPPPIRALRDLTRYRKSVIEDRTRETQRLHKVLEDAGVKLSSVASKVLSKSGREMIDALIAGERDADVLAELAKGRMRSKIPRLKDALAGRFNEHHALLCQAMLARVDQADATIDALGVRIGELLDPFEAAVSLLVTIPGVSQRTAQVIIAEIGADMSRFPDAGHLASWAGMCPGNNESAGKHRSGRTRHGSKWLRKALIEAAHAASRTKDTYLAAQYAQIRYRRGPQRAAVAVGHSILVVAWHLLTNGEPYNDLGGDYFDKQRNSAARQRRLVAQLEAMGNTVTLTQAA

SEQ ID NO: 511339 - protein, 347 aa, unidentified
MLALDPGLDVVIGVDTHKHTHTAAALRSTGAVLDHLTVPADPAGYRRLIAFGQRHRATLWAIEGTGSFGAGLTAALLAGRERVVEVDRPQRPARRGGVKSDDIDAVRAARQALAGVGLSEPRCRGEREAIRVLLATRAQAVEFRTRAISALHALVTSAPDGVRERLRALPLGQLLRTCAGLRRSARQNAEEFATVVAMRSTARRALACEQEAAELETQLQGLLRQLAPELLDQLGIGPVVAGQLIASWSHHGRVRSEAAFAKLAGVAPIEASSGTVLRHRLNRSGDRQLNRALHTIVLVRMRQDPATKAYLQRRLAEGKTIREIKRCLKRYVARQLFRQLEALPPAA

SEQ ID NO: 511340 - protein, 430 aa, unidentified
MNLKPFAGIDVSKYFSEMVVISPTNEILARLTIRHNNPSDFDRAIEILKKVEEDFAARPIIVMEATGHYHKILSRFFNCRGWDVSIINPLQSNSIKNAGVRKVKNDKIDALWIALTFRLTNSAIAQPSSETLDCLKNLCRQYYNLSDELTSYKYRLTSCVDQIMLNFKEVFPDICSKTSLAILENYPTPNDILSADSEKLISIIQQTSKKSYQWAKEKYELLIEKAKQFKPFSISDLATVTMLKVYINMVLTLQQNIDKIFEAINQLVQQSSQTQPSISENINLLQSIPGIGFLTAATILAEIGDFKKFSKPNKLVAFFGIDPSVNQSGQFVGSKNKMSKRGSKILRRILFTIALANIRTKRDSKPCNPVLLEYYQKKCQQKPKKVALGAVMRKLICIIFAVMRDKKPFELRTPEEHIQKCFNKTAVCCV

SEQ ID NO: 511341 - protein, 334 aa, unidentified
MDKVTTVGIDLAKSVFSLHGVDGAGRVMLRRTVRRDQLIQTVAALSPCLIGMEACSGAHEWGRRFQALGHTVKLMAPKFVAPYRKSGKNDGNDAEAICEAVTRPSMRFVPVKSVEQQALLAMHRVRQGFVVERTATINRLRGLLSEFGVVLPLRSVTVRRQAAAAAEKLPELARRAIGDLLEQLRVLDERIGGYDQEIEAQARLCEPAQRLMKIRGIGPTTALAIVATVGNAREFKNGRQFAAWIGLTPSQYSTGGKPRLGHISKRGDAYLRNLLVQGARSVLNSASAHQDRMSRWILELQPRRGYYRTLVAIANKNARIAWALLARNESLRSA

SEQ ID NO: 511342 - protein, 346 aa, unidentified
MNQIIRIGMDTSKHFFQLHGVDAAERPVLRRKLRRHEVLAFFAKLPPTVIGMEACGAAHYWARELRKLGHEVKLMAPQHVKAYVKRNKNDGRDAEGLCEAMSRPTMQFVAVKTDEQQAALMLAGVRQQLIARRTQLSNAIRGYAAEFGLTAAKGLDKIEPLLARIAQDETVPALARELFAFQGRDYARLQIDLKAIEARLMAWHRANADSRRLAQIPGIGPIGATALVMKAPDPGLFPSGRHFAAWIGLTPKDHSTAGKTRIGKITRAGDEMLRSVLVAGATAVIQQAKNGRGRPSPWLVALLARKPPKLAAVALANKTARIAWKLLTTGESYDGARMPVASALAA

SEQ ID NO: 511343 - protein, 498 aa, unidentified
MRRRAYRATDVKDVQLEKVLSRAPAEAVTVGADIGKEAIYSVVRWSDGSFERPWKAKNPEEVATLVGVLRALADQRELIVAMESTGSYGEPLRSKLAEAGLTVHRVGGKAAHDYAEVFDGVPSQHDGKDAAVIAELAAFGKSTPWPFRTKSASEAEMASWVDWLDIQQNFQRMWIGRLEALLARHWPEATRVLEFGSVTLLRALAHYGGPAELAKDPQASARLASWGGYWLRKEKIEKFLASAAQTAGVPQGAEESRRMQQYAAMALAARRETRNARGELKRLAAGNEVIQRQAKAVGVGTACVLWVMLGDPKDYPCGEAYRKAMGLNLKERSSGKYQGMLKITKRGPSIVRRWMYFAAMRTAQSAFVKPWYEAKKAKDKDRGNGALIAIARKLALALHAVGAHDRPFEPWRLFSQKILVRKQQRQAARSRANSGREVSSGMGAPPPNPRDLSHRANPGDKKGERGQTLPPPSPVLAPGAALGSVPTGALSSVQVKRV

SEQ ID NO: 511344 - protein, 351 aa, unidentified
MSHKTAAAAAQTIGIDTGKNTLHLIGLDDKGAIVLREKVSRGRIAARFANAPRCLIGIEAGMATHYVARELIALGHDVRQVPPAYAKPFRQGHKNDFRDAHAIAEAVQRPSTRCVPVKTDDQLDLQALHRVRSRLVGQRTAVINQIRGFLLEHGIAVRQGLRFLRQQLPDILAKRGDVLSPRMTRIIEDLSGDWRRLDERIKHITEEIEVLAHGSESCRQLMTAPGIGPLIASATVAAIGNGTAFAKGRDFAAWLGLVPKQMSTGDRTILGRISKRGNRYLRTLIMQGARVILLRPANWAKHSFGLWLTAAAQRLHHNVLATALANKLARIAWTVLAQGRSYEARVEPKVA

SEQ ID NO: 511345 - protein, 408 aa, unidentified
MEVLYPRCAGLDVHKDSVFARVRCVSEPRHDEVRSFGTTTSALVELNEWLSLHDVTHVAMEATGVYWKPVWHMLEESFELVLANAQHIRNVPGRKTDVNDATWIADLLAHGLIRSSFVPPVAIQELRDLTRSRKQLVRETAQHNLRIQKTLEDANLKLGSVLSDVLGNSGRAILQAIIAGERDPEKLADLAQGRATKKRAELIEALRGRIRPHHQALLKLHLQLVDALKEAIAEIDARVGKTLAPIQKCARLLTTMPRVNDVTAQVMVAEIGVDMQRFPSAGHLISWAGLCPKNDESAGKRRSTRLRQGAPWLKTTLVTSAWGAVRMKDSYLQAQFHRLRARRGAKKAIVAVAASMLTAAYHMLKNGVEYKDLGAEHFTRRDKSKAIQRLLRRLSELGCEVKLNAQAV

SEQ ID NO: 511346 - protein, 346 aa, unidentified
MVMMIGVDPHKATHTAVAIDGNEVVLAERLVRANKMQVLELLSWAKRLDGSERTWAIESAGGLGYLLAQQLLAAGEHVVDIPATLASRVRVLGSGRSQKNDPNDARSVAIAALRAPRLVPVRVEDHASVLRLLSRRHTQLGWTYNKTACRLHAIIAELVPGGIGKELVVSQARSLLETIEAASAVGRERHLLAVEMLDELDRLAAQRKQLRRRITTAVAASATTLTDIFGVGDVGAAIIIGQVGDVARFATADRFAAYNGTAPVEWSSGNPKRPVHRLSRRGNRTLNHVIHIAAVTQLRHAHSPGHAYYDRKRNEGHTAREALRSLKRRISDVVYRHLVADAARPG

SEQ ID NO: 511347 - protein, 344 aa, unidentified
MTVITIGIDLAKNVFQIHGVDENGKCQLKKRIKRSQMTAFFANMPTCLIGMEACAGAHHWARILIAQGHTVKLMPPQFVKPYVKTNKNDMADAEAICEAVSRPNMRFVSIKTPEQQSLLSVHRARTGFVKARTAQINQIRGLLAEFGIVLPQGAVAVSRHVPELLEDADNGLPMPFRQLLSSLYENIKQLSEHIETLETAINEQFRQDALCKKIAAIPGVGVLTATAIVSAVGDGKGFKNGRQLAAWLGLVPLQHSSGGKNVLGRISKRGDSYIRTLLIHGARSVILARRHKLLPGSWLSRLLARRNKNVAAVALANKNARMLWVLLTTDKEFSPEQTVGAVYM

SEQ ID NO: 511348 - protein, 341 aa, unidentified
MAVAGGLDLHRGQLTFDYVDTGTGESWRGRICPADRESLRGWLRRFHGVPDVEFAVEGCTGWRYVAEELQRAGITPHLAEPAETAGLRGRKRRAKTDWADARHLRDLLLDGRIPESWIPPGHVLEARALVRLYKDLLEERTSWQQRVHATLFHQGIPVVPKLGTADGQQRLEAAELSAAGRRAVQAGLRQIERLTQEMASLRRELARLSSRQPGCRALRRAHYGIGGLLSVAVWAELGDCRRFSSSDDAVRHTGLDITIYDSDGRRARGHIARQGPPVLRWALYEAALYASRPASPDYAYYCGVRDRIDGQRALLSVARKLARRCYHTLRDLGEDALAPAA

SEQ ID NO: 511349 - protein, 475 aa, unidentified
MVHPYTKMTQSLSSKPMKKQEQPIAAEPKNLPVINPNAAGIDIGADRHWVSVPVSRDSKSVRSFACFTADLYAMADWLKQCGIETLAMESTGVYWLPVFQVLESRGFEVKLVNAHYVKTVPGRKTDVLDCQWLQKLHSYGLLSGSFRPDDQICVLRSYIRQRDNLIKSAGVHVQRMQKALTEMNLQLHRVISDITGTTGLNIIKAILGGERNPLTLAALKDGRIKASTQDIAAALKGDYRCELIFILQQELQLYEFYQTQILAIDAQIEQCLAAFADKVDVTKKPLTKPKRRGKKQPGNAPQFDLRTHLYRISGVDFTQIQGFGALTVLILLSELGLDPTRFPTVKHFTSWLGLCPGSRVTGGKVKSSQTRSVVSRAANAFRMAAQTLCRSHSALGAYYRRMQAKMGAPKAITAAAHKLARIFYRLWTSGDQFIDSGVDAYEQRYRERVVNNLKKKALAFGLELTPISDSTQCVS

SEQ ID NO: 511350 - protein, 375 aa, unidentified
MKETVRFLGLDVHGETIAVAVAEPDGGVRSLGTIANRAEAIRKLVKKLGPTEQLRACYEAGPTGYVLYWQLTRLGVECAVIAPTLVPVKAGDRVKTDRRDAERLARSHRSGDLTAVWVPDEGSEALRDLVRAREAAKADQLRARHRLSKFLLRTGRRPETKIKLWTGVHMTWVRQLRFEHPAQESTRLDYLHEVEHMAERVLRLEQAITDAIKLATPEMQEVIRGLQALRGIAEISAVTIVSELGTLSRFENARQLMGYSGAVPSENSSGKRVQRGSITKTGNAHLRRIVVEAAWSYRLRPGIGPRLRKRQEYVPEEIKEIAWKAQIRLTKRYARLAAAGKDQRKIVTAVGRELLGFIWTIGIKAETTALQKMAA

SEQ ID NO: 511351 - protein, 353 aa, unidentified
MQTQSKRIDFSGQNFYCGFDTHKKTWTVTIETDEIALKTFTQNADADLLVQHLRKNYPGGNFIAGYEAGYFGYGIQRKLESMGVHCLVINPADIPTTNKDKDQKRDPRDSRKIAKALKNKEVSAIWVPPVALEEDRQLLRTRYALAKDQTRTKNRIKAFLQIHGIKYPEIFSQSGSHWSARFVKWLQAIQLTEPSGTEALQSFVRHLQFLRTEILVVSRKIRVLTKSSRYEKTYNRLIKIKGIGMITAMTLITEIGDINRFKNPDNFRSFIGLIPSSKSSGEKEYQGRITNRANSHLRYLLVEATWIAIRNDPYYLHHYKEYRKRMKDNNALIRTAGKLANQIFYSMKNTTEK

SEQ ID NO: 511352 - protein, 345 aa, unidentified
MKNTRIGVDLAKDVIQVCIYARNKVLSNTEMTYQAFALWLINTKPTTIIFEACSTSNYWNQVALSLGYDAKLICPKFVSSIRKKQKTDANDALAIVQASFVPDITFISGKSIEQQQLQSIMRLRDLATKQKTALSNQLGALLLEFNIRCSPKLGGLRGAIESVLENAENEFSWALRASLKAAWDHYLMICQSVATYDESLIKAINEHPECKKLLKLEGVGVINAVNLYIALGCSEIGVFAKGKDAAACIGLTPIQHSSGGKTKLGSVGKYVKNSILRSQLVVGSMAAIRMIVKRDAKTKKERWIQELVSRRGIRCAAVALANKNVRTAYAMMTKGTDYKAELLAV

SEQ ID NO: 511353 - protein, 386 aa, unidentified
MRVIIGMDPHKRSATIEAVDPTGRVLVTGRYATDNAGFTEMLTAGRRFADRVWAVEGCNGIGRHLAHRLVHDGETVIDVPTKLSAQVRVFATGNGRKTDPVDAHSVALAALHAPGLRRVEADPDLVALGMLAGRRDELGRAHTAILCRIHRLLLELIPGGAKVFLTARQARALIAEVTPHDAASRVRRRLVEEMIEELETIDRNTRAADKELRQLVLDRGSTLMGLHGIGPSSAARLLADTGDIHRFRDRDRFASWNGTAPLDASSGEQQRHRLSRAGNRKINRVLHIMAIVQLRNPTPGRVYYDLRKTGGKTSMEALRALKRRLSNVIYTRMLADQQRRELTGPGGQSGTTTDSSATGSNPHTDPSDKPHPGPTFQANPNPTPRG

SEQ ID NO: 511354 - protein, 392 aa, unidentified
MYIVGIDIGKNHHEASIVSPEGKQIGRSLRFATTHKGADSLMSFIFKNIGNSPCVFGMEATGHYWYPIYSFLKAKGYTIYVINPIQSDSLRKMYIRQTKNDSIDSFLIAEVIRFGQFGTTSMADENILAMRQLCRYRDSVISSRTEIKLRIGTIMEQIFPEYEKQFSSLWVSTSMGILEKYLTPENIENAPIDELFEIIKDKSHNRLTKAKAISIKEAAADTFGIKIAQDAFSFQLKQLIDRMNFLDKQIEALDCQILEYYEKFDCYLHTIPGIGMIGAATILAEIGDISRFKNSSALVAFAGIDPTVRQSGEFNSTHNHMSKRGSPYLRHAIFLAATTCSFHNSPLNAYYKKKRDQGKHHLTATGAVARKLTTVIYAVLRDSKPYEPKKFC

SEQ ID NO: 511355 - protein, 343 aa, unidentified
MDHFAGLDVSVKETSLCVVDDAGRIVREMKVASEPEALLQALKKPCYHLKRVGLEAGPLSQWLFNALAEAGLPVICVETRHMRAVLKAQINKTDRNDARGIAQMMRAGLYRPVHVKTLRSQKLRMLLTHRKLLQSKAIAIENDLRATLRNFGLKVGVVGTVKFEARIKQLVENLPDLAVLVEPLLLVRRVMREQIGILHRRLLAIVRDDEVCRRLMTVPGVGPVVALTYRATVDVPSRFRTSKAVGAVFGLTPAKHQSGESDRTGGISRCGDEMMRAMLYEAAQILLVRSTKWSWLKAWAMKIARRRGLKKAIVALARRLAVIMHRIWVDGTEFRWTREVAAA

SEQ ID NO: 511356 - protein, 347 aa, unidentified
MTIVEAPVGVTGGVDTHLDTHVAAALDPLGRLVGTESFDADAAGYKALLAWLEGFGQVDKIGVEGTGSYGVGLARFLRRKGVEVIEVNRPNRQSRRSHGKSDPLDAVEAARAVISGRALGSGKSKDGSVEAIRVLMVAKRSARQARVKAIVQMRHLVITAPDQLRSRLKGLTVTALVAESAKLRATRAPDPVTAATKASLCSLAHRIQDLDAELEELNVQIEALLLATAPELIARFGVGPDTAAALLVAAGDNPERLHSEAAWAHLCGVAPVPADSGKSAGHLRRHNGGDRQANSALWRIAMVRIAHDPETTLYFERRVKEGRTKRDVIRILQRYIAREVYRYLPRG

SEQ ID NO: 511357 - protein, 330 aa, unidentified
MEEHYIGVDLHKAFFQVCAVDSFGQRCWEDRFPTTPGGIAAFLGRTRAGVTVGVEASGPTWSFVDRLQGRLAQVVVVDAAKTRWKAGYAAKTDRLDARRLADALRRESVVSIYYPPAAIRDLRELCRYRRSLVRTQTGLKQRLQALLLRHGVVEPDVSTLWAGQGARWLTGLALPGRAGESLVGLRQVLAAVAQQVMTVEREVVREAAGDPIVIALQTLPGVGPVLGLTLRAEIGEITRFPDPPHLASYAGVVPRISQSGLRRARAGAITKQGSPWLRWALIEAAIHGVNRADPVGRWARRLAVKKGALKTRVALARALCEDIFRVWPRT

SEQ ID NO: 511358 - protein, 315 aa, unidentified
MSQCNESFVGIDIAKKHLDVCLLPERRGFQLSHDEKGLKELITRLRQIKPTLIVVEATGGYERRLAAELCQAELPLSVVNPARVRHLAKGYGTLAKNDRIDAYNLALFAQVVRPAPQRKSSQKQAELNDLVARRRQLVEMIVMESNRLEKLPGVSVRQSITRIMTLLQEQRQEIDHEIAEHLRSDDEWNGKVQILQSVPGVGPVTAATLVAEMPELGELNRHEIATLAGLAPFDDDSGGWRGRRFIRGGRTSVRVTLHMATLTATRCNPLIKPFYERLIARGKGFRRAMVACARKLLILLNTLVKEKRPWRPLPA

SEQ ID NO: 511359 - protein, 343 aa, unidentified
MEHFAGLDVSVNETSVCIVDEAGKIIREVKVASEPDALLVVLKKDGYHFKRIGLEAGPLSQWLYSALAEANLPVICVETRHMRAVLKAQINKTDRNDARGIAQMMRAGLYRPVHVKTLRSQKLRMLLTHRKLLQSKAIAIENDLRGTLRNFGLKVGVAGAARFEARIRELVADIPDLAGMVEPLLIVRRVLREQLAVLHRNLLAIVRDDAVCRRLMTIPGVGPVVALTYRATLDVPARFRNSRAVGAIVGLTPAKYQSGESERTGAISKCGDDMMRVMLYEAAQSMLRPTKWSWLKAWAMQVARRRGMKKAVVALARRLAVVMHRIWVDGTEFRWSRQEAAAA

SEQ ID NO: 511360 - protein, 473 aa, unidentified
MFSALISNLQVRLGSLTNTQGAPRNRLSILSSQNPCMHVHICNLPLMEVIMKSQSNHSFTAFVGIDWADRKHDFCIQAAGSDQRVFGTLEHSPEAIAKWAYSLRDQFGGPIAICLELAKGPLVYALQRFEFLVLFPVHPSTLAKYREAFTPSRAKDDPTDAEIALDILLRHPEKLQPIKLQSAPMRELATLVEERRCLVNEVTSITNRMTSTLKQYYPQVLDWFENRDTLIFCDFLERWPTLKQVKRARRSTIESFFHQHNGRRAHLIEERIQGIRAATALTEDESVIRPCQMVVQALVEQLRVILQAIDRFDAEIAAVTKNLPDYDLFAALPGAGHIQAPRLLVAFGEDRDRYASAAEIQRYSGVAPVVERSGNKCWVHWRLACPTFLRQTFVEWAGSTIPRSFWAEAYYRQQRSKGCSHRVAVRSLAFKWIRIIYRCWKTRTPYDESVYLKALKNRGSPLLANATESLKMT

SEQ ID NO: 511361 - protein, 364 aa, unidentified
MTHNHTQIESAQVGIYGGVDTHLDFHVAAAVNALGALLGTAVFATTVQGYAELLAWLRAWGPLAQVGVEGTGSYGAGLARHLHRHDVEVLEINRPDRASRRRRGKTDAYDAEAAARTALAGHARAAKINTGAVESLRMLKLQRDSAVKQRTATLNQMHQLRVTAPQELREQLTGLTKHTLATHCVRFRVTRDTNRLTDPVQAAKKALHGLARRVLALTAEITELDADIAALTRAIAPATSAAAGVGAQTVAQLLIAIGEQPERFHSEAGFAALCGTSPIPASSGKTQRHRLNRGGNRQANSALHMATLNRLCHHPPTRAYIAARTTDAKSDPHLRRKLKRYLARELFTLLRQDLRALNTPDIAA

SEQ ID NO: 511362 - protein, 347 aa, unidentified
MLADQLDYVIGVDPHRDAHAVAIVEVRTGVVVFEATVAADNSGYSDALRFAEQRAAGRRAFAVEGTGSFGAGLTRFLTGKGEQVFEVSRLRRERRSGGKTDALDAVRAARSVLTQKHPAIPRANGERQALRALLAAREGAVSARTAALNQLRDLLVTTPEPLRSELRPLSRAKLLARLTATRPDRRHDPELRGTHLALKAVARRIQQLTAEERGLAREIEQLTSRLVPQLLDQPGIGPLLAAQLLLSWSHPGRVRSEAAFARLAGAAPIPASSGQTIRYRLDRSGDRQLNRTLHQIIVTRRRMHPPTIDYIERRTSEGKTRREATRCLKRYLARNLYRLLEHPPIPT

SEQ ID NO: 511363 - protein, 394 aa, unidentified
MKLIGIDIGKNKHFFCVMDQQTVEIISQPVSFSNDKEGFDFLVQKIKSYPKDSILIGMEDTGHYHFALLKYLLDLQYTVALINPKTTDFNRKMQGGITKNDKLDTINICDVLDTPERKKQYRITKVNSFDLYEQKQLTRHHHNLKEEENVYKNRLQKCIDIVFPEFNKLFNSKYGTVYMNILKMFGSAENIANTDIRTIRKCFEIEGRGNRISLTPERLKECARSSIGISSSADVIQIKHLTAQIELIEDQLTEIDKKIEEFSIQNNSPILSIPGISHFSGTSILAELGDISNYSKPSQIIKFAGVAPLHYESSQFNAQHTAITKKGSKYLRKTLYQIILPVIRHNPVSNKYYQLKISQGKGHRCAQGHCVRKLLRIIYHLLKTNQQFDPQLLR

SEQ ID NO: 511364 - protein, 406 aa, unidentified
MKKSTSKVKDRFWVGMDDHAATIAVAVLKNEEAAPKAVFTVSNDERGHKQLIKRLLELESEVQCVYEAGPCGYGLQRGLAKAKIHCDVAAPSLTPRRPGRRVKTDRRDALKLAEMLRGKVLVMVTIPDLEREALRDLVRAREDAGEDLLRVRNRLSRFLLRHEQQYRAGDRWTRAHWRWIRSLKLEQKYAQQTLDEYITVTEGRKDRVDALTQVLKTVAEEHHAVISRYCALRGVDWLTALTVYAEFGDLRRYTKAPGFMAAIGLVPTEDSSGPNQRRGAITKTGNAHVRRVLVESAWHARHAPSRAGERLRKRRQNLPAEVVRIAERAEVRLHRKFSRMIYRNKRSTVAAVAVARELCGFLWAIAQLPWPMTNRRCIGCEPRGGSRQTPRKENPRPGYSGACFGT

SEQ ID NO: 511365 - protein, 415 aa, unidentified
MSKRNRRGRIIGSDVLVVGIDVAKRRHVAVCRRPNGLKEKAFSFINLRTGFERLLELSDKSRQRSGCCSVLFALEATGHYGHALRQFLDDHGFALMGVNPAHTKRAKELEDNSPEKSDPKDAGLIADLAAQGRARPLMIPRGEFADLRRLGKLRQRLVVERIRYLNRYHGLVDLLLPELVAIVRDVACRTMRRMFEKWPTATDVAGADYEAFEDQLWRWSRGHIDRAKITLIHRASWHSVGLHEGLDAAKLEMKQLLAALIQVEQNLADVERAQEATLLRVPYAKLLLSVPGLGPVSVAMILGETGDLRSFPSAEAVIKLAGYNLYRLASGSFKGKTRITKRGRPLLRHQLFLAALRLSKSGSPLETFRNRLRERKTGPEVAVAGSRKLLRLLFALVRDGQSYEPGRLGVHQPAA

SEQ ID NO: 511366 - protein, 337 aa, unidentified
MDYFAGLDISMDETHVCVLDREGVVVRESKTESTAEAIAGELAKAPSCRRIVFETGRMAPILFHGLNQLGLPVVCVESRQAYQALKSLATHKTDRNDARGLAHLARTGFFKPVHVKSLQAHALRSLIIARKKLVGQRVTLENQIRGLAVVFGIRLPRALAAAFIDQALKASEGIAGLSAAMRGLITARTAVMTAIAAIDADIRRMTRASAACRRLMTIPGVGQLTALAFVAAIDDPSRIRRSRDVGAYLGLVPRRYQSGEVDYVGSISKCGDRRVRTLLYEAANVMLTRYKGQLKLKDWAFAIAKRSTMRKARVALARRLGIIMHAMLRDETEFVLA

SEQ ID NO: 511367 - protein, 440 aa, unidentified
MSMVMIGVDPHKASVSIEARDSTTERLVATGRFGTDTQGYRQLKALTRQWPQRIWAVEGTAGTGRPLAQRLVADGETVLDVPAKLAARSRVFDTGQGRKTDAYDAHAIVMVALRDRGSLREVREEDALTILRMLVDRRDQLAKTKVQGLCRLHRYFTELIPGGAPRQKSVDQYRRLLASVRPRDQVGKTRRRIAADQVKELMRIEARLKASKKELTAAVLATGSSLMDLRGIGPVNAARILADVGDVARFPSKAHFASWNGTAPLDASSGEQLRHRLSRAGNRRVNHALHMAAVVQLRHDTPGKAYWRRKNNGPGKALHAMRCLKRRISDTVYRQLVADATARQETEEVAAGRVGHPGASLASSAADLPPDIGTSDQPQPEPADPTVDPPQAGDQTPAGGSTAAPPRRRARGVNVQRLPGRTTLTPTNADAQSRLEPAGT

SEQ ID NO: 511368 - protein, 308 aa, unidentified
MTTIYTGLDIAKLNLQLHLAGRIHDLPNSAAGHRRLLKLLTPQAGLHVVCEATGGYERDVVAALHEAKVPVSVLNPARVRHFARATGQRAKTDDIDAAVLSAYGQALQPKPTAPRTEQEQQLAELVRRRVQVLEILVAQRQQTERLTVPALRRQAQSLVRRLERDMAQIEEQLKALRTQASTLDVRVQKLEAITGVGAITALGVLAELPELGTLNRRQAAALAGLAPHPRESGQWHGRRSIGGGRAPVRRALYMAALVAAHSNRQLKAFYQRLRAAGKPAKVALTAVMRKLIVLMNHILKNPNFALQN

SEQ ID NO: 511369 - protein, 349 aa, unidentified
MVVIGVDAHKSTHTLVAVDDIGRQVGQRTVKATTEGHLSAIEWAAQWPQVQFALEDCRHVTRRLESDLLRRGYAVVRVKTQLMAVHRRSARQPGKSDPIDAHAVAMAALREENLPIARLDEPTREVKLLSDHRRNLVCERTKLINRLRWHLHELDPELVVPMRGIRRYCVMDELVERLAAFTGVVAQIAGELLGRCRQLTEQINDLERQIRDRVRRIAPALLAIPGCGVLSAAVIIGETADARRFHSKDAYAKFNGTAPIPVWSAHERVRLNRGGNRAVNSALHAIATTQVARGGPGEDYVAKLQAAGKTKREAVRLLRRRVSDRVFQVLRTAETAIENCSQGPLSAAA

SEQ ID NO: 511370 - protein, 394 aa, unidentified
MCQQYKTEASMIKHNILFIGLDTHKTFTEVAYIEDQRGAKTIHLGKILSNKAAFKKLARQLQSKYPHATLHFVYEAGPCGYWIYRLLTNLAHCCYVIAPSLIPKKPGERIKTDKRDALKLAKLLKSEDLTPIYVPEPEDEAVRDLSRARETGMKDLKDAKYQLKALLLRNNINSKVKDNWSLQHLRWLAELVLPHPCQQIVLQEAVSTITERLKRLKRLDNELTHQVKNWRYYPVVKAVQALRGVRLLVATGVIAELGDLTRFDHPRKLMSYLGLVPSEHSSGGKRRLGAITKCGNSRARRLLVEGAHSYKHNANISKEMQLRQEGLSKEIIDMAWQAQLRLCRRYNRLIHRGKHRNVVVTAIAREMIAYIWAISREVVLPVVDVKLRLARMPA

SEQ ID NO: 511371 - protein, 404 aa, unidentified
MRFCGIDWANDHHDALSIDEQGHQLGSIRVTHSPEGLSQLDTYLEGIAGPGGKGQIACIVETTHGLLIAHLLEQGWSVYPVNPRTVERRRAPSGAKTDIIDAYLLAKTGRADFQDLRRLNPDSEQIQELKTLTRDQDALVHMQTRLVNQLTACLKAYYPVVLEVFSKLHQPTTLKFLRAYPTLQAARLASVEELAALLKQARYPGASKAAQQIAQHLQQPCLQANAVTTRTKSRLMLALVDQLEPLLKQIADYDKEIERLFLSHADSEFFQALPGAGARLAPRLLAEMGEERSRYQSASSLQALAGTSPVLFQSGTYQKAHRRLGCIKPWRNALQQFAWQSTHQEAWAKEYYQRKRAEGKSHTVAVRALANVWARILYAVWKKKELYHTTTFELARLAHAPRVA

SEQ ID NO: 511372 - protein, 383 aa, unidentified
MTVVVSENNEANEAIDAIFVSIELSKNSWLVTSLSPHTGGKLSRHGVPGGDIAGLLDRFLQLKRKAHERTGRECRLVIIHEAGFDGFWVQRVLEAEGYESHVVDAASIATSRRRRRVKTDRLDGETLIRALLAFKRGEPRACSMVRIPSPAEEDRRRICRERKILLTERVRHSNRIKGFLFSQGIRGYSPFQRDRREQLETLRTGDGHPLPDHLKRQINRELDRLELLQQQIAQVEAERDEMLAREKQSSQEVAMLTNIVGVGPEFAGVLWSEGLCRHFDNRRQVAAYAGLAPTPWQSGSIDREQGIGKSGNRRLRYTMLEMSWLWLRHQPRTALSRWFNERIAQSGGRFKKVMITALARKLVVALWKYVTAGVVIEGVRLRA

SEQ ID NO: 511373 - protein, 408 aa, unidentified
MEVVYRCCCGIDVHKKIIVACLNQGGEQSLREFGTTTSEIKSLATWLTESGCEIIAMESTGVFWQPLYNLFELMDLDAIVVNAAHMKALPGRKTDVKDAEWIADLLRHGLLKASYIPSREQRELREITRYRKSLTEERCRETNRLQKILEGANIKLDSVVKDINGKSARKLLEKIIEDDVPTSEEEISKMIHGRMRSKLGQLVTAIEGITTPLQRKLLAQVIDHIDDLNRRIADLDKLVQDYMDEYEAAITALCDIPGIARRSAEVILAEIGLDMSRFPSAAHLCSWAGVCPGNCQSAGRRKHGKTTKGNKPLKTILTQCAKSARSVKGSYFSAQYQRIAARRGKNRATLAVAHSMLIAIYHMLRNNVPFRDLGSDYYDSFNRDRKIHGYLKRLKALGWEPDALPGSA

SEQ ID NO: 511374 - protein, 346 aa, unidentified
MGKSITNFSEVTTVGLDLAKHIFQVHGVDAAGRVIVAKSIRRSKLLEFFALLPPCLVGLEACGSAHYWARELIKLGHDARMMPPAYVKPYVRRQKNDAADAAAICEAVTRPSMRFVGVRSLENQAALMSHKTREMLISQRTQLINGLRGHLAEVGVIAAQGPRYARELADRIEAGDEAIPLAVCEALAPLVVQLRNLDEAIVRLDRAIAKMAQKDETTRRLMSIPGVGPITASAIAASVQDASSFSGPREFAAFLGLTPKQNSSGGKQRLGRISKMGNRYLRKLLVVGAHAVLFHRKPHTDALRTWAKKLIEKKPFNLVAVALANKMARIAFAILRGKTSYREIPA

SEQ ID NO: 511375 - protein, 358 aa, unidentified
MRMVVYVGIDVHKKYCQAALMNDNGKLERELRFDNTTEGAKSLVNLAKSIDPEIKAVLEPSANFWIRIYDQLEDESVEVKLSNPLRTKAIAEARIKTDRIDAKTLATLLRGDLVAESYVPNHKNRERRAIIRHKASLMHMRVEIKNRIHALLDKHELTHSYSDLFGKEGLEWLRNIQLPTIDHQILQSNIQILETITTEIDNADIQIAKDAVNENQAKLLMSMPGVDYYAAMILLSEIGDVKRFPTPDKLASWVGLTPQVHQSGENNWTGHITRKGSKRARWILGQCAQSARQHDPRMRNFYERIERKHGSSKAIVAVAHKMVTIMHVMLTRNEPYRGQNIQLTEKKHKRLNNIANSA

SEQ ID NO: 511376 - protein, 352 aa, unidentified
MRYLGMDVHAKSTVWCLVDTQGAVVREGRVPTTAPALAALVQELSQEDEVLAGQEVGTLTYLVHDAVTAAGTRLLSFNAQQLRMIAASRKKTDRRDAYWLAKALQAGMYPHPVYIPTGEIRELRALLSQRRVVHADYNRWRYRARTYLRAGGYAVAPGVAALRAALAPGHASTQGAPPSLRAALALCQRQETALRAELVQLDAALRARTEAVAAMQRLRTVPGIGPLTAATIYAWVGDVRRFPHAKQLAAYAGLVPAVRQSGGAVHRGGITKQGAPALRATVVQAAQVLLSRCRSAEATPLQAIGLRIQGTRGRRKIAVVAVARHLLRIAYYILRDGTTYEALRMRRLTDAA

SEQ ID NO: 511377 - protein, 468 aa, unidentified
MALTLGIDVACRAAHQATLAVDGKTVWRGRKFWTRPADLERLWDDLDLAEPGELTVVVEPTRNAWIVVAEWFRRRGATVVMVPTTQSSDLRKYYSKHTKNDRIDSELLARLPLLHPEGLRPYSGQGPADPMRRLTRQRSTMVKRRTAVYARLDTLTELLGPAWYEALNARYGIAALEFLARYADPHAVIRLGQARLARFLIARSRGAWREDRAAALIVAAKETLSLWTLDDGSDGMDFAELAADIAHEAEQALFLTGQIKEIDERIANLYADADPDGIVASAPGVGPVISAVIAGRIGDPHRFTSLAAIRAYSGLVPKVSQSGVSKVESSITKAGDPLLREMLFAAADQARKVDPQIAAKYQRLMAGDRHHSSAVCHLATTMLTRIATCMRTGQHYVLRDVDGTPITEAEGRAIVKDRYQLQPRRRDNVRHQRMRERRKQAAGQESQESQSAPTSQPASTKPTSRQVA

SEQ ID NO: 511378 - protein, 370 aa, unidentified
MKETITSFVGLDVHKESIAIAVAEAGRQAPRFIGTVVPSLRSLQSALRKINSASRTLVVYEAGPCGYGLARRLNAQGYACEVVSPAHIARSPIEQRVKTDRRDALLLARESRAGNLIAVVVPDERDEAIRDLSRTREDVLAARLRAHQQMKALLLRHGRTCPGRIAFSAAHERTLSSIRLSHPAQEIAFVEYRNAIKDAHERLERVTEALRLQSNQWRMNPLVRALMCLRGFDFIAAITFVAEIGDPRRFARPTALMAYLGLVPSEFSSGQSRHQGSITKAGNKHARRILIESAWAYCHSPRVSRDLEVRQQGQPKAVRDISWRAQLRLTKRFRHLRMARHLPQNKVCVAIARELCGFIWDIARQIKPLP

SEQ ID NO: 511379 - protein, 428 aa, unidentified
MNKEEIIRREQYCQIVKEITGSDQHMVVGIDVGKDKHHAFVGTARGICLFKKLIFENNIDGYARLLTIVDQVKTQNGLTKTVYGLEPTGNYHKPLARHLIRCDCDVVLVTGQAVKHNRQLLDGRWDKNDTKDAANIADLVSRARCLYYDCPAPSIFEVRGLLSLRRRLKREEHGLKMRIRNNLLAQYFPELDRFYSACESESLAIVRWFLNPHTISAMPFSEFFHLVTKTRRGVAQTLRLRKIHQLATESVGCPIGPSVEFEADLLVEKLHQVRDQIQKTGDLIEDFCLEFAEYSYLLTIPGFGPYISARVLASIADPFRFENRKQLIKMAGYDLCAKRSGKTSDKAVPVISKKGNGELRYALYQAANVAAARVDLFRTYFVKLLRGRERERGIKTKMRVKLAAKMLVIAWTLMKKKQPFDPAHLNIE

SEQ ID NO: 511380 - protein, 354 aa, unidentified
MSQSSTVTAGLDLGDKYSYLCLLDTQSGEVIEEGRLCTTPKAFERRFSGCEPMRIAIETGTHSPWVSRLLERFGHQVLVANARKLKLIYAEGRKNDKLDAENLARLARLDPKLLAPLQHRGESSQAHLAIVRSREALIEARAKLINHVRGTVKSFGARLPKCSSPTFHKKVGVYVPESLRPALEPLLETIASMTAHIREYDRKLESVASELYPETKLLRQVHGVGTLTALAFVLTLEDPSRFATSRAVGAYLGVVPSKDQSGERDPQKRISKRGNGLLRKLLVGSAHRILGPFGEDSDLRRHGLKIAERGGKNAKKRAVVAVARKLSVLLHRLWVTGEVYEPLYNAKRFAYRAG

SEQ ID NO: 511381 - protein, 520 aa, unidentified
MSEPAAEPDVYLGIDVGKSFHHAIALGRSGEVLLDQQLPNDEAEIREVIAALREHGSVLLVVDQPSDVGAFPVAVARSEEVGVAYLPGIAMRRIADLHVGQSKSDRRDALVIAHAARSLPHALRPISGEADSIAELRVLCAFDDDLATEINQASNRYRALLAKVHPALERAIGPRLAHPAMLDLLQDYASPEALRSAGHERIEARLLIRAPRIGSQMADDIELALGEQTIAVPGTRASASVLVRLAGQLQLLRHQREDIAEHITWLVQSHPLYLVVASMPGVGIGTSARILTEIIPRHFESAGHLAAFAGLAPVSRRSGTSINRQHRSVRGHRALKRALLMSAFAALSHDKDSRAYYDRKVREGKRHRQALSALARRRLDVLYAMLRDGRPYRSTPEDSPDDSTVPPVKRAHRVIRARAAAKSLTPHPAPPGFYDSIVERLRADGTFQCRVSDLPWDVVTFRHGLRDATDRVGIRIASKCLNGRFLAENVDFEPSEESLQALVERMVEGAPADRWEQFAR

SEQ ID NO: 511382 - protein, 388 aa, unidentified
MIYVGIDIAKLNHFASAISSDGEILIEPFKFTNDNDGFQLLVSKLESLDKNSLIIGLESTAHYGDNLVRYLVASNYKVCVLNPIKTSTMRKNNVRKTKTDKVDTYIICKTLMMQDSLRFVTFYDLDLMNLKALGRFRQKTIKQRTRLKIQLTSYVDEVFPELQYFFKSGLHQKSVYALLKEAPTPKAIASMHMTHLAHLLKVNSHGHFNKEMAQQLRVLAQKSVGSDDSALSIQITLSIAQIELLDSQLERVEAEMTEIMKFNDSVIMTIPGIGYINGGMILGEIGDIRRFSCPNKLLAYAGLDPSVYQSGNFQAKKTRMSKRGSKVLRYALVNAAHNVVKNNSTFKAYYDAKMAEGRTHYNALGHCAGKLVRVIWKMLTDEIEFNLE

SEQ ID NO: 511383 - protein, 324 aa, unidentified
MIDGILGIDVCKNTLDVSISSYTKVRTKSFTNSPDGWRHLLDWLIAQKIQRVHACLESTGRYSLGIACALYEADHVVSIINPAQIRDFVRTKLGRNKTDGVDASHIREYCELFKPSPWAPPSEAHRRLGELQTIRSGIIAGLTEWKNRKNSGIVDAEAQALADATISHFTSQLGAVDKAIALTIDNDCDLQSKRDLLLSISGVGETLAGVVLAELPGPDVLRSSVEVVAYAGLNPRRHQSGTCIDRATRISKIGNAVLRAALYMPALSAMRYNSAIVALVTRLKSRGRLKPKQIVVAAMRKLLVLCFGVLKTGRPFDAAIAMGG

SEQ ID NO: 511384 - protein, 362 aa, unidentified
MPNSVACGIDIGDSTSLASVYSKAGELVDRFEFEMNSEGYELASKRVPMEAGIACEATLMTYPLVKALEGRGHRVTVANPKQLKWIVESRKKNDRVDSEKLARLLMVGMLPEAHLLSEEERLKRDLLVQRVTLGKEVGRMKTRVLSYLKREGVNEFLPQTDDNYSVARRKAIRSFSFGDKRDVVLRTMMDRLDFLEGQCGPLEEEIRGFAKESDDVRLLMTIRGVDFYSAALYSSVVGDVNRFPSGDRLASYLGIIPAQHESSGVKRMGRMSKEGIPLGRWVLDVMAGNAINFNPAIRQYYLSALNRTGRAKKARVLTMRKMERMTYHMLKSREPWRYEDRGLTERKLSRLDGGGDQEGGEP

SEQ ID NO: 511385 - protein, 372 aa, unidentified
MAQPTPLLYVGLDVHKDSIAVAHAQGQSAAPPVFVGEIGPRQADLDKLVRRLQAKTPALVFAYEAGPCGYGLYRRLTAQGFACQVVAPSLIPKKPGDKVKTDRRDAVELARLLRSGDLTGVYVPTVDDEAIRDLVRARDAARLTLKNAKLRLKGFLLRLGLHYVGRADWNPAHQRYLAKVVCPTAAQQIVFQESVRAVDEQVDRLHRLEAELLERAPAWRLYPVVQALQALRGVQWLVAITVVAELGDLTRFDSPRQLSAFVGLIPSEYSSGAARRQGGITKAGNGRARRALIEGAWAYRHPAKVSAHIQTRIDALPKPIQDIGWKAQVRLCKRFRRLTARGKHSNVAVTAIARELVAFMWAIAKEVPITTT

SEQ ID NO: 511386 - protein, 344 aa, unidentified
MKHTTIAVDLAKSVFEVALSIHPGQVAERHRLRRDAFVPFFAERRPATVLMEACGSAHHWARQLEALGHRVLLLPAQHTRPYVIGNKTDRTDAKGLLEAQRNEQIRPVPVKSVEQQALAALHRLRSAWLAARTGRINTVRGLLREFGIAIPLGAKRVVPIVQALLEDADSLLPDSVRPALDEARAEIVELERRMRKVEHQLRALARQTPVVHRLRSIPGVGLLTATALVAFVGDVGRFPSARHFASYLGLTPRERSSGLRRRLGAISKRGDVYIRMLLTHGARSVLWKAKSRARLDRLRVWALQLERLRGHNKAAIALANKLARIVWAIWRRDTEFTEQLVTAA

SEQ ID NO: 511387 - protein, 301 aa, unidentified
MVLATRRVADGLAGVGELHVLVASHAVDPAQVAVGIETDRRLLVAALLAAGYQVYAVNPQVVGRYRGRHGSSRAKSDRGDAKVLADLVRTDRHNHRPVAGDSLLAEAVKVLARAHQSLIWARQRHVNAVRSALREFYPGAVVGALVAALGCLNQQVAALEQQLPARFADHQDAAIIRSQPGLGVVLGARVLGEFGDDPDRYQTAKGRKAFAGTAPVTRSSGLRTVVARAACNQRLVDACYLWAFAALTASPGARRCYDAHRARGATHHQELRALGDRLVGILHGCLAHRVAYQEQLAWPAS

SEQ ID NO: 511388 - protein, 397 aa, unidentified
MKKPMHPLIAEVPRSVTKVGMTIGIDLGDVWSHYCTLNEDGEVVDRGRFRTSPSGVEKWFTDLPRIRIAMEAGTHSIWVNEQLQELGHEVIVANVRELRAISHSDRKSDQVDAEKLARYARLDPKILRPIAHRTVAHQEALTLIRARNLIVRLRTAAVNAVRGLAKPCGYRLPASSTLCFAKRCMAVLPPALAEALGPVLEQIATMTVKIKHYDRTIKRLTETEYPETQALLQVYGVGQLTALTYVLTLGSKERFQRSRDVGCYLGLRPRRSQSGERDPQLGITKAGNTYLRSLLVECANHVLGSHGRDSTLRQWGLHLASRGGKQSRNRAIVAVPQVGRAAAPHLGDPGTIRSLLRCSRLIGDYVYLLRRSRVPMTACRLGPSTRPTENWQHRLLL

SEQ ID NO: 511389 - protein, 343 aa, unidentified
MKQISTIGLDLAKHVFQVHGIDEGGDVVVRKRLRRSDVVEFFAKLAPCTVGIEASASAHYWAREIGTLGHAVKLMPPAYVKAYVKRGKNDASDAEAICEAVQRPTMRFVPVKSAAQQASGMIYKVRELLVRQRAQATNAFRSHLSELGIVAAQGRSKLAELFAMVRDTNDAPLPAAARAVLEELAGQIEALSMRIERLDETIVAQVRSSEAGRRLTSIPGVGPITAGALLAMVPDPGSFRSARHFATWLGFAPRQKSSGGKPRLGSISKQGNRYLRGLLILGAANVLRFTRKNAVSAWLAALRERRPFKVAAVALAHKMARIVWALMVKGGVYRAAPSAVATS

SEQ ID NO: 511390 - protein, 345 aa, unidentified
MKYFAGLDVSLEETSICIVDETGRIVKEARALSDPQALCEALKGAGFPLERIGLEACSLTAWLHDGLHAEGLPATCIETRQANAAMKTMPNKTDRNDARALAQIMRTGWYRQVHVKSRQCRLWRSLLVARRTVLNEMRSIENVVRAMLREAGVKLGLPSRSAFAGRVRELAGADAQMMAMVEPLLAILAVMLGEFTRLTKQVLDIARNEEVCRRLMSTPGVGPITALAFRATIDRPERFGSSRAVGPHLGLTPARYQSGETDIQGRISRCGDELARTALYEAAHTLLVRSKKWSSLRAWGMNIARRRGMARARVAVARKLAVILHRMWADATEFHFGKEPAALAA

SEQ ID NO: 511391 - protein, 381 aa, unidentified
MSKASSEVAILVNGEKVHGYTMSNDALGFARLLGDLRTVHKPEIIFEATGVYSRPYTRLNPLEAKKQLDSLRVRKTDQIDAEKLAQSQFVLNRKPTYVQEEVYQNLRDLSRFYQNLTEDIVRAKNRLHKVLQVTFPELETILSTPSGEQYWNLVIAFPCKDFVLELSKDKLSESIRQSTSKRISDKRVAYLAEKLIGLANQSYCAVKKNSPMLEEVRYYTKELLRLSEQRQTVLDQMVELAQPLPEYDILLSIPGIAETTATSIIGELGDIRRFQSANQINAFIGIDLRHYESGNFLAKEHITKRGNPYARKILFKCIHNIASASHTKPCHIADFYEKRKRQSQTTSTKPHTIASIHRLIRTMYYLITHNKLYDYTSTQNR

SEQ ID NO: 511392 - protein, 337 aa, unidentified
MSSKVIEKFFLGVDVSKKTVDCVLYSEKIDKMKNENHFKTTNDEKGCEEILMWLKKRKATQKSTIICMEYTGRYSFIFANNLAALGLKFCLIPAIKIKGAFAGARGKNDKVDAIRIAQYAYRYKDELKPTELKNDKILKLRDLMNDRKMVVIDIASRKNILKEHKNTPEDSRYQRAKEGIEFLSKQLQEIEDDIIAIINSDDALAQNYTLLTSISGISLVNAVNLIVFTNNFKSFKNAREFAAYCGIAPFEYTSGTSVNKGTHVSKMGNKQVKADLSMAAQAAIWCDAEMKQYYKRKRQEGKSFGCVLNAVKFKLISRAFAVIKRGTPYVNTRKFAA

SEQ ID NO: 511393 - protein, 361 aa, unidentified
MHDSITWIGMDVHKENIVVAAVNGAGATTARWETPNTSKGKDRLAKRLSEFGTIRCAYEAGPCGYDLRRFLEGKGIRCDVIAPSLIPKKSGDRVKTDKKDAEKIARMHRMGELTPIHVPTPEKEALRDLLRAREDANEDLVRRRHRLQKFLLRQGRRYEGKSWTRDHWRWIRAQKFDDRNSEAVLSEYVAAIDQEIERIGRLDSQIEQESTNPEIAPSIARLKALRGVNTLTAMTILSELIDLNRFDSARKLMGFVGLVPGEYSSGGKQWRGSITKSGNSHVRRVLVEAAWHYRHSPRTTGAAIRKRRNGQPPEIIETARKAELRLYKKFTRMVMRGKKTTVAATAVARELAGFVWAIGRI

SEQ ID NO: 511394 - protein, 412 aa, unidentified
MPKTLHVGVDVALKTLAACFVDDQGKALHTIKSMPNTPEGARQIQQQIARLCQQDRCEIVRVGTEATSVYDLHLLEHLLEVGPGAPVGLSLYRINPRLIKKYKECSTEGSKTDSIDAFFIADYVRIKPLLRPYSTQSPLLPLQRLTRYRRGIVKTIAAETNRLLATIFLHMPGIVQQKPMDPSAPTMAAIVGEHLTAEQLLATPLDQLAALVAGHARNGVNPDDAAQAIREAVKDSFRIAPALADSLRIIEATSAANIRALKESLKTIDTQIEKSLAAFPNTLRTVKGIGPVFAAGLYAEVGNINDYDSPDKLAKRAGLVWNKHDSGSFTAEDTHLTTAANRYLRYYLVEAANSLRIHNEEYARYYQRKFNEVRDHQHRRALVLTARKFVRLLFVLLKEGRIYLPNRASQQP

SEQ ID NO: 511395 - protein, 429 aa, unidentified
MTMSGKEKVPEPEFVAFVGIDWADQKHVWSWQKADSTEREAGELEHRPEAVEAWVGELCRRFGHGPIAVAVEQTKGALVYMLRKYECLHLYPVPSTMSASMRAALYASGAKDDPRDADLLLELLLLHRDKLRRLTPDNEATRRVQNLVEERRKLVEEKTAQLNRLIGYLKVYFPQMLEWFAKLDTKLVCDFLERWPSLEELQQVRAGEVKKFFRHRRGRHGELTEWRMEGISQAMPAIQDRSVIEAKRTVVQVIAQLLRTLLEGIATLDRKIGEAVEAHPDFFIFQSLPGAGAALAPRLLAAFGSQRDRYGSANEVQKYSGIAPVTERSGKRKWVHFRWACSKFLRQSFHEWAGHSIGQSAWARAYYQRQRERGKEHHAAVRGLAFKWIRIVFRCWQDGVAYDESRYLAALAKRGSHLTSTCAAAAVSM

SEQ ID NO: 511396 - protein, 365 aa, unidentified
MNQDTLHVGLDTDKRHIDVAVAEPLPGGEVRYWGKLANEASALDRVLKRSRRSCRRLSVCYEAGPCGYGIYRRLSALPGVSCQVVAPSMTPRRAGVRVKTNRRDCLTLAKLLRAEELTAVWVPDRAHEAMRDLVRARAAAVEDLLRCRQRIGGFLLRQEIRYAGKPWTRKHRAWLGGLEFVEGAHRLMMAELVEALDQAQARRDRLRDHILELVPSWSLAWLVEALQALRGFALINAATLAAEIGDPRRFESPRQLMAYLGMVPSEHSTGAAVRRGGITKTGNARARKALVEAAWSYARPAKLPKPAGQSAALRAIADKARHRLSGRYRRLVARGKRPPVAVIAIARELAGFLWAIAHAAAKHPH

SEQ ID NO: 511397 - protein, 360 aa, unidentified
MTSIALSRTDVIVGVDTHKDQHVAVAIDGLGGLIDEPQFVSANSAGYAELIDWARSLGTIYAFGVEGCGSYGAGLAKFLRRHDQLVREVSRPPRRGERRLSGKSDAIDAEHAARTVLSGTGTATPKLADGQVEAIRLVKIARNTAVKAHTTAIITLKTIVVTAPGELRESLERLTDHKLVLACAALDTSGHIGDPAVAIRHSLAALARRYLDLHEEIKVHTAHLKHLVAAAAPKMLERFGVGFDTAAEMLITAGDNTDRVRSEAAFAKLCGACPIPAGSGKTNGRHRLNRGGNRQANAALYRVIIVRMRWHPPTIAYVQRRTADGLSKREIIRCLKRFVARELYQLLPEPSNVELRPAAA

SEQ ID NO: 511398 - protein, 345 aa, unidentified
MSQPETYVGLDVSLETTAICVVDTAAATVWRGSCPTDATMLAETIRQRAPGVVRIGLETGQLSNWLTLSLRARGLPVLCPDARHAKAALKMQINKTDADDAWGLAHIVRTGWFREVAVKSMDAHQLRMLLVARSQLVGQRQTIANTIRGLLKSFGIVIPHGSKAPFAVRVREAGTDNDVLMAIVGPLLEAWEALRGQIGVLDRQIVARAKADATAKRLMTAPGVGAIVVLAFSAVIDDPRRFKHSSSVGAYLGLTPRRYQSGEVDVSGHISRCGDGLLRAYLFEAATVILQRYAKPSKLKAWGLALAKRIGMRRAKVAVARKLAVILHRMWRDQTDFQTDQAAAA

SEQ ID NO: 511399 - protein, 338 aa, unidentified
MELYAAIDLHSNNSVLVVTDAEDHVVFAKRLRNDLQVIMMALRSCSGDIRAVAVESTFNWYWLVDGLRAAGFDVRLVNTAAVKQYEGLKHGDDFSDGKHLAQLLRLGILPQGYICPPELRAVRDLMRKRSQLVHQRTAQILSIHNLLARNLAQSVKGDDIKRLKDSEIDGFALLEDQKRALRANVAVMRCLEAQIRLLERSILAKGRLRREFHGLKTVSGIGDVLALTIALETGDIQRFASAGKFASYARMVDSRRESNGKNKGVGNRKCGNKHLSWAFIEAAHCAVRYDPSIRRFNQRKRAKGLAVVAIKAVAHKLARACYHIMRDGVPYDGTRAFA

SEQ ID NO: 511400 - protein, 319 aa, unidentified
MSVTIAPCIGIDVAKATLEIGIDTTGEIFSVANDPQALLALVARLEVFAPERIVVEATGGHEMLLVAACIAANLPIVVINPRQARDFAKALGKRAKTDRVDALVLAHFARAVRPEQRAHKSEAAQAVSVLVARRRQLTEMLVAEENRRQSPLFAEMADEFKEHIEWLQKRIAELDRDLQNQIRQTPHWHEQDELLRSTKGVGPVLSVTLLTQLPELGRLDRREIALLVGVAPISNDSGKRRGERHIAGGRAAVRSVLYMGTLAAIRSNPVIKEFYQRLLAKGKLKKVAITACMRKLLTILNAMVRDNEAWHPHAKQLSA

SEQ ID NO: 511401 - protein, 440 aa, unidentified
MSKLLLVDPRAAFVDVGSERMHVSVGGERPEVFGAVTLQLYALRDWLLAQEVRSVAMEATGVYWLPLYAVLEAAGLEVIMVNGRHMRNVPGRKTDMSDAQWGSTLHMHGLLRAGFVPPAHIRRLQDYMRLRAEHITAAGAHVQHMHKAFERMNIKLHDELSDLTGVSGMAVVRAILDGERDPARLLALCHKQVQRRKGEGIIESLRGTWADEHLFALRQAVQSWDHYQSQIKACDRQLELLLQEYDANDAEPPAASNGKRRKAPGKNAPDIPQLREILRHICGGHDLTTLPAHTEYSVLQLISEVGTDLTKWNTEKHFTSWLNLAPGTHQSGKRKRPVKRKRNRAGRLFCVIARSLAKSTDIALGGFYRRIAGRRGGLVANIALARKLATLFWRVMVKGLDYVEHGLHDYEAKVLQGKQRALERLAKQLGVTIVPATATP

SEQ ID NO: 511402 - protein, 451 aa, unidentified
MSFELGLTRWPPLRLARVCCEHVSVVVVRPLVLQFVQRVKGDEVRSLGRAIGLDVHRDFCEVAIVEGGALRSAGRIATTPGQLELFAQSLAATDGVALEVTGSAWEIARILGPHVARVVVVSPADTGIRQARAKTDRLDARTLARLLAAGELDAVWSPDEWTRVLRRRLARREQLVRARSRSKNEIHAVLVRRLVGRPPVSDLFGVKGRRWLGGLELPLEEAETVAACMRQVEFLDSEIAAVERQIARQALDSPKARRLMTVPGVNVICAATFLAAIGDIRRFPTPRKLVGYLGLDPRVYQSGSTPAKGGRISKQGSPQARWALVEAAWSVVQQPGPPHAFYERIRARRGNKIAVVACARKLAVLFWCLLSRGRDYAHQQPSLTAKKLRLLEIRAGAPTLKGTNTGTWATRQKMRNAERELAQQAEASYRRMVSDWQAAAKAGASVTPGRA

SEQ ID NO: 511403 - protein, 345 aa, unidentified
MRNTNVLAIDLAKNSFQVCKTDKYGRVIFNKALSRKELVTLLRKENQSLVAMESCGGAHYWCRKAKALGHEVIAISARRVKAFRQGQKTDATDALAISQAALQPNTKPSRLLSEHEQCLQSCERIREALVENKVALANQTRGLLHEFGYVIAKGDCHLLAKIPDILEDGENQLSGSFRACLQIQYDRLKQIIKDIASVEAQVNQDIKDDVDCQRLQQLEGVGAVNALSLKIVLGNHAHFKSGREAAACLGATPVQHSTGGKERIGSISKHTANKKVRSKLYLGAMSVIRQLENREIRTEKERWIKSLVERRGKKIAAIALVNKTIRTAYAMLKNNQDYKPQVLAT

SEQ ID NO: 511404 - protein, 452 aa, unidentified
MAKKSKRRCDTLPVLHPDAAGIDVGASELYVAVSADRDPQSVRSFPTFTRDLHALADWLEQCGIHSVAMEFTSVYWIPIYQILEARGLEVYLVNAQHVKNVPGRKTDVSDCQWLQYLHSVGLLRASFRPPGFICAIRSLWRHRSSLIQMAAEHVLHMQKALDQMNLQIHRVLNDITGVSGLKILDAILAGERDPLTLARLCHGGVKNSEDTIAKSLEGDYRPEHLFALRQSLAAYHYYQKLVLEVDQEIKLQLGELQTAPTAERTIPARTKASAYQRRRYEPKTFDLRGELYRIFGVDLTNVPGISAITAQTILCEIGTDVSRFRNASAFASWLGLCPEKKVSGGKVLFTKSRRVRSRVATALRMGAQSLHHAKDYLGEFFRRITRKLGRPQAITATAHKLARIVYHLLSTKEAYTESVFHKSEEETLRRAQYRLRRQAAQLGFQVIPAENG

SEQ ID NO: 511405 - protein, 358 aa, unidentified
MSKRGSSRPASAKLEQLPGLVKPASFARLSCFGGIKIKEERVLPVSPTFVGVDVSKATLDVAVRPSGERESGSNDESGIKRLITRVRELQPALIVVEATGGFERQLTRALVSAELPVVVVNPRQVRDFAKATGQLAKTDTIDAMVLARFAEAVRPAVRPLPDATLLELQALIARRRQLTEMIVAERNRLTAASKTVRKRIDAHIRWLEAELGRADKDLDQSIRRSPIWQETEELLRSVPGIGPVISRTLLAELPELGQLNRKQIAALVGVAPLNHDSGILRGRRTIWGGRATVRATLYMAALVGSKRNAVIRAFYQRLRNAGKAPKVALVACMRKLLTILNAMIKHRTRWAQVAMETY

SEQ ID NO: 511406 - protein, 358 aa, unidentified
MQRNKKTFKGQNIYIGIDVHKKNWQVAVITESGYTERLSTAADAKALFKFLKSHYPDGNYRAVYESGFSGFATHYALSELGISCVVAHAADIPSSQYELTMKSDRIDAEKLARALRAGLVRGIYVRPKDNLDDRGVLRIRKTIQIQVGGYKTRIKHLLHSNGVELPERFSRSGTHWSRAFIAWLREDVRLLSDTRRSLELLLLQVETLRANLLEATRRVRALSMTDRYREDCALLMGIPGIGLTVAMTILTEVCDIGRFGNERLFASYLGLVPTSHSSGERVSHGEMTFRGNKHIGPLLVEASWVLIVRDRELGRMYTEYRWRMAGQKAIIKIARKLSNIIFAVLKTRKAYEPYRRDA

SEQ ID NO: 511407 - protein, 398 aa, unidentified
MKTSGLDVHKDSIFCAIYDGKDYSVVKEFSTTTTSIRLLSEYLESEKVKKVALESTSTYWVPVWDILYEMGFELKLVNPHHIKQLPGRKSDAKDAQWIAELLHKNMLRGSLVPSPVIQELRSYTREYRTLVNQRTKVLTQLDRLLVMCGIRLSSCISNLDSKSFMLIVEALIRGETSPDTLVKLVYGNRKNKESGKLKECLTGNMKAHHRLKLTTYKQQFDLLESQIQLYLNEMQRVCSAHFCEEISNLTTLPGVSQISAMIIIAETGGDMSVFENSGKFTGWTGLRPRNDESAGKFKSTATTKGNKHLRAIIVQVAWAASRTKGSFFMSKFTKLAIRKSRKKALVAIGRKILVIIWHILSERTQYNPHLVHIYDPVKVEHKIKYHEKEIERAKKLIA

SEQ ID NO: 511408 - protein, 482 aa, unidentified
MKRRPPEEPKKTTEGAKHVHWDEMNRKQRREMMRKMQSADLSLEVVHPNAAGIDIGNESHYVAVPPDRDNQPVRRFGCTTAELKAMADWLNQCGICTVAMQSTGVYWIAVYDILEAAGLEVYLVNARDTKNLPGRKSDVQESQWLMKLHTYGLLRNSFRPSQEIRTMRTYWRQRNDLVQAAGRHIQRMQKALTQMNIQLANVLSDISGVTGQAIIKAILDGERDPHKLAELRDPRVQASEEQIAQYLEGNWQPDLLFVLKQEHEAYQFCQKQMAACDEQLQQYLQQREDRSQGASLPEEKRKGRLKRKKGNAPQFDLRAALFRMTGTDLTQIDAVDVVTATTIFSEAGWDMSKWESENHFVSWLRLCPDNRTSGEKIIGQGHLPTNNRIHVALKMAASSLRTSNTYLGAQFRRLRTKLGSPVAIKAMAAKLARLVYRMLRYGMKYVDRGVEFYETQHRRLQISHLRSNAAKLGFRLVEAPAP

SEQ ID NO: 511409 - protein, 342 aa, unidentified
MEEASIIGLDLAKRRFQAHGARADGGVAFRKALSRDKVLAFLAERPRCVVAMEACGSAHHWGRAIEALGHEVRLIAPIYVKPFVRRQKNDAADAEAICEAAVRPTMRYVAVKTEEQQGRAMLFRTRDLLVRQRTQLINALRGHLAEHGVVAPQGPANVKGLAEAIESETTSLPLLVVELSRVFLDQLDGLSKTIAELEKATVQEATRGATMRRLQTMPGVGPITAMAIETFAPPIAVFRRGRDFATWLGLVPLQHSTGGKPLLGKISKMGQRDIRRLLIIGAMAVVRLASRKGGPEGSWLHRMLARKPRMVSAIALANKMARAIWAMLTRGEDYRVPAAAAL

SEQ ID NO: 511410 - protein, 352 aa, unidentified
MEIHVIGIDLGKSVFHLVGVNQSGEVVVRKKFSRPQLLRFTSNLRVHLIGMEACGGAHFLGRALRAQGHEVRLMPAQYVKPYVKTNKNDYIDAEAIAEAVERPRMRFVPIKSEDQLDMQSLHRVRERWIKRRTSVVNQIRSLLLERGVTVRTGRKHLVAALPGILEDPDTNLSGPLRVLLAQLQREMKNLENQIEEADSVVVRMSGQSEACQRLEAIPGIGSLTATGIVSAIGNGADFKKGRCFAAWLGLVPGQYSTGGKQKLLGISKRGNCYLRKLLIHGARAVLRTKDKQSSGLSTWLTQLTSRAHSNVVAVALANKMARMAWAVLAKGEAYRPPLLAAEVAGTEGLACN

SEQ ID NO: 511411 - protein, 427 aa, unidentified
MWVSGKAGRESGVVRMVFIGDDWAEDHHDVEIEDESGRRLARARLPEGLEGIGRLHALIAAHAPQGWSELGGQEMAARVIVGIETDRGPWVAALRAAGYQVYAINPMSAARYRERHSTSGAKSDVGDAHVLAEVVRLDREHHRPIAGDSDLADAIKLVARAHQTAIWDRTRQVLRLRSLLREYFPAALEAFDDLAAKDALLLLGRAPSPARAAKLTRGQVVSALRAAHRHQVQAKTDALLAALRAPGLRQPQGVETAYAAVVASQVRLITTLNEQIGQLQEVVAEHFGRHPAADIYLSQPGIGTILAARVLGEFGDDAKRFGDARARKNYSGQSPITRASGRKSVVLARYATNRRLSDALHQQALSALTASPGARIYYDSLRARNIGHHAALRQLANRLVGILHGCLKTGTKYDEHTAWHHQITAAA

SEQ ID NO: 511412 - protein, 449 aa, unidentified
MSKSGMVAGLPVVNARAAGIDIGSRIQVVAVPPELSDEPVRTFQSFTADIEQMANWLVSIGITTVAMESTGVYWIPVYEILEEHGLAVVLANPRDCKAVPGRKSDVNDAQWLQRLHACGLLHASFLPARDIAALRAYTRLRDRHLEYASAHMQHMQKALTLMNIQLHHVISDISGVTGLRIIRAIVAGERDPDVLAAMRDVRCRESIQTIRAALVGNYQPEHVFALSQALELFDAYQARIADCDKKIEGALQRLNADRPVPLTPLLAPRIKTKQANAPKFDVRTMLHQLTGTDLTRIHGIGPSLALSLISECGSDLSKWPTEKHFASWLCLSPGCKISGGKVLSSRTRRSSSRLASQLRLAASNVGRTETALGAFYRRLAARIGKAKAVTATARKIAILFYRTMRFGMQYEDPGVAQYEQRYRERVVKQLQRRAAHFGFSLQPTEIGVS

SEQ ID NO: 511413 - protein, 378 aa, unidentified
MQAAQERGYESVEVLYMAMELSNSKWKLGFGNGSKLRRKSIDARDRQRCLEEVALAKVKLKLAEDAQVVCCFEAGRDGHWIHRWLESEGFEVLEIDSSSIETARGRKHVKTDRIDVEKLLDLLIRHHCFGLRKAFRVVRVPCAAAEAAQRLHREDEYLLKQRTRISNRIKGLLVAQGVVEVPLRGDFSAWLDRVRLWNDAGLSAELKTELRRLQAQYEVFASQLRELAKDYAKEFTADTPLAEKRRQLESLKGIGPKSSRALSAEMFSWRTFANTKQVGAFAGLTPTPSQSGDSETEQGISKAGNRRVRRITIELTWLWLRWQPDSALSQWFNRRFAHGSKRMRRIGIVALARKLLIALWRYTEHGVIPEGAVLKTQG

SEQ ID NO: 511414 - protein, 347 aa, unidentified
MKHFAGLDVSLDETTVCVVDEAGGIVREARVPSEPEALVAFFRGLGLAMERIGLEACSLAAWLHEGLTAAGLPAVCLETRRAKAAMGAMPNKTDRNDARGIAQIVRTGWFRAVHVKSPACRSWRALLAARRLVLNKMRDLENGVRAPLREAGLKLGRPARKELAARVRELVGADAVLSASVEPLLAIVATMAHELAQLTRRVLAIVRDEPVCRRLMGVPGVGPLTALAFRATIDRPERFRHSRDVGAHLGLTPKRYQSGETDVQGGISRCGDELARTALYEAAHSLLVRSRRWSSLRAWGMQVARRRGMARARVAVARKLACVLHRMWADDAEFRWGKQETASAVPG

SEQ ID NO: 511415 - protein, 400 aa, unidentified
MLYVGWDWASRQHAVAVVDERGAVVDRWTLEHGEVAIADALRRLAGHGRPGELPVAIERADGVVVDRLLEAGHPVVPVHAGAFHAARPRWGAAGAKSDPGDAFKLADYLRTDGHRLRRVSPPDEPTRHLQALVRTRDDHVAAKVAATNQLAALLGAHWPGAAAVFARLDSDIALDFLERYPTPEAAVRLGEGRMAAFLRRHSYCGRRSAAELLARLRGAPTPVARLDPEVLAECVRAQTRLLRTLLATLDDLDRAVAAALPEHPKAALLASLPRVGQVNLAQILAEVGPILDRAADVEHAAAEVGAVPVTRTSGKARAVCFRWAANARARQALGTWADNSRHASPWAAKLYRDARARGKRHPHAIRILARAWLRVVWACWHAGVPYDPARHRAETALVAA

SEQ ID NO: 511416 - protein, 454 aa, unidentified
MAEQSKSSKEALSMEVVHPNAAGIDIGNATHYVAVPPGRDPEPVRSFQCFTEDLKKMADWLAQCGIETVAMQSTGVYWLPVYEILTERGFRVFLVNASHTKNLPGRKSDVQECQWLMKLHTYGLLNDSFRPTEEICVLRAYWRQRDEHVKAASATIQRMQKALTEMNVQIANVISDISGVTGMAILGAILDGERNRYKLAELAHPRIQASKEEIAKSLEGNWRPELLFILRQQRDIYREYQKRIGECDEAIQAHLKKIEDKADPGSKPETPKAGKRAGGNAPQFDLRGELYRISGIDLTRIDGINVMNAQTIIAEIGLDMSRWPTEAHFASWLGLCPDNKITGGRVYHRASRHVENRAATAFRLAATSLWRSKSYLGAKFKRLRTQLGAPKAITAMAHNLARLVYRMLKYGKEYVDKGMEFYQQRYQQQQIKWIQKKATELGLVITPPSGTLVN

SEQ ID NO: 511417 - protein, 350 aa, unidentified
MSGAYEGKQIVGMDLHRRRSVVVRMTDTGERLETVRISNDPDYLRAVMARAGDAPEVVLEATYGWYWAADTLAELGANVHLAHPLGVKMFGLRRVKNDERDAADLADLLRMGRLPESWIAPPATRELRGWVRHRAKLVGLRSSVKNQIYAVLAAAGVAVSMSDLFGVAGRQLLATTLLAVESRSRVDSLLRIIEALDFEIDLYARLIAGRLRTDPGYHAIQTIPGVGPLLGAVFVAEIGDISRFQRPEQLASWAGLTPKHHESDTTVHRGPITKQGSRLVRWAAVEAVQRVGGHTRLGQVRDRVGQRRGRNIGVVAAARELTELVFYGLRDGRLRCLSTPAASNTVNPVA

SEQ ID NO: 511418 - protein, 381 aa, unidentified
MKPTKKLTPTSHQQTEATAEVIKLGIDIHKTKYVVIRQIDNLAAQSPQSFSPDEFIVWVQRQRLLAKRVVSCYEAGCFGFVLHRKLAEVGVDNFVVRPRNWDEYGSSVKTDARDARELCGHLDRYLAGNERALCVVRVPTEEQEQARSLSRQRETLAKERKRLQNVGTSSGLYHGVDVPANWWKPKVFTKLCTEIPEFMKLILDPFQQVLEIIDKQLRETTAREERKANRKIPVGLGALTTSILDQEFVDYTRFSNRGQVSSFTGLCPGESSSANKRQQGSINKHGNPRIRHMLLEAVWRMIQFQPDYKPVLHWNKRKASEPFGAAKKKKMAVAIARQFAVDWWRIQTGRIEPEDVGLRIEFPSAYSTRALREGRVSKVYA

SEQ ID NO: 511419 - protein, 353 aa, unidentified
MTSSQLASVGVDVGKSCFHVVGLNQQGAVALRGKHTRGGILAALVQCDAQRFAFEACGGAHDLARRLSAEGREVRLLVPADVRAFVRTQKNDYNDAQAVAEAALRPTVRTVPVKSVEQQDVQLIHRARRRLVEQRTALINQIRAMLLESGLTAGKGRQVLRRELPLLLEDAENGLTMRRRALIASWRDEWNRLDVEVSRLEQILEDEAASDPRCQRLRTIPGVGLLTATALVAAVGGASEFRNGRDLAAWLGLVPRQHTTGGKPKLLGISKQGNSYLRWLLIHGARSVRKHLDRKQHEWGPWLDDLEQRLHPNKATVAVANKLARIAWAVLRRGVTYRAIDPRQKGLSGSASD

SEQ ID NO: 511420 - protein, 335 aa, unidentified
MKKIHVGIDISKEKCNLCYRSGLEIVCEEECANDVKTLKKAFKAALKALDASMEEVLVCAEYTGRYIYPLTVACQELDVFLWMDDPTRIKNSMGLTRGKNDVIDAARIAEYAYRYSDKAVRYCIPDAALVSMKNLLSDREFLLIDRKRYQSQLSDQKKYMAPCDFKHKNSRWKKVIKSIDEQIAAIDAEIESFIAANPVLARQKELLVSIDGIGDRIAINMIAITGGFTRFQNARQFCSFAGLTPYKYESGTSVRSKAKISKRANQTMKALLHMSAVNVATRMKAGEYKDYYERKLKEGKHIMCILNVLRAKLVHRMFSVIKRDTEYTKEYKPAC

SEQ ID NO: 511421 - protein, 365 aa, unidentified
MEGKKKTITRFVGIDLGKRTYEVAIVGKGGKVTKSNGKTYPVARQNLYKKLCSQDKVALEAGNMAFIMAKEIEATVGCRVYVLNPSQLALIYGSMKKTDKEDALKLAHILEDCREERLPLVPVPSDKEISCRKILASYRRVKQGRNREINQLHGLFVAQGITTKVRKDFTTAQNRQEAIKELVGIELEEADYLLKCLALKDERIAELEKQMAEESAGDEVIERLQSVPGVGPKVAFAFVAHVAAERFENAGQVSHYLGLVPRVYISGETMRYGRITKRGNSFLRALLVQASWSLIRSKKGGKLKAMYEYMTIEKSKSKKKAIVAVARQLAELLYTMMRNKSCYALRPFKPVKQESEALAKLALSA

SEQ ID NO: 511422 - protein, 411 aa, unidentified
MDTLYPRCAGIDVHKNNVVVCVRGADRPGKVMEEVRTFSTMTRDLLALSDWLASHGVTHVAMESTGVYWKPVFNILGGRVEVILVNAEHIKQVPGRKTDVKDCQWIAQLLQHGLLKASFVPPEPIRELRDLTRQRTQLIQERSAAANRIQKVLEDASVKLGSVATDVLGASGRDMLEALIDGETDPAALADLARKRLREKIPQLQLALEGRVTDHHRFLLRMHLDHVAHLEELIARLSTRIEEKMAPFAQAQQRLETIPGVSQRVAETVVAEVGVDMKQFASAGHLASWAGMCSGNNESAGKRRSGRTTKGDRWLKRILVQAAWAASHTKGTYLAAQYRRLSKRRGRKRALVAVGHTLLVIVYHVLKRGTTYAELGADFLDRLEPERLTRQLVKRLESLGHRVTLEPGQAA

SEQ ID NO: 511423 - protein, 340 aa, unidentified
MLIIGCDYHPSFQQIACVNTETGECSSRRLKHGDGEAERYYRNLGSQPVRVGVEATGGMRWFERLLAEMKFELWVGDPARIRAAAAHKAKNDVRDAELILQLLLEERFPQIWMPSPEVRDNRQLVLHRHRLVQMRTRVKNQVQAMAINEGVQRKHRLWSQAGQTELRNLPLSKWGQVRRKDLLELLEEFKGKIDPLDKNLEQEAEQRPEVRRLMTHPGIGPVVGMAYVLTLGDPHRFKRSKQVAAYLGLVPSENSTGGRQKLGHITKQGNPVLRGLLVEAAHVAARQEPEWKRQYMRLGLKKNRSIAAVALARRLAIRLWWMWKSGLDYQQICESRSHAE

SEQ ID NO: 511424 - protein, 330 aa, unidentified
MQQINRLGIDVSAANLSTICQEAGGQQRQALFDNDPAGHRKLIAWATRKGAPAQVCLEATGVYSLDLALAWHHHPKTQVMVVNPRAIKAFAGPLLQRAKTDATDAQVILAFLQRMPFQPWQPPAEEVMPLQALTRRIDQLKVTLTQETNRLHAPDYRHTPPTGISQDLQHHLRYLQGRINRLEAQALDLVQQHPQLQATFTRLISVKGIATTSAMQLMAELLVLPDDLQPEQWVAQAGLDPRPRDSGTSVHKPRFIGKARNAYLRAALYMPALVALQHQANISAFYQKMLRAGKKMMQALVAVMRKLLRRLWAILKYHQDFDGNKFYQLT

SEQ ID NO: 511425 - protein, 454 aa, unidentified
MKKAKRVPQPKAQAALQIVFPNAAGLDIGANEIMVAIPPDREGVTVRGFGTYTPDLAALADWLKEAGVTQVAMESTGVYWIPIFELLEERGFEVIVVNARHIKHPPGRKSDVMDCQWIQQLHAHGMLSGSFRPGADMCTLRAYLRHRDNLLEDRAKHIQYMQKALLQMNLQLGQVLSDLTGETGLEILHAIVGGEHDPLVLASMRHGNCKHSPEDLIKALTGHYRQEHLFVLKQALEMFESFSQRLRECDQEIERLLEEMQPELPDDFPPLPPDPKPNSHSKNAPSYDARALLYPLAGVDLMAIPGMNAILLQKILSEVGLDMSRFPTAKHFCSWLGLAPHNAISGGRILYSHTLKNHNRAGQCFRLAARAVSRGKTTYSEFYRHIRARSGAKEANMATAHKIARTFYYMLQRGQPFLAPDLQTYLQVQREKDIRRLQARAAKFGFCLQPAEVS

SEQ ID NO: 511426 - protein, 313 aa, unidentified
MEVVYRCCCGIDVHKNLIVACLRKGGRQELREFGTMTGEIKVLANWLTEAGCEMTAMESTGPYWKPLYNLFELLGLDTMIVNAAHMKAVPGRKTDSKDAEWIAELLQHGLLRASFVPSREQRELRELTRYHKSIIEERSRELNRLQKVLEGANIKLGSVVADIHSKSARRLLERLAAGETMDDSEEISKLLHKSLLSKLDEIVAALDGIVTPLQRALLAQILDHIDDLDKRIQELDRMAETYMAQFQPAIAEVCQMPGIARRSAEVILAETGIDMSRFPSAAHLCSWAVGSARATTRVPGSGITARHARGIRR

SEQ ID NO: 511427 - protein, 416 aa, unidentified
MDTMYERCCGLDIHKKTIEACFRSGKKKTHMSFGTTSAELRKLTMWLVENDCQSVAMESTGSYWKPIFNILELSGTDMKIIVVNARHMKNVPGRKTDVNDAEWIAELLQYGLLRPSFIPDHEQRELRELSRYRKSLVGERAREINRLQKMLEGGNIKLTSVVSEVTGYSSRRLLDRLLRNDEPMTEDVISGLVHTSLAGKSKELETALDGLLSELQKELLIKVLDHIDDMSRRIADLDDFCRKQMKKYEDALDKLDEIPGIARRTAETILIETGLDMSRFPTAKHFARWAGLAPGNNESAGKRSSGRTTKGNPTLKSTLIQSAKVAARKKDSFFKARYQKIAARRGANRASVAVAHSMLIAIYHILKSGERFKDLGEDYYNQFNKEKKKKYYLKKLTKLGVNLKEATLSISIQAAT

SEQ ID NO: 511428 - protein, 415 aa, unidentified
MEMLYSHCAGLDVHKKSVVACRLSVDGQGRKVKEIETFGTTTVEILRLSDWLLAGACTHVTMESTGEFWKPIWNLLEGNFELLLVNAQHIKRVPGRKTDVQDAEWLADLLQHGLLKASFIPPLEQRDRRDLTRQRTQLVRDRTRVLNRIQKVLEGANIKLSSVVSEISGVSSRAILRELVKDQLNPAQLESLVHGRLREKVRELEQALTGRVRDHHRFLLAQHLAHLDFLEEQIAAYAQEIERVTAPFEELITLLDTIPGVARTTAELILAEVGADLSRFPTADHLASWAGLVPGNNESAGRRLSGTMRKGSQWLRVGLTQAAQSAARQKNGYLSALYHRLAGRRGKKRATMAVAHAILVIAYHIIQRREPYQDLGANYFDERQKVSTANRLTRRLEKLGYRVLITPPTSTPLAV

SEQ ID NO: 511429 - protein, 433 aa, unidentified
MSQTTPHTQEPTSYWAGLDWGKSEHSVAVVNDARQLVETFTVGTDLDGLEELKRRLGALGEVRGVAIEATPYPVVSYLHAEGFALYLINPKVSKNWRAGRSAAASKNDALDSHTLAVELSRRHEELEPYAPADPKVEELAGLCQTRRSLVNQRTALIQRLTQDLNAYHPGALAFFSDWSSPAAWKFVQKYPTPKKLARARKDVLKRFLKRNGIGLKPCWLERIDKCSQAARWPAPPNARALEHEALATAAQLIALEEHIRRVADEIAQCFEQLPEAKLMESLPGAGQALAPELTAMAAQAASKPNRLQALRPLTGVAPVEDKSGKRRVTKMRRRCRRYWRNTLHLFAQHSTKYCAWAKAFYELCRQRGDTYATALRKLADKWLKIINRMLAKKQPYDEQRYIQALRKSRSPVYQRLVEKGLVENPVENSPAKT

SEQ ID NO: 511430 - protein, 343 aa, unidentified
MDHFAGLDVSVKETSVCIVDDTGRIVREVKVASEPEALLQELAKPGYHFKRIGLEAGPLSQWLFSALAEAGLPVICVETRHMRAVLKAQINKTDRNDARGMAQMMRVGLYRPVHVKTLRSQKLRMLLTHRKLLQSKAIAIDNDLRGTLRNFGLKVGMVGTVKFEGRIKELVENLPDLAVLVEPMLVVRRVLREQIGILHRRLLAIVRDDEVCRRLMTVPGVGPVVALTYRATVDVPARFRNSKAVGAVFGLTPAQHQSGESDRPGGISRCGDEMMRVMLYEAAQIMLTRTNKWSWLKAWAMKIARHRGMKKAIVALARRLAVIMHRIWVDGTEFRWTREVAAA

SEQ ID NO: 511431 - protein, 338 aa, unidentified
MKLYAGIDLHANNSVVVVIDEDDRIRYQKRVHNELGALLQALAPYQATLQGIVVESTYNWYWLVDGLMATGYRVHLANTTAIEQYKGLKHTDDESDARWLAHLLRLGILPEGYIYPKEERAVRDLLRKRSQLVRQRTSNLLSIQNLLTRNTGSALSGNRIKQLTIAEVEELLPQAELALAVKSNLAVLQCLEEQIEQIEAVVLAQLKLRDGFQPLLTVSGIGQILGMTIMLETGEIGRFATVGDFASYCRCVSSQKLSNGKRKGQGNVKNGNKYLAWAFVEAANFAVRYNAQIKRFYQRKQAKTNGVVAIKTVAHKLARACYYILRDQVPFAVDKAFA

SEQ ID NO: 511432 - protein, 421 aa, unidentified
MKEWKEITHYAGFDWARNHHAIVIVDSGGQIISDFEFDHTSEGWKAFLEKTASYPNLAIAIETNQGAAVDQLLQHEFTVYPVSPVASESYRKRKAPSGTKTDHIDGWGLADALRVDGHGWKALRPRDPLTEKLRLLCKDEVALIQQRTLLVNQLQQALVEYYPAALEAFEDWTDAFTWDFIVEFPTPQSLIKAGQRRWEKFLHAHKLWRPETAQKRLEIFARADKFKASDPITEAKSQLALSLSKILRTLDQQLEQYRKQIEALFKDHPDHDLFGSLPGAKAVLAPRLLAAIGTDPDRYGSPNVLQCFAGTAPSCYQSGQVNRVKIRWACDPFLRHTIHLWANAFRKATVWGQTYYEKKREQGMSHACALRCLGQRLLKIVFRMISDKKPYDGELHARNQKKHGSWVLDLVNGTAASNPGE

SEQ ID NO: 511433 - protein, 405 aa, unidentified
MLIEELLKESYLSSGTRGKRPASSSGTVGGGKPADNVPDGSSRKGHRATPATYADEWGAASASARKSLCWGRYREISTCCRFLSRTLLVRHERFEGCPTCVFEHSREGFRSFVDHLQEYVPLEQVTVLLEHTGHYHRLLEQYLLVLDITVYRVHVQKRAEGMLKTDKRDALSLANALYTQLELGAQVQDKMQLVRRIVPPTSAAAQLQGVMRHRYELSHMSTQYRNKLTAICDQLFPELVQVFHDPNLPTALAFRSAFPTPHAIAVASLDDLRAARQRTFSSDAQLLELQRLADKTIGVTDLDRQRGLVLEQGLLIKELQLIQQHPEDLQTTIMDIVQNCREGQILLSIPPIGPVQAATIIATVGNIANFAKACELKSYFGWAPRKKRLGSPWIEPISQREGSVP

SEQ ID NO: 511434 - protein, 387 aa, unidentified
MGVIIGMDPHKSSATIEVVDERAVVLSKGRFGTDRAGYAQLLAAGRAFDDRVWAVEGCNGIGKHLAHRLVHDGETVIDVPAKLSAQVRVFATGNGRKTDPVDAHSVALAALRAPGLAQVVVDDDLLVMGMLADRREELGRARTQTINRLHRLLLDLFPGGAKQFLSSHQARALVATIKPRDLVGKTRRRLVVELIVELEAIDKKMKTLKKELTDLVTARGSTLLELHGIGPAGAARLLADVGDIHRFTDRDKFASWNGTAPLDVSSGKQERHRLSRAGNRRINRTLHIMAIVQLRNPSEGRAYYDHRKAGGMPSMMAMRALKRRLSNVVFARMLDDQKRREETGPGGQSGTTLHSSATDLTPDIGSSKKPHPGPANHHPKTPALAMS

SEQ ID NO: 511435 - protein, 346 aa, unidentified
MQNDTLVAVDIAKEVFELGGSERPGRVALRRRLDRCRFLEFFAQLPPATVVMEACGSAHYWARRIEELGHVVVLLPPQYVRPYVVRNKTDRTDVEGLLEAFRNQQIRPVPIKTVTQQVIGTLHRLRSGWLADRTRAINSLRGLLRELGFFIPEGRKHVLPDAWEIIHDPTRGLPEALKPSLSSLCQEIVSLSTRIEEIEAQLEALAKQIPAVARLRTVPGVGLLTATALYAFVGDISRFPSGRHMASFIGLTPREYSSGLRRRLGRISKRGDVYLRMLLIHGARSVLWHAKRMKNRDRLRAWALRLERKLGHNKAAVALANKLARITWAVWKNDRSFEPVPELQAA

SEQ ID NO: 511436 - protein, 345 aa, unidentified
MEITTIGLDLAKNVYQVHAINGSGEVAVRKALRRAQVLRFFERLAPCLVGIEACGTSHHWAREIRRLGHEVRLMPPAYVKPYVKRGKTDASDSEAICEAVSRPTMRYVAIKSCEQQAALTVHRTRDLFVKQRTQLVNMIRGLLAEFGIEIRRGITHALSLAERIVAGEMLGIPALAAKMIASLAGQILDLQARLRGIERELLAWHRSSDIARRLATIPGVGTICATAFAASVTDPHQFRSGRQFAAWLGLTPLQHSSGGKERLGGISKMGDKYLRRLLVVGMTSLVRRAKYKPDALNARLAHLLSRKPVRVVTVALANKTARVIWAIMTRGGTYRAPQPAGAVVA

SEQ ID NO: 511437 - protein, 337 aa, unidentified
MIVVGVDVHKHSLTAVAVDEAGRALAERTVAAAPELLAWSASLGPERLWALEDCRQLTRTLERALLAADERLVRVPPKLMAPQRRAGRMRGKSDPIDALAVARAALREPRLDHPRPGEQRLRELKLLVDHRDDLIDERRRVQQRLRWHLHDLDPELAVPLGALDRGVWLDRLGRRLARLEQTAQIRIARELVSRCRGLTRTILELDRELEQRAAATAPRLLELPGCGAISASKLLGEIGPITRFETDAQLARHAGVAPLEASSGKHRRHRLDRGGNRQLNCALHRIAVTQARIHPPARAYLERKQAEGKSRREALRCLKRQLARVVFNTLKANPALT

SEQ ID NO: 511438 - protein, 466 aa, unidentified
MQRRWNEMNRQQRRETMRKIQSHDLRLEVVHPDASGIDIGNESHYVAVPPDRNGQPVRRFGCTTGELREMAQWLKQCRIQTVAMQSTGVYWIAVFDILEEAGFEVYLVNAKDTKNLPGRKSDVQESQWLMKLHSYGLLRNSFRPTQEIRRMRTYWRQRNDLVQSAARHIQRMQKALTQMNIQLANVLSDVSGVTGQAIIHAILAGERDPHKLAALRDPRVKASEAQIARYLEGHWQEDLLFVLQQEQQGYEFCHRQIAECDRELEQYLQQCEDRSAGAPLPEEARRGRLQKRNGHKPQFDLRAELFRMSGTDVTKIDGIDVMTATTILSETGWDMSKWADEDHFVSWLRLCPDNRISGNKVIGKGRLPTNNRASIALRLAASTLRLSNTYLGAQFRRLRTKLGAPIAIKAMAAKLARLVYRMLRYGMKYMDRGATFYEAQHRARQVSHLKWKAHLFGFRLVEAPTP

SEQ ID NO: 511439 - protein, 391 aa, unidentified
MIYVGIDVAKDKHDCFITNSDGEVLFPVFTFQNNRDGFDGLFSRLQSVSPDMSKIKVGLEATGHYSYNLLSYLIDKGLPTFVINPLHTNLYRKSLSLRKTKTDKVDARTIAMMLMSDVDLKSYSDTSYHNEELKSLTRYRFDKVRERAQLKQSVSRLVTILFPELEKLVPTLHIASVYALLSEFPSADKIASCHLTHLTKLLENTSKGRYSREKAIEIRNAARVSIGSHMPAKSLELRHTLRLIGELDSEITEIESEIKRIMDQISSPILTIPGISYRMGAMIIAEIGDFTRFDSPDKILAYAGFSPSTYQSGQLDGAYSHIEKRGSRYLRYALYNAAKYVCIWDPTFAEYLAKKRSEGKHYTVAISHAVKKLVRVIYHLEKTNQQYIKAA

SEQ ID NO: 511440 - protein, 362 aa, unidentified
MNRNTGMNAGQIIGTMGGKQVFGLDIAKHVFQLHTVDMSTGEIANVQIKRAKVLEHFVNKPKSLIAVEACGGAHHWARELTALGHTVRLLHAKIVRPFVSGNKTDATDARAIWLAVQQPGVKFVGIKTAAQQATLTLHRQRELLMKMRTMQTNALRGLLYEFGATFAQGRKALFKDVEQTLEDLSAQLPQMVRDSLREQVARIKAMSDDILTIEKRLGLQLKADPHMQRIAQIPGVGLLTATAAIATMGEASAFKSGREFCAWLGLVPKQTGTGGKVRLGGISKRGDTYLRTLLIHGARSVLAHAKEPGPWLAQIQARRPANVVIVAQAAKMARTIWAVTAKEQSYQRGFQSVRPNASMQAA

SEQ ID NO: 511441 - protein, 364 aa, unidentified
MYIGLDVHKESIEIALAPHEGGEVRHYGRIAGDLEAVDKVVSRLKKTHAKLNFVYEAGPCGYALHRHLTRKGFSCSVVAPSMIPKCSGDRIKTDRRDAIMLARLHRAGELTAVFVPRAEDEAVRDLTRSREDAVANHRRSRQQLGALLLRQNIRYTGKSAWTKAHMRWLSEVAMPLPTQQIVFQEYLNATRETDERLARIDEQLRIAVEGWRMAPVVNALQALRGVSMNVAATTVAEIGDMTRFDRPRQLMAFLGLVPSQYSSGPRVRMGHITKTGNGHARRVLVEAAWAHRFPAKIARAHQVRQENLPQAVRDIAWKAQLRLCRRYQRLLAKGKTKNVVVTAIARELVGFMWAIAREVKPIAA

SEQ ID NO: 511442 - protein, 317 aa, unidentified
MSRTPIGVDIAKAKFDVATFVNGKYKTKSFANTPAGIQAFQTWLAAFSEPHVCLEATSTYGEALSERLADAGVMVSVVNPARIAAFAKIELSRTKTDKGDAKLIARFCALHTPEPWQPQPRSIRELRALVRRLENLLEMYQMEANRLQTADVAVQDSLQTVMTALQRQIDHVRAQIVQHIDNDPDLRGRRDLLDTIPGLGKATIPVLLSVLADPSRFGSAKQCAAYAGLTPSERQSGKYRGQTRLSKTGDPLLRKALYLPALVAWRHNPVLRPFCERLKARGMNGKAIVCAAMRKLLHIAFGVLKSNRPFDPNISLA

SEQ ID NO: 511443 - protein, 337 aa, unidentified
MSDVHILAIDLAKRSFQVCGTDRGGAVLFNRTLSRAKLMHMLDAQEPCIVAMEACATSHYWGRVAQQSGHDVRLVPPIYVKPFVKRQKNDAADAAAIAEAVLRPNMHCVAVKSAEHQARAVTFRTHQCFVRQRTQLINALRGHLAEFGLVFPQGPAHLKQATTLLEDGTIEIPDTVREIAKLYLDQIDLLTVKIDDLTLRLKEATHESVEMRRLCTVPGVGPVTAGAVMAFAPDLRAFSSGRNFAAWLGLVTRQRSTGGKTRLGGVSKMGQTDIRKLLIVGAMSRIRWIIRKGVLPDNWLGQLVGRKPRMVAAVALANKMARIIWAIMTREQNYRMA

SEQ ID NO: 511444 - protein, 352 aa, unidentified
MRFYKNQHQFYIGIDLHARTMYVCVINNCGETVFHKNMECSTDNLELVANTFGKDIVIGVECIFTWYWVADFCAERGIDFALGHAYYMKSIHGGKTKSDKIDSEKIANMLRGGMFPTAYAYPKAKRAARDLLRRRLYFVRRRAELSVHLQLTNHQYNINAPLDSSKMRSRAYRDAIPGKFSDPMTLEMVNADLFMFNAYNDIITRLESRIEGCMEVQDPVSYAIINSVPGLGFILSLTILYEIDDINRFPDEGKFISYYRLVKCSHESAGKKESGRHNKIGSVHLKWAFSEGAVLFLRNNELGQKWHDRLVQRYGKARAMSMIAQKLARTVYFMLKRKVPFNAKQFYGLEKT

SEQ ID NO: 511445 - protein, 353 aa, unidentified
MYKVMNKKLFVGIDFSKETFDAAILKVSEESSIDPKIIGNEQFKNDVPGCKRFVKWLNKTCALSGDYSSVLVGGEDTGNYSITLPKQLYVLGIDCSLQNAYSIKCGSGKIVRDKTDKIDAEKIAYYFYRFRDQIRLYKPLSKDMESLERLYSYRYGQVRERARLKCQIKEYKHILKSEPNDETLKFMIQRLEKQERFLKKEIKAIEAKMVEIIKANEELNEIHKCLLSIPGVGKITSLLLIVVTRGFTRFDNPKQLACFLGVSPHPNQSGTSVQNGNHRSWFADPYFASLLHMTALTASIHNPKFKAYDERLKSKGKPKLLIMNNIKNKLLTVAFTIATRRTKFYSDYDIKRA

SEQ ID NO: 511446 - protein, 312 aa, unidentified
MTQYTIGVDISKAHLYAHRLPDGIARQFTNDRPGFSAMIKWIGNLDIERIVYEPTGIYHRHFEDALAKAGLPLAKVNPLQARRFAEARGTRAKTDKVDAAVLAHMGIALQPGICTPPSRMLRDLKELQVARQALIKDRTAARNRSKSLRMTILKKQGNLRLRQIERSLEVIEKTMLALINDDHKTARAFEILCSIPGISKITAATLLVEIPELGTLEQKAVASLAGLAPFSRESGKWKGKRFIGGGRKFLRDALYMPALVACTYNPDMKVVYQRLKGAGKPSKVAITAVMRKLIILANTLVKNNRMWEEIRT

SEQ ID NO: 511447 - protein, 385 aa, unidentified
MLLDHLSDGPTAIRTQFGAIFVSLELSRSTWLVTSLSPGQGEKMSRHSVEADDVGELMKLFADLRRKAEVRTGLSYPIITIQEAGLDGFWLHRVLQREGIESHVVDPASIATPRRRRRAKTDRLDGETLLRALLAYKRGEPRVCAMVVAPSVEEEDRRRPCRERRTLIAERIEHVNRIKGLLFAQGISDYAPLRRDRRARLKALRTGDGRELPSHLKAQISRELDRLELLLTQIEAVEAEQDALLAEGKQPATPDPASMLLALKGMGANFAAVLWSEAFYRQFANRRQVAAYAGLAATPWRSGRIEREQGVSKAGNPRLRTTMIQLAWLWVRHQPQSALAIWFKAHSQRGRKRTIVALARKLLVALWKHVTQGVVIEGAVMKSAA

SEQ ID NO: 511448 - protein, 395 aa, unidentified
MTAGIDIGGKQHAVARCREGQDQAEREVLRISQDRAGFDRLDAWLARQEEPVGRITMESSGHYWMSLASHLKRGPVPATVVNPLGAKYFAKSRMSRTKSDPADARSLALMAQQDHTIPHDPLEGVELRQASRFAMTLVTEQARVCQRLVRLVELGFPELGELFDDPACRTAREVLRVAPTAAVARRRRASTLAAANAGPGHRRLGETKAERLKAAAVTSVAVAELDDEVTFEVGLLLDQYELYEDQISAAEEHLASLLDGELARRLQTIPGVGPATCAVLIAEIGDIWRFDDVDQLLAYAGVHPAERSSGRKGADPETSWHMSKAGNAHLRAAAYRMAVVGVTHNPVIKAHYERKRKAGKSKMNALGHCMAKALNLVWGVRRNEADWDPDWRLRA

SEQ ID NO: 511449 - protein, 405 aa, unidentified
MKHIISFDVSMGKSYMVIYNSFKECVYEGEFNHTKTGFAEVKLRIDQIIISYGVLPEIVFESTGVYSKALERFMKENHYRYCLLNPLEAKIQCDSLRIHKTDRSDAHKLALTHFTMDRKEKKVSDSVFDQLKSLSRFYSELDDELTVIRNRLHKVMQETFPELETIFTRKSDLFLNIAQLFPHPDFLIGHSNTVIRNKIIANTNKNISKNRAEKKAQELLLAAEQSYPAVSSVDVLCEQVRIYSKRFQELLNEKDRCTEKMIKLAEQRVEYKILLSFPGIGPNTAVRLMAEIGDIFKFNNNKQLNAFAGIDIRRFQSGKSFYKDKINKRGNKHLRKLLFIIIQNMIRLRRNGNNHIVDYYDKLKTQPYNKCHKVASIACVNKLLKSIFHLITHGISYDYRLATSS

SEQ ID NO: 511450 - protein, 370 aa, unidentified
MFVIGIDAHKASHTLVAVDATGRRQAEKTVDATDSGHFKALRWVRGRYPTDELTWAIEDVRHVSGRLERFLLESGERCVRVPTRLMARARHETSRTPGKSDPLDALSVARAYLREPNLPVACHDEVSRELKLLVDYRESLVMQRTAIWNRLLWRIHELDPERKVGPLDAVRHREPVQRWLATLPGIVADLASVELEDIARLTTDIRGWERRIDERVCGIAPNLLAMPGVGTLTAARIIGETAVVTRFAGSEAAFARFAGVAPAPRWSGSTAGQMRRSKVGNRRLNSAVHRVAVTQLRLAGPGREYFDKKVAEGHSRSMALRCLKRRVCRVVFTRLNADHRRRYPNGGPPETWAAQRKAAAAPDVHDGSPD

SEQ ID NO: 511451 - protein, 315 aa, unidentified
MKTSITHVAMDTHKKQHQVAWVHPDTGEIQEFTVANTAREIERMVKRIRKQVTGEIHVCYEAGLCGFVLKRRLEKFGCVAQVIAPSLVWRKPGDRVKTDRRDAKKLLTQFVAGQLTEVWAPDPAQEADRELTRCRESARIDLKRARQRLNSLLVRHGYLYQDGNLWTGKHAQWRKGLVFDQPKLRTVFEEYSSEIEHCAERVKSLDKQVESLARSPRYRSAVGVLRCMRGIDTLTAITLLTEIFEFARFDSPRALMAYLGVTPSEDSSGESRRPGAITKTGNRRVRRILTEAGWHYRHPYAVSKALKARREDQPA

SEQ ID NO: 511452 - protein, 455 aa, unidentified
MANKAKKIKTKKGLKLEIVNPNAAGIDVSSTEMQVCVPEDRDEDNNRRFGTFTCDLHEISAWLKSCAIDTVAMESTGVYWVPLYMRLVADGFDVLLGSAQAIKNFAEKKTDEVDAEWIMLLHSYGLLKASFQPCNYSREIRNLVRHRDNLQRSAAKEVQHMQKYMELMNIKLTNVISDILGVSGQAIITAINKGERDPKVLAALADPRCKSPRDVIEKSLEANWDENLLFTLKQSFELYHFIQKQMIQTEKKAEKIILKYKASLPKEMVHQTGCKRSDKAEAAKNKISIDIEQYAHEFWGVNIMRVPGISKGSTFRLLGELGHDFTDKFETCKHFCNWANLVPNNKITGGKLISSKVPKRKNPVGQILRVAANSLMNEKSPMGNYFRKIRSRKGHNHAIVATANKIGKIIYTMVKNQTEYDEALVQEDITKILKMKLKRTEKELERIKKQLRQCA

SEQ ID NO: 511453 - protein, 392 aa, unidentified
MVYVGIDVAKDFHECAILSQDKEVLLAPFSFSNTKEGFVYLKEMINLAGNADPLNVKIGLEATGHYSVALLSFLEHNGWRIIYLNPLSVANAKKARSLRRTKTDKSDALYIAELIIAERLRAYTASSPDILALKSLTRARYRLSKELQIIKGRIKRSIHLLFPELPDLFVNLYRKAVLNVLKKYPSAEDVSKANLTVLTNLLKSNSHGVFGKTKAKQLKERAKNSIATYSPGDALELKLLAERILFMHEQRATIDEEVERIMREINSPITTIPGIGNITGAAILSEIGDISRFDTSSKLQAFTGTDPCVYQSGKFNANNTPMVKRGSSYLRHSLYLATCMASMTSPTFSSYVAKKKEQGKHYYVAIGHAMKKMIRIIFHVLKTGKSFVELSA

SEQ ID NO: 511454 - protein, 405 aa, unidentified
MVDIMVSDFRKGRYNLMKIFVGIDIAKLNHFAAAISSDGEILIEPFKFTNDADGFQLLVSKLESFDKNSIIIGLESTAHYGDNLVRYLVAEFYQVCVLNPIKTCQMRKNNIRKTKTDKVDTFVIAKTLMMQDDLRFITFFDLDMMDLKALGRFRQKTIKQRTRLKIQLTTYVDQVFPEIQYFFKSGLHQHAVYALLKEAPSPKEIASMHMTHLANLLKVNSHGHFTKEQAKELRVLAQKSVGANDSAISIQITQTIQQIELLDSQLEKIEAEMTDIMKFNDSVIMTIPGIGYINGGMILGEIGDIHRFSNPNKLLAFAGLDPSVYQSGNFQAKTTRMSKRGSRVLRYALVNAAWNVVRNNATFKAYYDAKRAEGRSHYNALGHCAGKLVRVIWKMLTDEVEFNLE

SEQ ID NO: 511455 - protein, 418 aa, unidentified
MQQLPPGFRWVGRGVGLDLHRDFVEVAICEDGVVRSAGRVKATPETLEVLGASLEPTDRVAMEVSGGCWEVARILEPHVQRVVVVSPDDTGIAQARTKTDKLDARALAKLMWHGELDAVWMPDKRCRVLRRRLARREQLVRSRTRCKGEVHAVLMRQLQGKPPCSDLFGVKGLKWLRSLDLPVEEAETVQAALRQIAFLDREIADVEKLIAKEMLSSPEARRLMTVPGVNLIATAAFLAAIGDISRFSNARRLVAYLGLDPRVRQSGEQPARSGRISKRGSAAARWALVEAAWSVVCQPGPLRAHYQRIRSRRGHGKAIVAAARKLAVLFWCMLTRGEDYAHQQPSLTAQKLRRLELTAGAPVRKGKPSGVWVTHQKMRHAEKQLAAQAQASYERMIRDWKAAPPKNDVGASVTAERA

SEQ ID NO: 511456 - protein, 392 aa, unidentified
MICVGIDVAKDKHDCFILSSEGEVLADVFTIPNNAEGFGTLLQIIRSCTRPADKIMVGLEATGHYSYNILGFLLDCGLPTYVINPLHTNLYRKSLTLRKTKTDRVDARTIATMLMSDVDLKSYTDTSYHNEELKSLTRYRFDKVRERAKLKTSVSRLVTILFPELEKIVPTLHMSSVYTLLSEFPGAHQIAAAHLTHLKTVLYEASKGHYGRDMAVEIREAARKSIGSRMPAKSLELKHTIQLIQVLDAEIEEIEEEINLIMHEVHSPITTIPGIGTRMGAMILAEVGDFSCFNSADKILAYAGMSPSTYQSGQLTSSHAHMEKRGSRYLRYAIFNATKYVCMWDPTFAAYLAKKRAEGKHYSVAISHAAKKLVRLIYAMEKSRQPYRPTVT

SEQ ID NO: 511457 - protein, 483 aa, unidentified
MKPKRQEKNKKTTDHSTQHHWHEMNRKQRREMMRKMQTEDLSLEVIHPDAAGIDIGNESHYVAVPPSRDSQSVREFGCTTAELKAMAAWLKQCRIRTVAMQSTGVYWVAVYDILEQAGLEVYLVNARDTKNLPGRKSDVQESQWLMKLHTYGLLRNSFRPSQEIRVMRTYWRQRNDLVQSAGRHILRMQKALTQMNLQLANVLTDISGATGQAIIKAILAGERNPHKLAEFRDPRVKASEEQIAQSLEGNWQEDLLFVLKQEHEGYEFCQKQMAECDRQLQQYLQQREDRSHGAPLPEENRKGRRKKKRANKPQFDLREGLFRMTGTDLTRMDGIDVMTATTVISEAGYDMSKWENENHFVSWLRLCPDNRISGNKIIGKGRLPTNNPISIALKLAASTLRESKTYLGAQFRRLRTRLGAPIAIKAMAAKLARLVYRMLRYGMKYVDQGAAFYELRHRELQIKRLKAKAEKLGYRVTPIPAAA

SEQ ID NO: 511458 - protein, 341 aa, unidentified
MEQYVALDVSLKEISVCIVDSNGEVVFEGKTAAEPAILVELIRSKAPQVKRVGLETGATSPWLFHALASAGLPVVCMDARHAHALSIRPTKSDRSDARGLADMLRMGWYREVHAKSVTSHERRTILGARHQLVTMRSELDAQIRGILKTFGLILGTGNKDTLIQRAEKLAAGHPVMSGLVAKLAEVRRHVTSQIAAIDRDIRHLVHTEPTLKRLMSVPGVGPITALAFLSAVDDPRRFKHARDVGPYLGLTPTRYQSGETDRQGRISKCGDTFTRTCLYEAAHVLLTRVQRFSPLKAWGMRLAKRIGGRKARIAVARKIAVILHCIWTDGTEFWWTREKAA

SEQ ID NO: 511459 - protein, 373 aa, unidentified
MPRYSTAFGMDVHLRSTTVCALDAETGEAVTRRFRGNPWGEVAEWMSGFPGPSLAAYESGYLGFAPQRELSALGVDCVVAAVSKVPRSAADLSSKNDRNDAARMAKAILSHDVTPVWVPSPEIEGLRDLAAAHDAATARLAAAKQRLLAFLARRGYVYGGTTPAGNPRKYWTYGFLRWLDGIRPADDGGIRALAALRNEVEAADETREAVLAEYRAAVTAGPLSAEVEALQSIKGCGFVLAAAFASEVGDFSRFRSGRQVTAYFGLAPKQRSSADSVRLGGISGAGNALVRRLAVEGSWRYAQAGHQPKLMPKGSGVPLEIRMHGRKGSERLLRRREEMLERGMPQAKANAATAAELVRWLWALGMMCREGAE

SEQ ID NO: 511460 - protein, 321 aa, unidentified
MSDSVTVGIDVSKLTLDVHVSPAQLHQTVSNNESGFAELKTLLSMQQVSLVLLESTGGYEDAVVCFLQSLGYDVSVINPRQARDFARSMGRLAKTDRIDAELLAQLASVIHARPDRERFVKKITDDRRRKLACMVARRRQVVNMISTEQQRKSAASNYSTDSINKVLSFLRSELKSIDADISLHVRSHFADISGLLASFKGIGPATIGVLLGEVPELGRLNRRQISALIGLAPFNRDSGFMRGRRTVWGGRAMVRNALYMPTLSAVRFNPAIRVFYMRLISQGKPRKLAQVAAMRKLLCIINAMLSSGAMFNPALHPGPGA

SEQ ID NO: 511461 - protein, 313 aa, unidentified
MVTPTVFVGIDVAKATLDVALRPSAERWQAGNDEAGIRDLVRRLPTPGLTLVVLEATGGYEHPVAAALAEAGVGVVIANPRQIRDFARATGQLAKTDAIDAELLALFAERFRPVPRPLPTEARQLLEALVTRRRQLIEMLVAEQHRLEHARRPVRRDITAHIRWLERRLADVDRDLDHAVRTSPLWRAQDDLLQSVPGIGPITSRTLLAQLPELGQLGRKQIAALVGVAPLARDSGTRRRQRTVWGGRAPVRAVLYMATVAAARCNPVIRTFYHRLRAAGKPAKVALTACMRKLLTILNAMARTQTPWRSATA

SEQ ID NO: 511462 - protein, 337 aa, unidentified
MEYFAGLDVSMEETHVCVVTRNGAVIHEAKVPSTPASIAAALARVPSCQRVLFETGRMAPMLYHGLSQLGLPVVCVESRQAYQALKSLAMHKTDRNDARGLAHLARTGFFKPVHVKSLPAHAVRSLIIARKKLVGQRVTLENQIRGLAVVFGVRLPRALSPAFIRQALQASEGIPGLSAAMKGLVAARAAVLAAVVAIDGDIRKMARASAACRRLMDIPGVGQLTALAFTTAVDDPERFRRSRDIGAYLGLVPRRYQSGEVDYTGGISKCGDRRVRTLLYEAANVMLTRYKGPLKLKAWALAIAKRSTMRKARIALARRLAIIMHAMLRHGTEFKSA

SEQ ID NO: 511463 - protein, 479 aa, unidentified
MEAGQVSRRLVGIDLGIASRHSVRVLEADGQAVCRSSCVPTVASLAAVERAALAGAPEGTTLAVVFEPTGPAWLPIAVFFARRGHAVYRVSSAKASDLRRFLRRHAKSNGIDAETLARMPLADPGGLQPLELPGANVAALDRRVRACGRLTQAASEHKTRIKDLVRQLMPMTPLTGDIGKADLAVLERYADPRALMAAGIAELTPLIAAVSNHQQGQERAGQWRAAAAAAVELYGDHPAVPYAELAAEVSTEIRLLRAIQAELALHATAREQHYLQADPSQLARSLPGFAEISAPVLAAGMGRPGRFRTGARFKSYAGLTPRAKETGETDRKGQPMSKAGPSLLRSAFVRAADTARRQDPQLARIYYLQMTERGATHLKACCIVASHLAERAWTVLNRGTPYVICDTNGSPVTAAEAKQIIAAKWTVTEDVRKRRRSRKTAGKAPQAATTGPDRRGGPPRPRSSRPYSHAVKPTAAHQP

SEQ ID NO: 511464 - protein, 333 aa, unidentified
MKITTIGIDLAKEVFQIHGVDDHDKIVLRKQLRRKGMAKFFANLEPCLIGMEACGSSHYWARKLSGFGHTVKLMSPQFVKPYVKTNKHDMADAEAICEAVSRPNMRFVPIKNVEQQAILSVHRARRGMVKARTAQANQIRGLLSEFGIVMPQGIRSIGKRIPAILEDAENGLPGILRKLLDRLNDHLKELDRQVEELELQIKLWHQANEASQKLEAISGIGPITASAIVATVGNATEYKNGRQLAAWLGLVPKQCSSGGKQTLLGISKRGDTYLRTLLIHGARSVIRFAENKAEPESWLRKLIIRRNKNARIIWALLAKGTTFRPNHAGSVRS

SEQ ID NO: 511465 - protein, 415 aa, unidentified
MKVVFPTCCGVDVHKSFLVATIIKTPKDSLQPSYQKKRFSTFNADLNRFADWLHENNCLDVCMESTGKYWVPVFNILEKRGVRVIIANPKWVKAVKGNKDDTKDSKWIGDLFRIGLVKSSFTPAKDIRILRELTRYRYKLTSMKSSEKNRFQNAFTVCNVALDSVVSDMFGKSAIAITDYLTSDENFDPQHCVSLLQRSLKKKVDDVLASIEGYEIAPEQKYRIGIVRDHLHYIEKLIEQVDICINAMVEKYDSALSLLCTIPGIDRSSAITVISEIGVDMAQFGSSKRLCCWAGLTPGNNESAGKKKSVRISRAGVYLKPVLVQVAHAAVKDKLNPYYALKYEHIAKRRGKKRAIIAIARMILTAIYSMLSTGKIWNPVDLFKIDMPEHLKEQQLQNAVRQAVRFLEAQGLKVS

SEQ ID NO: 511466 - protein, 400 aa, unidentified
MLSIGIDVSKGKSTVCGMKPGGEIVYTPFEVQHTREGMSELVSLLRGSGEEVRVVLESTGSYHCPVVAALLENGIFVSVVNSLRMKRFCSQSIRRVKTDQIDAMQIALYGLAYWQELQPTRLPENTYRELQLLARQYYQMTSLLIKAKVDFNALCDQVLPGMQELMSDHAGRHKLSDFVLRYHHTARILKMGETRFRKDYCKWAEKKGYRNCERMAALIFATAQNGIPVLPNAPSTQIVITEAIRVLHTVEASRDAILTQMQALAKTLPEYSLVREMPCIGDTLAPRLIAEIGDVRRFHSKRALIAYAGIDAPPYQSGKFCANNRHISKRGNRYLRKTGYEVMQSYVMHKPANDPIFIFIEKKRGEGKSGKLAMVAGLNKFLRVYYGKVTELYRSLPAIE

SEQ ID NO: 511467 - protein, 346 aa, unidentified
MKQIIRIGMDTSKHFFQLHGVDAAERPVLRRKLRRNEVLAFFAKLPPTVIGMEACGAAHYWARELRRLGHEVKLMAPQHVKAYVKRNKNDGRDAEGLCEAMSRPTMHFVPVKTEEQQAALMLAGIRERLIARRTQLSNAIRGYAAEFGLTAAKGLDKIEPLLSRIAQDETVPALARDLFAIQGQDYAQLQVELKAIEARLRAWHRANTDSRRLAKIPGVGPIGATALVMKTPDPRAFPSGRHFAAWLGLTPKDHSTGGKTRLGKITRAGDERLRSVLVAGATAVIQQAKHGRGHPSPWLIALLKRKPPKLAAVALANKIARIAWKLMVTGESYDGARMPGASASAA

SEQ ID NO: 511468 - protein, 348 aa, unidentified
MSKHSVPASDVSGLLRRFAELRRKAAARTGRDFSIIVIQEAGLDGFWIHRVLQSEGIESHVVDAASILTSRRRRRAKTDRVDGETLVRTLMAYKRGEPRVCSMARAPTPQEEDRRRVCRERRTLVGERVRHVNRIKGLLAAQGVFGYEPLRKGRRERLEELRTGDGRPLPVHLKAQTIRELDRLELLLEQLKTVETERDTLLKPAPGETASPAAMLTRLKGIGPESAAILWSEGLFRQFGNRRQVAAYAGLAPTPWKSGSIDHEQGVSKAGNPRLRTTMVELAWLWLQNQPSSALSLWFHERVRRLGGRLRKTSIVALARKLLIALWRYTTAGVVIEGAVMKPAPATI

SEQ ID NO: 511469 - protein, 392 aa, unidentified
MIYVGIDIAKDKHDCFITNSDGEVLFKSFTISNNPDGFETLFQKIQSVSDDLTKVKVGLEATGHYSYNLLGYLLDKGLPTYVINPLHTNLYRKSLSLRKTKTDKVDARTIASMIMSDVNLKSYSDTSYHNEELKSLTRYHFDKVKERAKLKTSVSRLICILFPELEKLVPTLHMASVYALLSEFPSAHAVASAHLTRLINLLSQSSKNRYGKDTAVMFREAARNSIGSNMPTKSLELKHTIKLIQELTSEIDEIEAAIKQIMDEEIQSPILTIPGISYRMGAMIIAEIGDFCRFDSADKILAYAGMSSSTYQSGQLDNCYSHMEKRGSRYLRYALYNATKYVCHWDKSFGEYLAKKRSEGKHYNVTISHATKKLVRLIFAIEKSGKAYLPAT

SEQ ID NO: 511470 - protein, 330 aa, unidentified
MKQEIVYVGIDVAKAHLDVAWEKQFHRLPNDVAGTKQLLCLLKAIAGQVQVIWEASGGYERSVMQTLQRGGIKASVVQASRVRQFARAIGILAKTDCIDAAVLCAFGKAMQPQVTAPSNPQQERLREMESHRRHLSRLLVAEQNRRAQLTDPTVLALTERLVGQIQKQIERIDLLIKELIEGSPGLSSKAQKLMALTGVGPRTAALLLAQMPELGQLNRREAAALAGLAPFNRDSGKLRGRRTIFGGRRAVRTGLYMAALVATRHNPILAAFYRRLRAAGKPPKLALSATMRKLLLALNTSQTPTNPRLNSTQLLQLQNAATWHRRLNHH

SEQ ID NO: 511471 - protein, 335 aa, unidentified
MDSDAQGTTGASSGAALYVGIDVSKDGLDLARSDRGGVTAYANDAAGIAAVVRMLAEDGPALAMAVVEATGGLERPLLEALLDAGLPAALVHPGRVRYFAKALGVLAKTDRIDGRVLARFGQLAGPRLAEKRSKNQAELADLVACRRQLAATRAQQLNRRCTTASKAALRSLDAVIAALDGQVESLGQKIRDLIDADDDFRDLDKLLQSVPGVGPTLSATLAAELRELGDADRREVGALAGVAPYDKQSGRRDGRRRIRGGRTSLRCVLYMATLAAMRFNPVIRSFADRLRAARKAGKVVVVACMRKLLTLINAMVRDGLAWDQLEVVKKLATNP

SEQ ID NO: 511472 - protein, 380 aa, unidentified
MASMHDSVRFKTTVYAAIELSKKSWVVAIARPDRDRPSIHRIAGGNLADLIGRLRKAAGEKQRIVVCYEAGYDGFWLARSLAKIGIDCRVLDPASIQVNRRARRVKTDRIDSLALLRALIAIDRGERHVCAVVRVPTVEEEDARRSHRERQRLVRERTGHINRIKGLLFAQGIRGIEPKRRRTRIDFGKLTTAEGRPLAERLRRELEREYQRLELVQSQLRIVEKERDTADAQDPAVERKRELLCALQGVGGASAAILAREVFARPFASRRQLGSYLGLTPSAYDSGSTTRCQGISKAGNSWARRVLIEVAWLWRKYQPGSPLSHWYARKTADQSPRIRRIMLIALARKLAISLWRYVETGLVPDGAVMAKTTPHMTAAT

SEQ ID NO: 511473 - protein, 420 aa, unidentified
MAKLKIIHPICCGMDVHRDFVIACVASTNTQGITSYSSKRFSTFSGGLRDLRDWLAAQGCKDVCMESTGKYWFPVHNILEETCRVVVSHPKFVKAIKGKKTDKKDAQWIADLFKHDLVRGSFIPPQDIRQLRDLCRYWCKLTSYNTGERNRVQNCLTVSNFKLDSVFSDVFGKSASAIISHMLEHPGESFDVAPFVDGRCKTPIAEIQAAVDGSFNKFQAEKLTIIREHMADLEKLKALLESQILTLAEPYIHQIDLLCTVPGISDPMTAIRILAEIGVDMAQFESSKHLCSWAGLTPQNNESAGKKKTTRIGKAGQYIKPLLVQCAYAACNPRSTKQPEILLKFQQLKKRRGSKKAIVAIARRLLTAIYQILLKDEAYSPYVAPVVESIPQQRVLSQEQALAMLRSKGYIIKDDATLTA

SEQ ID NO: 511474 - protein, 321 aa, unidentified
MQTPSIALDIGADVGKDEIVIACAEGAFSRRKVRNRGIEVKAFLKSLPAGSRIGMESTGIYHELLAETAYKLGFVIFVLNPKDVRHYAMGVGLRGKTDRVDAELIARMIAREHEKLHPWIPPTPEQHQIDRLLKRRAKVSRIRVALNQSLKGLSGFGADLKMVNERLDRLVKRIDAKVKALIEANKDRKQQYARLRKIAGLGGVVVRSSVLNTLERVPLHSADAFVAFTGLDPRPEDSGHHVGRRRLSKRGPSELRRLLYIAAMAAVKTKLWKPIYEHYRAKGLSTTAALVVIARRIARTAWSVYTHKTDFDPKRVALALT

SEQ ID NO: 511475 - protein, 339 aa, unidentified
MELYSGLDLHSTNTYIGILDTDFKRVFKKRVSNNLDLILETLQPFEDQLKGLVVESTYNWYWLVDGLMDAGYSCVHLANPSAIKQYEGLKHSDDQHDAFFLAQLLILGILPQGYIYPKEDRPVRDLARKRMFLVKHKTAHILSLQSLIARCSGQRISSNQLRTFTSADLEHLLKEDHLVLSAQANLDSISFFKQQIHRLEKVIKNKLKLSQAFNGLLTVPGIGHILAMTIMLEVGDIGRFAKVGNFTSYCRCAPTQRLSDGKSKGSGNRKNGNRYLSWAFSEAAQMSRRYNQRFRRYHDRKAAQTNKIVAARALSNKLARVCYYIMRDQVAFNEELILH

SEQ ID NO: 511476 - protein, 317 aa, unidentified
MKRDKTITKSAGIDVSKARLDVALAEGDARLEAANGPEGFAGLIAWLESHEVGRVGLEASGGYERAAATRLREAGFEVVVHQPAEVRAFARFKRIRAKNDRIDAKVIALATAQTEAVRCANDPRLVELAERMTAYEQAADRLAQMKTCLEHVTLEDLKAGLLAQIRLATAWKAQLLRDIIVRIKAWPDLARRYALLQSLPGCGIIVAACLVIRMPELGALPHGKASSLIGVAPWDRDTGQSTGKRHISGGRGRPRRMLYIAALVASRFDPGWAAFVQRLRAAGKSPKVSLVALMRKLIEAANLVLARGTPWVPNTAR

SEQ ID NO: 511477 - protein, 354 aa, unidentified
MANYYIGADVDSKMTELAIEKKEKIIRRYRVPTSIPALKEVLGSISGTKFLTFEEGPMAGWLYRNLKDDVDGLIVCDPRRNKLIACDGDKDDSIDSGKLAGLLRGGYLKAVHQSDDIGRVVLKQWVSLYHDKVREAVRQINKIRGRCRMYGIRIPRRALSDQVVRSQWMAKLKEKALAEQLAVLWMGYDTANKQSKMAKKQLIRHSKGYEIIRHWSELPGIALIRSTTMLAYLDTPWRFSSEKKLWKYCGVGLQRTASGTDRYGRPNRGKLKLAWAVNRRLKDVVLGGTMSAINQKQNIFSYEYERMVRNGLSESNARHAVARKLLSVMWAMWKTMSRFDESLVCCSSETVRAN

SEQ ID NO: 511478 - protein, 399 aa, unidentified
MAQPTLWAGIDAGKAAHHCVAINADGQRVLSRRVVNDEGALRDLIRAVKALADGGAVRWAIDLNSGGAAVLITLLLDDHQELLYIPGRVVHHASGAYRGDGKTDAKDAAIIADQSRMRRDLHPLRHRDKTAADLRILCARRNDLAADRNRAINRLRAQLLEYFPALERAFDYAHRKAALVLLTGYQTPDGLRRMGVARLEKWLRDRHAYHAGDLAARAIAAANAQRITVTGQEVAASVVARLAQTVLDLNAELVDVDAMIEAKFEQHRLAGIITSMPGFGSLLGAELLAATNGDLASFNTADRLAGIAGLAPVPRDSGRISGNLKRPRRYDRRLLRVFYLAANNSIKTCPESRNYYDRKRSEGKRHSQTILCLARRRLNVLSAMQRDNTSYQPGLPRAA

SEQ ID NO: 511479 - protein, 313 aa, unidentified
MIAQPVHVGADIAKPSIDLYAAGLAASPSIENAPAGYRLLLKSLGRSSRPVHVICEATGVYHQRFVAALQEAGVTVSVVNPRQARDFARSRNWLAKTDALDARMLAEYGASVQPAPTAPPDAAFVRLAQLVTRRGQLVGDRAAERTRLSEQAATAEIRASLRRHLRQLDAEIAKLEGLITGLVESTPALLARVQRLVAVQGVGPTTAAALLAALPELGTCSKNQVAALAGLAPFNRDSGAFRGQRSIRGGRLDVRRALFMAALCATRTNPVLRPLYQRLRAAGKAHKVALVAVMRHLLIHLNSLLKPLAVPST

SEQ ID NO: 511480 - protein, 334 aa, unidentified
MSTQLAYAGIDVSKRKFDLALRIDGRITTQRSFPNTAAGVAQLIDLLPAEPASWRIVLEATDRFHERLSDALAAQPGCEVMLVNPRRAHYYMAAVCHRAKTDRIDARGLALLAEEIKERFILYVTPSPLARELQLLGRHLYQLANQRAKCRNRLSSLDRQQPIHARAIASQQTMVAMLLQQANNLVDMMVELMRTDEIAGRCFDRLIQVDGLAETIASQLLSELVILPWDMTSRQWTAAAGLDPRARKSGQADPPRRISRMGNKYLRRALYIAALSLTRHHDQVRTYYLYLQEQGKPKKLALTIISRKLLHAIWVMLHRNQPFLAEKSFSVPAS

SEQ ID NO: 511481 - protein, 450 aa, unidentified
MISRKTKISLKSAKTRAKLSITHPNAAGIDIGSASHFVAVPPDRDDDPVREFPSFTVDLNAIADWLSACEVDTVAMESTGVYWIPLFELLESRGFKVLLINARHVKNVSGRKSDVLDCQWIQQLMTYGLLSGAFRPAEQVCVLRSLWRQRGMLLKNQATYVQHMQKALTQMNIQLANVISDVVGETGQKILRAIVAGERNGRVLAAMKNARIHASEDEIAKSLQGNWRTEHLFALKQALAAFDFIGTQLAEVDHEVEQQLQSLQAHEGEPAKGKKRGRARNAPRFDLRTLLFKMCGVDLTRIDGIDVTTALAVVSETGTDMSRFPKMGNFTSWMGLCPGTRITGGKVMSGRTKRCANRAAQALRLAAAALRTSQSALGAYFRRMCSRMDKSKAITAAAHKLARLIYTMLTKGEEYTDQGQEYYEERYRERVVHHLSQRAAKLGLKIVAIE

SEQ ID NO: 511482 - protein, 349 aa, unidentified
MTEQRRSYAGECVYVGVDVPKETYTVTCVCHQQIVKTATVQAEPAGLAASVLRWFPGATLYAVYEAGFSACVLHRVLTTAGITNIVVNPASIAVAANDKGKTDRRAAKKLAIDLADGRLRGISIPTEAEELARLLPRTRAQMVEHRATIARQLKAKLHQFGLIAPSSRRRISNRYLREIAAWSLAPELRVSLTLLAEQWRFATRQLIEIRRLLQEQAAAQAELETVYRSVPGIGAVVARPLATERGDMTRFANERALCSYTGLTPSAYASGASVRRGHMSRQGSGRVRHWLIETAWRALPRAMVLQEIFDRIAATRGKKRAMVAIARRLTGRIRACFRQGTTYAVGTYA

SEQ ID NO: 511483 - protein, 442 aa, unidentified
MPTRKSTSLTVVPLPVQIALDRGDHEMHAAILSPGATRPVQEIFKTGAETLHGFIRRWQQAHPGHVLEVAFEHPAPGLLHALMDLPGVELYPMNPSQTARYREVLNSSRKKDDATDALVILELLKTHRQHFPKWEPESDEIRLLRLVVEGRRKAVNDRTEAVLGLISLLKTYYPQALELCGDDLAGPLSLAFLKRWPTLQALKQSSSATIRAFYYGHNVRREKNIETRLSLIEKAEPLTHDAPLLEACEMRLRMLLDQIRILNAHIAGYEKKIEALVSKQPQFAIVRSLPGAGLLIGARLIAALGSHKKNLPHAVNLACLSGIAPIIKRSGKSSSTQRRIARPLFLHQTFVEYAENSIKFSLWARAFYRLKRAHGKGRWGTIRALAYKWIRILHHCWTHDIPYDENRYIAQLRLKSSPLIPYLDQLLAAPNATLLADKPTEA

SEQ ID NO: 511484 - protein, 417 aa, unidentified
MNSPPETTVIERYIGVDIHKYYVMVGGQNRSREWTLRPRRIQMNRFRDWAEKNFGKTDAVVIEATGSVWDIYDIIVPHVGKILVADARSIRQIAEARVKTDKRDIERMITQLLGGIVPEVWVPPVPVRELRSLVSFRWRLTKQITMSKNRLQSVVQRFNLDLPEGGLLTEKNRGWWEDQKFSDLTGFEVERDLEIVDTLEAQKKALDLKLAELSNSEPWASDMVYLMQIPGMGLILSMVVLSAIGDISRFSHPKQLVSYAGLSPGVHISGETNRSKPITKEGRKELRWAMVEAAWRTKESDPYWNAQFKRLEKRMHRNQAIVAVARRMLVSIWHILTKRETYRHFDEEDIAYKMLIWAWAMDKTSRKGMTPQQFAKYGLLRLGTGQDLERIYRGGAPRRIAPTDEILALKPELAPPR

SEQ ID NO: 511485 - protein, 403 aa, unidentified
MRVPAAADKAWAGIDVGKRHHWVCVVDRDGRQLLSARVANDEAGIAAVIGSVTGLAAEITWAVDIIGAPSALLLAVLSQSGQHVRYASGRLVAAMSGAYTGEGKTDPKDAFVIAETARIRRNLPVTGHKGELVCNLSLLTAHRADLIADRVRMINRLRDVLTSVFPALEREFDYSSCKGALVLLTGYACPARIRRIGQARLASWLRQRRVRGYASVAARAITAAQAQRITLPGQDIAADIIAELARNLLALDERVTELDTQIAALFAEHPQAEIIQSMPGFGPVLGATLLVTAGDLAAFPSPGHLAAAAGLVPVPNDSGRRSGNLHKPRRYSRPLRRVFYLSAQTSMMREGPSRDYYLKKRQHARPHNQAVIALARRRIDVLWALLRDNRTYAATPPAPAKAA

SEQ ID NO: 511486 - protein, 355 aa, unidentified
MTSTKYIGMDVHKESISIAVMNSVGKVVMECVIETKASTILQFIDGLRGDVRVTFEEGTWAAWLYDLLKPRVTEVVVCNPRKAALLKDGSKGDRIDAHKLAELLYMNKIKSVYHGEHGLRTMKELARSYLTISADLTRVMNRLKSLYRSWGILCTGKEVYAPRYRAEWLGKIREAGVRRRAELYYQQLDVLRLLRQQVRQDLLVEAKKHKAWKLLRQIPGIGPIRAAVLIAVMQTPHRFRTKRQLWTYSGLALETHDSAQYHAVKGELQRSKRPATVRGLNKDHNHDLKDIFKGAAMRASTTAGPLHDFYENLLAKGRKPTMARLTLARKIAAITLIVWKKEVRFDANHLKQQAA

SEQ ID NO: 511487 - protein, 370 aa, unidentified
MNSIIYLGMDVHQNSYSLCAYNGFTGEILGETRCSSDIKFVLKFIENLKKKYGEDIQIKAGYEAGCLGYVPYKQLTNHGIDCDILAPTTMYRSSKNKLNKNDKLDARNIATNLANGTYKSVYVPSEDDLAVKEYIRMLDDAKIARKKVKQQINAFTLRYDLHYQGKSKWTMAHIKWLRDLELSPLLKETLNERLALYDSLCDKIERFSERLKELSHNESYEKPVSQLRCLKGIDTTSAMTLHVEISDFLRFSTAKKFSSYVGLTPGEDSSGDKTQYLSITKQGNATVRNTLVECAQALVKGKIGVKSKAVKQRQKGQEAAAIEYADKAVERLQRKYHKMVKRGVNHNKAITAVARELACFVWGMETGKIY

SEQ ID NO: 511488 - protein, 360 aa, unidentified
MRTEITKDSFKGQSFYVGIDSHKKSWKVTILGEQYEHKTMSQNPDPDLLATYLHRNFPGGNYHAVYEAGFNGFESCRRLNQLGVNCIVIHAADVPTSQKEKLQKTDAVDSRKLARSLRSKEFEAIHVPDQKLEADRALVRQRFRLTKDVGRTKNRVKSLLFQFNIPIPDRFTSAQTRHWSKVYINWLKGLEIEQQSLKQVLDNYIAVGERQRNDLLMVNKQVRNLSLTDAYYHNYQLLLSVPGIGLVTAITFLVQIGDINRFEQLDDLCNYVGLVPKMYGSGEKMQVGGMIKRGRKELKIMLIEASWDAIKKDPALMLKFNELSKKMHKNKAIIRIARKILSRMRFVLQNQQRYELGVVQ

SEQ ID NO: 511489 - protein, 376 aa, unidentified
MREKLRFLGLDVHAETIAVAVAEADGEVRSLGTIANREESIRKFIRKLGSPEHLRACYEAGPTGFVLYWQLTQLGVECDVVAPSLVPKKPGDKVKTDRRDALKLARSHRSGDLTAVWVPDEDSEALRDLVRAREAAKQDQLRARHRLTKFLLRTGRRPPLGLKAWTERYLAWLHQIHYTQPAQEATLLDCLNEVQHMGERVKRLEQSILEVVKLAPAPVQAVIQGLQALRGVAHISAVTIVAELGNISSRFENARALMGYSGVFPSEDSSGERVRRGGITKSGNAHLRRIVVESAWSYRHRPSVGAKLRKRQAGVPAEITEIAWKAQNRLHKRYMTLMARGKEQRKTMTAVARELLGFIWAIGIKAEAACKQQLAA

SEQ ID NO: 511490 - protein, 394 aa, unidentified
MRFYTTQHPFYCGIDLQARSMDVCILSHDGELWLHRHMHAAPAPFLQAVAPSREGLVVAVACIVTWYWLADLCAAQGIPFVLGHALSRKAIHGGKAKNEKMDSQTIAALLRGGMLPHAYVSPAEMRAPRAWLRRRTPLMRTRAELLAQVQNTNSQYTLPAIGTNIAYTANRAGVAERFEAPAVHKTLEVDLALLTYYDQRLSDLALFILQTAKQHDAQPLSLLQTVPGIGKLLSLVLLYAMPQIARFPRVQDCASSCRLLTCAQASGGTRFGTSGNTIGNAHLTWAFSEAATLFLRGHEPGPKSLARVETKQDNGQALRILAHKLARAVYCMLKRHTAFDLEPCLRPSGSRASEPDAALDTKGMRLHRTDVKPIMAASWNAAVRLGPLSLRPAL

SEQ ID NO: 511491 - protein, 420 aa, unidentified
MPDHDFAAFIGMDWGDQQHAVCLAVGGQRVATDLAQQAEDIDVWAADLRTRFGGRPVAVCLEQKRGALVYALLKYEFLVLFPINPKQLASYRDAFVPCGPKDDPTDAELLCLFVEQHHARLRAWRPDDALTRTLRLLTEDRRRWVDERTALKNRLRQRLKEYFPLALELAGDNMAADWLLRMLKSYPSHDELRRANPKTLVKLFPKRSRVADDQNEDARVTFVRSSRPLVTDKAVILTHRLDVLHIVQLIIQLNETVDEYDREIASHMAQHCDAALFQSFPAAGPGLAPRLVSAFGADRERFGSAQQVQQLSGIAPVLKRSGKSCSVFRRLACPKFLHQTFHEYADHSRKKSAWAAAYYRMLKARGMGHHCALRSLAFKWQRIMYRCWKTRTLYDEVRHLQQLRLRNSPLLAYLQQTNDA

SEQ ID NO: 511492 - protein, 341 aa, unidentified
MDIVVLGIDLGKNSCSLAGLDASGRVILRRRMRRSSVEGFVKGLERCIVAMEACCGAHHLGRVFAAQGHETRLMSPEYVRPYVKAQKNDELDAEAIAEAATRPTMRFVAVKSQSQSDIQSLHRARERLVSERTALINHLRALLLERGIVAPQGRRKLQEELLVFADEDGIEALNPRIRLLIEDLRSEWRALDERIAAFDAEFVRMAREDEAVRRLTTIPGIGTINATALAAAVGNAQAFRRGRDMAAWLGLTPRQMTTGGKSRLLGISKRGNRYLRKNLIHGARAVLPYLVQRETPLGRWARGLLARAHKNIVVVALANKLARIAWAVLARGRTYEAASAA

SEQ ID NO: 511493 - protein, 322 aa, unidentified
MNKYSETFGIDISKDVFDCYGSTQGHLQFKNTESGFKKFQKLLSKDSLVVMEATGYYHYRFAQFLYHQGFVVSVVNPLSIKRFIQMKLAKVKTDKSDAKAICNYGLSQEVPLYNALTEVQSECLQLFRWMDSLLKKRTATKNKIHGEKVLGIPSKYVYHSLNRTLKHLDRELQGIDKKLLSLVKQDQQKQLTLLKSIPGIGVKTALFLIVITDGFKKFETASQLCSYAGITPTIRASGSSVRGRSRISKVGNRKLRNLLFLCAFSAYKHNKGCRELYERIVNKGKSKKLAMLAVSNKLLKQAFAIAKSGIPYDETHVSLLPK

SEQ ID NO: 511494 - protein, 319 aa, unidentified
MAQNDLVVAGIDVAKDKVDVCLRAASLRRTFASTAEGRRELTAWFRRQKVGKAVMEASGGYEREWAKVLRNAGIEVRIVDPKRVRNFAQSAGQFAKNDTIDAEMIAWFAETFDEARGQACDAAREELVQIVNARQALLEQQTQMQNRSGHAVPIPVRKMHERLLNAITLEVAKLEAAIAALIKAGPHFAEVANIIESVPGLGKITSAGLIAAMPELGQVSNEAISALLGVAPYDDDSGKRRGERQIKGGRRKVRNLFYMACLGAATRHNPVLKAFYRRLIVKGKKPKVALIACMRKLIVILNIMIARGEKWDASRYVVA

SEQ ID NO: 511495 - protein, 350 aa, unidentified
MIFIGMDVHVRNSFLHITDEGGQLLKRGRCANTPSDFAAFLAPLGAESGYAALESTTNSRAIARMIRDAATHSGIDMIVDVLDARKLRIIAESVSKCDRRDAAMLNELSRANLKLPACYMPDDEVFALREHLRARSDLVRIRTSVKNRVHAVLHRRGVLTPLGGLFTQAGRTFLAQAQLDDAGSTIMQLYLRTIDQLNGLITESNDSLKQLTRRPRWAKPAALLQTMPGVGLITAMTILAELGDPKRFRRRAAVANYAGLVPVVRDSNDKRYRGGITKRGSTHLRAVLIEAAWIAIKRVPTYNHLFERVTRRSNKLTAIVAVARRMLEDAWTMLKREEAFRYSAMPSVAG

SEQ ID NO: 511496 - protein, 374 aa, unidentified
MKNSITYVAMDTHKKQHKVAVHYPGDEQIVQFSVKNNARDIKEMVKKIKKQAPFEIEFCYEAGVCGFTLKRWIEKQGCRCEVIAPSLIPRKPGERVKTDRRDALKLLQLFKAGLLTEVHAPDEQDEADRELTRLRETAKENLKRIRHQILKFLTRHGYVYSDGSHWTQRHIAWLRTVKFTESKLNKVFESYFDEMVYCIGRLDNLDKEVELLAHSEKYKEVVGLLCCFHGIKTLTAITILTEIFEFGRFETARHLMSYLGLTPSEYSSGDKQKKGGITKTGNKRVRRLLNETAWHYRYRYVPSKVLKKRREAQPLWAIEIADTAGRRLSQRHRHLLNNGKIPCKANIAVARELVGFIWAIMTQWQARENIKDAA

SEQ ID NO: 511497 - protein, 365 aa, unidentified
MNNTIKVESPSPEGTRGQFSGRNGAIKLGIDVHQAFYVVVMQEGGANPKPAQRFTKEAFLIWAARLKQKSAAADIHAVYEACGFGFALQRQLAALGIRCHVVCPQKLDERNKRVKTDGLDAKALCLKLDRYVEGNREALAVVRVPTEEEEQLRAIHRQREQLVKARKQLEAQGRSLLVNHGIEPAKSWWKRRTFAALAVPEWMKQLLENSQPILLALEERIRALTAQLQSAAAPDQPRGLGLMTSVVIDREIANWDRFKNRRQVGSYTGLCPGEYSSGSTRLQGCVTKYGNPRLRAALVELAWRLVRFQPDYKPVVKWRKVLAKGALATGAARKKAIVAVARQLAVDLWRLRTGRLSPAQLGLSI

SEQ ID NO: 511498 - protein, 319 aa, unidentified
MAQNDLVVVGIDVAKDKVDACIRALALRQACPSTTHGHRKLVAWLRKHQVNKAVMEASGGYERAWARVVREAGIEVRIVDPKRVRNFALSAGRLAKNDAIDAEMIAWFAETFSDAPGQKHDAAREELQTLVKARLSLIDFRMRLVSQSEHAAPGLVQKAHAHILKSLISEIARLEAAICAKIKSMPDFAERAEIIESVPGFAETSSANLVAGVPELGQVSDRIAAALIGVAPYDDDSGKRRGERHIKGGRRWVRNAIYMPCVGAATLNNPVLKAYYQRLIAKGKEPKVAIIACMRKLIVILNTMIARRQKWDPGRYALS

SEQ ID NO: 511499 - protein, 396 aa, unidentified
MLYLGIDIGKNNHVASLIDEKGKIIFKAFSFSNTTDGGESLIAKLNTFITSTNDVEVGMEATGHYWLSIYSFFVKRGFIIHVVNPIQTDGWRKGIEIRKRKTDIIDSVLIAELIRYGDFLETSLADENTMSLRNLSCFRNYLISSIGDLKRKTICVLDQVFPEYQSVFSDIFGQTSKEILLNFITPSDFESISSEQLDKVLSEITMKKFATNKIKQLSHVAKNSFGISFCLDSFALQLKLLIEQINFIENQVKDVECQIKVLLDKINSPITTIPGIGNVTAATILGDIGDISRFSNPSKLVAYAGIDASVSQSGEYQRTNNKMSKRGSPYLRKALFSTAIVASNCDPVFKAFYQKKRAEGKHHLTAIGAVARKLCYTIHAILKNNCPYEVRLPNND

SEQ ID NO: 511500 - protein, 417 aa, unidentified
MKKNSNSPMKKEPRAKRAKVQRPVQRETKEVLAELVEKLRGRLEGKATSASLGEARQRPELSPNLDRLTVGVDLGDQWSRYCILGLQGETLSEGALQTRQAEVAEFFQSLTPARVVIEVGTHSPWMQEIIAGKGHEVLVANPRLMEGSKRRKRKNDRIDAHKLARLGRVDPESLHPIRHRSREVRQDLVLLRAREALVAARTELINATRGLVKSMGTRLPKCSSRSFAHKVGDAIPVEAREALLPLLQLADGLSRAIKEYGQKIEEMANQKYGHTKLLRQVKGVGPITALAYVLTLENPERFAKSRDVGPYLGLVPKQEDSGESQPQLGISKTGDTMVRKLLVGSAQYILGPFGPDSDLRCYGLRLCERGGKNAKKRAAVAVARKLAVLLHRLWVSGEVYEPLGYASSGAMVQKAAA

SEQ ID NO: 511501 - protein, 404 aa, unidentified
MQHHKFTAGGFSMVVSVGIDVSKDKHDCFILSSEGEVLADAFTIPNTMDGFNCLLQRIQDCTTPQDKMKVGLEATGHYSYNLLGFLLDNGLPTYVLNPLRTNLYRKSLSLRKTKTDRVDARTIAAMLLSDAGLKPYTDTAYHNEELKSLTRYRFDKVKERAKLKGSISRLVCILFPELEKLVPSLHIASVYALLEEFPGAKQIAAAHLTRLKALLEAASKGRYKRDMALEIRDAARNSIGSWMPAKSLELQHTIRLICELDNEIAEIEEQIQLIMDEIHSPITTIPGIGFRMAAMICAEVGDFTRFDSPDKLLAYAGMSPSTYQSGQLKNCYPHMEKRGSRYLRYALYNATKYVCHWDPTFADYLAKKRTEGKHYNVALSHAAKKLVRLIFAMEKSRQPYCSTA

SEQ ID NO: 511502 - protein, 341 aa, unidentified
MRYIGLDVHKDNITACVLTSTGKPKFEKDFMKDSESWNLSELMEYGDKDGFCVMMESGTYAYQPFRFFSDRGVETHVVHAQALKLITQSDKKTDKKDAYTIARMLRLWKRGEIDLQMAFVPTREQCELKDICRYREEISRKIGDETRRIKSHMSRNCEHLPDDFDNFQARKARDYVRSAFPADITLMRRMADLERLFEERDHVQKEVESRLPDSREVEILTTIPGIARQTAVQIMSMIVDIDRFEDAEKLCAYFGMVPRVRDSGGKEHHGRMTKSGDRMMRMVMERVTESHVRNCDSSVTRYYKRKCSEMGTKKALITASRKMLSVIFAMLKSGSDFRLAA

SEQ ID NO: 511503 - protein, 374 aa, unidentified
MKKSIKANAAQARTAAKVKQQKVDWKRVTTVGIDLGDRFSHFCALDADGTVIAEGRVATTPAAMELEFKPASPKRIAIEAGMHSPWLSRLLKRLGHEVLVANPRKLRLIYENQRKSDRVDAEYLARVARLDPKLLCALEHRSESGQCHLAIIRARDTLVRSRGRLIQHIRSAIKSIGERVPSGTAECFHKRAAACLPDGLREALLPLIEMVEQLTTRIREFDRKVQQLAEDRYPDTEALTQVCGVGSLTALAYILTLEDEGRFRHSRSVGAWLGLVPGQHDSGESQPQWHITKEGDPYLRRLLVGSAQYILGPFAKDCDLRRYGLAIAARGGANAKKRAVVAVARKLAVLLHCLWRTREVYEPFFNSREQHAAA

SEQ ID NO: 511504 - protein, 407 aa, unidentified
MICVGIDVSKRKSTVCFMAPGDKIIRRPFDVKHTKEELQPLVDEIRVQAKYDEIKVVMESTGVYHLSIAYFLQQNGIFVSVVNALKVANFNKAENFRHTKTDSIDSTNIARYGIAYWAKLPQFDLNGDKYFLLKRLCDAYLNFSEERSRILLQLQSQLEQTMPGIFDLFGGFDINSGKDKLLDFLERYCHIEDIIAKSEAEFVASYREWAKEKGYRSNESKAATIYAQAKNGIPSIPNNPIVRETSMWYVGLLRRADEALMASLTRMEDIAKDLPEYELVGEMGGVGRVTRVALIAQIGDVRRFKNKHSLICFAGLTPSIHESGKFRASQNHIVKKGPARLRKVLYQVMMSLVMHKIPKDDAVYRFIKKKEAEGKYKKVAKVAGMAKFLRIYYGRVMHLYRDLGLAA

SEQ ID NO: 511505 - protein, 301 aa, unidentified
MQVYGIDLSMEKFDVNYIDKNGKEKKKEVKNQVKNISKFLETVSKDAVICAENTGTYGDLLLFLANLFEIKIALVPGFTIKHSLGMIKGKSDPIDAGRIREYGERFNDKLTFKTYDTEDIAELKSLCALRSQLVKARKVIRTGEHSRTKAPMQSISVKRHSETALKQLDKEIEAVEIEMGDIIKADNELKENYDFATSVKGIGPVIATDLIIKTGNFKTIDTARKAASYAGVCPFPNESGKMVGKRKTSPFADRKLKALLYMGAKSAVKHNKEYRLYYQKKKLEGKPHYLIMNVTIYQGIP

SEQ ID NO: 511506 - protein, 364 aa, unidentified
MFIIGCDYHPSFQQIACVDTDTGEVSEHRLSHREEAEAFYRVLKQRNLSLRVGMESSGHSRWFERLLRELQFELWIGDPAQIRSKRVRKQKTDRQDAQLILQLLMENRFPRIWVPDAENRDLRQLLWHRHRLVQMRTRVMNQLHVVALNEGLRRKKALWRPAGRMELESIVLAPWASRRRQDLLDLLDQLTPKIQELTHALEEEVEKRPVTRLLMTHPGVGPLTALAYELVIGTPERFHCGKQLASYIGLVPTEESSGDRRRLGHISKQGNVLLRFLLVEAAQVTVRSQQEWRSKFFHLAMRRGRKIAKVAMARKLAVHLYWMWRQGCDYGQTQKLGSHAGEPGNPDGEQSITDVMIGHPAPSK

SEQ ID NO: 511507 - protein, 400 aa, unidentified
MICVGIDVSKGNSTVCILKPFGEVVLQPFGLSHTQADLKQLVDVILGFDAETKVVMEATGHYHLPLLCFLQENGIYASVINPLLMKKYASVSIRKGKTDKMDSIKIAKFGLDHWHELSNYRLSEDIYYELRTISRQYFRFMSLRIKEKIMLSNLLDETMPDIGKILKSNSSNFEKDKVTAFAQKYWHYDNILKLSQNKFIESYQKWAKKEGYHSSEEKAREIYLLARNSITTMPSKMPTTKLVISETAKVLHATGISLNLILSRMQELAKSLPEYSVVIEMHGVGEKLAPRIIAEIGDIRRYHSSKALIAYAGIDAPPYQSGNFTGTNRKISKRGSRYLRKTGYEIMKCVKCKVPIKDTAVYDYIIKKETEGKAKKQAKIAGLNKFLRIYYARVSRVLTS

SEQ ID NO: 511508 - protein, 464 aa, unidentified
MKRQHRRTPKPRQSTAALDRLHPHAAGIDCGAAEHFVAVPPDRDPTPVRSFPTFTGDLHRLAAWLTACRVTHVAMEATGVYWIPIFEILDARGFQVILVNAHHVKNLPGRKSDVCDCEWLRDLHTLGLLRGSFRPADGLVALRGYLRHRATLIESAAALVQRMQKALVQMNVQLPLVVSDITGVTGLRILRDIVAGQRDPQQLAQHRDARCHASEAEIVAALTGNYRPEHVFVLQQNLALFDIYHEHLATCDGAIERQLTHLAATAAPPTGPLPAARRRPKLQANDPRFDLRTPLHQLTGVDLSQIDGLAPYTALRLLGEIGTDMTRWPTEKHFTSWLTLAPQNKISGGRLLSSRTAPSANRAATILRLAAMNLGRTQTALGAFYRRLAFRIGKAKAVTATARKLAILVYRTLRDQLVYVDPGAAAYDAQDRQRVVRRLRHRAEHLGFRLIDLATGEVVESSVS

SEQ ID NO: 511509 - protein, 301 aa, unidentified
MTIVAEKYDYVIGIDTHARTHTYAIINTRTGAREHCQTFPVTTPGMNRAVAWLQRNIHGESIAAVEGTRSYGATIAHTLVGAHIEVVEAKPPRRKDQASRGKSDEIDATAAAISILGKDISKLLRPRSEGARAALSILSASRGRIDTQRTINRNSLSALLRTFNLGIDARQSLTARQIKQISVWRQHSSDSIDQRFAREEAKFLASSILAADQVLKENSKAMSDLDEQLAPELQQVFGLGPVTTAWILMAYSHPGRVHSEAAFAALAGVSPLQASSGNHERYRLNRRGDRLLNKVSTLTEY

SEQ ID NO: 511510 - protein, 320 aa, unidentified
METIVGIDISKKYFDAEINGRVCRYDNDRKSFKKIIKHLPANSHCIMESTSTYGNKLAYALHEAGHIVYIVNPLQVSCYAKMKLSKVKTDKSDAKLITEFAKANLQDLRPYDFPDKDILSAKQIETVLSQLKTQRTALGNQLEALKQNQFVSEASEKVLTETVQYFDLQISKLEKQEKDHIDKQHKEMRENITSIAGIGDATACMMISLTNGFKGFSTPGQLSSYFGCCPRVRQSGSSVRGRGTISKIGLSQARTRLYMCALSAIKYNRTCKDLYDRLKAKGKPFKVALLAVVNKLIRQIYAVISKNVVFDNNYVKKFAY

SEQ ID NO: 511511 - protein, 341 aa, unidentified
MGEYIGLDVSLKETAISVRRDGKRVWRGKCPSDPSLIAEVIRKQAPAAERVVFETGPLSVWFYHALRAEGHPAICIDARHAKAALDMAPNKTDANDADGLAHLAEVGFYREVRVKGYDSMLIRTLVAARTKLVRITTELSNQIRGLMKTFGLVIPRSKGGTFEAEVQRLLAGQEALARIILPVLEAWRSVRARAAELGRQLIASARQSEACQLLMSIPGVGSVTATSFTTAIEDPANFKKSRLVGAWLGLTTRRYQSGEVDYDGHISRRGDAHLRGLLYEAATVILTRTYAESDLRTWGLKLRERIGFKRAAVAVARKLAVIMHSMLKSGELFNRATNVMA

SEQ ID NO: 511512 - protein, 343 aa, unidentified
MQAITTVGLDIAKSVFQVHGVDSAGQVIIRRQLKRRYVLPFFEKLPPCLVGIEACASSHHWSRELKALGHTVRLMPPAYVKPYVKRQKNDAADAEAICEAVTRANMRFVATKTPEQQSCLMLHRTRHLFIRQQTAVINVIRAHLAEFGIVAPVGRKGVEELLDVVADPSDKRLPEVARGCLAALGTQLRSLKAQILGFDRMIMAWHRSNETSMRLDEAPGIGPVLATALVATVADPKVFRSGRNFSAWIGLVPKQHSSGGKDRLGSISKQGDRYLRSLFMAGALAVIRYAKIHGTKHRPWLTALLARRPTKVAAIALANKIARMVWAMMARGEHYKEPVALAA

SEQ ID NO: 511513 - protein, 362 aa, unidentified
MFDNQLWCSRPIDTWSSKTVLERGSLHRLPSNPNGCKGIEARILQGRVQEDLMETKVFVGIDICKDSLDVAIGPGKEIITFANDQKGVNALIKELSRIGPELIVLESTGGYERLATSSFVEAGLPVVIVNPRQVRDFAKSVGILAKTDAIDARVITRFAEAVKPDVRQLKDRETSELTALVTRRRQIVEMIVAESNRLKLANKRNKKDIKDHIRWLEKRLDKIESDIGKMIQNSPIWRCKDDILQSVPGIGPTTSAVLICDLPELGLLSPKKIAMLAGLAPLNCDSGKFRGRRRIWGGRASVRSALYMGTLAATRYNPAIKAFYQRLTAAGKCHKVAITACMRKLLIIANAMLRDQTLWQQN

SEQ ID NO: 511514 - protein, 339 aa, unidentified
MWYSGIDQHKRDSVLTTYGPDGPRVKQARVANTPLAIAQYFAEFPGPHTAVVESTGGWYWLADVLAPLGVELVLAHATRLKAISAAKVKTDQVDSDVLALLLRADLIPVAHMIRPDQRGPRDLMRARLRLVEKCVSAQNSVGRLLEKFNVPEVGALAELYQLPAACHAAQIQLLTEQIATLERALYPHLIPNPDVQRLLWIPGLGKVNAFTIYTEIDGITRFPSESQFFSYSRLVPGADNSGGRTRHRSGSKAGNRYLKLAFSHAGIRAVQYYPEIRAFFKAKARRKPIRIARTLVALELARIVYHVLTKQEDFNGQFKHRPLSRQKHAQWPRRASPPA

SEQ ID NO: 511515 - protein, 424 aa, unidentified
MKVTYQTCCGVDVHKSFLVATIVKTTGGIEPSYQKKRFSTFNNSILEFKQWLLDNDCHDVCMESTGKYWVPVFNLLEDEINVVIANPKWVKAVKGNKDDAKDSKWIGDLFRLGLVKGSYIPCKKVRILREYTRYRYKLVSCRSSEKNRYQNALTVCNVALDSVVSDIFGKSSMSIIDYLLEQSGTSINHEEIASKLLRSLKSKEDAVIESVEGYQMTDAPKYRVRLVRAHMDYITAEINDVDKMIENMISSNPNFENAVQFLCTIPGVKRDSAITIISEIGTDMSQFSSSKRLCCWAGLTPGSNESAGKKKSVRITRAGVYLKPALVQCAHATVKSDKSPYYKKKYESLVKRRGKKRAIIAIARMILTAIYQMLSTGEQWNPSDLYKIDMPVALVEKQKAKAIKQAKKLLQREGILPPDEPLAS

SEQ ID NO: 511516 - protein, 349 aa, unidentified
MGEVITIGVDIAKLVFQIHGVDADGTVVIRRRVGRARVLEFFADLPPCRVGMEACATAHQWARELAKLGHDTRLMPPTYVKAYVKRGKNDAADAAAICEAVTRPSMRFVPIKSVEQQSVLMLHRARDLLIRQRTQLTNALRAHLAELGLVAAKGREGLHQLAAGVTECGNERLPSDARFACQAIVTQLNSIQIEISGLDKRINQIHRANADSKRLATIPGFGVILSTAVLATMTDPKAFKTGREFAAWIGLVPRQNSTGGKERLGSITKQGDRYLRRLLVVGATSVINSARARPYKYPWVIELLGRRPTKVVAVALANKMARIAWAVLAKGERYRAPTRSSNPVVPAAA

SEQ ID NO: 511517 - protein, 354 aa, unidentified
MLIIGCDYHPSFQQIALVDTDTGELQERRLDHREEAEKFYRELAAQGVKVRVGMEASGQARWFERLLGELKFELWIGDATEIARKRERKQKTDRQDAQHILKLMLKDDFPQIWVPSWENRDLRQLLWHRHRMVQARTRIMNQLQAVALNEGVRCNKRLWREKGREQLESFRLAPWASRRRHDLLEWLDRLNPTIGALSQAIEQEVEKCPEAQRLRTHPGVGPLTALAFVLIIGKPDRFQCGKQIASYLGLVPLEDSSGNRRRLGHITKQGNSLLRFLLVEAAQVTVRSLPEWRSKYVHLTMRRGRKIAKVALARKLAVRLYWMMRKGWDYEQLKKFGSHAGQPGHRDGVKQNIE

SEQ ID NO: 511518 - protein, 369 aa, unidentified
MEQYRELFVGLDVAKSRHAVAVADGDRNGEVRYLGEIDTDPTSISRLVAKLSKRNARLHFCYEAGPTGYGLHRQLTKMGHECSVVAPSLIPRRPGDRVKTNRRDALQLARLLRAGELTAIWVPDEAHEAMRDLVRLRDTAVEDLRRKRQMISSMMLRHGRIYPRKKTWGPTHAQWLQAQKFSHPTHQLILQDLLLAVRHAQERLQRVENAIKEFLPGWSLAPVVEALQALRGVNLVTAAVIMVEVGDLRRFENPRQLMGYLGLVPGERSTGTSVRRLAITKAGNGRVRRALVESAWSYRYTPRMAAPKQRQINRVSPAIKDIAAKAQLRLCGRYRALSARGKKLNLAVTAIARELCGFIWAIGKEVQVS

SEQ ID NO: 511519 - protein, 348 aa, unidentified
MTVYIGVDFHARQQTISYLTTEEGAIQHLVLLHDNPVAVRAFYAQFAGQRVVVGFESSGYAAWFEELLEELGCELWIGHATYIRQFAKRRQKNDRRDADLILELLHTGDFPRIHRYSRTTREMLQQLRYRQRLVKMRTMAMNMLLFMASSRGVSLRTQLQSKRGQAKLQQLALPATLGRQRDELLSLLQTLNEKISTIERWLEQQTKADLAVQRLQTHPGIGLLTSICLRYTLEDAGRFANTRKVSAFAGFDPMQDQSDERNRMGAISKQGSRWLRFYLVEAGQVAIRKDADLQRVYQRVARRGGHAKAKVAVARRLLVRAFIMLRDEIDYAEFQRRGVAARSSRGTA

SEQ ID NO: 511520 - protein, 368 aa, unidentified
MQVVYTHCAGLDVHKKTVVACAITPNQKGGWQKEIRNFSTMTKDLLNLSDWLTSKGCTHVAMESTGDYWRPVFNILEGNVEVMLVNARHIKAVPGRKTDIKDSQWIAELLQHGLLRPSFIPGAEQRDLRDLTRHRSNFVRERVNLVNRVQKVLEAANIKLACVASDVMGVSGRAILAALVEGQSTPEDMAELAKGTMRDKRELLIQALEGRVRPSQQFILAQLLAQIESIDQTIALFDQKIEDYCRPFQKAIELVDTIPGIARRTAEIIVSEIGTDMSRFPTAEHLAAWAGVAPGNYESGGKTLSSRTRQGNRTLRAILVQAAHGLSRTPTYLAAQYRRLAARRGKKRAAVAVAHSILVIAYHLISRS

SEQ ID NO: 511521 - protein, 421 aa, unidentified
MKPQAPEAFAAFVGLDWADATHDICLQVAGSTRREFLRLEHRPEVIDAWVCTLRTRFNGQPLAVCLELNKGPIVSALQNYDFLVLFPVNPLTVAKYREAFTPSRAKDDPTDAELQLELLLKHRDKLTPLSPQSPTMRALAQLVEHRRRLVGDKVRLTNRLTSALKNYFPHVLQWFQEKDTVLFCDFLSRWPTLKAVQLARRATLEGFFRAHHVRSADVIATRIQAIKSALALTTDEGVITPNVLLVQALVAQLRVTMQAIADFDKAIAQRAQDHPDFPLFDALPGAGAVFAPRLLVAFGEQRERFTSADELQKYAGIAPVTERSGKKSWVHWRLQCPKFLRQTFVEWAAESTRHSFWAQVYYQQQRDKGKAHQAAVRALAFKWIRILYRCWQERTPYDESVYLQALKRRSAPLLHNLANLS

SEQ ID NO: 511522 - protein, 343 aa, unidentified
MKYATTIAVDLAKSIFEIAVSDVPGHVLERHRLSRTRFHEFFAQHRPATVVFEACSSAHHWARSLDRLGHSVVLLPPHAVRPYIVRNKTDRTDAKGILEAFRNKAIQPVPIKSPDQHTLAALHRFRSAYIGNRTARINTTRGILREPGCTIPLGANHVVPAIHELLSDNNDIPDALKPTLIDAANKITDLQDRARGIEGQLNTIAKSSDIVKRLRTIPGVGPLTATALLAFVGDMQRFPTSRHFASYLGLTPRENSSGSRRRLGRISKRGDAYLRTLLVHGARSVLCHAHNAKELDRLRTWALRVEQLRGHNKATVALANKLARIVWAVWKNDEPFTSADAEH

SEQ ID NO: 511523 - protein, 409 aa, unidentified
MFCGIDWSDDHHDVAVVDDNGAVIAQLRIGNDAEGFGQLLETLAELGSGSAREVPVAIETAKGLLVASLIAGGWTVFPINPLATSRYRDRHRSGRGKSDTSDALVLANILRTDMHAHRPLPVDSELVRGLRVLTRAQQDAVGDRMRMTNRIRAVLKQFFPAAIDAFERGGKHRLDSAACRTILRAASTPAAARRLTLTQLRSLLRRAGRSRGIDAEAANLKKILRSTRLHQPSRIEEAMGTQLRCLLDQLNATCSAVDQLTAAVEELFAEHHQAPIFVSFPGAGALTAARLLAEIGDDSSRFDNARALRAYAGAAPITRASGKSHWVGARRAKNDRLAATGYVWAMAAIRHDPDARAHYQRRRDHGDHHVAALRNLFNKLIGKLHHCLIADVVYDANQAFPASVTAAAA

SEQ ID NO: 511524 - protein, 314 aa, unidentified
MDAVIVGIDVSKDKLDVAIRPSGERLVVKRSEAGLEELKNRLGALAVAVVGLEATGGYETVVAASLSAAGLPVVIVNPAQVRAFANALGKRAKTDPIDADVIAHFVEATKPKARPLPDEATRQLSDLVGRRSQIVAMMAAEQQRKKHRPNKRMLASIERLLAALQRELSDLDGQIREAIKASPVWREKDELLESVSGVGPAISGRLLAGLPELGSLDRRQIAALAGLAPWTRRSGRWKGKSFIGGGRADVRSALFMGALVAVRHNRTLKAFYQRLLAAGKEKMVALIAVARKLLTILNAILRDGEPWREPEVHA

SEQ ID NO: 511525 - protein, 357 aa, unidentified
MNLKYSIGIDVSKKDFHCCLSLIDSSQKVTVKSSRKLSNTPNGFKEFLTWAKQHQKEELPSRIVMEATGVYHEQLAWFLHSKGLVLSILLPNKAKKYLQADGANSKNDSIDARGLAKIGAEKNLEPWIPGSEKLYELRHYTRQHQNLKETINLIGNQLEALNHSQFQSREVIRQLNKTIKLLEQQVTEMEKAMEKLVKADKVLKLHYQNITAIKGINLLSFCVIVAETNGFTLFKNSASLVKYSGYDVVENQSGKHIGKTKISKKGNSRIRRILFMPAFCAVRNDQPQFKGLYERVFERTGFKMKGYVAVQKKLLVMMYHLWKNEQAYNPQFNYQEKIIAPEKSRATHDKIPEGSFH

SEQ ID NO: 511526 - protein, 341 aa, unidentified
MTSYVGLDVSLAETSVCVLEADGAVRFEGRVKSSPEALVRCLAERAADMKRVGLETGQTAGVLVRGLRAAGLPVICMETRHAHKVLSARTHKTDRNDARGLAELMRVGWYREAWVRGASATYIRSLLQGRKLLMQTKRTLENTLRGAVKRFGVITTKTAGRGFAQRASLAMTQDPAYAGFARPMLAVLAGVVEQIRIYDRQLRAIAREHAVGRRLMTVPGVGYLTALAFLSTIEDPARFKRSADVGPYLGLTPRIYQSGEIDRSGRISKTGDAMTRSYLVEAANVLLVRVDRPVPLRLWGLRIMERAGLKKAQVAVARKLAVLMHAMWSDGTEFEWAQAGA

SEQ ID NO: 511527 - protein, 414 aa, unidentified
MLKIVYRICCGMDVHKSFIVACIASTNEQGVTGYKSKRFSTFTGDLRRCADWLSENNCKDVCMESTGKYWIPVYNILESTCNIVLAHPKYVKAIRGKKTDKRDAKWIADIFKHDLVAGSFIPPADIRQLRDLVRYRWKLTNFTTGEKNRAQNCLTVSNFKLDDVFSDVFGKAASAITVRILENPAEKITDVSGFRTKGMKATNEQVLAAVDGEMCAQQAEKLRIIRSHMSNLELCKLNLESLILTTAEKYLPQLGLVMTAPGIQSFAAIGIISEIGVDMSVFPTSKHLCSWAGLTPQNNESAGKKKTTRISRAGAYIKPLLVQCALCAVRAKQFPEVRNRYMALKKRRGHKKAIIAIARMLLTVIYNMLKKNEPYNPELYRKGNRPPAHREVSVEEAIFILQRQGYLVTAPPAS

SEQ ID NO: 511528 - protein, 337 aa, unidentified
MIHVGADLHREFCYMTALDATGRFLKAGSVVNTPGALQQWLGGFPEPVTVAVEACSFWPAFKDAIEEKVAAIRLVHPQRVKAIASAKLKNDRVDSQTLAHLSRCDLLPQAWMADRSTRERRQQVRLRISLGQHRAAWKNQVHAVLHQHGQRPPVSDVFGKQGRQWLAQIPLPAAARHTVNTYCSMIDQISRHVREQDRQLKQTAAADVRVKWLASIPGIGVYSAMIILSEIGEIQRFRTAKSLYSYAGLVPRVRESAGHKSHLGISRSGSPRLRWVMVEASHTAQRHCPAAARYFERLRKRKHPHVARVALARKLLGAVFALLRDGVCFEESIFAAV

SEQ ID NO: 511529 - protein, 354 aa, unidentified
MKRTTKYVALDVHQATTLASVREEGGRVLARTILPTEELAIVEFFRGMRGAVHVALEEGTQAQWLHDLVAPLVDRVIVCDRRGQPRQGNKGDQVDADQLSELLRRGGLRAVYHGSAHRGALKELTRTYRNLIEDATRVMLRLKALFRARAIPTRGTKVYQARERARWLAQLVDRGARFRAEALYAELDVLRALRPKAKAAMVAEARRDPAWPVLRAIPFLGPVRVALLLATMQTPWRFRTKRHLWAYAGLAVVTRSSADYTLVAGEPVRRRRPPMTRGLNRNHNRALKDVFKGAATAATAWPGPLQDFYHGMIARGMREELARVTLTRKLAALTLRLWKKGERYDPTQLTMQAR

SEQ ID NO: 511530 - protein, 480 aa, unidentified
MKRLTGTSIPLNTIRRSHWLFSMTVELRSEVAGSRIRTWHLMPTDRMGPPPGAADAHDRIMVRINRSYRIQILCNGATNSGNSMSPTTEPTERSMDHPTTLSVPDPTGICGDCATLFVSLELSRSTWVATSLALGSRKMSKHTLVGGDARMLLDLLARLKSKAEQRTATPIKIVAIQEVGLDGFWIHRLLEANGVESHVVDPASIAVPRRHRRAKTDAIDGETLLRTLMAWQRGEPRVCAMTVPPSPSEEDRRRVSRERAMLLRERIRHTNRIRGLLFGQGITNYNPLHKNRRKRLEELRTGDGHPVPAHLKAEILREIDRLELVLRQISEVEAERDKMLRPAQASSPAALLMRLKGIGAEFAGVLYLEGLFRHFENRRQLAAYAGLAPSPWKSGSVDHEQGISKAGNPRLRTTMIELAWMWVRYQPASALSCWFRQRVGSERGRIRRISIVALARKLLIALSRYINHGEIPAGAVVKPV

SEQ ID NO: 511531 - protein, 354 aa, unidentified
MYYTGIDLHRDTCTCCTLDQAGTTVTVETLPTDPEEITAYFTALPGTHQAVVECTTGWYWLSDLCQALGVELLLAHAKHLKAIAYAKVKTDTVDATTMAHVLRLGFIPEAHQISRERRGLRDLLRHRLRLVETRSRLQTQAQAVLFKFNHGPVAGQYLRDIDQVEGKLATTFPEAYRLQLKTFAAQLQQLDTSLHTIRAQLRTALIQHPDVQHLLTIPGVGLLTALTLYLEIDGIQRFPTVGHFFSYCRLVPGAHNSGGKQAHARRKDGNRYLKMACGHAAPKARQYYPVIRRWFERKKRAKGFPIANALLAKELAKSAYYVLRKGEPFHGQWKGQPLDHQKHRHWPQPVTAPH

SEQ ID NO: 511532 - protein, 424 aa, unidentified
MKFKMQNKQNQLIERISVKHLVVGVDIAQQLHVARAVNFRGIVVGDPLTFKNNEEGFVSLLKWIINLQKLNNLDEVIIGMEPTGHYWINLSKWLSNQDIEVVTVNPHLVKKNKENRDNTQSKSDKKDALVIADMVKNGYYSQVRYTSESFEKLRVLMSNRDVVVKRFVSSINQLNRWVDIVFPELRQVFKDIKAKGAIATLRLFPTPMELETLQPHDVIAGWKSIMKRQPGLKKAKLLLQVAGRSVGTRQALDAYKFHLEQLLEEYDLAVTQLERVEKHVTEELNKISFAKKLLTIKGISEISLAGILGEAGDLSNFSHGNSLLRHAGLHLAEASSGKWKGQIVISKRGRSRLRRFLFLATMSLVANNPEFKALHTNNVKVKKMKKMKSIMKLVGKMARIFVGISRRNESYSSDKLKPFSPMAA

SEQ ID NO: 511533 - protein, 386 aa, unidentified
MKEKVRFLGLDVHAETIAVAVAEPEGKVRSLGTIPNRAESIRKLIKKLGPAAKLIACYEAGPTGYVVYWQLAELGVECEVVAPTLVPVKAGDRVKTDRRDAEKLARCYRSGDLTAVWVPDEGSEALRDLVRAREAAKQDQTRARHRLSKFLLRSGQRPPTGVRPWTRPYPIWVAQLRFTHIAQEYTRQDYLHEVEHMRERVLRPEQAIAEAVKLASPALQEVITDLQALRGIAHISAVTIAAELGQVSRFPGARELMGYCGAVPSESSSGKRTRRGGITKTGNAHLRRIVVEAAWSYQRPPAIWAGLRKRQQSASEEAKEIAWKAQHRLHKRYVRLAAAGKDKRKIVTAVGRELLGSIWAIGTKAEATARQRLPDRDGMASMDDGT

SEQ ID NO: 511534 - protein, 348 aa, unidentified
MDHIIRIGMDTSKHVFQLHGVNAAEEPVLRRKLRRNDMVVFFERLAPTIIAIEAAGASHHWARLLRSFGHEVKLIAPQLVKPYVKRGKNDAADAEALCEAMSRPTMRFVPVKTAEQQAALMLLGLRDRLVRNRTQLANAIRGYAAEFGLAAAKGIAHLAPLLARIQSDESLPGLARELFAAHAQEYAQLQAQIDEVEGKLMAWHKTNPGSRRLAQIPGIGPIGAAMLIMKTPAPEMFRSGRQFAAWIGLTPKDHSTAGKVRLGVITRAGDEGLRSALVVGATAVIRHLRNGKGRSMLSAWVEQLLKRKPPKLAAVALANKLARIAWKLMVTGETYAAKPRPVASAGIA

SEQ ID NO: 511535 - protein, 415 aa, unidentified
MNCYCGIDWAEGHHDVAIVGGDGSLVAKKRIGDDPGGFTALTGMLADAGDSFEDPIPIAIETPRGLLVAALRASGRPVFAINPMAVARYRERSSVARAKSDHADAMTLANILRVDAHLHRTLPADSELAQAIAVLARAQQDAVWRRSKATNELRSVLREYYPAFLDTFAGKSATNLAKPQARAVLAIALTPADTAKLTQARIATALRRAGRKRGIDELAAEILERLRAPQLRQPELVEKAMGRQALALLAILDAACVGADELEQAATEEFRKHPDHAVITSFPGLADLTGARILAEIGDDRARFADDRALKAYAGSAPVTRASGKLTSITHRRIKNDRLAAVGWVWATYAAINPGPARAHYRRRRDHGDRHAAALRHLFNKMLGQLYHCLQTRQTFDPIKAFGQPCAAPPEPAAA

SEQ ID NO: 511536 - protein, 455 aa, unidentified
MRGRPRNRIKLLRVNMFCREAGLEQDSASARRTLTPFSAYPDVSPVLIISTREGRQKFPPLVWFGELPVANYEQLGWRDASHICHPPMDRLLKTSPTHSISVNEESSGRVLDQSDRRFVRKVTQVGSTPATYTLPIGERVMQTPVDIGADISKDYVNVSCATHVFPNAKLLNRRAVLLAWLKRLPAGTRIGMEATATYHELLASLAHRLGLVVYVLNAKDVHHYAKATAQRAKTDRVDAALIARYVAKEHNQLHVWYPACPAQRQLQRLMRRRGKLTRTRASLRSSLQGVPSLRSDLRALLKHFDSLIAKLDTQARALVSRNVEREQAFGRLDDIPAVGNAVGIALLATLERWALPRANSFVAFLGLDPRADESGTRHGRRRLSKRGDPELRRLLYTAAMSASRTRVWAPLYQRAIARGLSRVQALVVLARHIARTAWSIYTHKTQFEPARVQNS

SEQ ID NO: 511537 - protein, 466 aa, unidentified
MEVLYARCAGVDVHKKTVVVCRIIPGPDGKPLKEIRTFTTMTRDLLALSDWLAEGGVTHVAMESTGVYWKPVYNLLEGTFTLLLVNAAHIKQVPGRKSDVLDCAWIADLLRHGLLKGSFVPERGLRELRELTRYRTALVRERAAEQNRVHKTLEGANIKLSAVATDLMGVSARQMLAALCTGRSDTEAIAQLAKGRLREKIPLLEQALEGDFQPHQRFLVAQQLAHIDYLEGLIDPVSEEVAQRLEPLAPPPSGPAPAPGRDALDEAAAFAAAELEARREALHLRLALDGLQEQEAVEGPLSFAAAVALLVTITGISQRTAEVIVSEIGTDMSRFPSAGHLCSWAGLVPGLNVSAGKRHGNRTRRGSPWLRSALVEAAHGASRSKGTSLSAQYQRLAARRGRKKAIVAVAHTILATAYYLLKNRTTYEELGDAYYDARDKEAIQRRLVRRLEEIGYTVTVELAQAA

SEQ ID NO: 511538 - protein, 343 aa, unidentified
MQMVTTVGLDIAKSVFQVHGIDAAGQVVIRRQLKRRYVLSFFQKLPPCLVGIEACASSHHWSRELKVLGHTVRLMPPAYVKPYVKRQKNDAADAEAICEAVTRANMRFVVTKTAEQQSGLVLHRTRHLFIRQQTAVINVIRAHLAEFGIVAPVGRKGVEELLNVVTNASDKRLPVVARMCLASLGAQLRRLKQQILEFDRMIMAWHRSHEASRRLEAIPGIGPVLATALIVSIPDPNAFRSGRNFSAWIGLVPKQHSSGGKDRLGSISKQGDRYLRSLFVAGALAVIRYAKIHGSKHRPWLTALLARRPTKIAAIALANKIARMVWVLMARGERYKEPIALAA

SEQ ID NO: 511539 - protein, 357 aa, unidentified
MHSIGTVEDRQVFGMDTAKHVFQVYSVKPSTGASISVRLDRSEVVDYFARFGSCLIAMEACGGSNYWGRLLQSHGHRVRLLPTALIRPFITGNKTDAIDARAIWLAVQLPDVKFASIKTVAQQSVLSLHRQRDMLTKFRTRQVLALRGLIYEFGIIFPKGGRDLFLKAVGEVLETRQGELPAFLLASLQDQVERIRSLEKSIARIDEHLEKYFRSDPDMQRVAQIPGVGMLTATAVIATMGDPSIYKNGREFCAWLGLVPRQSGSGGRIRLLGISKKGDPYLRTLLIHGARSVLYRTKEKSAWLQQLLQRRPTNIVVVAQAAKTARIIWAVTAKKCAYDPTHALVAGQTLQISKAVE

SEQ ID NO: 511540 - protein, 409 aa, unidentified
MPTTLLVGIDVSSCENKVRFLDSSGTSLSKFTIPNNLPGASKLSQSIANIMNSHKLESLVIGLEATSVYGEPLIHFLKQDAGVMSFNPHIHILNAKQVSAFKKSYPDLPKTDDVDAFIIADHLRFGRINKEVYMDEKTVALKKLTRARYYCANNLTREKNHFLNHLFLKFSALTQEKVFSDKFGATSMAIIEEFFSVDEIAYTSIEELAEFIDNKSRGKFECPEDIAKMVQKAARSSYRLPKTVADSVNQVLAISYNTIKTLKDQLKLFDNAIEEIMKTIPHTLTSVKGIGPVYAAGIIAEIGDINRFKNQAALAKYAGICWTKYQSGKYTADNTHMILSGNRYLKYYFMEAANMVRMHEPEYKRFYDLKSRETPKTPHKRALALTARKLVRLVDALLRSNRLYISPKA

SEQ ID NO: 511541 - protein, 334 aa, unidentified
MWHVGIDLHRETVVIAAVNDTGEVIKPVTVRCEDTETIVDVVKALGSFRAVIEASATYRWLYELLQPYGTILLAHPFRLRVMVQRRTKTDKLDAQLLANLLRIDQIPLAYIPPEPYQQLRELTRRRARLGRELAEAKIHLRALLARKNRQAPYRVPFGVRGLAWFRGQDFGWIENLVRDELLARLRHFGRQATIIDRHIERMSAAFPQAEALTDIHGIGLYSALLIVAEIGEPERFRMAKQVGAYAGLTCRVHQSGGHCYRGSITRQGSTWLRWILVQAAIKAIREDAALKNFYTRVRKRSSAKIARVAVARKLAEICWKRLRRWQREHANQAA

SEQ ID NO: 511542 - protein, 402 aa, unidentified
MNAVGIDVSKGKSMVCVMRPFGEVVLEPFEVLHTAQSLNDLAGKLKALDGETRVVMEATGNYHKPVAFVLHDAGLFVSVVNPGLIHDYDNNSLRRVKTDRKDAVKIANYTLDKWTRLRQYLPEDDTRLALKNCYRQYQQAVAVRTMLKNNLISSLDLTFPDANKLFSSPAKSNGCEKWVDFIGDFWHSECVSSLSSDAFAKKYLKWCQKHGYNFTRSKSDTIYACAVNAASLPKSPTSKLLIQQQVAQLKAVSQSVAAFQQEMLRLSQQLPEFDTVMEMYGVGPSLGPQLMAEIGDVRRFSSKKSLIAFAGIEPQPNDSGKIVGNDSGISKVGSAVLRRTLFLIMTVILKTQPQDEPVFQFMNKKRSEGKPYKVYMMASANKFLRIYYARVKAVMDSKRRYR

SEQ ID NO: 511543 - protein, 443 aa, unidentified
MSRDIKYIGMDVHKEAIVIAVLNGSGKLVMESIVETKASSILQFIHGLRGELHVTWEEGTWATWLYDLLQPQAAQVLVCDPRRNAFLKEGNKSDKIDARKLADLLRTGMLRPVYHGEHGLRTLRELGRSYQTISQDLNRVMNRIKALYRGWSIPCAGTQVYAPRNREEWLHKIEHAGVRRRAQLLYEQLDGLQTLRRTLRPELLAESRKHKASKLLMTIRARAGLVRARTALVNTARGLAKSYGERLRGCNVRDMDPEKAEGLSPELQRALEPLLSTIEELSERIVEYNDRIEALAQTSYPQVELLKQIKGVGTLIALTFLLTLEDPHRFRKSRDVGGYLGLQPGRRKSGESEPQMHISKEGDPYLRTLLVQGAQHILGPFGIDCDLRRWGLKLAERGGRNGKKRAIVATARKLAVLLHHLWISGEVYDPLHNSSRLTVAAAA

SEQ ID NO: 511544 - protein, 348 aa, unidentified
MAHFVGLDVSVKETSVCVVDDAGKVILEQKVPTEPADIIALLTSLGVSYGRIGIEAGPLSQWLVNALTAAELPVICVETRHMKALLTAQQINKTDRNDARGIAQMMRVGLFKPVHVKTLAAQEQRMLLTSRKLLQRKLLDLELDLRGTLRNFGLKVGAVSGGRYEARVRELVVGFPRLAAIAEPLLNVRRVMRQQLAVLHKMLLDTVRGDPVCRLLMTAPGVGAVVALTYRATVDQPQRFVHSRAVGAHVGLTPKRYQSGEIDYDGGVSKCGDTLLRTMLYEAAQVLLTHGSKWSWLKAWGVRVAQRRGMRRAIVAVARRLAVVLHRMWVDGSEFRWKKDSVAVPTAP

SEQ ID NO: 511545 - protein, 346 aa, unidentified
MKILALDLGKSNTCGCIFDTSTAEERFSTVRTRPDELRRLLERERPGHVVFEVCTLAGWVHDLVTAAGAKAHVANPNHEGWRWRNVKRKTDRLDAAKLAGMLAMRQLPEVHMPSRGVREHRALIAYRQQLVARQTRVKNTIHSLLLRQGRVHPRGQRGWTLKARSELEQLARPWEQVGDADLWRAELGEELLALEEIGQRLVRVERKLDELGRGDERIRRLQTIPCVGPRTAELLVAVIDEPRRFHRGKEVGSYVGLVPRQYQSGQMDRSGHISKQGHRQLRSLLVEVSWLALRYNPHLRSVFERICRGTRSRRKIAIVAVARKLVIIAWAMLRDGTSWRARVRAA

SEQ ID NO: 511546 - protein, 370 aa, unidentified
MKHPTTLFVGLDVHKDSISVAHVFEDRSAEVTFVGPIGTRQGDLDRLVRRLQSKASRLVFAYEAGPCGYVLHRSLTRKGFTCLVVAPSLIPKKPGDRVKTDRRDAVQLARLLRSGDLTSVYIPTVEDEAIRDLTRAREDALKDLKATKLRLKSFLLRLGIHYTGKANWSDAHLRYLAKVVCPTPSQQIVFQEYRRAVSELVERLGRITTVITEQVPSWRLSPLVSALQALRGVQDTVAVTTLAEIGDLTRFHTPRQLAAYLGLTPSEHTTGNQRRLGSITKTGNSHARRALVEGAWAYRFPAKVSESIQKRLEKLPKPIQDIAWKAQVRLCKRYRRLIARGKHPNVAVTAIARELAAFMWAIAREVPITA

SEQ ID NO: 511547 - protein, 355 aa, unidentified
MSQDKYIGMDVHQASVSVAVLDVGGKLSMECVLETKASTIVEFVRGIRGRLAVTLEEGTCAAWLHDLLQPHVSRVVVCDPRKNALLQDGSKSDRIDARKLAELLRGNQLSPVYHGDHGVRTLKELARSYLTLTQDLTRVMTRIKALYRSWAIPCSGTRVYGARQRSEWLAKISQAGVQLRAERLYQHLDLLRPLHQQARCALVEESRRHPAVKWLRQIPSIGPIRAALLVALLQTPHRFRTKRQLWAYSGFAVETHDSGEYRYVRGKLQRNRERMRVRGLSDNYNRDLKNLFKSTAISASTRPGPLRDFYLALLAKGIRPSMARLTLARKIAAITLTIWKKGVDFDATQLGRQAA

SEQ ID NO: 511548 - protein, 345 aa, unidentified
MEITTMGLDLAKNVYQVHAINGAGEVVVRKTMRRAQVLRFFERLAPCLVGIEACGTSHHWAREIRRLGHEVRLMPPAYVKPYVKRGKTDASDAEAICEAVSRPTMRYVAIKSCEQQAALTVHRTRDLFVKQRTQLVNMIRGLLAEFGIEIRRGITHALSLAERIVAGEMPGIPALAAKMIASLAGQILDLQARLREIERELLAWHRSSDIALRLATIPGVGTICATAFTASVTDPHQFRSGRQFAAWLGLTPLQHSSGGKERLGRISKMGDKYLRRLLIVGMTSLVRRAKYKPDAVDPWLAALLLRKPARVVTVALANKAARVIWAIMSRGEIYRAPQTASAVVA

SEQ ID NO: 511549 - protein, 361 aa, unidentified
MKKVSRELPKMEAGIAKPEMTVGLDLGDRYSHYCLLNSDGEVIEEGRVQSTEAALRRHFEGEDCLRIALECGTHSPWVSRLLNALGHQVIVANARQIPAITGSESKNDRNDAEKLARFAAFDPKLLSPLEHRSEERQMDLNLIHARSTLVRARTMIVNALRGLVKSAGGRLPACSTEFFPARALAVIPPALSAVATPLVEQIGLLNAQVNGMDKQIEKLSAKYPEIVLLRTAPGVGPIVAAAYVLTLGQPDAASNRSAGAFLGLRPAQSQSGAADPQRRISKSGDSFLRSLLVQSAQYVLGRFGPDSELRRWGLKLAATGGKRGKKRAIVAVARKLAVVLHALWRSGQRFQPFPQQAAVAA

SEQ ID NO: 511550 - protein, 361 aa, unidentified
MRIIGCDLHARQQTLAMLDTATGEIVNLTLTHEGDHVREFYSNLPRPVRVGIEATGSMQWFLNLMEELGIECQVGHPANIRAAEPRKQKHDRRDADLILKLLAENRFPSIWLPSKELLDLRALLLHRHQWVRMRTRVQNALQAIALANGLRRGPSLWSQAGQDKLASLPLAPHTAHRRNELQALYAKFEMEIEKLNQRVEKQAWERSTALRLMSHPGVGPITALATDVFLGDPRRFVDGKALASYVGIIPREYSSGGRQRLGGLTKQGNPLLRFLWCEAAIHAVRKDPELQRFYRRKLFQKGLGKARVAAARKLGIRLWILLRDQIDYNEFCRRGQRRQKYGGACAGMPELRYGAEQSPSD

SEQ ID NO: 511551 - protein, 339 aa, unidentified
MELYAGMDLHSRNTYVGILDGKLKRVFKKRVANDLGLILNTLEPFRCDLRGIVVESTYNWYWLVDGLMDAGYNNLHLANPSAIKQYEGLKYTDDRHDAFFLAHLLALGILPEGYIYPKKDRPVRDLLRKRSFLVKQRTENIHSLQSMIERHRARRLNGSEIKKLHIEDLEGIFQEEYVVLAAQANNGTIKFLSEQIQEIEKAVKGVVKLKKPFELLMTVPGIGEILALTIMLEVGDIHRFPTVGDFTSYSRCAPTDRLSNGKSKGKGNRKNGNRYLGWAFVEACTFARRFYPKFQSYYQRKAAKTHKFVATKAICNKLARICYYVMRDQVSFREEALFC

SEQ ID NO: 511552 - protein, 320 aa, unidentified
MNCTNNQNEINVGVDTGKHQLDLYIRPLDIFFTVENNKSGIKKALTEIKKHPPTRIIIEATGRLEHAFIEACAKAKLPFVVANPMQVRRFAGATGQLAKTDKLDAQMIAHYGEAIKPGLSVLKPAAMRHMSNLLSRRRQLIKMQTMEKNRLQVMPKELSGFIKPILTVIKNQLAKLDDKLAILIEKIDEYRIKNDIIQSMPGVGKVVSMSLLSDMPELGQISNKKAAALIGVAPINRESGGYKGQRRIKGGRHQIRTVMFMAMLSAIQCNSLFKATYHRLVDAGKPKKIAIIACVRKMVVILNSMVRDGVYWNENMAKNN

SEQ ID NO: 511553 - protein, 710 aa, unidentified
MAPREVVRGEWAGSGWLSGREQAHHPDQVVRAGDQVASHPCFVQADVARAAESASCFHPAKYFFDPLADALTDGIPGMPCRSAIDRTAPPTRVLGHVGRHVPRTEVGDTRLGVVALVRSQRPWSEPIVARLVDQAWNRIPFGCAGGLSHLKVDQEPIVVFHERVAGVRQAGFFARTFLGQQRFGISPALMRRIRALLPMEVHPPIAGRAAGALVGWLVSRSEALEAGRGFDQRAVHREVLIAQQSQTIRRANHGIKELAGHRVLEQPRAVLGKDRRIEAGLHQAHIQKPPIEQVEVELLTEGPLTADRVNMEGMPRRTFATVAWTRRGFSSVEVCLMSPAKHQRTRYVGLDVHSTSITAAVAEGDEPPTSFGSIANEPAAVRKLITRLGGPDIQLRVAYEAGPTGYALHRQLSAMGIECVVIAPSLIPVQPGVKVKTDRRDALKLARLLRSGDLTPIWVPDEAHEALRNLVRARADAKADSLRAKHRLSKFLLRQGRHAPVGRRAWSQTYFQWLRGLQFEQLADRVVFADYLAVVTSADERLKRLEAALRQCSAVASQAALIDALQGLRGIGFLSAVTIVAESGDLRRFATAPQFMAYAGVVPSESSSGNRQHRGRITKTGNALLRHVLGEAAHHARHAPHVSGSLKQRQAQLPQPIVDLSWRAQLRLHHRYRQLGARIGPYRTVTSIARELAGFVWAVGQLQQATPPAA

SEQ ID NO: 511554 - protein, 343 aa, unidentified
MTHFVGLDVSQKMTAICVVDNAGHRLWRGQCPTVPEQITVLVRRHAGDEARIGIETGAMTPWLVHELRNLGLEVVCLDARHARAALEMQINKTDQNDAEGLAQIVRTRWYRSVHVKSFESHRARALLGARTQLIGMTTRLSNHIRGVLKTFGLLPGAMRGLPFDRKVEALILHRSDVALIVRPMLVAWRQVREQIAVFDKAIRVLVRSSSACRLLMNVPGIGVLSALAYVSTVEDPGRFSRSRSVGAHLGLTPRQYQSGEVDRSGRISKCGDTLARTLLYEAAVVILTRLKKASSLKDWGHAIARRSGNGKARVAVARKLSVILHSVWRSGQPFRWPEHANAA

SEQ ID NO: 511555 - protein, 359 aa, unidentified
MSKNSMHFVGLDLGDRHSYLVLLDSAGELVEETRLPSTRAALQRRFSALPPSRVAMEVGAQSRWASDLLRQLGHEVLVANARKLRTIYDNPHKSDRADAETLARLVRMDPKLLSPIYHRSPQAQADLAVIRSRDALVRSRTLLINHVRGRVKSSGVRLPTCSAASFAKKVAGSIPEQLRPAVLPILGTIGSLTQQIRAYDRQVEALCDSQYSETRSLRQVPGVGALTALAFVLTLEDPARFPKSREVGAALGLVPRRDQSGDRDPQLSITKTGNAFLRRLLVGSAHYILGPFGPECDLRRWGLQLAERGGKNAKKRAVVAVARKLAVLLHRLWKTGEIYEPFHSSAPQLNQSEVIPTVA

SEQ ID NO: 511556 - protein, 311 aa, unidentified
MQDIIGIDISKDRLDAFRLSDRQHNSFGNDKAGFKTLLKWIGNTEGLRIVYEPTGPYHRGMEEALAKAGHALVKVNPRQARRFAEATGTQAKTDRVDAMLLARMGLALDLPPRPVRGELMNELRELHVARLALIKDRTAAGNRAETAAISLIRRQAKARLAIIEKQLAEVDETISTLIAADPALAERLDILTSIPGIGAVTACMLLIEMPELGTLEPKQAASLAGLAPFTRRSGKWKGKEMIRGGRASLRAAIFMPALVAIRFNTDLKRKYRQLLESGKAPKLAITAVMRKLVLLANALLRDGRKWAERPA

SEQ ID NO: 511557 - protein, 357 aa, unidentified
MNSTFSSNPAVVIGIDLAKSHCDVVGYDKDRKMVLKRPRISHRKLLEMLSNMPRAVVLMEACGGSHCFVRKVKALGHDGRLLNPGDVKRIRGGHQKNNMLDAAYIAWAWYIPGITFVAAKTQAQQDLQVLQRIYQGYVKIRIELGNRIHALLLEYGLHSPQKAAFIAEKLPAFIEEHPDELSPLAREAVLELRDSWLRALEREWQTGQRYDRLVKENDDAKRLMTIPGIGVKSAGALLVHCGEASRFRDSRQFAASLGLVPRQNSTGDRDTLGHITKRGPKHPRSMLVQGAAALMIRADRLEGALGDWVRKIKASGKKYGVKVCAIAAKLARIAWRILREKDAAYRPQAAVPAGAAA

SEQ ID NO: 511558 - protein, 414 aa, unidentified
MLKIVYRICCGMDVHKSFVVACIASTNDQGVTTYKSKRFSTFTGDLRRCAAWLSENNCKDVCMESTGKYWIPIYNILEPTCIIVLAHPKYVKAIRGKKTDKRDAKWIADIFKHDLVAGSFIPPADIRQLRDLVRYRCKLTNFTTGEKNRAQNCLTVSNFKLDDVFSDVFGKAASAITTRILENPTAKITDVSGFRTKGMKASNEQVLAAVDGEMCEEQAEKLRIIRSHMDSLELCKLNLESLILSTAEKYLPQLNLVMTAPGIQSFAAIGIISEIGVDMSVFPTSKHLCSWAGLTPQNNESAGKKKTTRISRAGAYIKPLLVQCALCAIRAKRFPEVRSRYLALKKRRGHKKAIIAIARMLLTAIYNMLKKNEPYNPELYRKGDRPPAHREVSVEEAIFILQRQGYLVTAPTTA

SEQ ID NO: 511559 - protein, 313 aa, unidentified
MSDNLPQTIGIDISKASLDCHAHPAGAERQFANTTKGYKALIAWLQQWPIERIAYEATGTYHRALEAALTGWPCVKLNPERARRFAQATGTLAKTDRIDAMLLARMAATLQPTVRPARDPQEAQMAELINARDGLVRDRTALKNREKNLTITFLKRQCRQRLEQIDRHIEALDAEIANLIAADAALARRHQILTSIAGVGTLTANQLIATMPELGSLENKQAASLAGLAPIARQSGQWKGKSFIRGGRANVRQALYMPALVAARYNPDLKAKYQQLVAAGKPAKIAITAVMRKLVVTANALLKADRCWSQSPA

SEQ ID NO: 511560 - protein, 387 aa, unidentified
MQKPHDDSKACLTAFVQDSTLTVVIEMSLRSWLVAGMVPGVNREPRKKIAPNPELLLQLLYRWRDEAIKAGKEITRIAVAYETGRDGFWLARWLRARGIDAHVIHATSVAVSREHRRAKTDRIDTAMLQRGFLGWLRGERGHCSMAIVPTVAEEDGRCPHRERETLIKQRTSTANRMKSVLIQFGVRNFNPSLRKAPKKLDSVRTPEGIPLPSNAVAALQRHMERFRIINEQIKAIERTRLQRLQRDPAEKFNAMVFLLVRIIGLGVETAEQLVREILSRNLRDRKAVARYAGLTGSPDESGSMRREKGLSRSGNGRVRNILIQLSWRLLKFQPQSDLVLWFKNRTANAQGSRKPMIVAFARKLIIAIWRYVNTGVVPEGFQLRSAA

SEQ ID NO: 511561 - protein, 368 aa, unidentified
MKQQTSATIETFIKGRTVTDFSGKTIYVGIDVHQKDYQVAKILGGICLGNHRMGADNNQLIEHLRSRYPGAAFKCVYESCAWGFALQRKLEQAGMECIVVHAADVSSSDKEKRRKTDTVDALKLARNLESNQLKAIHVPPEDIQKQRNLIRLRKRLVGDINRSKNRLKSLLKYQGIDIPEKFGKKNNWSHNFMNWVEAEAKKDELLEDSLLLLLEEIKMLRQLLLRAERKLRELMKSKYKGNAELLVSTPGVGPTTAMLFLLEIGDIQRFGTFDSLNDFVGFCPDTASSGDTEQDRGITCRRHKQLRSALIESAWQAIRVDPALLEAYQLLTKRMKGNEAIVRIARKLLRRMRAVLLSGKPYQIGLVK

SEQ ID NO: 511562 - protein, 396 aa, unidentified
MEVTRIGIDIAKDSFELHGVDHSGEVVLRRTLKRGRVLEFLAQLPPCAIGMEACGGAHYWHREISRLGHTVRLLSAHKVKPYVVGNKNNRHDAAAICEAMRRPKMRWVTPKSIAQQDLQTLHRVRARLLRDLTALSNQMRGVLQEYGIVMRKGVATLKRTLPELLASEDPRLTPLLKQALAEQFERFTYLAQRLAQYDRQIGELCKQDERCRRLLEVEGIGPLSATALVVAIGTGHEFQHGRHFSAYLGLVPGHSNTGDKTVMLGLTKRGNRYLRTLLIHGGRSAVYAARRRNDPRSRWLNRLREQRGPNVAAVALANKNARVAWALLRYGEDYQPRRAHAQSSDPAAARTARPAKTTPAFTLQSARPADRSRQHFSAPPSASNEGRSGKMPRTRN

SEQ ID NO: 511563 - protein, 378 aa, unidentified
MKQAPHQLESTGVGAVLYMALELSARRWQLAFGLGLATPSRRRTIDAGDREALRREIAAAKRRFALPPTVVTRSCYEAGRDAFWVHRLLEAEAVANVVVDSASIEVSRRQRRAKTDRLDAEALLRRLIRYWLGERDQWKVVQVPTVELEDARHAERAIATLVAERTRYRSRIHSLLATHGVRVRITARLGEHLPLLTNRDGRVLPPGVLARVALAWRMLGVVEAELGQARREQQAQVRAGATPAAVRTGRLAQLKGIRMGSAATLAKEVFARDLQNRRQVGALSGLVAVPYQSGEAGHDQGISRAGLRQVRRVIVELAWSWVRWQPQSALTRWYRARFGAGGSRLRRIGIVALARKLLIALWRYSEQGIVPAGAVLRA

SEQ ID NO: 511564 - protein, 378 aa, unidentified
MHKDSVYLCILRENGEKIERVYGVLTPQLDSMRDFMAENKVSEVAMESTSVYWIPIWRVLVDSFELKLVNPYFIKQLPGRKSDVKDAQWIAECVMKELIRGSFIPPPLIQQLRLYDRRIFELNAELVRKYSKIDAILQRCNIRLSNYVSNTDCKSYKNVVKRISEGVTSPQELLMLVHKRIINKHGEDTILAALTGVVSEAEIDMLAQYVAESALLEDNKNKCIEKMREICNREFEEQMKNLQTIPGVSERSALTVLAEIGPDVNAFPSAKHLVSWCGFNPRNDESNKKIKSNKITHGNRFIRIASVQCAWAASRTKDCYFSKFYAFHTQVRKKFKLKVVVAVARKILVCIWHILKFNVSYKDFEPQKSVAKDSTQLA

SEQ ID NO: 511565 - protein, 345 aa, unidentified
MENMYYIGLDVHKKTISYCVKDGSGRIYAEAEIPATRLDLDIWMKTLPQPWTAAMEATIFTAWIYDHLKPHAAAVKVAHPLMLRAIAAAKKKNDRIDANKIADCLRCDFLPECYMASTEIRERRRTLRYRNLLVRQAVQMKNKIAVLLMEAGVSYNKQKLHKVGYFRELLATNQDIDEGLKSLLRLCRETVVRLGKTESALVRSLQRDSLLMERVERLMTIPAVGPITALTWALEVGDVQRFSSIKKAISYCGLCGAENSSANIIKRTPLSKQRNKHLQTVLIEAAKMAPRNSPDLAMIYDREKQKDNANRATLAVARKLVAYLVAVDRRQKEFLTVERENRTAA

SEQ ID NO: 511566 - protein, 356 aa, unidentified
MNSSKYVGMDVHTATISVAVRNAGGKLIIESVLETKASTLLQFIRGLGGDVSVTFEEGTWAAWLYDLLKPYVKKIVVCDPRHTALLKEGSKSDRIDARKLSELLRANLLRPVYHGEKGLRMLKELTRAYLTISQDLTRVMNRVKAIYRSWGIPCGGQSVYHPRHRDQWLSKITQASVRRRAELYYEQLDALVLLRKQARQELLAEGMKHKAWRLLRSIPALGPIRAAVLMAILQTPHRFRTKRPLWKYSGFGVVTHTSADHRYVNGQLERSKKPVSVRGLDHSHNHHLKYVFKSAAVQASTRQGPFRDFYEALVAKGMRTEMARLTLARKIAVITLAVWKKGVAFEAKYLKPQTTA

SEQ ID NO: 511567 - protein, 341 aa, unidentified
MSESALIGIDLGKHSFHLHGQDTAGREVFHKKLSRPQMMQFFGNLPACTVVMEACAGAHFVARQLIAMGHQAKLISPQFVRPFVKGNKNDFVDAEAICEAASRPSMRFVTPKTEAQQTLSVLHRLRESLVHDRTKAANQMHGFLLEFGISLPKGLAIMKRLASILAEHELPVRLTGQLQRLHDHFAYLDEQVKELDKELAGQLAADDLGSRLLSLPCVGPITASLLAVEMGDGQQYKCSRDFAASVGLVPRQYSTGGKANLLGISKRGDKHLRQLLVQCARVYLQRLDYQRGRLADWVRSMLTRRHSNVVACALANKLARIAWALAAHHTQYEAGPGALSA

SEQ ID NO: 511568 - protein, 406 aa, unidentified
MNRLPLSGWLSQGVPPARRPVSVWLNRGLAPALLGLEVGMPTAAFPLEFVDRSNRMIIGVDPHKSSHTATALDPATNTPVASVRVEATLAGYRQLLRWAQQFEDRRWAVEGARGLGRHLAQWLVARDEAVVDVPSTATARVRELSRGGRRKTDVIDAAAAASVAALQGDATPVAAEDHTTVFALLEERRANLAAQRVRAANQLHAVLRDLVPGGAEVALTAKAGAAMLRGMRPASASERTRKELAQDLVRELRTVDANLVKIEKRMAAALDDHGSQLREVDGVGAVTAVRLIGRTGPASRFATADAFATYAGVAPIEVASGERTRHRLSRRGDRQLNSAIHLIAVTQVRMVSSLGREYFDKKIAEGKTRNEAMRCLKRRLASHLWRLMLADERRLNAPPESAPIAA

SEQ ID NO: 511569 - protein, 462 aa, unidentified
MSKKRIYSAVDVERVDVAAVVGELADGCVVAVDVAKTKFVAAVATRAGEVVRIVRFDHPRQTRTFLALLDALRAAGVTPVIVMEPTGTYGDVVAWQCRERGFEVRMVAPKHTHDASEFFDGVPSMHDAKATVVLARLATVARTWAWQPRSEEQRDLRAAVARRRLYAEQLEGNYGQLEALLARHWPELGEHVDVREQRSWMALLAQLPGPAAITAAPAEAAKILRRAGRGALVQERIQGVVDSAAQTLGLPMTAAEQHRLGELVADMRRLLTELDRVDEQLRARVQQDATMNRLARVIGAVTTAVLVSYLGELGAYACAGALEKACGLNLKERSSGEHVGKLHISKRGPGVVRQYLYLAALRLLQRDPVAAAWYQARGSYQAGVKSKAVIAVTRKLARALWHVARGAEFDSRRLFDTRRLDLESGVRESVTTSCGTEKRARRRPHTTAADRRGQELRECAGS

SEQ ID NO: 511570 - protein, 387 aa, unidentified
MPQPNDLSRSLFALDQNSTIIAVVEMSQSSWLVGGVLPGIERQPRKKLEPSPERLLALLHRWRDESVRAGRTITRIAVAFEAGRDGFWLARWLEARGVEAHVIHPSSVAVPREHRRAKTDRLDTELLKRGFLGWLRGERGHCSMARVPTIAEEDAKRPNRERECLVKERTRLVNRMKGTLARLGIRNFRPTLRNAAEHLAALSTPEGSPLPPNVAAELERHIARLGLVIGQIKQIEEARRQRLEEQPERGSHAMVRLLARVVGIGIETADMLVNEVLSRPLRDRRAVARYAGLTGAPDESGAKRREQGLAKAGNARVRRGMIQLAWRFLRFQKNSALAQWYQARTADHRGATRKTMIVALARKLLIALWRFVTIGEPLDGVTLRPAG

SEQ ID NO: 511571 - protein, 397 aa, unidentified
MNTAREIRICMDIGSSQHQVAIGLSNGDLLEEFTVSHTPTDIEQFFNKIEDYHDRFQCPIALAMEAYNGYARPIDRMALQKGYRVLNVNNHKLAQFKKIFPGAAKTDAIDTKKMFELFTLSDHLPLAKGVLQPILVLPEANEKLKRLTRRRQLLVEEKVRIVNRLQGDLQAISPGLASITGSVDNRWFLHFLVAREAIEKLATLRLNSLLKIKGIGKCYAAAIVAWQETATFSTETTWVGAMVICDAKRILELLDEIKALENAMKELTPDSEIASRLKTILGFGEVTSATLAGELGTVARFTSEASLALYLGMAILDNSSGNYQGTKQSQHVNKRAKTAMITAVARHIDHSSQAKMYYDKKRSEGKKHNQAVRALGRHLVRVIWSMLTKHRDYQVRD

SEQ ID NO: 511572 - protein, 317 aa, unidentified
MENQINMNTEKTSTLIAIDIAKETLQVRTARGSFSLENAACGFKSLLKEIAGKPNVLVVFEATGGYERALAEFLHAHGIPLSILNPRLLRAFAKSEGIKAKTDPIDAEMIYRFASQKTLRPTHPPTTQERALGDLLDRRSQLTEFLAREKNRMQKASNKAVISSLRRGIKTLEKEIALIEKQIRHLVEQTAELNKPCALITSVKGVGEVTAWTILAQLGEISRVSRNQLVALAGVAPFNDDSGKHAGKRYIHGGRAKVRRILYMAAHSAAQFNPVIKPYVERLIARGKPYKCAITAAMRKLLIHIQSLLKNSQFQPC

SEQ ID NO: 511573 - protein, 401 aa, unidentified
MAVLVGVDWGGDAHAVCVINGEGQVLDHFAVGHDRAGLGTLVARLQRQGAAADIPIAIERPSGLLVDALVEAGFVVTPVHPNLVKACRPRYRAVAAKSDPGDAFILADILRTDGHRLRPLAPQSDTIKALRGLVRGRDDLVRARVALANQLTGVLESFWPGAARIFTDLASPIALAFLERYPTPDAAARLGPKRLAGFLAQHRYCGRRSPEALLERLHSAPNGCAGEAEAEAKGELVRALARALQALIAELGKITSRVEHLVADLPDGRVVMSFPRAGRVCAAQILAELGDVRARFPTEDQFAAEAGVVPVTYQSGKARGVGWRWACNKRLRAALTRMADNSRQQSPWAADVYQRARARGCDHPHAVRILARAWARVLWRAWTDRVPYDPGRHRGARALAA

SEQ ID NO: 511574 - protein, 382 aa, unidentified
MEATTIGIDLAKSIFHLVGMSQTGKVVWRKALTRARLLEFLVQHQRAVVGMEACATAHYWAREIQKLGHEVRLMNPSFVTPYRKSGKNDFNDAEAVCEALSRPTMRFVEVKSLAQQDLQSLHRVRRLVMKQRTQTANQLRGLLAEYGLVVRRGVAALRREVAALSDDPQRLTAVLRQLAAANLDILAVLEQQLKALDLRIAQACRADERCRRLAEVDGVGPLIATAMVAKVGNAQQLPNARALSAYLGLVPRQHSSGGKSVLLGISKHGDRYLRTLLIHGARAALRVAHRRRDQRSLWVSRLKLKSGPNVAAVALANKNARVIWKLLTSGQRFTPQPGAPEVERAQAAQRLASEKRAGLSAAVRLEPELKTPGFFRRPPEHV

SEQ ID NO: 511575 - protein, 466 aa, unidentified
MGDQQVNNIGIDVDSVNLVCRIRRNGKDFPQMIFTNNAAGHQKLIRWATRRRKPARVCMEATGVYSLPLALALDNAPNIEVMVVNPKAIKNFATASMQRGKTDSMDAATILSFLERMPFQPWHAPATELLELQHICRRIVQLNAEVSRERNRHLAALRVGPHGRIVANDTSVNMKHLQRRIDLLEQAALDLINNAPVLADKLATITSATGIARKTGPRILAELLVLPHDMLAPQWVAHAGLDPKPHQSGTSTNRPGRISKAGNRYLRDALYFPALVASRRDPNVKAYYEKLIERGKKPKQALVAVMRKLLLAIWAMLSNDKAWDGNKFYKLARSASEHLTRLGISLCSCASSVVTAGELPDPIETVKPSIVGIGTYLATRRQPIRLLGTGFAIAGGEYVATNHHVVPTSFDSEHKERLVILVGHGRDGERRDRDCPRDCVSDHDFKYPVRGEQSWEQRWTNRKSEP

SEQ ID NO: 511576 - protein, 353 aa, unidentified
MDNVTKLSFKGQAIFIGLDVHQKNWTVTLRNNKLDLKTFSMNPNPKELYLYMNKNYPQGNYHSVYEAGFCGYWIHRKLSQLGFKNIIVNPADVPTSHKEKDQKRDPIDSRKLARELENGSLEAIYIPTEQQQAARSLSRLYFKAVKERTRIKNTIKSFLQFQGVEIPRMDQVSHWSGRFIQWLKGLSFAEEENQYYLNCLLDNLQNKRKEILDMLRVMRNTSKNNPIISYLKSVSGIGFLTAYSLHSELIDIRRFKNINHLASFIGLIPSIQSSDDHEIKRGLTCRHHKHLRSQLIESAWVAVRHDPALTQSYNQYIQRMPKQKAIVRIAKKLLNRIRYVWLNEKEYVTGVVC

SEQ ID NO: 511577 - protein, 315 aa, unidentified
MASAPLFVGIDVSKAQLDIALRPDGQFVVPNDETGIAHVIERLRVLPVALIVLEATGGLELPLIGALVAAKLPVVVVNPRQVRDFAKATGKLAKTDPLDAQILAHFADVIRPAPRPLPDEQTHVLAALLARRRQLIEMLTAEKNRLSSARHAVRKSVTAHIRWLEQQVAQIDRDLAHTIRESPVWREKDDLLRTVPGVGPGLARTLIVDLPELGTLGRKQIAALVGVAPLNRDSGTLRGKRTVWGGRAHVRAALYMAALVASRCNPVIRAFYQRLCAAGKAKKVALTACMRKLLTILNAMVKHRTPWSTKEVMCP

SEQ ID NO: 511578 - protein, 338 aa, unidentified
MTLYCGIDLHSNNNYLGIYDQDDRAVLSKRLPNELGVVLECLEPYRTELKGIAVESTYNWYWLVDGLMEQGYRVSLANPAGNEQYSGLKYTDDRHDSRWLARMLRLGILATGYIYPKEERPVRDLLRKRMRLVQHRTAHIVSVLNTITRNTGICVSWTKIEQMTEDQISKLLGDGLIGMAPRASLAVIKSLGEQITKIEKTAKAQARLRRDYELLKTVWGVGTILGLTIMYETGEISRFAQVGDYCSYARCVGSARISNGKKKGENNSKNGNRYLSWAFVEAANFATRFYPRAHRFVQRKRAKGNHTLAVKALGHKLARAAYYVMRDQVEFDPDRLFG

SEQ ID NO: 511579 - protein, 354 aa, unidentified
MPKTNLLQVTERSKKMNRYVGVDLHKNMFLVSFFESQTGNHHLKRYHIKDIVSFIRELNCDDTVGVESTNNTRYFVNQIRESVHEVKVINPSQFKVISKSVKKTDENDAKVIAEFLSKDMVPEVRMKDKKTAQINSLANTRDKLVKLRTALKNKIHNILSSHGILLKKESLSSNKALNRILEQPVDSTAHVELEVIVTQIRSLNEGIKRLDSELEDKGKELPGHENITSIKGIGNKSGSILLSVIGDINDFENEKKLAAYFGIVPRVSNSNETEWQGRITKRGSKLGRTTLVQCTLVAIKYSPRLRAFYERIKAKKGSGKAIIATAKKLLNVIYFTLKENIIFEDFTNGVIRTT

SEQ ID NO: 511580 - protein, 410 aa, unidentified
MGCCLLCRELMSPTMHGEVLMEQQDRQPGSRRLVGIDLGIASRHSVRVLESDGRVVCRSSCVPTTESLSLMERAALAGAPEGTRLAVVFEPTGPAWLPIAVFFARRGHDVYRVSSAKAADLRRFLRRHAKSNGIDAETLARIPLADPGGLQRLELPGADAAALDRRVRACDRLTSAASEHKVRIKDLVRQLMPMTPLTGDLGKADLAVLERYADPRELLAAGPVELTRLVTSASSHQQGSERAGQWQAAAMAAIDLYGDHPAVPFEELAAEVATEVRLLRAIQAELATHAAARERHYRQVDPGQLARSLPGFAEISGPVLVAIMGRPGRFRHGTKFKSYAGLAPKGSETGETGRKGQSMSKAGPSLLRATLFRAADTARRQDPPLARIYYQQMTEGAPPTSRPVASSPVT

SEQ ID NO: 511581 - protein, 344 aa, unidentified
MQITILGIDLGKNSCSVVGLDDGGHVVVRRRMHRASVIKFAGNLMPCVVAMEACCGAHHLGRLLRAQGHEVRLMSPEYVRPYVKAQKNDDRDAEAIAEAATRPTMRFVELKTEDQLDMQTLHRVRDRLVGERTALLNQLRALLLERGTVIPKGRRKLEQHFDAMLSAPDWPGVAPRIRRLLQDMRAEWQALDRGIAAFDEEFALRARTDPDARRLATIPGIGVLNATALVAAIGNGETFARGRDLAAWLGLVPRQATTGGKPRLLGISKRGNKYLRKLLIHGARAAMPSLARGATVLGAWLRGLLARAHPNTVVVALANKLARIVWAVLRHGREFERAGVLALA

SEQ ID NO: 511582 - protein, 391 aa, unidentified
MILVGVDVAKDKHDCYIMTSEGEVLFKSFTIANNMEGFNQLYEKILSVIDNFDNVKIGLEATGHYSYNILGYLLDKGLTPYVINPLHSNLYRKSLSLRKTKTDKVDSHIIASMLMSDVSLKPYSNTLYHNEELKSLTRYRFTKVQERAKLKISISRLVTILFPELEKLVPTLQMNSIYALLYEFPSAHAISKAHLTRLTNLLNTTSKGHYTKDKAVLIREAAKNSIGSNMPAKSLELKHTIKLIKELTSEINKIEEEIKIIMNKINSPILTIPGIGLSTGAQILAEIGDFKNFSSPDKLLAFAGLSPSTYQSGNMYSSNTKMEKRGSKYLRFALFNAAIYVSYWEPTFSQYLKKKRVEGKHYYVAISHVVKKLVRLIFHLEKTNERYSTVI

SEQ ID NO: 511583 - protein, 339 aa, unidentified
MENFVGVDLHKKVSQLATLREPQPASQVRFPNHTVTVEKVLKKLPQGSKIALEATGSWWWFVDLAQRTGHEVVMSHPKQTKAIASARLKSDKVDALMLAKLLKADLLPTVWIPPAAQRYVRELLTHRARLVRQRTSVINELHALYAKRNIDAGMIFHRVRPPAFRAEDLSGYGPRIVEEDVALLGFLNRQVQGLDKELKAIAEKDPESKRLMTIPGVGPVNAVAGSCWIGTIERFSNSKKLSSYFGLAPRVRQSGERERHGHITKEGNRMVRSLLIQAALWHIRRGPVSSRRHYLGVCKRRGKSIARVAAANKLLGIIFQMMKEKIDYEEFLRRGGNAQ

SEQ ID NO: 511584 - protein, 415 aa, unidentified
MPNPLFVGIDVSSRDNVVCCLSNDDEKRPLSRFIVLNNRPGILELKQRISQLVQKHSFDQILFGLEHTGCYSTHAAMYLQHHLVFGCEDVNVYLFNPSLIKEFKKAHFLDAPKNDRVDAWYIASKLMAGHLPHPFTWSEPLMALQRLTRARYHLMQALVRESNFLMTNLYLKCSDYTLVFDNKLSATSLAVMEEFECAEALAEASLDKLTWFLVQHGKNRFDDPQAVAKELQKAARSSYRLPKAMADSVNLAMASSIRVIRTLQEQLKSLKKAIEDHLDTIPQTLDSVPGIGPIFASGILAEIGDINQFDSHKQLAKFAGLAWTQHQSGNFTANNTRLIRSGNRFLRYYLIEAADSVRMHDPVFAQYYALKKAEPKQYAHKRALALTARKLVRLVFYLLKTNQLYQPGGRNRHDS

SEQ ID NO: 511585 - protein, 319 aa, unidentified
MGKSNIEFEQVIDRGCGLDVHRDTVVATVMGKGLKTETRTFGTTTSSLNELGVWLESLKVTDGAMESTGIYWKPVLHVLRAYPLNLIVVNARHIKNVPGRKTDKADSQWICKLLISGLLKGSFIPPENIQELRDLHRYKKKLIGTVASEKNRIIRVLEDANIKLSSVVSDTAGITASYLIKGLIEGRKDLEKLIAECYHRKLQATPEQIKEAITGRLTAHHAFILKSMQKHIASVEEQIAEIDVEIEKYIKDFEKEIELLQTIPGVGREGAIGIVAEIGVDMDVFPSEHNLASHSGMCPGNNETAGKKKVQEHDRGTNI

SEQ ID NO: 511586 - protein, 354 aa, unidentified
MTKSSNQKIPALSSLGVDIGKNVFHLVGFDTAGKIAVRRKIKRLSLVDEFKKLPRCIVGMEACLSAHFVSRTLRGLGFEPRIMPAKYTRPFLKGQKNDYNDAEAIAEAALRPNLRCVREKTQDQLDLQALHRVRFRLVSRRTATINQIRAFLIEQGITVRTGAHALRKSLFAILRNREDEISPRMSDIIVGLYEDWLWLDERIESTTTEIEMISKREANCQRLMSVPGIGPIISTAVVAAIGTGEAFDRGRDFGAWLGLVPRQFSTGGKTTLGRISKRGSRYLRTLFVQAAHVILMRPKNWEKFSFGPWLEQASQRMHKNKLAAALANKLARIAWSVLRHGKAFDTNRIEVTAI

SEQ ID NO: 511587 - protein, 343 aa, unidentified
MKLSRVGIDLAKNIYQLHGVDRSGKTVWKRRLKRHQWLKVLLDTAGPECEIGMEACAGAHHWGRELQSRGYTVKLIPPQFVKPYVKSNKSDAKDAEAICEAMSRPNMRFVTVKRVEQQDIQATHRIRAELMTQRTAKANQIRGLVAEYGLVAPKHLSSLRAAIPCWLEDAENGLTGDFRRLLHGVWEDLRLLDDRVGEMDKTIKRLADNNEDCVRLQQLRGVGPMISTAMIATVGDARQYHKSRQMAAAIGITPKQHSSGDKHRLLGISKRGDVYLRTLMIHGARAVVARATYKDDRLSRWVTNIANKKHPNVAAVALANKTARMAWAMLRNKTDYDPDFAMS

SEQ ID NO: 511588 - protein, 345 aa, unidentified
MELHTIGIDLGKTVFHLVGLNLRGEVVVRKKFSRTQLLRFTANVHVKLIGMEACGGAHFLGRALREQGHEVRLIPAQYVKPYVKTNKSDYIDAEAIAEAVARPTMRFVPIKTDDQLDLQSLHRVRERWVMRRTAVINQIRGLLLERGITLRKGRCYVGAALPGILEDADAKLSGALRMLLAQLKLELDHLDMRIDEADALIKKTVRENEACQRLVAIPGIGPVTATALIAAIGNGAAFHKGREFAAWMGVVPREHSTGGQQKLLGISKRGNSYLRRLFVQGARAVLQQRTKQSSGLSAWLAQLTSRTHRNVAAVALANKLARIAWAVLAKNEPYRPSVVADVAAA

SEQ ID NO: 511589 - protein, 311 aa, unidentified
MNAKIIGIDVSKDRLDVHIRPTGEAFAVARNAEGLSELAAKLKSLCVALIALEATGGFETVVAASLTAQGLPVVVVNPAQVRSFANALGKRAKTDPVDAMVIAHFAEATQPDVRPMPDETTQLLADMVARRRQIVAMIGAERQREKRVPASIAKSIRRLLKALEKELNSVDADIDGAVRGSPAWRLQEDLLQSVPGVGPVISRTLLAELPELGRLSGKQIAALAGLAPFTRQSGKWRGKSFIGGGRAAVRACLFVGAMVAKKHNPVLKAFFDKLVKAGKPKLVAIVAVARKLITILNAIIRDNQPWNEKKA

SEQ ID NO: 511590 - protein, 349 aa, unidentified
MIIIGVDFHPEFQQIAFVDTDTGELEERRLHHPDEAEAFYRALVSQGKTVRVGMEASGHGRWFERLMSELHIELWVGDAAEIRTKRVRKQKTDRQDAQLILKLMLKDDFPKIWVPSWENRDLRQLLWHRHRMVQARTRIMNQLQAVALNEGLRCKKRLWRTERPRLESFQLAPWASRRRRDLLELLDRLNPTIAELSQAVEQEVEKCPEAQRLATHPGVGPLTAMAFVLIIGQADRFQCGKQVASYLGLVPMEDSSGNRRRLGHITKQGSSILRFLLVEAAQVTVRSLPEWRSRYFYLMMRRGRKIAKVAMARRLAVCLYWMMRQGWDYQQWVEFGSYAGQPGNRHGVQ

SEQ ID NO: 511591 - protein, 345 aa, unidentified
MDHFAGLDVSVKETSVCIVDDTGKIVREVKVASEPEALLAVLNNPAYHFKRIGLEAGPLSQWLFSALAEAGLPVICVETRHMRAVLKAQINKTDRNDARGIAQMMRVGLYRPVHVKTLRSQKLRMLLTHRKLLQSKAIAIENDLRATLRNFGLKVGVVGTVKFEARIKELVESLPDLTMLVEPLLIVRRALREQIGVLHRRLLAIVRDDDVCRRLMTVPGVGPVVALTYRATVDVPARFRNSKAVGAVFGLTPAKYQSGESDRTGGISRCGDEMMRMMLYEAAHIMLVRSTKWSWLKAWAMQIARRRGLKKAIVALARRLAVIMHRIWVDGTEFRWTREQATAAA

SEQ ID NO: 511592 - protein, 385 aa, unidentified
MGSQTFIPRDYDVFSGLDVDKRKMSVTFTDHSGFLKSVRMPYSAEHLLNHVRKHFSGKKVAFAYEAGPTGYGLYDEIVVQGYPCLIAAPSMIPKAPGQRVKTNRLDSRGLSESLRGGQLKSIQVPSALYRELRHLTQLRDVVVSETVGMKQRIKSLLLMEGIEFPPAPAGSQWSFVVKAKLRKLSCSSTVRFKLDQLLDSLEFNEKQVFKTTREIRRFVHNDPELSQCIAYLMSLPGIGWIVASQLLARIGDWRQLNNIRQLAGFLGLVPTEHSTGERIDRGSITRTGDERLRSKLIQASWSAIRQDGELRDFYRTVYRKHPRQIASRVAIVAVARKLSVRISVVLMKQRPYEVREKVHSAPLTQEETSPQGTTRREPEPGEKNS

SEQ ID NO: 511593 - protein, 402 aa, unidentified
MAGSPTRFFGLDIHKEYFVAVGVNAQREVIFGPQRVSNYQLDDWVSRVLTTQDSVVLEMTTNTYLFYDTLLPQVHSVIAVHPPSVTLVTNAQVKTDKKAALTLAQLHAAGMLTGVWIPPHPVRDLRALIARREKMVRLSTMAKNRLHSILHRNHLTLPEKPFSPEQRTWWESLPLSATEQFLVRSDLDTLAFAQKQVEQAEECLKKESAQDERIPLLVQLPGVAMLTAITILAAIGDITRFPTAKKLVGYTGLGTRVHDSGMTHNTGRITKAGRKDLRRAMVNAANHAIEHHPHWKKEFERLEPHLGRSKAVVAIARKLLVAVWHVLSEKTADRFADPDNVARSFFAHAYRVGVRNLPEGQSALAFTREQLDRLGIGKGLQEIPWGSKRHKLPPSKLLLEKE

SEQ ID NO: 511594 - protein, 449 aa, unidentified
MVKNKKQKGHLQLAVIHPHTAAIDIGSMLMMVAYSDAQGNQCMLETDGFTESIDALAETLYTAGVTHVAMEATGVYWMSLYEVLEQKGLTVTLINPRHFKNVDAQKTDVKDCQWLQQLHAYGLLRASHIAPEIYRELKSYLHERNVLQKQKSDILNRIHRLLTQMNIKVQHLISDMEGVSGMKLLQGIAAGIKQPDELLSLIDPGRLKASEEELLKSLKGMYKQQYITILQYSLKAYDFFKQQMKSYEALIEQVLIKMLPEDAHGNKAIIGKKKSHVRKNQYSINLKAYLNQITGIDLTQVDGLDEISILEIISVTGLDMGKWPTAEHFTSWLNLAPRPKKSGGKILGHQKRFTNNKATQAFRLAAQTMWKHKGALGHLYRRLATQKGSNKAIKAIARKLAVIFYNMVKNKQQYDQSRLQIDTEKQEAKRIARLKKEAFKYGYVLQAAG

SEQ ID NO: 511595 - protein, 366 aa, unidentified
MNILAIDLGKFNSRCCFFDTETQKYRFQTAATTRQYLTAVLKHHAIDLVVMEACGPSGWMNDLCQEHGIKALVCSTNEEAWKWKNVKRKTDKDDALKLARLAMMRQLTPVHVPKQEVREHRTLIKYRKKLVGRINQIRNSIRGLFVCRGIEIDRGQKAWRSGRELIDSFRKSLGECSMKELWRGQLDLELTQLDALGEQMADVEQRLEAIAKGDERIQRVQTIPGVGRRTAEAIVTTLDDVDRFDNARQVSSYIGLVPRQYQSGETDRNGRITKRGSRLLRTLLLECAWVSIRYNDWSRATYNRIHGGQKTRKKIAAIAPARKILVVAWAMLKNKTDWDPERAGIVGQPIVEEGSSRSTDQAAVIA

SEQ ID NO: 511596 - protein, 372 aa, unidentified
MENFSTFIGMDVHKETIAVAIAEKHGTPRYYGEIANTAEAITKLAKKVVPDGGRAAFCYEAGACGYGVYRQITEMGYRCDVVAPSLIPKKAGDRVKTDRRDAVTLTRLYRAEELTAVWVPDQEQEAIRDLTRIREDMKSMERHARQRLSGFLLRNKKIYTGKNKWTQAHFRWLEKIRFESPIQQIVFQEYVDTVKQLQGRVASLEEEMWKALSGWSLGIVVEALMSLRGVNLVTAMTIVAEIGDMSRFESPRQLMAYLGLVPSENSSGKRQRRGEITKTGNSHVRRVLVEASWSYRLPARKTAHLQRKAEKTTEAVQAIAWKAQKRLCRRYWHLTLKGKLKVQACTAVARELAGFIWAIAREIMGKRTTLLR

SEQ ID NO: 511597 - protein, 380 aa, unidentified
MSDCIMAGCDVHEKTLELFAGKNAEEPERRGFAATPAGREKLMAFLKGRAKELGASRIVMAYEAGPFGYGLYDDATAAGVECYVLAPTRIERSLRDRKNKTDKKDARRILEVLRGHVLAGNDLPSVWVPDEGTREDREIVRQRLELGRTCGGVRTKIGSLLRRWDVWKPKGMGNNWTQSHRRWLVGLTGSGSVLGEWARKVLASLLRQMGFYEEELRRADKEMLCLASRDRYRALVEELCRLKGVGELTAMVFLTEMGDLSRFKNRRQIGSYIGIAPSSHESGEDSDRKGHITRQGSSRLRHVLCQASWVRVRCDAKEQAWYAQAAERNAKHKKIALVGSMRRLAIVMWHRALEAQEERGKAPPNLPSPNGAAGGPKGKG

SEQ ID NO: 511598 - protein, 380 aa, unidentified
MARSKEMTVRHEDITGTPTIYMALDLGRRRWMVGFLLPGDRQPRLHQIDGGDCETLRKLIEHQRAQVDDRRVRVASCYEAGRDGFWLDRWLTAQGVDNRILDPASMEVPRRRRRVKTDKVDTVALLRVLLRLERGETELTRVVRVPDVAVEDSRRRTRGRARLVGERTGHRNRIRGLLASQGVVDIQVGTRGWLDRLEGTRTGDGRELGPVLLAEIRREAERLLLIERQIKDVEAAQRAALQEDTPLAAGARMLHQLKGIGETFASGLMHEAFWRDFRNRRQVGSSFGLVPWPWQSGDVQREESICKAGNRRARTLAVVCAWTWVHHQPDSALSQWWRRRFAHGTKRQRKIGIVALARKLMVALWQYLTQGLIPEGAVMK

SEQ ID NO: 511599 - protein, 331 aa, unidentified
MSVHVGLDIGSRTTAMGWREKGRPAGSWDIAQTPKGRKAAVKKLLALKPLSVVMEATGIYYLDLAMELSAAGLPVSVINPKSSRNFARLMLQHSKTDALDAQLLAEYGERMTPRLWVPPSPAQLELKAIGRHINRLICHRTRAKNELHALQATETTSALLIEDEEEAIATFGKRIERFRQAGRELIANCPTLNAQFSHMVAAPGMGDVSTFAVLAELTTLPVTLKSSQVSRHAGLDVRLTQSGTSIDKPGRLSKCGNTYLRSAMFMPAMSAIRCDPYVKAFYEALVGRGKRKMQAICAVMRKYLTGLWACMHAGEDFDTAKLFSKIHLLKA

SEQ ID NO: 511600 - protein, 341 aa, unidentified
MQHFVGLDVSARETAICVVDEQGRVVARATVESEPAAIVSWLLGRGIRFGRVGLEAGPMSPWLYADLVEADLPAVCVETRHMHAALSARINKTDRNDAHGIAQMMRVGLFKPVHVKTPASQRRRLLLTSRKLLQRKVQDLENDLRGSLRNFGLKVGVVGAAGFDRRVRELAAGEPFVAAVVGPLLEARAMLRLQLAKLHKMLLDLVRDDPVCRRLMTAPGVGPVVALTFRACVDNPGRFDRSKCVGAHYGLTPRLYQSGETARVGRISRCGDAMLRASLFEAGLVLLTNPRIRWSPLKAWGMAVAKRRGMQKAVVAVARKLAIVLHRMWRDEADFRWTKAA

SEQ ID NO: 511601 - protein, 579 aa, unidentified
MNKKKVEETNEPSKNDGNNPPNRPRQAFPQGRLLTKAELELLRSAELCKLLRLKKVPGRSKFTRKPARATALEGIITYGDLSSLSISPPREVEVYEPQKAEKKPIKPGKGERIDDPVGGMDVHKDTIFVAIATPAGIIDEKVFRNKEGGIIDLINYFEFHGVEHVAIESTAEYWLKTFWKLTEGGIKVLVANPLQTKAAQGVKTDPEDARRIAIAFRDGRLKPSVICTPEQYSMRKLNRDATKKVQEGTKAVNRLKAMFEMFDAEEWITKLHTSNRGQRIMSQTLELSDKEKILDVITEEYSKGPKQIKDKNKLLIRAAELTKFFNNMDISSNYRIRFGHLLEDYVRCERMATQLRTRIIEFAANDEQFKKNLELLLTLPNVGITTALTILVEIVDIRYFWRSKSLVKWSGLAPRVNQSGHRKRKTGRIYKGGNKWLRRAVWITAKNCYAHYNESDEPIGAFVNRLYNHKHKHYFTAVTAGARKLVSYIYQVLTQQRPFEEVFELEHLELLEKNRKRKLSVLQRMLNERSVVDVLPIIANSLREECYELEECEKHLALEIATKLGVTPRYYIDQGSIRY

SEQ ID NO: 511602 - protein, 415 aa, unidentified
MNAVGIDVSKGKSMVAVLRPLGVVVAKPFEVGHTAAELGKLADYLKSLDGETKVIMEHTGRYYEPVAQVIHDRGLSVSAVNPLLIRQYGGNSLRRVKTDKADAKKIARYGLDNWADLREYTPMDTTRYELKTLNRQFQLASKNRTACSNNLVALLDQSFPGANRWFESPTRKDGSQKWVDFVMTFWHVDCVRSTSQAAFAERYRKWCKRHGYLFSAAKAEQIHCEAKQMVALVSKSATAKLLVQETAAQLLSVSRTVEVLRAEMHRLAALLPEYPVVMGMYGVGESLGPQLMAEIGDIRRFAGKQSLVAFAGVDPMPNQSGAKVSRSNKSSKRGSPYLRKTLFVLMGVLLKLSPTGVPVYQFLDKKRAEGKPYYVYMTAGANKFLRIYYGKVRDYLAVLDVPPRDLTASTPANPL

SEQ ID NO: 511603 - protein, 315 aa, unidentified
MTNGTEIFVGIDVGKAKLDVHILGSGEEWQVRNDGEGICQLADSLEQLSPTLIAVEATGGYERLMVVQLSAGGLPIAVVNPTRVRRFADGLGQLAKTDEIDARMIAQFASVTRPPVRELKSEEEEHLGELLDRRRQILTMRTAEKNRLHTSRGAIRSDIQRHIDWLESEERMLSKEIAFLVRNNSKWSQKMALLQSVPGVGAVTAATLLADLPELGTVNRQQIAALAGVAPFNKDSGRKRGRRRIFGGRSSVRRVLYMAALVSTRYNPVIKRFYENLLAGGKEKKVALTACMRKLLVILNAMVRDQQPWRHAPTT

SEQ ID NO: 511604 - protein, 344 aa, unidentified
MKHYAGLDVSVKETAICVVDDDGQVCSEMKIASHPEELSLALSGIGVHFERVGLEAGPLSQWLFEGLARTGLPVICIETRHAKAFLKAQVNKTDRNDARGIAQMMRVNLYRPVHVKTRESQQRRALLRARKLLQEKAIAVENDIRGLLRNFGLKVGIVGRGKFEARALELIAELPELEKVISVLLAARRKLREGFAKLHREVVEIATGDAVCMRLMTVPGVGAVTSLAFVSTIDIPARFRRSRAVGPVLGLTPVLKQSGESQRVGRVSLCGDGMMRALLYEAAQSMLTRVKKWSWLKAWAVGVAKRSGFKKAVVALARRLSVIMHRMWVDGSEFRWSREGAIAM

SEQ ID NO: 511605 - protein, 440 aa, unidentified
MTTPSLPVLDPHAAAIDVGSEQLHVSIAGGPPRIFGTTTGELHALRDYFLKEGVRTVAMEATGVYWLCPYEVLEKAGLEVVVVNGKYVKNLPGRKTDISDCQWQATLHAHGLLRPGFVPPENIRRLQDYLRLRSDHIVMAASHEQHMQKALERMNLKIHDVISDLTGMSGLKMIEAILGGQRNAVALVALCDPQVQKRKGTALRAALEGTWKKEHLFALRQAHELWGAYQKRITECDQAIAEVLKEMVGPDDPEAPAPPAATKRGGINSPQIGGLHGLLFRLCGGKDPTQLPGVADYVLLQLVSEVGTDLGKQWKTEKQFTAWLGLAPGSRQSGKRKGSQRRSRNRAGRLFCVIARTVGRSVDKALGGFYRRLKGRRGGLVANLALARKLAVLFWRLMVHGVAYVEQGLKQYEEKVAQTEQGLLQKLARKYNLVLQPKTA

SEQ ID NO: 511606 - protein, 358 aa, unidentified
MVTTKRHVEATIVVAGIDTHKDTHHVAVLDLVGRVLGTAEFPTTPAGYQAVADWIAEHGVIDRVGIELTGSYGAGLTRYLTAAGVTVLEVNTTDKATRARQGKNDTIDAISAAQKVLSGMATAVPKDTTTVVESVRMLMLVRDSAVKARTQALNQIKDLIVTAPAVLREEFTGLTLTAAAKKAAQLRPDRTRLADPAQAGKLALKRLGDRIGDLTDEIVEAEKQLDVLVHDAVPTLLSRPGIGTLTAAQFLITAGANIGRIRTDAAFAHLCGAAPIPASSGKTDRHRLNRFGDRQANRALHIVIIGRMRYDDETKAYIGKKLTEGKSKKDAIRALKRFLARRIFHDLTTDLGTPMVTT

SEQ ID NO: 511607 - protein, 402 aa, unidentified
MNAVGIDVSKGKSMIAVMRPGKETVIEPFEIGHTDSELIDLAKLIKSLDGETRAVMEATGNYHVPVAWMLHDAGIYVSVVNPMLIHNYGNNTIRKGKTDKKDAKKIANYALDNWTELPQYFPEEDVRMMLKNCYRQYEHFSKLQTMMKNNLISLLDVTFPDANKLFSSPRRADGSEKWLDFLATFWHCQCVCGLSVQAFTRKYQRWCKKHKYNFREEKAFDIYASACGHICVMPKTETTELLITQAVNQLQTIAKTLTALQKQMHELATSLPEYPVVMQMYGVGPVLGPQLMAEIGDVRRFHSKKALVAFAGIDAPPYQSGTIDVRSRSISKRGSSSLRRTVFLVMGVILQHSPVDEPVYQFMDRKRAEGKPYKVYMMASANKFLRIYYATVKAYLDALEAK

SEQ ID NO: 511608 - protein, 367 aa, unidentified
MRNYILVGCDLHTKSMQLSVGRNAEEPESRRFGTTPEARQKLIGFLKARAAEAGADEIVFAYEASAFGYGLYDDLREAGIRCDVLAPTRLERSAKDRKRKTDKADARRLLEVLRGHVLAGNKLPTVWVPDRQTRADREVVRARLDLAQKCGGIRTQIGSLLKRRDIWSPSGVGRTWSRGYQDWLVGLTEPGSELDDGTRQGLLHLLRELSFYEQEIERSDEEVSCLAKSDRYAESVAELCRLNGVGELTGMVFLTELGDLKRFRNRRSVANYLGVVPTSNESGEKTDRKGHITHQGPWRVRRMLCQAAWARVRTDRRERAWYDRLAERNPKRKKIALVGSMRRLGILMWHRALEVQERREKSAKAED

SEQ ID NO: 511609 - protein, 414 aa, unidentified
MSYKIAGIDVHKKVLMVVVVDASTPEERPERRRFATMPSELRRLSTWLREQGVEEAVMESTAQYWRSVWLELEPYMRLQLAQAFSNRAPRGRKHDFKDAERLVRRLIANELILSFVPDGEQRTWRNLTRMKTQLTRDRVRLQSQMECLLEEMRIKLSIVVSDLLGVSGLRILRALAEGETDPRRLALLGDDRLRCSEEQLVDALTGRPQPMHREMLALQLERLQLIDRQIEKLNGLIAQAMKPHQETVIRLAEVPGLGVDSAQQVMAEVGVQASTFPSAAQLTSWVGTCPGKDESAEVNHSSRSAKGNKYLRRILNQAAHAAVKKKGSHFQAVFRRLLPRLGYKCAIWAIAHRLCRVIWKILHEGVRFIEQGSESDPKVREHRARNLARALRKLGYDVALTPIHPAVAAKAVQT

SEQ ID NO: 511610 - protein, 447 aa, unidentified
MKVYYIGTDVHSGSTTFYCGDDKGKLVARGTIPTNPEGVEQMLRRIQKKVPEGTDYKLTAGMETGNSSFRLAKIFSLAGIEVHVIHAKEVRDKVRDKKKKTDNLDAKEIYEGMRRQYYYKEVYIPTDAELKIRWLYSKRVLAMKTRTSYILSAKGTLRSWGFVEYTKRKLESKNSWNKLLKELESMSESEQDKLIGWQFEGGIGEDLIEAVKNDYEMWKHADKLITDYERKIEEASKGLDKSIMKSIENVDDIFGIGRLSAVMLAVLIGDPHRFQKSNQLKSYFGLAPSENSSGGKVSRGKITKTGNGVGRKILVEIAQQATRSQHPLYPLFWQIRSKKPYNVAIAAVAGKLIQIVWRILRDGTSFDISRLGVCMVKVPSKTSTGRATTKITAVKKKRLPKFLAEHNLDEDAVIEIVDKELERRRKKKTISDLSMIEGLSEPPRKKG

SEQ ID NO: 511611 - protein, 394 aa, unidentified
MFLVGIDVGKLSHMFCIMDSSNGEILVSPVSFKNNKQGFDFLMGNIKLYPKDKLLIGMEDTGHYHFNLLKFLLDSGYTVALINPITTDLTRKMQLNPTKDDNLDTMTICDVLASSPRKKGYRISKINNFEFYEQKRLTREHHDLKEQLNVYANKLQKCIDIVFPEYNSLFKSKYGTVYLKVLKAFGSADSIAHADIRNIRKCFETNRNGRTISLTPEKLKEAAKHSIGFPSKAEVIEIRHLIDLIELIKEQINDVDIKIEEFSTQLNSPILTIPGISHFSGTSILAELGDLRNYSKASQIIKFAGVSPYKHQSSQYEAQHTAITKKGSRYLRKTLYQVILPVIRYNPVFNEYYHLKLSQGKGHRCAQGHCVRKLLRIIYHLVITNQPFDSTLLK

SEQ ID NO: 511612 - protein, 355 aa, unidentified
MHSTLIINFICKDMKDLSTLQHFVGCDISKDTLDFALYERGKDYRTFEHIQVPNSPDGFKAMRKWLRTLKVRMKDAVIAMEHTGSYSMALSEWCFGKGITFVMLHPLDVKNYGGTSRNKTDKVDSQFIADYAYTMREKLKPSVPESANIKQLRQLRNERQLAVRSRTAYINLLKSMPDNVDTRRIEKIIKEFEAQIKQIESEMNTVISRDKTILANYDLLLSIPGIGLVNAVTTIIATGNFTRFQTARQYAKFCCVAPLSRQSGTSVAKGDHVSKAGHNEIKSVLTEGARSAITHDSQIRAYYERKKSEGKCHGCILNAVKFKLICRMFAVVSRQRPYVDVEAYRSRTVKSADSA

SEQ ID NO: 511613 - protein, 505 aa, unidentified
MNNSAAGENIAGGRFASARSRSLEGNRKTVNCRLPGEPEALAATSNRTTPQEGCNISSVDGRAKQQQKFKPQHVAMNNPEQQPGSWLEQRGFGGLDWASQKHNVVVVDPQGKVIEDFEIEHSALGWKKFRERMQPYGSIPFAIETSQGAAVEQLLEADMEVYPLNPKSAQSYRERKAPSGVKGDRLDAWSFADACRVDGHGWKALRPEDALVKELRLLCRDEVVLIEQRTAFINQLQHALAEYYPTALEAFEDWTSVSAWMFVQRFPTPQLLKQAGKRQWEKFLHSRHLWRSESGPRRMELFAHATELSGSLAMANAKSCLALSLVSMLFALEKQLGIYRQRIEELFARHPDHDLFGSLPGAGPKIAPRLLSEIGDDRDRFGEQPQALQCLAGTAPVTRQSGKPRCKPPCWPVHQRWACDKHLRHAIYLFAEQTLTRCFWAELYYRHHRQKGRSHADSLRRLGQRWLKIIFRMWMDRVPYDAMLHHQNQIKHGSWVLQFNPTQPN

SEQ ID NO: 511614 - protein, 343 aa, unidentified
MEHFAGLDVSVKDTSVCIVDDTGRLVREVKVASEPEALLAVLANPAYHFKRIGLEAGPLSQWLFGALAEAGLPVICVETRHMRAVLQAQINKTDRNDARGIAQMMRAGLYRPVHVKTLRSQKLRMLLTHRKLLQSKAIAVENDLRATLRNFGLKVGMVGTLKFEARIKELIENLPDLAVLVEPLLIVRRVLREQLGILHRRLLAIVRADEVCRRLMTVPGVGPVVALTYRATVDVPARFRNSKAVGAVLGLTPSKYQSGESSRTGVISRCGDEMMRMMLYEAAQVMLLRSAKWSWLKAWAMKIARRRGMKKAIVALARRLAVIMHRIWVDGTEFRWTREVVAA

SEQ ID NO: 511615 - protein, 399 aa, unidentified
MFIGIDWATDAHEVCAVDASGTIRHRATIPHSQDGLDRLVGHLGRWAREGELLVGIERPEGRLVDRILEAGHPIVLIPTFAMKDFRRRYGIGGAKSDRADGYVLADVTRTDGHRLRRLEPLSAQTRALRAVVRSRDDLVDQRKTLANQLRATLEAYWPGAAAIFADVDSEISLAFLERYPTPASAARLTQARLASFLTKAGYSGRRPAGELLARLTAAPAGVLGAEAEARADAVRAMVRVMRALLCSIKDLDRSVIAHLGEHPDAEVFASLPRSGQINAAQMLAEWGDCRQAYPQADSVAMLGGLCPVTHASGRHRDVSFRWACNKRLRQAMTCFANNSRRTSPWAAEVYRQAIARGCDHPHAVRILARAWTRVIWRCWQDRTPYDPALHRAARRLKAA

SEQ ID NO: 511616 - protein, 354 aa, unidentified
MNTTQNSTKSKIVKVIGVDLAKDHCDVIGYDENGKICLRLDGCSYAKLREILSNLPQAVVLMEACKGSMFHARSIADLGHEVRLVKGADVKALRNINHKNDLRDAAYIAKLYFVPGTTYVYIKSQQQQSLQFLQNEYKSLQELRIQAGNQIHAGLEEFGCPVRKSSKFIKTRMVAHLEKHAELIPEDVMASFKRRREIWLNLLQQEEEAKRRMEQVAATDANAKRIMTVPCVGPQTAVGLLVHIGVDIGRFKNSRQFAASLGLVPKQNSTGGNNTLNHITKCGPKRLRSNLVQCAQLVLMHTEKWKGNFGDWVRKMRDSGKKHGVIVCAIAAKLARIIYRLMKDKVDYTSVLSC

SEQ ID NO: 511617 - protein, 348 aa, unidentified
MTLVGCDLHSRKQQVAVLDTRTGELVEQELVHDGDAVERFYRALPPPVTIGIETTGYTQWFHALMHQLGHTVLVGEAAKIRAMVVRKTKTDRRDARHLLDLLQHDRFPTVWIPDPDTRDRRALIAHRVRLVRMRTMVKNGLQAIALNQRLALHSALWTQRGLTQLKALALAPHTTRRRDDSLALLAWLTTRIDQLDEHIAAVASADPRVQLLLTHPGVGPLTALTTVLVLGPLARFPDSKHVVSYIGLAPAVHASADKQRLGKITKQGNALLRWVLGQAAPLAARKDDDLRRRYFSVMHRRGRPKAKVALARKLLVRLYIMLRDQIDYEEFRRRGRAPRPQQLPVAVM

SEQ ID NO: 511618 - protein, 431 aa, unidentified
MADTTDVTTQTHWLAIDVAKHWHAVLIETASGARHRFKMANTEQDYERLIHFIDGLGGRCRAALEPTGDWHRPLAYRLIVAGVDLVSVSSVAQSRYREAKFNSWDKNDPKDAAVILDMLKQGIVQRYVDPMVAGHHDLQELSKTYFQISKLKTRIQHSILNHHVPLYFPEMARYWNSSRSEWWIRFMLEFTTPAHVKQLSREDFIAAAWSLIGKKSDKAGKLGEMWDTAHQSTALPHEVGSLAVETFRITLRQLQHLNETRADLERRAETILSDNADYKQLRTLPGVGPIIALMILAEAGDLRRFNHHRQFLKYCGLDLAKHQSGAMRGREQLSKRGNARLRLAFWMAGAIAVRLRENSFSDKYERYIRTAPGDADLKRKALTAVCAKMARVAYGLIKSNRSYQQFYEQSLPSGSIPLCRAVEASAQLKTS

SEQ ID NO: 511619 - protein, 337 aa, unidentified
MIGIDPHKATYTAVAVDDAERVIGEFTLGASSDQAERLCDWAEGLGKREWAVESANGLGYLIARQLVACGETVFDVPPVLASRVRLLGSGRSQKNDPNDARSVAIAALRSERLATVRSDDHVTVLRLLVKRHRDMARLRNKHCSRLHALLIDLEAGGIGGKISVTNASELLDGINVTSDVTRYRALVAREVVDDIAQLDEKLKASKKRIAVAVTASGTSLTNIVGVGPIGAATIIGYTKDITRFPTRGHYATYNATAPIEASSGGNKRHRLNPRGNRILNHAIHIAAVTQLRHDTNGRIYFDKKIAEGKTPKEAIRALKRRISDAVYRQLKLDASRI

SEQ ID NO: 511620 - protein, 344 aa, unidentified
MNNYNVNSVVTVLGIDLAKQSFQLHGTDKHSKVVLKKKLTRNKLSAFIANLPPCLIGLEACGGAHYWVRTFKAQGHKVRMIAPQFVKPYVKSNKNDAVDAEAICEAVQRPSMRFVPDKSIAQQDIQSLHRVRSQLVARRTAQANQIRGLLQEYGLIIPKGISHVRKAIPLILEDADNTLTCLFRELLNELYDELVHLDDRVNTLEKKLEIISRESDDCQRLLTIPGIGLLTATALIAAIGNISAFNSGRELAAWLGLVPKQHSTGGIPTLLGISKRGNSYLRSLLIHGGRAVVRVAPLYSDKRNTWVNTLSERRGKNISAVAVANKNARIVWALLSNKENYKAA

SEQ ID NO: 511621 - protein, 311 aa, unidentified
MEKGKVYVGIDISKDSLDVAIHSSDKCWHFSNDDTGINNLCKMLVKLKPALVIFEATGGYEMLLYLILDKAGLPVSPINPRQIRDFAKSTGKLAKTDVLDARVIAHFGYAIQPIPHHLPDTQELKVAQARRTQIIEMITMETNRLRIAQQPIKSRIETHITWLKKELEDADNELRESVMNDPVWREKDALLQSVPGVGPVLSATLIAEMPEMGTLDRRQIAALAGVAPLNRDSGSFHGQRSVWGGRAHVRAVLYMATLVATRRNPLIREFYLRLCAAGKRPKVALTACMRKLLTILNAMLKHHIPWCYSPC

SEQ ID NO: 511622 - protein, 409 aa, unidentified
MRIIGLDIHRAFAEAVAWDDGKLRRLGRVDMRRDLLSAFAEQLSADDVVVVEATGNAAAVVAVLAPHVKKVAIANPMQVRMIAHAKIKTDTIDAGVLAQLYASGFLPEVWVPDEPTQALRRQVTRRNQIVRQRSRLKNIIQSILHSHLIPACPHADLCGAKGRAWLVEQVVPEDERLAIERHLREFDRLGEDLKVIERDLARSALADEGVKRLMTVPGIDMVVALALTAAIGEVTRFDEPQKLVSYLGLNPSVRQSGPGPAQHGRITKQGRGHARGMLVEAAWAAARAPGPLRAFFLRVRARRGQHVAAVATARKLAVVIWHLLSKGESYVWARPSLHAKKLRDLELKAGYKAARGQKGAAHAYNSKSHRDEERRWVEQAETAYARFVTGWNPQGPKKVRTGAATEVRR

SEQ ID NO: 511623 - protein, 309 aa, unidentified
MGIDVAKATLDIAVRPTAETWRAPNDAPGIDALVMRLGAWAPTLIVLEATGGSQGPLVAARVAAALPVVVVTPRHLRACAQAVGILATTDRSAARVMAHCAEAVTPAPRPLPDAETQELRALRGRRRQRVAMVSAERARLDTAPPRVQDAIQAPIAWLTTPITGLDDPLTHARQTHPAWQAKDDVWQSLPGVGPVLARTRLGQGPAWGPLGAQPLAALSGVAPCNRDRGTRRGRRTVYGGRAEVRAVLSMGALVATRHNPVIKAFYERLLAAGKAKKVALTACMHKLLTIMNAMVRDLKRWQPREVPIA

SEQ ID NO: 511624 - protein, 346 aa, unidentified
MTIVEDRRAITGGVDTHADLHVAAALDPIGGLLGVREFPATAAGYAGLLGWLGGFGTVALVGIEGTGSYGAGLARHMAAAGVRVVEVDRADRQDRRRKGKSDPLDAVSAARAAQSGRAAGAPKGRDGAVEAIRALMVAKRSARNERTQAINQARSLIVTGPEDLRARFGKHTTAALVAGLAALRPRPGDVPGYATRIALRELGRRAQFLDAQIGHLNELIVPLVTARAPSLLALHGVGPDTAALLLIAAGDHPQRLRSEAAWAHLCAVAPIPASSGKVRRHRLNPGGNREANHALWRIVITRMSNHPATRAYAERRTTEGLSKKEIIRCLKRYVAREVYPHLRAAG

SEQ ID NO: 511625 - protein, 342 aa, unidentified
MEHYAGIDVSLERSSVCVVDGSGKIVRETKVASEPAALIGWLGSLGFGLGRIGLEAGPLSQWLYMAMKQAGLAVELLETRHVRDAFKAMPVKSDRNDARGIAQLMRLGWFRPVHCKSMAAQEVRALLTARKLVQSKLLDVENSLRGILRGFGLKVGKTTRKNFAGRIRELVKGHPNLKTIGEALLSVRAVLLGEFNTFEKQVRAMSRLNANAKLLMSTPAVGHIVALTYASAIDDPARFRSSKRAGPLFGLTPRKHQSGETDRSGRISKIGDASVRAALYEAAHIILTKPIKGCSRLKSWAMRIAKRAGTNKAKVALARKLAVILHRMLVTATPFNDAAAAA

SEQ ID NO: 511626 - protein, 319 aa, unidentified
MNIQNQTEISVGIDVGKSQLDVAIYPLERHLRIPNSVEPISKLIQLLKELDVSRIVLEATGRYEHEFVFACDKAGLPVCVVDPVKVRRFAQALGIHAKTDKIDAGVIARFAATMKPEAKPIPDKQSRVIKDLLTRRSQLMEMSTMEKNRLQIMPKELHSSIKGLLKTLEKQIEAISNKVDGLVRQVKEWRVKTEILTSVPGVGKVLAYTLLSELPELGSLNSKEIAALVGLAPFNKESGRMTGKRRIRGGRPRVRTIMFMAMMSSIQCNPVFKRYYERLKAAGKLPKVALVACMRKLIVILNTMVKNQQRWDVDSAKSS

SEQ ID NO: 511627 - protein, 326 aa, unidentified
MNHKLGIDVSKAKLDAALLKVDGKYRSKVFSNDAAGFKSLLLWIEANVPAGIADVHACMEATGAYHEGLALFLSDQGIAVSVVNPLLVKRFIEVDRVRNKTDEGDAKCLARFCQMTQPELWEAPSVGVRTLQALVLRLDSLQEMRQGELNRLDVAHASVQQSMRDVIADLEHAIEAVRKQIKRTIDDDPDLKQRQSLLTSIPGLGDKTIPQLLAYIGRPERFKNVKSLTAYAALAPLIRQSGTSLNKHHGTHPQGHRALRSALYFPAMVAGKYNPLIAAFWQRLKAQNKPGKVIVVACMHKLLVIAYGVLKSGKPFNPDHHKPIIA

SEQ ID NO: 511628 - protein, 346 aa, unidentified
MLHAGLDLSRKRLDFCLLDESGEQVEVGAAPPDADGLRSLARRLARHDQPVRAAIESMNGARFVHDQLELAGWQVEIADALKVKGLAPLACKTDRIDAWVLAELSRRDLVPAIWLPDPSVRAERERARFRLHLVRHRSSLKQRVHAVLLAHGKPCPVSDLFGVAGRALLERLALPEPWAGTVAASLRLIDELDLQIATGEAELRRLGADHRYVPLLMTVPGIGWVLAYTIAAEIGDIDRFGSPRKLAGYSGLCPRVYQSGESDRRGPLAKQGPKYLRWALVEAAVHANTHPAYRERYQRTKTRLGKQRGAKVAQVDLARRLAEAIWHMLTRNQPFAPAGATDPLTA

SEQ ID NO: 511629 - protein, 447 aa, unidentified
MTTPSLPVLDPLAAFVDVGSEQMYVSIAGGPPEVFGTVTDQLHRLRDWLQERKVKSVAMEATGVYWLPLYGVLEAAGFKVVMVNGKQTRNLPGRKTDMKDCQWGATLHAHGLLQAGFVPPAQIRRLQDYLRLRADHLVSAAANVQHQQKALERMNVKLHDVISSLVGTSGSKVIAAILAGERNPDRLLALCDVQIQKKKAERVKESLRGTWAEEHLFALRQAVENWEHYQRQIAACDQRIEAVLREINGPDQPANPPPPIASSKRAGANAPEIDDLHSLLVKLCGGKDLTVLPAHTDYSLLQLIGEVGTDLTQWATEKHFTAWAGLAPGSHQSGKRKGSVRRKRNRAGRLFCVMARSLARSKHIALGGFYRRMAARRGGLVANIALARKLALLFWRVMVKGLSFAEAGLKAYEEQVLETKRRALCRLAKQLGRVVLPSLAEMQTKPA

SEQ ID NO: 511630 - protein, 329 aa, unidentified
MFVGLDLHKNYLQTAVMDDQGRLLSQERIPNRDENIEEFASKRLRDSHAEIVIESSSTWYHVYELLSRNQNCHVVLSNPVKTKAIASAKVKTDKVDALTLANLLRTGYIPESYIPPRHIMDLREMVRYRTSLVRMRVEAKNKIHAILLQNGTRITEKPFTIGFVEELRKLGDYRIDGYLSVISSLSHQIQTVSSTIKREATEDESTRLLMTIPGVGYFSALLILSELGDINRFPDSHHLCSYAGLTPSTHSSGGVTYHGSITRSGSRYLRWILTECAKAHIRTRRDSQLTRFYTRLAKRRGGSKATVAAASKLLRIVYWVLKEKRPYHG

SEQ ID NO: 511631 - protein, 388 aa, unidentified
MEKDTTYVALDDSKRKIPVMEKDTTYVALDDSKRKIVVGILRPGSTQPELREIANDPRQIRRLFERLKREGPVAACYEAGVSGYDLYRQIIGLGVTCDVIAPALTPRRPGQRIKTDRRDAAKLVRLFRAGELTAIHVPAEAEEAVRDLVRCRDDIRRDVLRWRHRVLKLLARHGRAYLAGKNWSQAHWRWIREQRFDLPPLQRAFEATVFALEQALARQAELDKELEAVAATASYREPVGWLRCFRGIDTLSAIILLAEIVDFQRFRRPRELMAYLGLVPSEYSSGESQRRGALTKAGNSHARRVLVEAAWHYRHRPTIGRALASRTHGQPDEVIGQAWRAQQRLHRRYRHLVGHGKRTPVAVAAVARELVGFIWAAMTRHESRRAAA

SEQ ID NO: 511632 - protein, 428 aa, unidentified
MNCNTQNAKIASITEKTLIVGIDVGSETHFARAFDWRNYEYTKKPLEFSNTEAGFLTFKAWVEDIAEKQGKTAVIPGMEPTGHYWFALGKFLQDNGMKPVHVNPHHVKKSKELDDNNPNKNDRKDPKTIAALVNEGRFSYPYIPTGIYAEIRSLSNLRFQTQEELTRIKNRIARWFAIYFPEYKDVYGDLKAVSGRMVLKVAPLPEDIGKLGVEGVNQIWRSAKLRGTGIKRAKTLVSAAEHSVGSKEAPEAARMELKNLLDDMDVYVSRLDELLVNIEEKLKEIPYVDKLMEIKGIGLVTVSGFIAEVGDIGRFDNPKQLQKLAGYAIVANDSGKHNGESRISYRGRKRLRYVLYEAAISLIGKNAEFKSIHEYYRTRKENPLKKMQSVVAVACKILRVFYTILTKGVDYDPVKLLGDIKRPQLQAA

SEQ ID NO: 511633 - protein, 341 aa, unidentified
MNTITIGLDIAKSVFHLVWMNAAGKVLKRKQLSRKKVAEYFANIEACTVVMEACGSTHYWSRVISRCGHKVKAIAPQFVTAYRKGNKNDYNDAEAIAEAAQRQNMRFVPLKSLEQQDIQMLHRIRERLIKNRTALSNQIRGLLSEYGLVMPKGISHLKAHLPRFLEDATNELSASARRYFLGLGEELDEISVQIKSVDTEILGINRQHEVCQRLSTMTGIGPIVATAFYAGIGDGKAFNSGRHVSAWLGLVPGQHSTGGKPTLLGISKRGNTYLRTQLINGARAALKHCENKTDQVSIWAKQLKERSNYNNATVALANKMARMAWAMLHHQEDYKFKTVIN

SEQ ID NO: 511634 - protein, 350 aa, unidentified
MLIIGCDFHTRYQQIAMLDEATGELVERRLEHETGQARAFYAGLAPPVRVGIEATGHTQWFERLLTELGHELWFGHAAQIRATAVRQQKTDQRDAAHILDLLLTNRFPRIWVPSPAERDLRQLLWHRHKLVCLRTLVTNQLHAVAMSQGLCRKKKLFTAKGRAELASLPLGPWASRRRAELVHFLDQLDPPIAELDRAVLKEAQRRDDAVRLMTHPGVGPVNALAFVLTIGPVSRFRRSKQVASYLGLNPSEHSSGGKQRLGAISKQGNTMMRWLLVEAAQTAVRFDPQLQQDFQRLKFRRGNAVAKGAIARKLAVRMYWMLRSGGDYARLVRMQGSPGATLVNASSPSG

SEQ ID NO: 511635 - protein, 462 aa, unidentified
MLTLALPFSRLKPNPKLEKTMPTRKTPTLTVAPLPVQIALDRGDHEMHAAVLPPGATRPVQEIFKTGAETLHGFIRRWQQAHPGHVLEIAFEQPAPGLLHALMDLPGVELYPMNPSQTARYREVLNSSRKKDDATDALVILELLKTHRQHFPKWEPESPSIRRLRLLVEGRRKAVDERTQAVLSLIGLLKIYYPQALELCGDNVHGPITLAFLKRWPTLQALKQSTAATIRAFYYGHQVRSRKAIEARLSLVEKAEPLTSDAPLLEACGLRLGLLLDQIRMINVHVASYENQIDALAVEQPQYAIVQSFPGVGRVIGARLLAALGSRKENLPHALNLACMSGIAPIVKRSGKSTSTQRRMARPVFLHQTLMEFAESSIKSCLWAQAFFRLKRAQGKGRWESVRALAYKWIRILHHCWRHDIPYDDNRYLAQLRLKGSPLLPYLDQLLAAPNTTSILNKPTGM

SEQ ID NO: 511636 - protein, 278 aa, unidentified
MEFTYFIGTDVSKNELDFAVMQGKALLFHKEIKNTPSSIKTCIKELIKLPGFDLNNAVFCLEHTGIYSNHLLSILHDKKALICLEAATQIKNSLGNLRGKNDKVDAIRIAEYAYRNRDKLRLWQPKRDVIQQLAHLSTLRSRLVEVQKVIKTPLKEAGSFIKKNQGKQNDKLCSKTLTAIEFDLAKIEKAIEGVIAGDPELNRLFKLVNSVSGIGKITAATVIITTNEFKDINDPKKFACHAGVAPFVKNPAYSKAKQECHIWPIRDLKCYYLRHKYF

SEQ ID NO: 511637 - protein, 347 aa, unidentified
MRIVSHSCAVYGVDLGKTTFHIAGADQHGRPTLRIKLRRDALLQFFATASPALVGMEACPGSHWLARKLIAFGHDVKLIPAQFVKPYLKSNKNDTLDAEAIAEAVTRPTMRFVPVKRHEQLDMQALHRVRAQFVHQRTALVSQFRCFLLEYGIAIHTGIGMFRRDATRILADDSNDLTPTMRQLLTDLWSDFLRIDERVTALSGQIEVSAKHDDVVQRLTTIPGIGPLGASALCAAIGNGKQFRSGRDLAAWVGLVPRQQTTGGKPTLLGISKRGNTYLRRLLVLGAQSCLMHLDRSRDRLGRWLDTLESRMHHNKVVIALANKLARVAWVVLTRPGALYEKMGPRF

SEQ ID NO: 511638 - protein, 343 aa, unidentified
MNACLYVGLDVHKKSISWCAKRQDGKVFGEGSVKATRQCLTEWVSTFNEPWIGALEATIFSGWIYDFLKPHAEALKVAHPLMLKAIAASKKKNDRIDASRIADCLRADLLPECYMAPSEIREMRRELRFRNLLVGQAVKMKNKISGVLMEVGADYSKEKLHGKKYFNELLGSLDSAVAPESVKRMLRVSRGHLDLFTTGQKSLIRSLQADARLHERVMRLQTIPGVGEVLALTWALEVGESGRFAALANAQSYCGLTSAQSESGGVSKRMPISKQRNKHLQKMLIEAAKIAPQWNSQLRALHERELKKGNRNRATLAVARKLVAYLLSVDKSGKDFEVREIID

SEQ ID NO: 511639 - protein, 343 aa, unidentified
MNIQLKETIDEAKPHLFAGIDVGAEELVLVILKNGKSFDPQKFANTPADRDRLVKKLVKLPGIIVCLEATGVYHFDLSLALHDAGVLLMVVNPKASHNFAKVLMKNSKTDAVDANTLAEYAARMDFVAWTRPSNETIALRSFARRIDALTSQKAAAKNHLHALTATSETPKAVLKDVKLAIAQLEKRIDSLTAGALILIGKHPDLERILDLLIGIKGIGNTSAIALMGELLLLPPDLSHREWVKFAGLDPRAFDSGKSVHKKTRISKAGNRHIRSALYMPALSAKQHDPHVKAYFQHLVANGKKPLQAVCAIMRKLLHAIHGMLKHNKPFDNTRFYAIPECTR

SEQ ID NO: 511640 - protein, 342 aa, unidentified
MKYIGLDCHKKYDHATMIDTETGEVKAKRLTHVKEEFAEFIGERSDTRLVMESCWNWCKTYELVKDLVEEVTLAHPLKVRAIASAKIKTDAIDSRTLAELLIADLVPQAHLRKAENRIKQRVIRHRAFLIVTRTRLKCRIHDLVDSQLLSRDVIQAKPVNIFSKKGMKWLCSLELTTEEERNMSDSYLRLLEVINQEIASSNEMIEEVYDKDKDAQLLATIPGIGVTLATLISTEIDGVERFKSPAKLCSYAGLVPSTHSSGGKIHHGRITSEGNRWLRWGLIEAAVPASYGDAGIRRQLNDLRKIKSGNVAKTIMARRLLRIVYHVLRERRAYVPDYPGRL

SEQ ID NO: 511641 - protein, 353 aa, unidentified
MPALATPVTVGVDTHLELHVAAVIDQTGRLLGTQAFPASTRGYVALVTWAEGFGPVERVGVEGTGTFGAGLTRFVRAYGLAVVEVARPDRSTRRRHGKSDPIDAQAAARATLAGIAATVPKTRDGQVEMIRVLRVARRGAMKARVAAAEQLYGVLWSAPDELRQPLLGLTTKALVRACATMRPGPLTSPTAATKTTLRTLARRWQQLQAELDQLDLQLQKLVKAVAPTLVALPGVGVETAGQLLVTAGDNPQRLGSEAAFAHLCGAAPIPASSGRTNRHRLNRGGDRRANNALWRIALVRMRYHPPTRAYVERRTKQGLSKLDIMRCLKRYIAREIYHQLTSPPPITPTACPK

SEQ ID NO: 511642 - protein, 424 aa, unidentified
MKVTYQTCCGVDVHKSFLVATIVKTTGGIEPSYQKKRFSTFNNSILEFKQWLLDNNCRDICMESTGKYWVPVFNLLEDEINVVIANPKWVKAVKGNKDDTKDSKWIGDLFRLGLVKGSYIPCKIVRILREYTRYRYKLVSCRSSEKNRYQNALTVCNVALDSVVSDIFGKSSTSIIDYLLEQSGTSINHEEIASKLLRSLKSKEDAVIESVEGYQMTDAQKYRMRLVRAHMDYITAEINDVDKMIENMISSNPDFENAVQFLCTIPGVKRDSAITIISEIGTDMSQFSSSKRLCCWAGLTPGSNESAGKKKSVRITRAGVYLKPALVQCAHAAVKSDKSPYYKKKYESLVKRRGKKRAIIAIARMILTAIYQMLSTGEQWNPSDLYKIDMPEALVEKQKAKAIKQAKKLLQREGLLPPDEPVAS

SEQ ID NO: 511643 - protein, 386 aa, unidentified
MIYVGIDIAKLNHFASAVSSDGEVMLQPFKFTNDYDGFHKLKSSLDSLDPDQLIIGLESTAHYGNNLVEFLVLSGYKVCVINPIQTSTLRKNNIRKTKTDKVDTLVIAKALMMNPTRFFTKYDISLLHLKELGRFRMKLIKKRTQAKIQLTSYVDQAFPEIQYFFNGVHHKSCYALLKEAPTAGMVASMHMTHLAHLLEVASHGHFKKDTAQEIRVLAQKSVGINDSSVALQITQTIELIELLDKQVTTVESDMESLVESLDSVIMTIPGIGAINGGMILGEIGDISRFSNPSKVLAFAGLDPAVYQSGNFEARHTKMSKRGSRPLRFALVNAAHNVVKNNKTFNDYYAQKRSEGKSHYNALGHCAGKLVRVIYKMLTDNVAFDLK

SEQ ID NO: 511644 - protein, 342 aa, unidentified
MYYIGLDVHKKTISYCVKDASGQVHQEGKVGATRRELDSWIKTLPQPRTMAMEATIFTGWIYDHLLPHAQQVKVAHPLMLRAIAAAKKKNDRIDAGKIADCLRCDFLPECHMASTQIRDRRRTLRYRQLLVRQMVQMKNRVSGLLMETGVSYNKQRLHKVGYFRELLSSHEEVHESIRPLLKLSRETIVRLQKTEYGLVSSLERDPLLADRIRRLRTVPGVGPITALTWALEVGDVSRFRSIRQAISYCGLCGAEKSSADKAMRTPLSKQRNKHIQHVLVEAAKLAPRQDHDLALVYETEKQKGNANRATLAVARKMVAYLLAVDRGKRDFVPAEDHRSAAA

SEQ ID NO: 511645 - protein, 314 aa, unidentified
MNNPSGTPIILGIDVSKEWVDAHILPSGAKWRVPNDAKELKTWVEQLPKGITLTVIEATGGLESLAASAMALAKIPTAIVNPKQVRSFAEAMGQRAKTDPIDAMLIAQFGERIQPKAKTLPDKDHAELKELMARRRQLIKNKVAEQNRLGTMRSKQAQKSIKAHIRWLTKQIERINQQIDDTIKKSPMWLSKEQLLITIPGIGPTTARSSLVHIPELGQMNNKQVASLGGLAPFTRESGKWKGKRFIGGGRKEFRSTLYMATLSATQSNPVIAPFYLSLIKRGKPHKVAMTACMRKLLTIMNAMVRDQTPWSKC

SEQ ID NO: 511646 - protein, 343 aa, unidentified
MEITIAWRFIVGIDISKKWLDCFLLDRQTGKGYDSQVPNTYEGFEQLAGWLADHGADPSQTKLISEHTGRYGEHLLRWTTTNEWAHAVVKTTALKKVGNEHHRKTDAFDAEYLADYGVRFSDQLSLTTAPQPAIGQIRRLQAERRAMVDRRAALKSKLTEADSHDADMERLKNMWSRQVALLTEHITEIEARIQELIEEDTTLKNRYHMMRTAPGIGKVLGPLWMSLFAGRQTLEARKISSRFGFAPHPHSSGSSVKRIEESSGFGNSEVRRVMHQAALSVKTYYPHYKEYYEKKRAEGKEHLLVINNIINKLIRLYCAMWNNRTEYDPDYIQKNKQKWKNSA

SEQ ID NO: 511647 - protein, 458 aa, unidentified
MNRKHRRELARKIHAEDVNLEVVHAAAAGIDIGNEIHYVAVSPKRDNQPVRRFGCTTAELKAMAAWLKECGIETVAMQSTGVYWIPVYDILEEAGFEVYLVNARDTKNLPGKKTDVQESQWLMKLHTYGLLRNSFRPTQEIRMMRNYWRQRNDLVRSAGRHIQRIQKVLTQMNVQLGNVISDVSGLTGQAIIKAILAGERDPLQLAAYRDPRVKSSEEEIAQSLEGNWQEDLLFVLKQEQDGYEFCQKQMAECDVRLEEYLKQREDRSGGASLPEEKRKERRRKKRGNAPRFDLREALFRMSGTDLTQIDGIDTITAITILSEAGYDMSKWATEHHFVSWLRLCPDNRISGDKVIGKGRLPTNNRLTVAFRMAANSLRKSDTYLGAQFRRLRSRLGAPIAIKAMAAKLARLVYRMLRFGMEFVDKGAEIYEAQHRQRQIHSLNRKAAQMGFRLVEVAA

SEQ ID NO: 511648 - protein, 361 aa, unidentified
MKCERSHFKLSFKGQNIYVGIDVHLKTWHVTTVTESGYKYSFAQHSDARELFDRLNRKFPDAHFVSAYEAGFCGFSAHYALADLGFESIVVHAADIPTTGKEKAMKTDAVDSEKIAWALKRGELTGIYVKDKQYMDDTNLVRLRQRFVADLSRQKNRTKHLLYTQGVTFPERFSKNRTHWSRNFMSWLREEVELLSGEKRSLVLLCDQVENTRRAILAVTREIRRLSTSDKYKENYGLLSSVPGFGLIMSMSMLTELDNDVTRFPNERTFVSMLGLIPTCHDSGEKKAIGEKTNRGSKQLGPLIVEASWVAIQRDKGMGAYYSNCCQSMKPHKAIIKVARKLACRAYAVLKTKTKYKYEQS

SEQ ID NO: 511649 - protein, 387 aa, unidentified
MTARTVSNLPAATHVETARCLFAIELSKQSWVIGFITPLSAKISRRILSGGDWKGLLDLIEEVRARVSRETGRAVDVISCYEAGYDGFWLHRLLEAHGIRNYVIDPASLQTDRRARRVKTDRIDTERLLRSLMAYLRGEPKVWSVVRVPSVAEEDARRLHRERDRLVSERVQHVNRIKGLCALHGIYDYQPLRPQAMARLEQLRTAQGISLPPRLKSEIKRELQRLELVVEMIATLEAERDAIVEDEASTHVNAKKIQNLHQLKAIGPEFAAVLVGEIFHRDFNNRRQLASYVGYAPSPFQSGNVAHDQGISKAGNRKGRTTGIELAWLWLRYQPDSDLSVWFRARVGTTKGRIRRIAIVALARKLLVALWRYLETGVVPRGAVLKG

SEQ ID NO: 511650 - protein, 412 aa, unidentified
MEVIHPSCCGLDVHAKTVVACLIKHGKKQTRTFSTMTDDLLVLSDWLVSEGCTHVAIESTGVYWRPVFNILEGTLEVILVNARHVKGLPGRKTDVKDCEWLADLLRHGLLKASFIPPAHIRELRELVRYRQSLVKEQTAVANRIQKLIESGNIKLGQVVSDVLGVSGRAMLRALAAGETSAEEMAQLARPNLKVKPPELRRSLEGRLTTTQRWVLGELLGRYQELEAALDRVNRQIREQVAVSPDPFLAEAVQLLDTIPGVGEQVAETVIAEIGVDMSRFPTSGHLASWAGMCPGNNESAGKRKSGKTNKGSPYLRAALVQAAWAASHTKGTYLSAQFRRLVRRMGKKKALVAVGHTILIIVYQVLSRRVSYRDLGGDYFDRRNVEVQRQRLIRRLESLGLRVTIEELGEAA

SEQ ID NO: 511651 - protein, 344 aa, unidentified
MTSMNFIGLDIHKKTISYCVKDAAGEVLAEGTILSTRQSLDVWMRTLCEPWTVAMEATMFTGWIYDYLLPHAAAVKVAHPLMLGAIAAAKKKNDRIDACKIADSLRCNFLPECYMASTEIRERRRTLRYRKLLVRQNVQLRNKVSQMLMESGVVYNKQKLHKVGYFKELMTTNPDIGEGLRPLLTICRETIVRIGKTEGALVRSLARDPLLSDRVQRLMTIPAVGPITALTWVLEVDDVARFGSVKQAISYCGLCGAERSSADMVKRMPISKQRNKHLQSVLVEAAKLGPRLSPDLALVYETEKQKGHANRATIAVARKLVAYLLAVDRSGREFVVAGERREAA

SEQ ID NO: 511652 - protein, 363 aa, unidentified
MIRHIFVGIDLGDKNSVARIAVDREKSERLGFVNNQQGRGRLFREVKRRSEQAGGAEIMMAYEASSCGFVLSDEAEAVGMKCWVVAPTKMEKSVEQRKHKNDDRDADDIVEKLRGHVLAGNRLPKVWVPDRQTRDDRELTRTRLELTEKQTQIKAQIRMLVKRHGLEKSSGLGAGWTVGYRRWLEALTESEDLLGWSTRQALNSLLRQLHFLEAESEQMQKSLEQLADEPRHKPIIEELTQEAGVGLLTAMVYRTEIGQAGRFGRGRQVGKFVGLTPTSHESGQQADRKGHISRQGPPRLRKVLCQASWVHIVHDDRAKRMYQRLVSGNPKKKKIALVAIMRRLAVRMWHRMRKVEQQLAVHP

SEQ ID NO: 511653 - protein, 345 aa, unidentified
MKITTIGIDLAKSAFAVHGVNEHGRAVLKKVLKRGQVAMFFANLQPCLIGMEACGSAHHWARKLQGFGHDVRLIAPQFVKPYVKTNKNDAADAEAICEAVARPNMRFVPVKNVEQQAVLAQHRVRQGFIKARTAQANQIRGLLAEFGLIIPQGIANIAKRVPELLEDATNELPGSFRLLVQRLMEHLKELDRQAGEIEAQIVTWHRDNELSRKLAEVPGIGPITASALVATVSDAKNFDNARQLAAWIGLVPRQNSSGGKNVLLGVSKRGDTYLRTLLIHGARSVICAFQRKKDKVDGWLGALLARRNPNVAAVALANKNARIVWALLAHDREFRPGYTSAQASA

SEQ ID NO: 511654 - protein, 384 aa, unidentified
MQKPNDLNQSRIVLKQDSTLIAVIEMSLSSWLVAGIVPGVERQPLKKLAVDESALLKLLNRWREEAEKTGRRIERITVAFEAGRDGFWLARWLRARGIEAHVIHASSVAVSREHRRAKTDRLDTELLKRAFLGWLRGERDHCKMVAIPTTKDEDAKRPNRERQNLVGEQTRIVNRMKAALIRLGIRGFNPKLKKAAGRLENLRTPEGEPIPPNTLAELHREMERRRLVSDQIRQIEKARLERMEQAPDDGPHAMVRLIARVIGIGIETADMLVHEVLSRKLRDRRAVARYAGLTGAPDESGSKRREKGLAKAGNARVRGGMIQLAWRFLLFQKDSALAQWYRTRTEGGRNRKTIIVALARKLLIALWRLVTTGEVPAGVVLRAA

SEQ ID NO: 511655 - protein, 450 aa, unidentified
MARRTNRFDEVQRYVAGIDLAGHADHYVCGPRKDDGTHDIEHFGTTTNEILRMVAWLKERKVVSVAMESTSVYWIYVYDMLEKAGIGCLLVDTRTVKMVPGRKSDVKDCQWLQKLHSCGLLRGAFRPPEEFNAVRSVIRESENVRQMRTQSIQSIQKSLDQMNVRVHHAVSDIDGVTGMRILAAIVGGERDPRVLAKLRDKRCRKSEAEIAEELTGNWREEHLFNLKQAYDTLCFLDERIADYDRQVRDMYAKIAAKFPPVEPPPGGTGPKKPKDKDDAKAKADLARICGGFDMTKIDGIGYDNAAAILSELGPCLDAFPTESHFVSYVGVAPALGKSAGKNVSSRKKHKNTSRVGLVLKLAASTLTRSESSLGARLRCTRSRTCSRTAIKDVAREMAKRIYRGLRFGQAYVDEGEQAYLERTRERTIKSMKKKILKLGISAKELGILAA

SEQ ID NO: 511656 - protein, 317 aa, unidentified
MKTVPFEQVILRGCGIDVHKDMVVATISGEGLKTETRSYKTFSSSLTELKEWLLSSGITHVAMESTGVYWKPVYKILECPDMKVWIVNARHIKYVPGHKTDKKDSAWICKLLLAGLLKPSYIPEREQRELRDLTRYRNKLIQHVSSEKNRIVRILEDCNIKLSSVVCSLDGVVANKLIDMLIDKGHVTMDDITCIYHKKLEASPELLYQACEGFIEPHHIYMLQTIRKDMEQTKAIIADLTCRIKEVLSPYENVMELLQKIPGLSRKTVEDLIAEIGVDMEAFPTEKHLASWAGVCPGNNESAGKKKVVEPPMATNS

SEQ ID NO: 511657 - protein, 339 aa, unidentified
MAGIDLHSNNLFCGIVDEDGRQVFEKKLPCDLGRVAAALKPFKSRLDTVAVESTYNWYWLVDGLQDYGYRVALANPAKIKQYDGLKHGNDKSDAFFLAELLRLKILPTGHICDRELRPVRDLLRRRMGLVQKRTSVMLSLKSLYTRMTGKQMELRRLKELEPRHAESLFDHPADQLITRLDLQLLEQLNEAVSKIEKTILATVKHISYYQVLQTMPGVGIILGLTITLETVDPKRFATAGDYASYCRCVDSQRVSNGKKKGENNGKCGNKYLAWAFVEAANFARRHDEHCRKFYDRKAAQTNTMVATKALACKLAKAAWHMMSQGVAYDVRRIFPEARA

SEQ ID NO: 511658 - protein, 389 aa, unidentified
MKIFVGIDIAKLNHFAAAISSDGEILIEPFKFTNDADGFQLLVSKLESFDKNSIIIGLESTAHYGDNLVRYLVAEFYQVCVLNPIKTCQMRKNNVRKTKTDKVDTFVIVKTLMMQDDLRFITFFDLDMMDLKALGRFRQKTIKQRTRLKIQLTTYVDQVFPEIQYFFKSGLHQHAVYALLKEAPSPKEIASMHMTHLANLLKVNSHGHFTKELAKELRVLAQKSVGANDSAISIQITQTIQQIELLDSQLEKIEAEMTDIMKFNDSVIMTIPGIGYINGGMILGEIGDIHRFSNPNKLLAFAGLDPSVYQSGNFQAKTTRMSKRGSRVLRYALVNAAWNVVRNNATFKAYYDAKRAEGRSHYNALGHCAGKLVRVIWKMLTDEVEFNLE

SEQ ID NO: 511659 - protein, 353 aa, unidentified
MSDDKYIAFDVHQATTVVSVLNAAGRELDSAILPTQPQALVGYLESLRGKLHLTLEEGTYSAWLYDLLQGRVGELIVCDPRRNALLREGNQTDHTDARKLADLLRTGMLRPVYHGSRSLRNLQELAHAYLALVKDTTRVMNRMKAFYRSHGIDCAGRGVYSPKQQGIWLPRLPAGASRVRGELLHDQLEQLRPLRRKARRALLLESRKHTVAARLREIPGLGPLRVALLIAALQTPHRFRTRRKLWTYAGLGLVQEGSSEYGWVEGRAVRRPRALHLRGLNRNHRPGLKAIFKSAALVAIRQPGPFKEYYEARAQRGVDPAILRVTVARKLAALTLSLWKKGGRYRAEGMKQA

SEQ ID NO: 511660 - protein, 340 aa, unidentified
MQVTTVGIDLAKHVFQVHGVDADGSVRLRRKLRRSEMTAFFGALPACLIGLEACATAHHWARTLEALGHRVKLIPPAYVKPYVKRQKNDAADAEAICEAVTRPSMRFVPLKSAEQQGVLMLHRTRDLLIRQRTMLSNALRAHLAEFGIVEKLGSNGLEALVLLVENREDERVPAIARDALLMMVGQIRDTHTRVSEIEKQIHAWHRASEVSRRLETIPGIGPIIASAIAATVTDVSVFASGRQLSAWLGLVPRQHSSGGKERLRGITKQGDPYIRRLLIIGATAVLRFSRRRAQTTEWTSQLLSRRPPLVVAVALANKMARIVWAVLARGDIYRAQHATA

SEQ ID NO: 511661 - protein, 355 aa, unidentified
MENAKYIGMDVHKDAISIAVLNSSGKLVMESIIETKAITILEFVHGLRGSLYLTFEEGTWAAWLYDLLKPHVTKLVVCDPRRNDYLKQGSKSDRIDARKLAELLRSNLLRPVYHGEHGVRPLKELARSYLTITKDQARVMTRVKAVYRSWAIPCAGKQVYGQRHRLEWLGKIQEAGVRRRAEFYYVQLDALRSLRLVVRRELLLESRKHGASKLLSQIPSIGPIRAALLIALLQTPDRFRTKRQLWAYSGLAIETHDSAENQYVNGQLQRSRKQASIRGLNQNHNHDLKNLFKSASAVAAAKAGPFQKFYDAQIGKGLKPEMARLTLARKIAAITLIVWKKGVSFDARYLNPQTA

SEQ ID NO: 511662 - protein, 364 aa, unidentified
METVFHVGMDVHSSSVHAVVLAGERLEPDSEQTLPYDFAKISKPFQRLLARGTVVAAYEAGCMGFELARYLEGIQVPCIVAAPGKMPRKPGDRIKTDRRDALMIARLLRRGELDAVRIPSREDEATRDYIRARGDLKSDILATKHRLSKFLLRHGKLYAGKSWSEDHLKWIRDLDLGSPMLRQTLERYRASLLDQLERLRVMDADVEELARDARYASSVARLRCLRGINYLTALSLVCEVGDFRRFASAAHFMAFLGLVPREYSSGTKRLQGGITKTGNTHLRRLLVEAAWHYRTRCTPSKDLRLRRHGQPPEVVAYAERATARLHRKYMKLVLGKGRKTQIAVTAVARELAGFVWGLMIGDVQ

SEQ ID NO: 511663 - protein, 348 aa, unidentified
MLIIGCDYHPGFQQIAFVDTETGECGEQRLTRREEAEEFYNTLKERKVRVGMEASGHARWFERLLNDMQFELWIGDAAEIRTKRVRKQKTDRQDAQLLLKLLMEDRFPRIWVPDAENRDLRQLLWHRHRLVQMRTRIMNQLHVVALNEGVRRKKALWRPAGRSELESLVLAPWALRRRRDLLDLFDQLTPKIHDLTRALEEEVEKRPIARRLMTHPGVGPLTALAFELVIGTPERFHCGKQIASYVGLVPSEESSGDRRRLGHISKQGNALLRFLLVEAAQVTVRSQPQWRSKFFHLAMRRGRKIAKVAMARKLAVHLYWMWRQGLDYGQFEKLGSHAGEPGNRHGVQ

SEQ ID NO: 511664 - protein, 317 aa, unidentified
MAMQAGRLIVGADVAKAELVIHHDSSDEVIKLKNSKADIKRWLKQQPLNTAIAVEATNVYHLDLVELAHGLGFSVYVVDGFQLSNYRKSVGGRVKTDPSDARLLSRFLRNEGEDLRPWSPPPAVYGKLQSLLRRRAALVSARTAMTQSWANETLLKAAFEAFVTSIDRLDLLMQKKMKEVLREAGLHEQVARCQAVEGIGFLTATALVMAFVRGEFKSSDSYIAFLGMDLRVSDSGQKAGRRRLTKRGCSEIRRLLHNAAMAASKSTAWKGIYEQHRNSGKATTQALVILARKLARVAFALMKNQDEYVTKASKPAC

SEQ ID NO: 511665 - protein, 355 aa, unidentified
MKYYISTTKFNCGIDLHARQMYVCLMDPQGNKLVHTNIRNNDFDYFLKRIEPYRHDLTVCCECMFGWYWLADACQAAGLKFVLAHALYLKAIHGGKNKNDRIDSEKIAHLLRTNFIPPAYVYPAAMRPLRALWRQRIVYVWRRAELLCRIQSHELAHNRCPIKQYRPNRDPWEKLLLAREENPLRQLALQNDLAMIRSYDQQITALEQRLQQFTKARSWREYALLQSVPGIGENLGHTILYEIGDIERFATVKDFLSYCRLVKGSVASAGKIKGLRGAKLGNPYLRWAFGEAAVIAKRDHATIGPLAQRLEARMGGNKFKANTVLAIKLARSVYFMLKNKTVFDPQRLISALSKN

SEQ ID NO: 511666 - protein, 355 aa, unidentified
MTFVGLDLHKRYITACALDASGTVVAEAKRLPATLDALGAFLAALVGPVTVAMEATLYWAWLTERLEAAGVTVHVAHAYQVKLIWQARSKTDPIDARKLAELLRTHLLPTIWVADAATRARRQLLRGRAFLVRQRTQLKNRLHGHLTAENHTCPTTDLYGKAGRTWLMSVALSPALREQVDALLRLVDALTQEIHALDRVVQRAARGNAVAAQLQTLPGVGPFGALMLEAEIGLIARFRSSHELAAYAGLVPSTHSSGGRTTHGGVGPAGNRWLKWILIEIVQTLKLAPGPVGTYYQRLLRAKGKAKATVAAARKLCCYVYWMLKEGWSYAEWLRQHDRSPSSEVRPVQRMGAVA

SEQ ID NO: 511667 - protein, 384 aa, unidentified
MTIDRTDAPTIEDYATIHVVFELSKSKWKLGVMLAGSAKMSRFTVEGGDLAALSARLALARDKVAGSGKKVRIVSCYEAGFDGHWLHRWLTDQGVTNYVIDASSIAVDRRARRAKTDRIDLELIMRTLLAYLRGEPRVCSMIRVPTVEEEDRKRRNRERERLLKERTAHTNRIKGLLHAQGIRDAMPLKPGFIKTLDRARTGDGRELSPRLHDEIIREHDRLCLLSQQIAAIEAESRAEQRAAVPGTGEARIVQLAQLKGIGLVGSQGLVNEVFYREFDNRRQVGSYIGLAGTPFNSGDRERDQGISKAGNHRARRLAIELAWLWIRHQPDSELSRWFRQRVGDTKGRVRRIAIVAVARKLMVALWRFLQTGLVPTGAVLHPSL

SEQ ID NO: 511668 - protein, 334 aa, unidentified
MENIALIGIDLGKNSFHIHCQDRRGKAVYRKKFTRPKLIEFLATCPATTIAMEACGGSHFMARKLEELGHSPKLISPQFVRPFVKSNKNDFVDAEAICEAASRPSMRFVQPRTESQQAMRALHRVRESLVQDKVKTTNQIHAFLLEFGISVPRGAAVISRLSTILEDSSLPLYLSQLLLKLQQHYHYLVEQIKDLESQLKRKLDEDEVGQRLLSIPCVGTLTASTISTEIGDGKQYASSRDFAAATGLVPRQYSTGGRTTLLGISKRGNKKIRTLLVQCARVFIQKLEHQSGKLADWVRDLLCRKSNFVVTCALANKLARIAWALTARQQTYVA

SEQ ID NO: 511669 - protein, 337 aa, unidentified
MKFCGIDLHSNNSVVVVSDEEDRIVFNKRLPNDLAQIRAVLEPHRPDLAGVVVESTYNWYWLVDGLMDTGYQVHLAHPSAIKKYEGLKHSGDFADAAYLAHLLRLGLLAEGYIYPREERGARDLARKRMQLVRYRTAQILALEGILMRQTGTSMKGEAVKRLTAEQVDGFAFAPDVSLAVEANRAVSQTLSQQIAALEKRLKQRVILRPEYHLLKTVPGIGDVLATTIMLETGTINRFTQVGNFSSYCRCVDSLRESNGKRKGEGNTRNGNKYLAWAFVEAANFALRCCPQAKSFYDRKKSRSNRILALKALAHKLARTCYHMLRDQKPFDVHLCFG

SEQ ID NO: 511670 - protein, 320 aa, unidentified
MDGVLGIDIAKAKFDVTLQLPDGTRRRKACPNTRAGFGELTHWLTRHGASHVHATLEATGTYGEALATYLHDAGHRVSVLNPAVIHAYAKSQLARAKTDRVDADLIAAYTATQQPPAWTPLPRETRELQALVRRLDALIKMRTEEQNRRQAGELVPAVQQSIDTVLANLEAQIATVRALIAAHIDQHPGLRQQRDLLTSIPGIGDATAALLLGELFTKSYASARQAAAFAGLVPRVAQSGTWRGRPGLSKIGPGRLRKALYFPAIAALRFNPTMRLLKARLTAAGKPKMVIVGAAMRKLIHLAYGVLKSGRTYDATYVQP

SEQ ID NO: 511671 - protein, 412 aa, unidentified
MRVFCGIDWAEDHHDIAVVDRDGQLLARRRISDDAAGLAQLLGLLAEHGDTPQDPIAVAIETPRGLLVACLRATGRQVYPINPMSVARYRDRHSVAGRKSDHGDSVVLAGVLRTDIAMHRPLPADTELAQAIAVLARAQQDAVWDRTTAHNKLRSCLREYFPAFLAAFADARGGITRPEARAVLAAAPTPADAAKLTVTQLRSILKKAGRSRALDTEATRIREAFRTQQMRQLPLVEQAMGRQALALLGQLDAACAAAGDLEHAVTQSFNLHPDAGIITSFPGLGALTGARVLAETGDDRSRFQDAKGLKAYAGAAPVTRASGKTRSVTHRKVKNNRLAAAGYTWAFSALTASPGARAHYDRRRDAGDRHAAAQRNLFSRLLGCLHHCLTTGQHYDEATAFPNATRKSRQAA

SEQ ID NO: 511672 - protein, 410 aa, unidentified
MRYYLGVDWADQTHAVWVVDETGSKLTACAVAHTAEGLGEWGRELDAWRAQGIELWAAIERPDGRVVDFLLDHGVVVYPVNPKALDRARDRFRQSGAKSDPFDARVLADFLRTDHAHLRALQPSSEAAQELKLLTEDCQRHIRQQTRLVNQLTATLKAYYPRALEIAEVPSALMREYLPAYPTPAALTAVTERQWQRWARAHRLSETRTADLWAVLRQPQLPVPAHVVRAKARLMHTLMAQLRPVVAAVAQYRAAIDDFFARMPAAQWARTLPIGKHGITAPTLWARLGDAPGRWESFRHLQAHAGTVPVTKRSGKQQRVVQFRFACDKALRYVVDQVAYLSLLSSAWARAYYDQQRARGHSHRQALRALGAKWLKIIFVMWQRQVPYDEQSHLATMARQQLRQHQERLA

SEQ ID NO: 511673 - protein, 410 aa, unidentified
MEVLHAHCAGLDIHKETVVACVRHMSGGKVKTEVRTFATHTAALLDLSAWLATEQITHIAMEATGVYWKPVWHILSDGEFDLVLANAAHVKNVPGRKTDVKDAEWLADLQAHGLIRPSFVPDESTQQMRDLLRTRKQLVRERSSHTQRIQKTLEDANIKLDCVVTDILGLSGRRILQALVKGETVPQALATLAHRRIHASTEELEAALRGRVTTHHRFLVKLHLDQIDAIDAAIQSIDKEVDGNIEPFRAAAELLTKIPGISQLAARVVLSEIGLDMSRFETSGHLVSWAGLCPRNDESAGKRRSTRMKKGAPWLKTILVQCAWAAARTKGSYFQAQYHRLRSRRGSKKAICAVAASLLTTVYHMLKNGTCYQDLGPNHFDQQDKERHIKRLVSRLENLGVEVKILPKAA

SEQ ID NO: 511674 - protein, 417 aa, unidentified
MLKIVNRNCAGIDVHKKVIVVTIAKTNEHDITDYQTKSFNTFTEDLIKCRDWLVSNGTLDVCMESTGKYWIPVFNILEEKCKCIITHPKYVRTIKGKKTDKKDSIWIADMFKHGLVEPSFMPPADIRQLRDLVRYRNKLVNIRSGEKNRFQNSLTMSNVQIANVVTDVFGKTSQSILKLMLSNPNLTLDDITPLLRKNLKSSPEEILKSINGNFDESQSSKMNIVLKHYDSINECINELEEQILKLAFKYSTEINLLLTVPGIKEISAIFIIAEIGTNMNTFIDDKHLCSWAGLTPRCNESAKKKKSVRITKAGIYIKPLLVQCALCAIKDKSCPYIKARYESLKRRRGHKKAIIAIARLLLTSIYHILLTGEVFDYKRFENLMDKNFKSHKNIQNTPEEMISYLTNLGYNITLQNT

SEQ ID NO: 511675 - protein, 466 aa, unidentified
MRQLETNTRRQRRAAVRAAAKGEAFPLVRPNAAGIDVGSRVHYVAVPPELNLPVRSFDCMTEDLKELREWLRACGVETVALEATGVYWIPLVEMLEDSGFEVYLVDARQTRNISGHKTDVKDCRWIQKLHSYGLLAPAFRPEKSITVLRSYWRQRQGLVASCAQQIHLLHKALDQMNVQVHKVLSDITGQSGMRIVRAIVAGERDREKLASLCHSGIKCTQAQVARALEGNYRAEHVFALGQALEAHDFFQHQLEDADRALEAQIATVPSRHTEPQEGRPQAQTRAKRRKNQPHFDLREQLRRIAGVDLTRVEGIDAMTAFSVVSETGMEMTRFPSEKAFSSWMHLSPNNRITGGRVHSRRVRPGVNRAGQALKVAAQSLHHSKSALGAYFRRMKARLGPQKAIVATAHKLARLIYRLLKYGEAYVAQSEAQYQQLTRERALQQLTRRAQHLGFALVCTATGEVVS

SEQ ID NO: 511676 - protein, 407 aa, unidentified
MKLTCGVDWAEAHHDIALIDEGGAVVARSRIDSGAAGFNCLLSLIGEHGGSVEDTPVAIETDKNLLVVALVEAGFTVYPINPRAVARYRERHSQSGGKSDPGDAAVLAHILRTDRHMHRQMPAVSEHGRAVKALARQHQEAIWALHQTVSRLRSVLLEFYPQALQAFPNLKHKAALSVLAAAPAPAAGQRLTRRRVISLLQRAGRGNHPELVEQILTDLHTPALRQPPRVEAALGHTVSGLIAIVIAMARAVEDLEAELTRQFELHPQAQILRSTPGLGPILAARVLAEIGDDPARFNDANSLRAFAGTAPVTIASGRSRYVKARKVRNKRLGDACHWWAFSMLTKSSGAREHYDKRRAAGDRHNAALRNLANKLLGRLWWCLANNAPWDDAAAWPHRAEHPHPVAA

SEQ ID NO: 511677 - protein, 369 aa, unidentified
MKKIVKYVGLDVHKDSITIAIADEGRDGNVRLYGKIHNDLGQIDKVMRKLISKNSELHCVYEAGPCGYPIYRHLTSQGIDCVVVAPALIPKKVGDRVKNDRRDATSLATLHRSGDLTPVYVPDETDEALRDLVRTRKDIQIALRKVKQQINAFVLRQGISYPGKSKWSKAHLNWLTSLKMPHPAQQIALTEYLDAMENHTARIKRLDKAIVASCQTWRLLPVVEALQALRGISLLSAVTVIAELGDLTRFEKPGQLMAYMGLVPSEHSSGPTIKRGPITKTGNTHARRTLIESAQAYRLPARKSTAIRKRQEGLPEEILEIAWNAQLRLCQRYRRLIAKGKNHNVAVTAIARELAGFIWAIARAVPVAV

SEQ ID NO: 511678 - protein, 341 aa, unidentified
MEEYIGLDVSMKETAVSIRRAGERIWRGKCASDPSIVAELIRKRAPSVKRVVFETGPLSVWFYHSLRTEGLPAICIDARHAKAALDMATNKTDANDADGLAQLAEVGFFREVRVKGFDSMLTRTLVAARTRLVRITTELSNQIRGVMKTFGLLVPAGKGSTFEKNVRNLLADRDRLASIVLPMLEAWRGIRIRAAELGRQLVRDARQSRACRILMTIPGIGAITATSFTTAIEEPDNFRKSRSVGAWIGLTTRRYQSGEVDYDGHISRRGDRPLRGLLYEAAAVILTRCSTHSTLRTWGLQLRERIGFKRAAVAVARKLAVIMHTMLKTGQLFNPNAGAAA

SEQ ID NO: 511679 - protein, 346 aa, unidentified
MSESYAGQQIVGIDLHRRRSVIVRMTETGEHLETVRILNDRERLAAVMAEAGESPEVVLEATYGWYWAADALAELGANVHLAHPLGVKIFSYRRVKNDQRDAADLADLLRMGRLPEAWIAPPATRELRHLVRHRAKLVGLRSNLKCQVHGVLAGAGVQVPMSDLFGLQGHQLLTKARLSPAERARVDSALRLVTALDFEVELFAKLVAGRLRLDPGYLAIQAIGGVGPILAAVFVAEIGDVSRFAAPAQLASWAGLTPKHRESDTKVHRGRITKQGSKLVRWAAVEAVQRVGAHTRLGQIREQVGERRGRNIGVVAAARELIVLVFYGLRDHHIRCLTQPSPSPAA

SEQ ID NO: 511680 - protein, 316 aa, unidentified
MTDNSMICAGIDVGKSHLDIALHPGRARLRVTYDAAGLKALDAFFQEHDVSRIGFEASGGYEWRLLAHLRAGKRPAARLQPAQLRFFAKSRLKRAKNDRLDAVLIALFTASLEQLPALPDARLDKLAAELTYLEQIEQQIALIKTFAETALSEAIKRRHAREVARLETCRKAHLLRLEKMVRDDCDLSQRLDLLTSIKGIGLRSALCLIIRLPELGHASRAEIAALAGVAPYDDDSGKYHGRRRIQGGRERLRKSLFMCAFTATRHNPDLASFYARLRQNGKDHLCAVIAVARKLIVLANTILSRKTEWTPQYQQK

SEQ ID NO: 511681 - protein, 460 aa, unidentified
MNRKTSKSRVDRTMPMMHPNAAAIDVGATLHMAAVRADRATEPVRSFGTFTTDLHRLVDWFTECGVETVVMESTSVYWIPLFELLDARGFTVFLVNARDAKHVPGRKTDVSDAQWLQRLHSYGLLRASFRPKGQIAELRAYVRQRERLLEYAASHIQHMQKALTEMNLQLHHVVADITGSTGLRIIRAILAGERDPEVLACLRHYSCHSSAETIAKALTGSYRTEHLFALEQALALYDAYHEKASACDVRIEAVLKELCIHRGRGIGSVAPAPRRRHRTDQANALAFDVRAALFALLGKDITTIDGLGPYLSLKLVAECGDDLSSWPSAKHFTSWLGLAPSNKVSGGKMLSSRTRRSGGRAAALLRLAAVTVGRTDTALGAFYRRLSSRIGKAKAVTATARKVAVLFYNAVRHGMEYVDPGASSYETRYRTRVVNNLHRRAKAFGFVLQPLEPKAGAVVS

SEQ ID NO: 511682 - protein, 405 aa, unidentified
MWYAGIDWADDHHDVVIIDEQGQRVASCRVAHTPEGFADLTTFLHQTLGAAPAPQELACLIETTHGLLITALLDAGWAVYPVNPKTVDRRRKPSGAKTDAIDAYLLAKTGRSDLADLRRLTPDSPLVQELKALTRDQDTLIQTQTRLVNQLTACLKAYYPVALTLFTKLQQPLTLAFLQSYPTLAAARGTSVEELAVLLRQHHHPTPDATAQALYERVHQPQLEADPITTRTKSRLLLALVSQLAPLLDQIKQYDAEITRLFLSHPDSGIFSSLPRAGKRLAPRLLAGWGDERERYGTAASVQALAGTSPVAYESGKYAKAHRRYACVKAFRNTLYQFAWQSTFEEAWAAAYYRRKRGEGKSHSMAVRALANGWVRIIHAMWLKQEGYATATFLRAQEAHASQVA

SEQ ID NO: 511683 - protein, 394 aa, unidentified
MIYAGVDIAKTDHVIGAVDERGAEMCRPMPFKNTEAGLERAVAWLEGLAGSPSDVVVGMEATGHYWMACYSFLVARGYSVAVINPMQVKAVRKLKKLDKVKNDRIDAWLIAETLRIGQYDETRLATDEVASLRSLSRYLQSLRGMAAELKTQCVCLMDAHFPEYAGIFSDMFGAGSRAVLSKSPLPFELARRRADSLARDIAEASRRGGKSAGYAARIKAAARSSIGVRLGQEAASFQVKSLIRQIEFADSECAKVEARVRALLDEVEPLVLTIPGVSYATGAQIVSEIGDVSRFRNASALVSYAGLNSSVSQSGQFDSGGGPITKHGSPYLRRALWLAANRARQYDPGLRAFYDKKRAEGKPHRVAVTAVARKLCHIVFAVMRDQVPYDPGRE

SEQ ID NO: 511684 - protein, 344 aa, unidentified
MKIKLLGIDLAKNVFQLCALNQANKVLFNRSVRRIRLCTTIAKLEPTTIAMEACSSAHYWGRTFEKMGHKVLLIPAQHVTPFVRGGKSDARDALAICEAAQRPGIHLVPIKSIDQQDIQLLHRLRQRQVQHSTALANQIRSLGREYGVIFPAGIKSLISHLPEALEDGSNELSPVARYALADQHRCLIEVRHAMTTFLHQIEQLAAQHPTYINLLPLPGIGPMIASAYIAAIGNGRQFKCGRQVSAWLGLVPRQYGTGGKIQLKGMTKNGDRYLRTLMIHGARAVITRGLKTRPELAQWIQPIIDRQGFNKAVVALANKMTRICWVIVTTGEAFDMKQAFKPVA

SEQ ID NO: 511685 - protein, 391 aa, unidentified
MIYVGIDVAKDKHDCFITNSEGEVLFKSFTIPNNREGFENLFQKVQSVSDDLTKVKVGLEATGHYSYNLLGFLLDKGLPAYVINPLHTNLYRKSLSLRKTKTDKVDAHTITSMIMSDVSLKSYSDTSYHNEELKSLSRYRFDKVKERAKLKSSVSRLVCILFPELEKLVPTLHIASVYALLSEFPSAHAVASAHLTRLTNLLSESSHGRYGKDTAVMFREAARNSIGSDMPAKSLELKHTIKLIQELTSEIDEIEVEIKAIVDEINSPILTIPGISYNMGAMIIAEIGDFNRFDSADKILAYAGMSPSTYQSGQLDNCYSHMEKRGSRYLRYALYNATKYACIWDKSFGAYLAKKRAEGKHYNVALSHAAKKLVRTIYAMEKSGLTYLPTT

SEQ ID NO: 511686 - protein, 332 aa, unidentified
MYLGIDVHKRYAQVAVMDEAGEIVEEVRVENANLDGLAQRYAGAEAALEATSNYYHIHDTLSEHLDVTVAHPKELNQIANSDKKTDRVDAKELARMVRLNSVPESYVPTDEIREARAPVRGRQSLVENRTKYANKIHGLLSDHGITEDVKPLNKEGREFLRELSLPTPWGALLESYLELIETLTEEIQELEETIEERAGSLKETQLLMTIPGVSYYTALTIYAELGEISWFDGDKSVVSYVGLNPVIRESGDSRIEGSISKRGSGRVRWLLVQAANTAVHTCNDKYLSRFYDRLASRKNSQKAIVAAARKMLVSIYYMLDRGDVYDPPGVSA

SEQ ID NO: 511687 - protein, 320 aa, unidentified
MTILDSQVVVGVDVAKDEIVVYRSDLQKPLKVANKRTSLKQWLKTLPMNSAIALEATNIYHLDTTEMAHEMGHDVYVIDGSRLNKYRDGIGMRAKTDALDAELLARYLCRESDRLRIWNPPPKAYTQLKSLLRRRAQLVRGCVALKQSWKNEPLLKEQFNQLLVAIAQFEKTIQKTLKEIAEDAGMQDQVKRCQAVEGVGLLTATAAATAFLRGEFANSDEYVAFLGMDPRVRQSGQKDQRRRLSKRGDSEFRRLFHNSAMAASRSPVWKPYYQSYLARGLKGTQALVILARKLARVMFALMKNQSEYTPNSMLGSSPQT

SEQ ID NO: 511688 - protein, 359 aa, unidentified
MNATTVAVDLAKNVFELAVADPQWKIVERHRLTRGQFERWFANRTVERVVMESCGSAHHWARWLTRLGIEVRLLPPRYVRPYVKRNKTDAADAAALLEAARCADIVPVRVKSIEQQALQSLHRIRSLWIGTRTARINALRGFCREFGLAIAPGSRVGVAQMAGVVADPGSTLPAMMRGTLTLLIEEIRLLEARIVQLEAQLTTTARQSPACATLLSVPGVGLLTATALAAATGGTVAHFKSARHFSAWLGLTPRESSSGTTRHLGRLSKRGDRYLRTLLIHGARSVLWAARAAQRTGRPLDRLRQWALALQARRHHNTAACALANKLARICYATLRDQEPFDRMRLNRKIARQTFVRPA

SEQ ID NO: 511689 - protein, 366 aa, unidentified
MQKISTMRASGSEILKGRQLTVGLDLGDRFSFYCVLDEAGEVILEQKLPTTPEAMRRAFEKMPRSRIALETGTHSPWVSRLLTELGHEVIVAHARNVRLIGDSSRKDDRIDARTLARLARIDPQLLGPVRHRSAKAQIHLTVVRARAGLVSARTALVNTARGLVKSYGERLRKCGTQQVGRELAAGLSAELRTVLGPLLEEVEALNQRIKEYDKRIEQIAKESYPETALLQQVKGVGTQIALTYVLTIEDPHRFRKSRDVGCFLGLRPGRRNSGQSEPQMHISKEGDRYLRTLLVQGAHYILGPFGEDSDLRRWGLKLAERGGKNAKKRAIIAVARKLAVLLHRLWVSGEVYEPLHNSQRVVQAVA

SEQ ID NO: 511690 - protein, 333 aa, unidentified
MQRAAGPYIDQRGAIILQQKVSRGQLERRLANIPRCLIGMEACSGSHHIGRQLQAAGHDVRLIPAQYVKPFLKGHKNDYRDAEAIAEAVQRPTMHFVAIKTPEQMDLLALHRVRSRLVSQRTGVINQIRGFLIERGIIVRQGVVPLRKALPEILSSQTGPLSPRMIGVIADLTQDWRRLDERIGGVSAEIEALAEQDDGCQRLMTVPGVGPIISSAVVAAIGNGAGFKQGRDFGAWLGLVPKQESTGDRTILGKISKHGNKYLRTLFVQAAHVVLVRRPRAAMWGLWPWIEQASKRPHRNMLAIALANKLARIAWAVLARGRAYQPRTAADAA

SEQ ID NO: 511691 - protein, 386 aa, unidentified
MVAHYQNDKFQKEFTIQNNENGYNFLLKYLNQMDSLQIVFESTGIYSRSMKKFCRLHQFDYFELNPLEAKFKTSSLRSWKTDKSDAHKLARMVHDLPATESPQAYEEIYFELRERVRFHLQIESQQNKLKTGIIEQLHQTFPGLEKLFSNRYSMIALNIAELFTHPDIVVELDKERLVEEIFNSTDKAMSRDKAEKHAVQLINIAHESFPNVDRHSFLVEKARILIKDLKSSMQKLKELAKAMIELAKQMDCFESIYSIPGIGELTAAMIVGELGDITRFYSHKQINAFVGIDVKRYQSGNTHCRDTINKRGNKKARQIFYSIIMNILKGKRHYDNHVADYYYKLKEQPYGKSHKTAVVACINKLLKTIHYLVNNHKLYDYQMAPH

SEQ ID NO: 511692 - protein, 408 aa, unidentified
MDVLYPRCAGLDLAKDTLMACVRIHRQPVQQECRSFGTTTRELLALAEWLTSYGVTHVAMEATGTYWKGVWHVLEPEFTLLLANAGHIKGVPGRKSDVNDAMWIADLLAHGLLRGSFVPPAPIQEVRDLTRTRKHLVREIAQHTQRIQKTLDSANLKITGLISDVLGVTGRSVLRALIAGDTDPERLAGLARGTLKAKRPALRDALTGCVTAHHQRLLKLHLTLIEQLEAAVADVDRQLGEALAPFREAVARLDAIPGINTTVAQAVLGEIGLDMTRFPTHEALVSWACLCRRLDESAGKRRSTRIRKGGCWLKTVLVQAAWAAVRTKDSYLRAQFLRLRARRGPKKAIVAVAASMLTGIYYVLRDGVEYRDLGANYFQTRDRSKVTKNLVRRLQNLGYRVELQEVAA

SEQ ID NO: 511693 - protein, 335 aa, unidentified
MNQFSYFVGVDIASASFMVCAGTTPWKLEVKPMKFDNHEDGYASFLLWLKEHNLTPEKTVVCMEATGVYGEGLAYFLYASGYAVAVEPPLNIQHKFPVNASKTDWLDCQYIAEYACRYVDKLTLWQPRNEILEQVKVLLTTRQQFSVQLASHKNALHAINRKKVSPKLAKQVHQDIIKQIVKFIADIDAEIRRLIESDPTFKNTLLSIPGIGLQLAAHLLIIMQDSLDPRELAAFAGICPYQHQSGTSVYATPTSRHYGPPALRKLLYLAACSVRTHRKEFKLYFLRKTAEGKPGKLVLNNIQNKLLKIACAVVRSQKPFTPNYVSVNPLLLKSA

SEQ ID NO: 511694 - protein, 319 aa, unidentified
MSDPPEIFAGIDVAKSHLDLALCNSQRSWRFSNDPEGIRAITNLLLQHQPALIVLEATGGYEQAAFRTLSAGRLSVAIVNPRRVRAFARANGRLAKTDRIDAHNLAHFAQVVRPHAHPASTEAHQRLVGLIARRRQLHRMITAEKNRLRNAHPAVRLQLQHHIDWLRQGLKELDSDVEALLQSDLELKAKADLLCSAPSVGVVTAASLLADCPEPGTLDRKKIAALVGVAPMNSDSGRKSGKRRIMGGRAPLRATLYMAALSASRYNPAIKPFYARLVGNGKEKKVALTACMRKLLTMLNAMMRDNKRWSPCPSSHTLA

SEQ ID NO: 511695 - protein, 398 aa, unidentified
MTESSDYESVQVFIGVDVGKDTHHAVAINRSGKRLFDKALPNDENKLRSLISDLKQHGQILLVVDQPATIGALPVAVALSEGVLVGYLPGLAMRRIADLHAGEAKTDARDAAIIAEAARTLPHALRTLKLADEQIAELSMLCGFDDDLAAQTTQASNRIRGLLTQIHPALERVLGPRLDHPAVLDLLQRYPSPEKLASLGEKKLAAQLCKLAPRLGKRLAADIAQALAEQTVVVPGTNAAAVVLPRLALQLITLRKQRDEVALAVEQRVLAHPLYPVLTSMPGVGVRTAARLLTEVACRAFASAAHLAAYAGLAPVTRRSGSSIRGEHPSRRGNKALKRALFLSAFAALRDPLSRAYYTRKMSQGKRHNQALIALARRRCDVLFAMMRDGTFYTPQAS

SEQ ID NO: 511696 - protein, 337 aa, unidentified
MNFVGIDLHKKTISLCLVNQEREILDRKRFFCSEPERIVAFFESVKPFRVVVEATASYEWLLALLEPLAERVVLAHPKKMRVIAESTRKSDKLDAQILAEFLALDMIPESYRPSKRERAHRILVRQRCYLSRRVTSVRNKIRRIMTNYNADREDLFTEKGLVYLSKTSVLEADRFVLDQLASEWRSYIEQMKEADKRLSSFAKDAPAKESEARAVLDTIPGVGPVTIDVVISELGDIRRFRSQKKVCAYAGLVPGQRESAGRSRELGITKDGSRLLRWVLVQAAWRLTNTTARWRSIFAGLVKRRGKKKAIVAIARRLLCVMASMLQSGRGYQAAMV

SEQ ID NO: 511697 - protein, 424 aa, unidentified
MRAIGIDVHRDFCEVAISEGGRLRSAGRVPSTPEALELLGASLSDDDEVALEATGNALAIARILEGHVARVVVASARELHAISGAKAKTDRRDARTLAKLLAAGMFAGTWLPGEEVRALRRRLAQRAQLVRARSRLKNEVQAALMRNLVGAPSATDLFGAAGRRWLADLVLPADERETLDSCLRTIAFLDGEVERFEVAIARYAMHSVEIRRLVTIPGVGLISAATLVAVVDDVHRFRCARKLVGYLGLDPRVRQSGSTPARMGHISKEGPAAARAALCEAAHAAMRTPGPLRAFGERVAARRGRQVAIVAVARKLATIAWRLLTSGEDYVYANPGQVRLKWRRVELLAGEPSQKGRRTGVSLASQHERELALAAERAYQRLVADRQAAGSRRKGAGAAPGRAPDGSSQDQAARQAQQPHRSAL

SEQ ID NO: 511698 - protein, 356 aa, unidentified
MSIVAHVHPYVVGVDTHARHHVYSVLVSSTGELLGSQKFPTTEAGLKRAMRWVVHRTRSHVEALWVIEGTSSYGAVLTGMVLASDFSVAEAPRVDSQHRAGVGKTDELDSARIARAALGLPVDKLRRPRLGKGIRQAIRILVASRELLAGESTRKVNALTALVRGNPLGIDARSALSRTQIEQIASWRMRGEDIELRVARTEAKRLARQILELDCELGANERDLAGLVQISEAAPLLQETRFGAVSAAKCLAAWSHYGRIRTEAEFASLAGVNPIPASSGNTVRHRLNRGGDRKLNSALHMVAIVKMTHDEETRKYVARRREEGKTDREIRRCLKRYIARRVYRTLNAQHELSIAA

SEQ ID NO: 511699 - protein, 399 aa, unidentified
MSASRRVVIGADTHLDTNHLAVLTDTGKPLADAEFPTSPAGYDDAVRWAQSLGTICIAGVEGTSSYGAGLTRVMQAAGIEVAEVSRPDRAARRRRGKSDPLDAYAAARAALAGDRLAVPKDEHTTALRALLSARRSAVKAHTAATNQLHALLVTAPAELRERYRRHHTTALVAALAQCRPATHGDPTTAAVLTAAKALAQRVKFLEQQRQDLTAQLDGLVGQINPALRAAYGVGPHTAAQLLVTAGTNPHRLRSEASFAALCGAAPVPASSGTITRHRLSRGGDRAANNALYRIALVRMSSHSQTRDYVERQVTKGRTKKEILRLLKRAIAREVFRLLTRPGPVDDYRDLRAARQAKNLTLAAVAQHFGVPIITISRLERGHQRNDTLANHYRQWLTAA

SEQ ID NO: 511700 - protein, 347 aa, unidentified
MNFYTKQHKFYCGIDLHTKNMFVCILDTSGNVRVHQNIHTNQEAFLHIIAPFREDIVVAVECMFTWYWIADLCIQENISFVLGHALYMKAIHGGKAKNDKIDSLKIATLLRGGMIPQSYVYPARMRATRDLLRRRNHLMRKRAELFAHIQNTRSQYNLPDPLGCIAKPQNREGIVDRFADPSVQKSMAVDLEMIEAYDHILTQLERDIIACAKEHDLRSYVLLQTISGVGRILGLVLLYEIDSIERFPSVQDFVSYCRLVKCIKESNGKKYGSSGKKIGNAHLKWAFSEAAVLFLKGNEPAKKYLQRLARKHGKAKALSILAHKLGRAVYFMLKNKEAFNQKKFLGL

SEQ ID NO: 511701 - protein, 344 aa, unidentified
MKNSNVIGIDLAKNVMQVCIIDKHGELLSNKAISPGKLKILLANNIQSIVAMEACGACHYWARLAQKYGHDVRVISPKKVKAFLQGHKTDANDALAIAIASTQFGMNFSQIKSEEQQSLQTLETSRKFLSRELIALNNHIRAYLYEYGITMNKGQKGLREAIVVVLDDGDTRLPMCLKNTLRLLWERFQLTVAQFKDTEKYKAHLVNQIEPCKRLMDLEGIGKVCASMLYVNIGDGREFKNGRQASVYIGLTPKQHSSGGKTYMRGIDKHGGNKELRAALYQGALSIISKLPCEPRTVKEAWLIELVKRAGIKRACIAMANKTVRTAWALLATGKSYQPVLLSK

SEQ ID NO: 511702 - protein, 352 aa, unidentified
MLIIGCDFHPGFQQVAIFDNQTGEYQEKRLSHRQEAEQFYRSLAGQKVRVGMEACGHYPWFERLLAELGIELWVGDAAKIRASVVRQQKTDRRDAEQVQILLREDRFPRIWVPSLEERDVRQLLVHRHKQVQARTRTKNQLQALALSQGVQKKRKLWSVAGREELEKLELLPYAALRRERLLAVLDQLEVEIEKLNRQVEEEVKQRPAAGKLMTHPGVGPVTALAMVLTLGPAERFESGRKVGSYFGLIPSEHSSGGRQQLGRISKQGSSFLRFLLVEAGQSAARYDAELGRFYRRLAVRKHRALAKVAVARKLATRLYLMLRENWNYAQLCKAVVQASPSHSVDGRQKPSV

SEQ ID NO: 511703 - protein, 316 aa, unidentified
MTTTAVVVGVDVAKDRLDVAVRPSGEVWSEANDETGITTLVARLRPLGPALIVCEATGGFERAAIAALAAAGLPVVVANPRQVRDFARATGQLAKTDQLDAGILALFAERVRPTPRPLPDAAAQLLAAVLTRRRQLLEMLVAEKNRLGFAPKPLHRGIQAHIRWLERQLDDVTKELAGLIEASPVWRAKDDLLQSVPGVGPIVSSTLLGELPELGTLSHKQIAALVGVAPLARDSGTLRGKRLVWGGRASVRTALFMAALCGRRWNPQLKVFYERLKAAGKPTKVALIACARKLLTILNAMMRDQSRWTSNLQYSC

SEQ ID NO: 511704 - protein, 341 aa, unidentified
MEKITTIGLDIAKHVFQVHGINGAGATVSRRKLRRDDVVGFFKALPPCLIGIEACATGHHWARVLMALGHEVRLMPASYVKPYVKRQKNDATDAEAICEAVTRPAMRFVPVKSEEQQSVLMLHRVRELLIRQRTMLVNALRGHLAEFGIVTRQGIAGVGMLIALVDDDDHDLIPPLARSALLPLIGQLREVHEKVSELDRQIHAWHRSNELSRRLETIPGIGPITANAIAATVTDASLFKSGRQLAAWIGLVPRQNSSGGKDRLGRISKQGDPYLRRLLVVGAHAVLRFSGKAKVAPTRWAAELLVKKPYNVVAVALANKMARIVWALMTTGRRFEATAAL

SEQ ID NO: 511705 - protein, 352 aa, unidentified
MNEKYVAMDVHKASVAIGIRDGDGKYIMESIVETKASTLVEFVKGIRGTIHLTFEEGTQSAWLYDLLKPHVAECVVCNPRKNKLLDEGNKGDRIDVQKLSELLYLGALRPVYHGDHGTRALKELARNYESLIGDRTRVKNRLKAIYRGRGISCEGDEVYNLRKREQWIMRLAERGVRQRATSFYSQLESLNALVAAAQREMLAESRKHKAAAILRSLSTLGPISVAMIIATCDTPHRFRTKRQFWTYCGFAVVTRSSSDHYFEKGELRQRRKPALTRGLNRNYNRRLKQVFKSAATSGTRQGPFKPFYEQLLARGLKPDLAKLTLARRIAAITLAMWKKGERFDPKKLKVNS

SEQ ID NO: 511706 - protein, 385 aa, unidentified
MPEVDDLSRCLATLDQDGTLLAVVEMSQSSWLVAGMVPGVERRPLKKLDPDPAALLGLIERWRSEAEKAGHPVGRTALAFEAGRDGFWLARWLLERGIEVHVIHSTSVAVTREHRRAKTDRLDTAMLMRVFLGWLRGERGHCRMVATPTLEQEDAKRPSRERENLVGERTRIINRMKGALARLGIRGFKPELLRAPEKLATLRTPEGQPLPPNMLEEMRRDMTRLGLVRDQIAEIEQARLARLEQVPPSESQAMMALLARVVGVGIETADMLVQEVFSRNLRDRRAVARYAGLTGSPDESGSKRREKGLAKAGNARVRRGLIQLAWRFLWFQKDSGLAQWYQARTAQGARRTTMIVALARKLLIAFWRMVTVGEIPAGVTLRSAT

SEQ ID NO: 511707 - protein, 453 aa, unidentified
MCLEDRPVLEPNAAGIDVGAREMFVAVPPGRDENPVRVFATFTEDLERLTDWLEQCGVTTVALECTGVYWIPLFEILEQRGIRPCLVNARHMKNVPGRRTDWHECQWLQFLHSVGLLRAAFRPGQDVCAVRTILRHRNELVAAASQHVQHMHKALTQMNLQIHHVISDITGLTGRTIVDAILAGQRDGAELAKLRDPRIKADTETIRKSLEGNWRPEHLFTLGQSRDLYRIYQQQIVNCDLEIEKMLHDFEPRTDPAERPLPPDRKRNRAGSKRRRKNGHPHPEFDLRTEAYKLFGVDVSQIPGLEENALPLFSEVGRDMSRWPSAAHFVSWLALCPDNDISGGKLLWRGARRVKNRAGHLFRMAAYALHRSLTPLGNYLRRMKAKLGPQAATMATAHKIAVIFYTMIKNQVEYDETIWDARDAQREKKLQAKLKRQAKQLGYELVPIEPQAA

SEQ ID NO: 511708 - protein, 352 aa, unidentified
MPFYIASDFHAHQQTVAWCDTETGEIQITTLKHNLEQVRAFYACLPPGIVGVEASSKARWFEDLLAETDHQLVVGNPVLIRRRATSRHKSDRRDAELILQLLLRDEFPSIWRRSREQTQVLDILKLRHSLVRQRTQIYNRLQALAKSCGLGKARARTTAFQERFKVTDLDEVEALQRSQLLQLIGSFDGQLKELDKWLANRAALDPQVQLLLTQPGVGNLTALALVNSLGDLSRFTRPTKQVPAYFGLDPLEKESAGKRQAAGTSRAGSTITRFLLGQAAQSAARRDPQLKAFYKRLAKKKPKGVAKTAVARKLLIKLVIMLRDTITAEEFDQRGGTSAGGSKSPWIERSVI

SEQ ID NO: 511709 - protein, 354 aa, unidentified
MRTSGKNIFEGQLTIGLDLGDRSSAYCVLNAAGEIVLEHKLATTPEAMKQVFGSLPRCRIAMETGTHSPWDSRLLMALGHEVIVGHAQKVRLITKSRKDDRLDARTLARLARIDPELLSPVKHRSAQAQLHLTEIRARAALVSTRTALVNAVRGLVKSYGERLRKCHTQQVGREMTRELSMGLREALKPLLQEVESLNERIKEYDRRIEKMAKEMYPETALLKQVKGVGDLIATAYVLTIEDPHRFRKSRDAGCFLGLQPGRRNSGESEPQMRISKEGDEYLRTLLVQGAHYILGPFGEDSDLRRWGQKLSGRQNECAQAPRDYRRCDGPHREGHEHFHRQQRAHCPCNPWRIR

SEQ ID NO: 511710 - protein, 418 aa, unidentified
MIDDVQWFVGIDWATQSHRVCLLDVEGRHVNERDFAHGGAGLTELRDWLLEKTKAAPGQIAVAIETPHGPVVEMLLDHAFLVFAINPKQLDRFRDRFTVAGAKDDSRDARVLGSGLRTDRQAFRRLVVDDPVVIELREWSRMADELQQERTRLANRVRQQLWRYYPQASELTDDVADDWFLALWQQVPTPATAAKVSEQAITRILKDHRIRRLDAATALQTLRKTPLFVAPGTTEAACAHIRNLAARLHLVNQQIKEAHRALDGLCARLEAATENPSGQIREQHDVTILRSWPGIGRIVLATLLTEATEPLRARDYHALRALAGTAPVTRRSGKQCFVIRRLACNKRLQNAVHHWSCVAIQHDTAARRRYDALRRRGHGHARALRTVGDRLLYALCTALKRQTAYNPNCQTAQVTASP

SEQ ID NO: 511711 - protein, 388 aa, unidentified
MYYVGIDIAKYKHDCYICTSEGVTVLESFSFDNSNTGFKELQSALDHLDHSQQIKIGLEATGIYGKNLKLFLSSIGYDFHEFNPLLVKRFHDSLSNRKTKTDKIDARIIALYLSTGASRTYLYSSYHTQALKQLSRTRNKLIRSRSDQYVIITNVLDVEFPEFKAFFHNKLSDTALFLLNKYKTVDRMKRLTHQDCVLLHNKSRRIPTSSFEELRDLAKHTIGHHFNYNDLILSSALQIVNTLERQIESIEKEILAIMEELRSPIDTIPGISTLSAATILGEFGDFSKFSNPKQLCAFCGVEPAIYQSGTSFHNGRMVKHGSSELRYVLFNAVPYLVIHNITFREFFYKKLHEGKNYRVAQSHVVKKLLRVIYHLELTGESFDPTFLY

SEQ ID NO: 511712 - protein, 282 aa, unidentified
MDNFYFIGVDVSKKKLDFCVLFEGKVLREEQVSNHQQAVARLIGELKNDLEMDNEQFLICAEHTGQYTFPLVCACKSVECKLWLENPSQIKYSSGMQRGKNDKVDAKRIAIYASRFGDKVKYYDRPTEEIERLKQLERERALYVTDLAKYKGQMYDQKDFMPAALYRKKTKRMKGLIQELQAAIDAITAEMEKIIGSTEVLARQMELLMSIDGVGKVVALNVIIETEAFSRFDNPRKFCCHAGVAPFSYTSGSSQHSKNKVSHRANKNIKKLLHMAGAQPYR

SEQ ID NO: 511713 - protein, 348 aa, unidentified
MAHFVGLDVSVKETSVCVVNDAGKVVLEQKVPTEPSDIIALLTSLGATYGRIGIEAGPLSQWLVNALTAAELPVICVETRHMKALLTAQQINKTDRNDARGIAQMMRVGLFKPVHVKTLVAQEQRMLLTSRKLLQRKLLDVESDLRGTLRNFGLKVGVVSGARYEARIRELVVGFPRLAAIAEPLLSVRRVMRQQLAVLHKMLLDTVRDDPVCRRLMTAPGVGAVVALTYRATVDQPQRFVHSRAVGAHVGLTPKRYQSGETDYDGGVSKCGDALLRTMLYEAAQVLLTHGSKWSWLKAWGMRVAQRRGIRRAIVAVARRLAVVLHRMWVDGSEFRWSKDSAAAPTVA

SEQ ID NO: 511714 - protein, 470 aa, unidentified
MTGDVHWLVGIDWASQKHQVCLLDLDGRVVGEREFDHEGTGLSQLCNWLIEQTKALPGQIAVAIETSHGPIVEMLLERGFQVYSINPKQLDRFRDRFTVAGAKDDSRDAHVLADALRTDRRAFRRLSVENPLLIELREWSRMLEDLKQERNRLSNRMRAQLWRYYPQALEIADDLAANWFLDLWQQVPTPAKAARVKQAKIESILKANRVRRFDAAEVLRVLRQKPLWVAPGTTEAACAHIRTLTARIRLVNQQIAEANRQLDELCDKLEAEADNAPGQQCEQRDVTILRSCPGLGRINVATLLAEAPEPLRRRDYHALRALCGAAPVTRRSGKQHIVVRRFACNKRLQNAVYHWARVARLVSMIQSASAATLRCAAEDIVMAAHCVVSLIGCSLSYARCCGGKRSSIQTMPARKWPVHDWSFLCPTETAIPSSRPADRHSAARRRCPGCPLAGTGAAGAKRPGQGRARR

SEQ ID NO: 511715 - protein, 373 aa, unidentified
MSEFNKFVGLDVHKSTIAISIASDDGAEVRYFGEIKNTKEALINFANKISQGSLKLSFCYEAGGCGYEVYRHLRNIGHDCMVVAPSLIPKKAGQRVKTDRRDSLNLARLHRAGELTGVWVPDAMNEALRDLTRAREDMKHLQRQAKQRLLAFLLRHGWTYSGKSNWTKDHFNWLETVKFQHAAQQIVFQEYVDTVKYCGKRVESVTQQIEICSRESACWPVIESLMALKGIDLISAATIMAEIGDLTRFDSAPQLMSYLGLVPSEHSSGSSVRRGGITKTGNSHVRRVLVEAAWTYRFPARKTAHTQKRAKVTTEAVQEISWNAQKRLCQRYKELNANGKIKVQTCTAVARELAGFVWAIGQTVPLKPTANVQ

SEQ ID NO: 511716 - protein, 365 aa, unidentified
MTTIARAPEQVSNPTSPPFTDVIGGVDTHADTHTAAVVDAAGRLLGSAQFPTTAVGYRALLGWLRGFGQLVLVGIEGTGVYGAGLARFLAEQGVAMVEVDRPDRKVRRFAGKSDPIDAEAAARSALSGRQSGTPKNRGGAVEALRVLRVARRAAVAHRADVQRRLHALVVTAPETLRAQLRTLPLRALLETCANLRPDRARLGDPTQATKHALRLLARRHHALSTEIADLDAELDDLVAQIHPRLVRVNGVGTETAGQLLVTAGANHQRLRSEAAFAALCGVAPVPASSGRTHRHRLNRGGDRAANCALWRITLCRLRHDPRARAYMARRTTEGLSKTEIIRCLKRYIAREIYYVLTGPPALDAP

SEQ ID NO: 511717 - protein, 412 aa, unidentified
MRHRKEKYIYVGVDLHKRMHTAVVINCWNEKLEVIEFENKPSAFPAVVNKVKKHVQDGMTIVFGLEDVGGYGRSLAVYLVENHFLVKEVNAALSNWKRRSYAMTEKHDSWDAENIAKLLLDELDRLPTAQPHDDYWILKQLVMRRYSLRDTLVMLKNQLHTQLSYNYPSYSKFFSELDGRTALAVWHEYPSPYLLEDVTLEALAEFLRKNSHNVCSTKKATLILASVQADRNTKRSGQEYRDFLVRSHVNQIRDVQREMNEVEDNIRDMMQKLDFKLNSFTGIDNVTASAIVAEIGDIARFTSADKLAKYAGLTPSQMSSGGRGKDRNQRQGNRALNKILWGLAVRQVQTAGTSKKPLNPLFHAYYEKKLSEGKKKKQAIICIMRRLVNILYSMMKNKTEYRLASLPESLAS

SEQ ID NO: 511718 - protein, 365 aa, unidentified
MKNNTIIFVGLDTHKEFTEVAYCEDQRGSEVKHLGRVSSAKVSLTKMARQFESKYPQATLHFVYEAGPCGYWIYRLLTSLGHCCYVVAPSLIPKKPGQRVKTDKRDAQDLARLVRNGDLDPIYVPEPADEAIRDLSRARERAMHDLNNARFQLKALLLRNHINYSGKSNWSLKHLRWLTEIILPHPSQQFVLQEMIQTISERNARLERLDNELAHHVKQWRYYPVVKAIQALRGVRLLTATGVIVELGDLTRFDSPRKLMSYIGTTPSEHSSGGKRHLGAITKCGNGRARRLLVEAAHSYRYPAKISKELQLRQEGLPKEVIDQAWQAQQRLCRRYQRLIHKGKHRSVVVTAIARELIAYIWSIS

SEQ ID NO: 511719 - protein, 325 aa, unidentified
MGLNTEQIQPQLIRFALGFDVSKATITFFDTHSGEICTLENSKVALKAILKPYAGRLDTLAICEATGGYEDNLLDVLEDLAIPAHRADAARVKAFIRACGANAKTDAIDARHIAEYGLSRAQSLPRWRPSQPREAKIKLLVLRRTDLVSMRVQEENRLKAPRNKPIARDIAGHITEIKRRIEAIDKQIETIMSLDKRLKDRKAILQTVPGIGKVIAPVLLALMPELGHIDRKQAASLAGCAPHARDSGARKGRRFTKGGRRQLRPLLFTAAMAASHSKSHLATTYKRLLAAGKSKLTALGAIMRHIIVIANARLKEYHIAQIQLT

SEQ ID NO: 511720 - protein, 321 aa, unidentified
MMARQIVGIDISKATFDAAWRTGDASSWRQFHGQQQPDVYAALLQAAPPGAVFVMEATGIYALRLAHWLYAHGQKVMVVNPLVIKRFTQMRLIRAKTDRVDAQQIARYGEQANGPLWRPREVLFTELNQLDSWLDDLLRQRTRVANQHEALGHCPDASSLALQQQQALIDYLSQQIATVEMAMQTLVESCAGELYQGLLSIPGVGPKTAIRLIGVTEGFTRFTTVKQLVSYVGLSPHPYESGTSIKGKGHLAKYGMGRMRQLLYLCSWTARRSNPACAALYNRLKAQGKPERVIKCAVAHKLVRQAYAIAMRGGIFDPEKA

SEQ ID NO: 511721 - protein, 580 aa, unidentified
MEQDATPSGWFREPETLAEGPALASALESEPQRDSAAKADKPPGAFLPAMEHGPGIDDCVDGGGLVLKKDKSPTPLERMCEFRHPGRVALNSTFDRTAMKPNQQEQHEKTPGRLSPMAWQQMNRKQRREWTRKMQAEEISLQVINPDAAGIDIGNEAHYVAVPPSRDNQSVRRFGCTTAELKDMAAWLKKYRIRTVAMQSTGVYWIAVYDLLEEAGFEVYLVNARETRNLPGRKSDVQESQWLMKLHTYGLLRNSFRPSQEVRTMRTYWRQRNDLIRSAGRHIQRIQKALTQMNLQLANVLSDVSGVTGQAIVKAILAGERNPWKLAEFRDKRVKASEEEIARSLEGNWQEDLLFLLKQEQDGYEFCLRQMAECDERLQQYLKQRKDRSAGASLPEEKRKERLRKKKENKPRFDLRAELFRMTGTDLTRINGIDVRTAATVISEAGWDMSKWRTEDHFVSWLRLCPDNKVSGDRVVGKGRLPTNNPLTVALKMAASCLRQSNSYLGAQFRRLRTRLGPPVAIKAMAAKLARLVYRMLRYGMQFVDRGAEFYEARHRQREINSLRRRAANLGFQVTELTST

SEQ ID NO: 511722 - protein, 409 aa, unidentified
MSVFCGIDWAEGHHDIALVDADGQLVAKRRILETVAGFAELTEMLAVAGDSAEAPIPVAIETPRGLLVAALRATGRRVHAINPMAVARYRERYSVARKKFDHINAMVLANILRTDAHAHRALPEDSELARAIAVLARAHQDATWRRTRVSNELRSLLREYYPAFLAAFKGQTSGLTSREARALLRIAPDPTAAARLSRPQIVAALRRSGRRRCVDDLSIQIQQALRRPHLQHPGLVEQAMGEQALALLATLDAECSNVDRLGEAVTQAFQQHPDHAVITSFPGLGDTLGARVLAEIGDDRNRFTDARAVKAYAGSAPVTRASGKSISITHRHVKNNRLAATGFSWAFMALTNHPPAREHYERRRTTGDKHPAALRHLFNRMIGQLYHCLQSGQEYDPAKAFSAQLPTAA

SEQ ID NO: 511723 - protein, 334 aa, unidentified
MQFNNFIGIDISKNTFDLALIKDNNASIFISDAFSNTHSGLVHLEEFLKKQGLKMEETLFCMEHTGIYCRLLSQYLTERKYAVWLEMPVKIIHSLGLQRGKNDRLDAKRLAEYACSKKGKAVLWDPPREVIIQINDLLTLRDRLVESRKSLKQPIKELRESGFTDAAELIESKCKITLNAIDKEIKQIEKELDDTINKDTNLKKLYRLATSVPGIGKITAMFLLYFTNEFKLFGNAKQLACYCGVAPFEHSSGTSIRGKTRVSHFANKKLKKLIHLVALSTISRNKELSVYYTRKVAEGKNKMLVINAVRNKILHRLCAVIKRGSPFQSEYQFA

SEQ ID NO: 511724 - protein, 377 aa, unidentified
MKEQDFVPREFEIFGGLDVDKKSIAVTFMSHQGVLQSFSVPYRAEHLLNYVSKHFAGKKVAFAYEAGPTGWGLYDTLTAEGHPCVVAAPSMIPKVPGQRVKTNRLDSQKLSEHLRGGQLKSIHVPTEPYRQLRHLTQLRDTFVKDVVAMKLRIKGLLLFEGIEFPQAPAGSQWSALVRGKLKQLPCSGSVRFKLDRLMESLESSEKHALQTIREIRRFCQQDAELAHAIEYLKSIPGIGEIVASHLLARTGDPDNITNVRQLGGFIGLAPREHSTGDRIARGGIMRTGDGRLRSKLIQAAWSAIRQDPELREFYRSVYQRHPRDRAARKAIVAVARKLTTRIYAVLKEKRPYVVREKVCSAPLTQEETSPQGTTRRP

SEQ ID NO: 511725 - protein, 337 aa, unidentified
MALYCGIDLHANNSVIAVLDEQDKARYEQRLPNELSQIITALQPYQQELVGCVVESTYNWYWLVDGLMDAGFPVHLAHTGAVPQYAGIKYTNDESDARHLAHLLRLGILPEGHIQPKAQRALRDLLRRRLLLVRQKTLHHLSLQSLIARYTGQRLSANEIKQLDIKAIADRLEDPIALGGQVTCLARRWLEDAIALLEHEIQKQLKPRLEYQLVTTMPGIGQALGSTIVLETGDIARFPSPGHYASYARCVKTERISNSKLKGRGNSKNGNKYLAWAFMEAAHYAAIWSPPIKRYYQRKQAKSHILVAKKAVANKLARACYHMLSRQESFDVNRAFG

SEQ ID NO: 511726 - protein, 339 aa, unidentified
MKVSTLGIDLAKNVFQLHGVGCNGQTVLKKKLTRDKFLPFLMQLEPCLIGMEACASSHHFARVLRQYGHEVKLIPPQYVKPYVKTNKTDAADAEAICEAVARPNMRFVQIKTAEQQAILVLHTEQNILIRERTACANSMRAILAEFGIIMPRTLSQLYKKIPEILEEYDNELSPFVRCSVARQLEHLQGVEDQITFIEQELSRWAKTQPACQRVMKVPGVGLMTATYLVASVGNGQQFHSAKQFAAWLGLVPREFSSGGKQRLGRISKRGDRYFRYLLVHGARAVAAVIERHKDNMPWLYRLLNKKAYNVAVVAQANKTARILWSMLVHHTEYRTLSAV

SEQ ID NO: 511727 - protein, 412 aa, unidentified
MTATNPFAAHVGLDWADKKHDVCVQFKNGERVFHVIEHTAEALDVWLTELHQKVKGRIAIALELKKGPVVYALQKYPFITVFPVHALSLARYRQAFSPSGAKDDPQDAELALELMLRYPQKIKAIEPDNADIRLLQQLVEQRRQLVEDKRRFVNRIINTLKQYYPQPLEWFSHRGSLLLCDLIIRWPSLQQLKRARRETIRNFLNAKGGRAMALTEHRVVSIDNAIPLTTDPSVIEANALMATALATQIKVVSEIIKTYDERIETLFDTLPDAGLFKSLPGMGPCMGPRMLAALGDNRDRFNSAEEIQNYAGIAPVTERSGQKSWVHWRWQCAKFVRQTFVEWAAKTVNSSYWARLYYQGQREKGKSHQSAIRALAFKWIRIIYRCWKTRTQYDEAKYLLALEARHSPLLKP

SEQ ID NO: 511728 - protein, 391 aa, unidentified
MILVGIDVAKDKHDCYIMTSEGEVLFKSFTIANSMEGFNQLYEKILSVTDNLDKVKIGLEATGHYSYNILGYLLDKGLTPFVINPLHTNLYRKSLSLRKTKTDKVDSRTIASMLMSDVSLKPYSDTLYHNEELKSLTRYRFDKVQQRAKLKTSISRLVTILFPELEKLVPTLHMKSIYSLLYEFPSAKAISKAHLTRLTNLLYASSKGHYGKEKAVSIREAAINSIGSYMSVKSLELKHTIKLLEELTLEIDEIEKEIKSIIDKLNSPILTIPGIGYSLGAQIIAEIGDFKNFDSPDKILAFAGMSPSTYQSGKLYSSNAKMEKRGSKYLRSAFFTAAVCVCRIEPTFALYLAKKKAEGKHQYVAISHVVKKLVRLIFHLEKTGEHYVALT

SEQ ID NO: 511729 - protein, 322 aa, unidentified
MTQENRFVGIDVSKAQLDSAVRPTGERWTSPNDEPGIAMTIKRITAMGSTLVVLEATGGMEIPLAGALTAAGIALSIVNPRQVRDYAKATGRLAKTDRLDAEILARFAEAVRPEPRPLPDAASAELAALMGRRRQLIEMLTAEKNRLGSASRRVRQNIQVHINWLERQLSQLDGDLADLIQRSPIWREKDDLLQSVPGVGPVLSSTLLANLPELGALSRRQIAALVGVAPLSRDSGTLRGKRTVWGGRAVIRQVLYMNALIATRFNPVIRTFYQRLCKAGKAKKVALTACMRKLLTILNAMVKHKTPWRMTPQAQPAGTGKA

SEQ ID NO: 511730 - protein, 370 aa, unidentified
MSQSRTLFIGMDVHKETIAVAYVAQDHGAEVTYLGTMGTRQCDIDQLVRKMQSKAKHLIFVYEAGPCGYWLYRYLTKKDSPCWVVAPSLIPKKAGDRVKTDRRDAMPLARLARSGDLTLVSVPKVEDEAIRDLSRAREDTLSDLKDAKLRLQAFLLRHDIRYTGRANWSPAHLRWLSEVVCPTPAPHIVFQEYVRAVTEHTARLRRLEHELHEHVQSWRLHAVVEALQALRGVQCTVAVTMVAAMGDLSRFDTPRELMKFLGLVPSEYSSGDRRQQGSITQAGNTHARRALVEGAWAYRSPAKVSRHLQLRLEKHPTIIQDISWKAQVRLCQRYRRLVARGKHANVVTVAIARELAGFMWAIAKEIPIIP

SEQ ID NO: 511731 - protein, 332 aa, unidentified
MYLGIDVHKRDAQVAVMDEAGEIVEEVRVANANLDDLAQRYAGAEAVIEATTNYYHIHDTLSEYLDVTVAHPGKLTLIANADKKTDRVDAKELARMGRLNSVPESYVPTDEIREARALVRGRQRLVENRTDYANKIHGLLSDHGITRDIKPLSVSGRESLRDLSLPAPWDELLASYLAMIETLTEEIERLEATIEERAGSLEETQLLMTIPGVSYYSALMIYSVVGEIARFDRDKEVVSYAGLNPVIRESSDSRIEGSISKRGSRQLRWILVQCARTAVHTCKDEYLKQFYDRLAGKKGSQKAIVATARKLLVSIFHMLDREEVYNPPGVSA

SEQ ID NO: 511732 - protein, 406 aa, unidentified
MNYLGIDVSKSNSRYVLLDNDGEKVAKSFTLENNQQSFTKLLERLKELNLQPDGLLIGIEATGIWWENLYCFMTEQKFQVIVLNPHQTNKFREALRLKAKTDDIDAYVIAGLLRSGEYAASYIPEETIQILREIVKLRHQLVTNRQSFERQAHALLGLLFPEYEKTAIKNPFTVSSLAILKAYPTAKHLAEAKPKNIEKIVRSIVGNNFNIAEIQTLIETARNSIYSGRAKDARGMNLNIILTHVETLHNSIAQLDKRMDDILSPQNSNDAMSFPGANLLSIPGVGPKTLAAILSVVGANGSAYPDGKSFIGYIGFFPQIYESGETRRDNIISKRGPNYIRRALYLSAVACLKHNAELKSFYDVKISQGKKPKQALICVAKKLAHMCLSMLKSGEFYTPTRVFMPA

SEQ ID NO: 511733 - protein, 351 aa, unidentified
MSQILNAVIVVMGIDIGKNSFHVVGLDQRGAIVLRQKWSRGQVNARFANMPPCLIGMEACVGAHHLSRELKAFGHDARLMPARYVRPYSKGQKNDFRDAEAIAEAVQRPTMKFVATKTADQLDLQALHRVRERLVSQRTGIINQIRAFLLERGVAVRQGLRFLRAELPRILATPPDVLSPRMVRVIEDLAGDWRRLDERVESLSSEIETVARQDAGCGRLMSVPGIGPIISSAMVAAIGTGDVFSKGRDFAAWLGLVPKQISTGDRTILGKILKRGNRYLRVLFVQAAWVVLIKPKSWERHGLKHWIEAAKKRMHRNVLAIALANKLARIAWSVLAHSRSFEARPATASAA

SEQ ID NO: 511734 - protein, 339 aa, unidentified
MKLYAAIDLHANNSVLVIMDEEDRVVHEQRYPNELPGILAQLAPYKKKIQGIAVESTYNWYWLVDGLMEAGYIVKLVNTAAVKVYEGLKYTGDEHDARHLAHLMRLGLLPTGYIHPKEERAVRDLLRKRAQLVRCRTTQILSIQAMVSRNSGKRVNADGVRKLDEAVIEGICGGNPELAMAIQGNLSVMHCLDEQISRIESVVLKQAKLKPEFKMLLTVDGIWHTLGMMIMYEAGDMARFETVGQFASYARCVNSTRWSNGKKKGEGNRKNGNKYLAWAFIEAAHYAARYNERIRNYYDRKAKKTNKFVAAKAVAHKLARACYHVLKEQTPFDEARAFV

SEQ ID NO: 511735 - protein, 346 aa, unidentified
MEHYAGMDVSLERSSVCVVDALGKIVKEAKVSSEAAAVVAFFEALGFAVKRIGLEAGPLSQWLHAGLKGAGFEAVLLETRHVKAALSAMTVKTDRKNARGLAQLIRMGWFRPVHAKSMRSQEVRALLVARKQLLGRLIDVELSIRGILRGFGLKVGPVTRKGFDARIRELVTGQATLERIAGAMLSARVALKAEYEKLHKTVLAIVRDDAVCRRLMTVPSVGPLVAITYKSAMDDPNRITKSKAAGALFGLTPKKYQSGEKDVTGGITRAGDEMVRTALYEAANVLLARITRFSKLKRWAMDVAKRRGSKRAKVALARKIAVILHRMWVDGSTYRWTEMQPIAAQA

SEQ ID NO: 511736 - protein, 315 aa, unidentified
MSENKVEVFVGIDVCKSTLDVRIEPPGESFQVANDDAGIRGLCTRLSELAPTLIVMEATGGLETRAAGELAARGLCLAVVNPRQVRDFAKASGQLAKTDRIDTQVLCGFARAIRPAARPLKEALTQELDGLVTRRRQLVEMRVQETLRLQGASKVQAKSVKAHIGWLDKRIKSIESDLGTRLRSCDAWRVKDDLLLSIPGVGEITSRSVLSRCPEIGRLNRREIAKLVGIAPLNNDSGKYRGQRHIWGGRADVRSVLYMATVSAIRCNRVIKAFAERLKSAGKAPKVVIVACMRKLLTIMNAMIKSNTPWTPKIA

SEQ ID NO: 511737 - protein, 328 aa, unidentified
MGDSKGTEVKRSRFPTTCEGLDEFASELPEGAKVAIEASTSGIFAYEYLDERGIEVHLAHPVYVKPFAKKHVKTDKVDARVLAQLLRMDYLPESYVPGKEIRDQRVMIRHHASPVRLRTSIKNRVHALLAIEGVQTSEFSDLFGKKGMEFLRRVKLRQVRREALDNYLEVLKALEERIEEMEAILKERAKITDEAKWLMSIPGIGYHNALLILSELGEIERFSNPRSMVSYSGLAPKVEQSGDYKRYGHINKHSNGFLRWAFIQSARAAVRSSKPNRFQKIYNKIKARRGEKVAIVATARHLAESVYWVLTRKEYYKENKAIRASYFS

SEQ ID NO: 511738 - protein, 346 aa, unidentified
MLYAGLDLSRKRLDFHLLDAEGATVDVGASPPDADGLDRLTERLERHGAPIRAAIESMNGARFVHDRLELHGWQVEIADAQKVKGLAPLACKTDRIDAWVLAELARRDLVPTIWLPDPLVRAERERARWRLHLVRHRSSLKQRVHAVLLTHGKPCPVSDLFGVRGRQLLAKLGLPEPWQGTIEASLRLIDELDREISECERELRRLGADHHYVPLLCTVPGIGWVLAYTIAAELGDISRFPTPRKLAGYSGLCPRVYQSGERDLRGPLSKQGPRYLRWALVEAATHACTHPAYRHRYQQTKARIGKQRGAKVAQIDLARRLAEAIWHMLSRGEAFAPKGATDPLAA

SEQ ID NO: 511739 - protein, 370 aa, unidentified
MEEGIKFFVGLDVHKDTIAVAVAETGRAPARLVGSIAHDVNQLLKRLARYGEPAQVHVVYEAGPTGYGLQRALARRGYQAQVIAPSLIPKRAGSRVKTDRRDSLRLAELSPAGELRAVWIPDPADEAIRDLARAREDAVNARTQVRQQLKGFLLRHDVRYARRTSWSKTYYRWLATLNFGETGVQTAFTAYWQAVSAADERVGRLTTALVGSIAGWRFASIVAALQALRGIDQINAIGLVAEIGDIGRFAHPRPLMSYLGLVPTEASTGERVVRGSITKTGNAHARRLLTEAAWNYRFQPRIGMRAQRRAEDLPQAIRDVAWKAQLRLSGRFRRLHTRGVHLNKVCTAVARELAGFVWAVARARSELPQS

SEQ ID NO: 511740 - protein, 341 aa, unidentified
MDIHTIGVDLGKTIFHLVGLDWRGEVVVRKKFSRAQLLRFTANRHVQLIGMEAWGGSHFLGKALPEQGHEVRLIPPQYVKPFVKTNKNDFIDAEAIAEAVGRPSMRFVPIKSDDQLDLQSVHRVRERWVTRRTAVVNQIRGLLLERGITVPKGRCHLEAALLPILTGAEAKLSGTIRLLVSQLKLELDQLTVRLEETDALIQQTAQENDACRRLDAIPGIGPVTATALLAAIGNGIAFHKGREFAAWVGLVPREHSTGGKQKLLGISKRGNSYLRKLFVQGARAVLQFREKQSPGLKAWLAKLSSRTHYNVVGVALANKLARMAWAVLARGDVYRPPVLPC

SEQ ID NO: 511741 - protein, 344 aa, unidentified
MKKVVAGIDLHSNNVVIGIMDMDGKRVANQKVSCELKEVAKVLAPYEKRLEQIAVESTYNWYWLVDGLRALKYPVVLANPAGMQQYNGIKHADDTNDAFFLAELLRLNILPTGHIYDPELRPVRDLLRRRLMLVHHRTALMLSFKSLYTRTTGQELALGKLKDLEVQEAQELYEHPANQLIAGMQVKHIEQLTESIEKIEKVVLSCARELPCYSKLTTLPGVGRILGMTITMEVGEVKRFAGQGNFASYCRTVEAKRTSNRKKKGENNSKCGNKYLAWAFVEAANFARRYDEQCRRWHDRKAAKTSKVMATKALACKLAKAAWYLMAGEVGYDAKRMFGPATTK

SEQ ID NO: 511742 - protein, 376 aa, unidentified
MEQDSRFVGLDVHAETIAVAVAEPNGDIRTLGTIPNTPEAVRRLVDKLGPRERLRVCYEAGPTGYVLYRQLTELGVRCAVVAPTLVPVKPGDRVKTDRRDAAKLARSHRSDDLTAVWVPDAAHEALRDLVRAREAAKRDQLRARHRVSKFLLRHGRRPPTGMKAWSARHRSWLQAVHFAHAAQEATWVDYVSEVEHATERIARLERTLGIVVATAPPALRAVIAALQALRGIAALTAVTIVTEVGQLSRFAHPRQLMGYSGAVASEHSSGPRTRRGAITKTGNAHLRRVLLEAAHAYRHRPGLGHTLRVRQRGLAEEVKAIAWKAQHRLHGRYRQLTAKGKPVPQVVTAIGRELLGFIWAIGMQVERHPHTEERAA

SEQ ID NO: 511743 - protein, 420 aa, unidentified
MTSPNAIPADAVLVAIDIAKACNEVLIEAPSRKRRRRLSVLNNRAEHDRLVEVLQTYGRSVICAFEATGNYHRPVAWRLAEAGFEVRLVSSLALARTREALHNSWDKNDPKDAQVILHMLKIQATQVYHDPLRAGINDVQELSKTHEAIARAKTEIQHRILTHYLPLYFPEIDRFRGNSRSDWFFAFLDAFPTPASITTLTKEAFVAGAWDVVGRKVSKTQILMDIYETARTSIGLPLPLEAPAIRMFRMVIAEARSLIRQRNEIETQADELLRHSKDYLLLRQIPGIGPINALTIIAEAGDLRRFHHHRQFLKFCGLDLSTQQSGQYRGQTRLSKFGNARLRRTLWLAGQVAIRQRENGFRHKFERYIARDRDNPDLRRKAMTAITAKMARVVHAVVKGDSDYRPFVEGRVPGGKTSVS

SEQ ID NO: 511744 - protein, 354 aa, unidentified
MAEPEGEVRWLGIIPNREESIRKLVKKLGPAEQLQACYEAGPTGYVLYWQLTALGVKCEVVAPTLVPVKAGDRVKTDRRDAMKLARSYRAGDLTAVWVPNQEHEALRDLVRAREAAKQDQLRARHRLSKFLLRHGRRAPAGIKVWTQKHEEWIKKQVHFEQPAQEYTLLDYLHEVEHMGDRIQRLEQAIAEAVKLAPPRMQEVIQSLQALRGIAQISAVTVVAEVGEIARFEGARQLMGYSGAVSSEHTSGKRIQRGPITKTGNAHLRRIAIEAAWAYRHRPAIGPRLRKRQEGLSEEVKEIAWKAQHRLHKRYRTLSAAGKEKQKVITAVGRELLGFIWAIGVQAERNSKRVA

SEQ ID NO: 511745 - protein, 346 aa, unidentified
MTTMYYIGLDVHKRTISYCVKDAAGQVHQEGKIGSTRRELDAWIKTLPQPRTIAMEATIFTGWIYDQLLPHAETVKVAHPLMLRAIAAAKKKNDKIDAGKIADCLRCDFLPECHMVSTEIRDRRRTLRYRNLVLKQMVQMKNRVSGLLMETGVSYNKQRLHKLGYFTELISSNDEVSESIRPLLKLSRETIVRSQKLDYALVSSLERDPLLAERLKRLRTIPGVGPITALTWALEIGDVSRFQSIKQAISYCGLCSAERSSADKLIRMPISKQRNKHIQQTLVEAAKLAPRYSHELALVYERERQRGNKNRATLAVARKMVAYMLAVERRKQDFVPAEQLGGTAAA

SEQ ID NO: 511746 - protein, 421 aa, unidentified
MEILYQRCAGIDVHKDQITVAVRVPGSGPGGRDTQVRKFRAFYGVLREMTRWLASLGVTHVAMEATGIYTMPVYHALMEPGCFEQVLVCNAAHVKNVPGRKTDAVDAAWLAQLLECGLLAGSFIPPENVKALRDVVRYRKKLVEQRSSEVQRLGGVLQDAGIKLDSVASAIDTVSGLNMIRALIDGERRGAVLADLARGRMRAKIADLSLALEGRFDEHHALMCTLHLEHIASLNEMIARLDAQVEKMMAPFAPQRDLLVTIPGIGPRMASVVISELGPQVAAYFTTDARLASWTGLCPGNHESAGKRKHGRPRKGNRHLKAALVEAAWSAVQSDGRLKARYHRLVLRFGGYKNKTAKKKAIVAIAHTLLVIIWHVLTEGIPYTELGADFYARRIDPQQETRRLIARLQALGHKITIEQAA

SEQ ID NO: 511747 - protein, 368 aa, unidentified
MDKPITSFVGLDVHKDSIAIGVADAGREGPRFIGTVGPTLGQLLKALARIGALETMLIVYEAGPCGYALVRELRGRGYACEVVAPARIPRSPADRIKTDRRDCLMLARLSRAGELVAVMVPDARDEAMRDLSRAREDAVAARMKARQQLKAMLLRHGRRYSGKSSWSAAHERYLATIGFAHPAQNIAFTEYRQAVGEAEERVARLTESLHQQVEGWRMKPVVDALVSLRGIELVTAVTLIAELGDLTRFAHPRELMGFLGLVPSEYSSGEARRQGKITKTGNGHARRVLIEAAWNYRFPARLGGRLQQRQEGQPKAVRDIAWRAQLRLCRRYRRLVARGLHPNKVCVATARELAGFVWDIARQVKPTA

SEQ ID NO: 511748 - protein, 343 aa, unidentified
MQAITTIGLDIAKSVFQVHAVDAKGNVVLRRQIKRRYVLAFFQKLPPCLVGIEACASAHHWSRELQALSHTVRLMPPAYVTPYVKRHKNDAIDAEAICEAVTRPNMRFVATKTREQQSCLTLHRTRHLLIRQQTSVINAIRAHLAEFGIVAPVGRNGVDQLLGIVADASDKRLPELARACVAALGTQLGTLKAQILQFDRLIMAWHRSSEASRRLDDIPGVGPALATALVATVADPRAFRSGRNFSAWIGLVPKQHSSGGKDRLGSISKRGDRYLRFLFVAGALAVIRYAKIHGTKHRPWLTALLARRHTKVAAIALANKIARMAWAIMAKGEHYKEPVALAA

SEQ ID NO: 511749 - protein, 378 aa, unidentified
MEKIMYLAIDVDDKSFTACGIYTENKLEKFVEFKTKPSIGALDAKLSKFIADGFQLKICYEATYLGFSLYRDLKNKDYDCEVIAPSSIPRPSDSFVKTDRIDARKLAQYYKKEMLTVVGVPDAEVEIVRSVCRSRMFLTKQIKQLKRHILATCRQYGIHYRGSELTQSKGKVVAYFTTTHTNWLNIEINKSDSELLKFNLKMLLNQMEQVQHQIDFVDEEIKKISEQEKYLKKVQSLVCYRGISTLTAMVFITEIGDVKRFKHPSQLVSYVGFDLREYSSGGRERKYGISKMGNSRMRWLATEASQRAHKLPVISKPLKYRREGVDPKFIEVADRCMKRLYKKSTHLVLAGKPINKVKVACAREMLCFVWESLNKAAA

SEQ ID NO: 511750 - protein, 346 aa, unidentified
MDISRVGVDLAKSVFQLHGVNKSGKGVWKRQLPRNKWLSVISETIEPGTEIGMEACAGSHHWSRELIARGYKVKMIPPQFVTPFVKGNKNDANDAEAITEAMARPNMHPVKVKSVEQQDMQAVHRIREEIKNHRVAKGNQIRGLVAEYGIVAPVQLTSLRQAIPVWLEDTSNGLTSLFKQLLQGLWEDLTTLDKRMKVLDKQIMVIATQNPTAKRLQQLRGIGPLIATAMVATLGDGKQYRKGRDMAAALGLTPKQHSSGGKDKLLGISKRGDSYLRCLIIHGARSAVQAAKNKDDRLSRWIVSLQIRRHNNVVVVAMANKMARMAWAMMTKDVDYDPNFCSASVN

SEQ ID NO: 511751 - protein, 420 aa, unidentified
MKDVNTKKLKRVNGKTLLVTVDASKMKHSGYCRCPDGTDIKPFEFFNTGRGFQEFWEKICHMKTTHGLEEMVVGFESTGPYAEPLLHFLRKRKARLVQVNPLHTKRLKELQGNSPGKTDQKDPKVIADIIELGHALTVIIPEGAVAELRRLIHARERSIQRRSVLLSQLQDLVFLVFPEFLEVMKDMSIKSTQYLLKSHPKPEDIVEEGIESLTQILKKVSRGRLGKERAEALYHAARESMGIKEGQESIILEIKEIISAIEGINRFVAELENHMSNYLKQVPYSKSILSLKGIGDITAAGLIGEMGDFRKFMTISEVIKHAGLDLFEISSGKHKGKRRISKRGRPLLRKLLFFASINAVRKGGILHQQYQLHLQKGMPKIKALVAISRKLLSIVFALVRNHSIYMDNYSKIKYQLKEAA

SEQ ID NO: 511752 - protein, 394 aa, unidentified
MKLIGIDIGKNKHFFCIMDQQTGEIISQPVSFSNDKEGFDFLIQKINSYPKDSVLIGMEDTGHYHFALLKYLLDLQYTVALINPKTTDFNRKMQGGITKNDKLDTINICDVLDTPERKKQYRITKVNSFDLYEQKQLTRHHHNLKEEENVYKNRLQKCIDIVFPEFNKLFNSKYGTVYMNILKTFGSAENIANTDIRTIRKCFEIEGRGNRISLTPERLKECARSSIGISSSAEVIQIKHLTAQVELIEEQLTEIDKKIEEFSIQNNSPILSIPGISHFSGTSILAELGDISNYSKPSQIIKFAGVAPLHYESSQFNAQHTSITKKGSKYLRKTLYQIILPVIKHNQVFYKYYQLKIFQGKGHRCAQGHCVRKLLRIIYHLLKTNQQFDPQLLR

SEQ ID NO: 511753 - protein, 314 aa, unidentified
MTKFSVHVGIDVAKDFVDVAIADDDQSRLHVATDEAGLDKLVAWLEALGPSLQVGLEASGGYEKRVVRHLQRAGVAVRIVDPKRVRQFAKALGIKAKNDQLDASVIAAFTASVKGAVAIDDPLRAQIRTFVQARRQLLDAIDINDNQIRLVENPDLKAMAQRRRALLREQINDIEHRIRDLIKAEPALSKTFDLLISVPGVGPVLASTLIAEMPELGSLDRHKLAALVGVAPFDRDSGNHKGKRSIYGGRADVRKVLYMAAMAAARSNPDIRRFHQRLIDNGKLPMVALTACMRKLVIVLNAIVRDQVAWKQAV

SEQ ID NO: 511754 - protein, 391 aa, unidentified
MTKPKTKTVNDFSRCLDPLDMDATLIAVVEMSQSSWLVAGIVPGVERQPLKKLAIDEHALLNLLNRWRAEAEKNGHRIARIAVAFEAGHDGFWLARWLAAQGVEAHVIHASSVAVTREHRRAKTDRLDTELLKRGFLGWLRGERGHCKMVAVPTLAEEDAKRPSRERETLVGEASRIITRIKSAFVRLGIRGFNPKLKAATTRLETLRTPEGEPIPPNTLAALKRDLERHQIVKKQIRELEQTRLESLAQAPAKGPNVMVLLLARVIGIGVETADMLVREVLSRTMRDRRAVARYAGLTGSPDESGAKRRDKGLARSGNARVRHGMIQLAWRFLLFQKDSALAQWYRQRTANAPSMRKPLIVALARKLLIALWRFGRDGVVPEGVRLRPAA

SEQ ID NO: 511755 - protein, 404 aa, unidentified
MIFAGVDWAEAHHDICVLNEQGEILARQRIPDSIVGARSLHELLGAHAEEPEDVAVGIEKDRGLIVTALLAAGYHVYALNPMSVARYRERHVTSGSKSDPGDAKVLADLVRTDRHNHREAAGDSEGVDALKVLARAHQSTIWSRQREVNALRNALKDFYPGALRAFGTDLDHRDAVAVLAIAPSPALGRQLSLSKIISALRRGGRTRGLERRAQDIHSALREEQLSERPRVELAYAKVVSAHVAMIRAFNDEIAELESAVSEGFEEHPAAGIIHSLPGLGTVLGARVLAEFGDDPNRYRDAKSRRNYAGTSPITRASGKSHVVLARRMRNRRLADALDQWAFCSLSASSGARSYYDELRARGKTHRQAIRQVANRWVGVLHACLEQGVIYNEDFAWKHRIDLAA

SEQ ID NO: 511756 - protein, 395 aa, unidentified
MFYLGIDIGKNNHVASMLDDEKKLIFKGFSFSNTTEGGESLLSKLESYGAKSDNLTVGLEATGHYWLSVYSFLNKKCFCQHVINPIQTDGWRKGIEIRKHKTDKIDSVVIADLIRHGNTVETNLPDEAILSLKALSRFRTYLVDSISDTKRKAICLLDQIFPEYQSIFSDVFGTTSKEILLQYSSPAELEKLSVNTLTDLLEKLSRKRIGSEKANQLSSAAKSSFGVIFCRDSFTFQLRMILKQIEYIESQVKDTEKEIKRIMEKVSSQITTIPGIGETLGAVILGEIGDIAKFNTPKKLVAFSGIDASVKQSGEFESSKNKMSKRGSPYLRRALFQAALVASVGNRADTVLSDFYKKKIAEGKHHKTAVGAVARKMCNIIYWVLKNNQPYEVRK

SEQ ID NO: 511757 - protein, 360 aa, unidentified
MPHPEDNRRITIGVDTHADTHVAVALSQLGARLDELHIPTTQTGYDQLERWAVALGQVDAFGLEGTGSYGAELARVLRRRGHRVIEVNRPDRATRHRRGKSDPIDAEMAARAVLSGVAASTPKHADGDAEMLRMLKMAKDSAVKTRTQAINQIKAILVTAPAQLREQLADLAVGKLLERCAAFEPGELTTPTAVAHHTLRLLAQRNLALRAEIKALQADIARLAGRAAPRLLDVFGIGPDGAAQILLTAGDNPRRLRSEAAFAALCGSNPIPASSGKTNRHRLNRGGDRQANATLHRVAVVRLRWHDPSQKYMARRLAEGKSKAEIMRCLKRYIAREIYHILCPTPRRAAATGTDLPQAA

SEQ ID NO: 511758 - protein, 319 aa, unidentified
MAMNTQPIQIGIDVAKEELVIYRQDLDQVDSLPNTLPSIRRWLKTLPEHAALAVEATGTYHMPLTEQAHRAGHSVFVIDGYQLKHYRESVRARAKTDPCDARLLARYLAREGDDLRAWTPPPKAYRTLQSLLRRRSKLIQARVALQQSLGQEPSLKAPLKRLVAQINRIDQLIQKRMHQAVRQAGLTEQVARCEAVEGIGPLSACALVMAFLRGDFRNSDAFVAFLGLDVRVRDSGKQVQRRRLSKRGDPEIRRLLHNAAMAARRHPYWANVYQRYRDRGLKTTQVLVILARKLARIAFALMKNQTTYQAKAKQACGTT

SEQ ID NO: 511759 - protein, 371 aa, unidentified
MYIVGIDIGKNHHEASIVSPEGKQIGRSLRFATTHKGADSLMSFIFKNIGNSPCVFGMEATGHYWYPIYSFLKAKGYTIYVINPIQSDSLRKMYIRQTKNDSIDSFLIAEVIRFGQFGTTSMADENILAMRQLCRYRDSVISSRTEIKLRIGTIMEQIFPEYEKQFSSLWVSTSMGILEKYLTPENIENAPIDELFEIIKDKSHNRLTKAKAISIKEAAADTFGIKIAQDAFSFQLKQLIDRMNFLDKQIEALDCQILEYYEKFDCYLHTIPGIGIIGAATILAEIGDISRFKNSSSLIAFAGIDPTVRQSGEFNSTHNHMSKRGSPYLRHAIFLAATTCSFHNSPLNAYYKKKRDQGKHHLTATGAVARL

SEQ ID NO: 511760 - protein, 347 aa, unidentified
MTIMVETQHTLTGGVDTHADVHVAAVIDPQGGLLGVESFRTDLAGYQKLSEWMCAFGEIRLVGVEGTGSYGAGLARHLRRVGLVVVEVDRPNRQERARQGKSDSLDAIEAARAALSGRAFGVAKTRDGNVEAIRALMVARRSARESRTKALNQIRQLVYTAPDELRERFVGVPAWRLAEGVAILRVHADADPVRMATKSALATLGRRAVALGEEGQHLDVLIARLVDKVAPELVELVGLGPDTAALLLIAAGDNPSRLRSEATWAKLCGVAPLEASSGKVTRHRLNRGGDRQANHALWRIVLSRMSCHAPTKEYVARRTAEGKSKREIMRILKRYVAREVYHYLPRD

SEQ ID NO: 511761 - protein, 433 aa, unidentified
MKIAPNLKVQTNNKLGAMQKKDCIEFEQVVERGCGMDVHKATVVVTIRGKGIKSVTKSYSTFTSSLIKLKEWLKKHGITHIAMESTGVYWKPVFNVLGDDFVILLVNARHVKNVPGHKTDKKDSRWLVKLLLSGLLKGSFIPDRPFRELRDLTRYRKKLVQQITADKNRFLKILEDSNIKLSMVLSNVFGVSGSKMVNHILSVESYRPEELMQYVHGSVKASREDIQEALTGHITDHHKFMLRTILGNMAKTDSTIAEIDQKLDTVLEPYNLERELLETVPGVGREVAIAIIAEIGTDMSRFPDQKHLASWAGMSPGSNESAGKNKSGRTTHGNKNLRGYLTEAGWAAAKTKNTYFSSKYKSLVGRRGKKKAIVALGHKILIAAYFIIRDKVEYKELGENYLNNFRKDKLIAYYKKQIEKLDPNLEFEKVEAA

SEQ ID NO: 511762 - protein, 370 aa, unidentified
MNTTHAVAGIDPHKHTATVAVVDVLGVMVTSLSFAVTESGVAALTALLRSTGLSIDRVGVEGSGGLGRPVTLALAAAGYDVREVQANRTAQRRKRRRRAKTDLEDAEAIARETLADPDLPPAGKNASPPPASDELAAVRDWRGSLVLQRVRLLNEAEPVLVSLPLRLRGLLPPSSRVMASLNRLAQLDNISAGLSAADRVKLDRLAETRTDIATISARIKALDAQIPALLKTLGCTLTTIHGVGVVTAMTLLTEIGDPHRFTTEGRFARWCGIAPVALSSGEGDGPPRHHRLDLGGNRRVNSVLHIVHVTQARCHPQAQAYLARRAADNKTKRAARRAHKRQLANVIIRHMWKDADHLASGSSPVSSTAA

SEQ ID NO: 511763 - protein, 450 aa, unidentified
MIYIGIDVAKDKHDCFITNSEGEVLFNAFTIPNNADGFHDLFQKISSLTNDFSNVKVGLEATGHYNYNLLGFLIDKGLPTFVINPLHTNLFRKSLSLRQTKTDKVDAHTIALMMMSGVNLQSYSNTSYHNEELKSLTRYRFDKVQERAKLKTSISRLVNILFPELEKLVPSLHMVSIYALLAEFPSSAQIASCHLTRLTNLPANASKGHYNKEKAIEIRNAAKHSIGSNMPAKSLELKHTIRLIQELTSEIDEIECSIKSIMDEIRSPILSIPGINYRMGAMIIAEIGDFNRFSSPDKILAYAGLSPSTYQSGQLDGCYSHMEKRGSRYLRYALFNATKFVCIWDNQFSAYLAKKRSEGKHYNVAISHAAKKLVRVIYQLEKSGQLYHRAKIKFNFISPFRAPAKMLLLSCSFQGSNISEKHFCNLLKNNAPFCHVIRIYTDRSRFLAQS

SEQ ID NO: 511764 - protein, 352 aa, unidentified
MGERRSPHHPHLTRTVARNSRFRIYKAEKLGNLIMTKIVYEFNIGIDVSKQKLDVSFNDKETAIFENSPQGFKRFLKSIKNKKNTRVTMEATGGYERPCAYFLQDRSIAVSIVNPKRVRDFAKALGKLAKTDKIDSHVIRHFAALIDPRIMEEKSELQQSLDSLTHRRGQLVKLRAKEKQHIETATSKEVKSSINRNIKFLDKEIESIENKINTLINSSKELKDKVERLETIKGVGSIVALTLMADLPELGTLSNKEISALVGVAPFCRDSGTMIGKRTIWGGRAQVRSILFMAALSARNHNPPIKAFYERLISKGKPKKTALTACMRKLLITANSMIRNNEDWSPDHGKLA

SEQ ID NO: 511765 - protein, 344 aa, unidentified
MDHFAGLDVSVKDTSVCIVDDTGKIVREVKVASEPEALLAVLTNPAYRFKRIGLEAGPLSQWLFSALAEAGLPVICVETRHMRAVLKAQINKTDRNDARGMAQMMRVGLYRPVHVKTLRSQKLRMLLTHRQLLLSKAIALENDLRGTLRNFGLKVGMVGKVKFEARIRELVENLPDLAVLVEPMLIVRRVLREQIVILHRRLLAIVRDDEVCQRLMTTPGVGPVVSLTYRATVDIPARFRKSKSVGAVFGLTCAKYQSGEVDWDGRISRCGDEMMRTMLYEAAQAMMRSKKWSWLKAWAMQIARRRGMKKAIVALARRLAVIMHRIWVDGTEFRWTREQATATA

SEQ ID NO: 511766 - protein, 347 aa, unidentified
MLADLVEHVIAIDPDRDRITAVVLEAKTKGVVATATFRATKNGYVALLGFADEHTLGGERAFVIEGTRSYGAGVTQAVESAGEWALEFDRTEQKKRGRVKNDERDAIDIGREALGRERLAEPRRGAEREAVRTHHVARESALKDRTRAINLLKSLVVSAPEDLRARLRGLSTKGLVKRCASLRHAASQPIDERGTRQTLRLVAQRILTLEGEIAAHEQAIRPLLQSQAPQVLAQFGVAEWATAQLLISWSHPGRCRSEAAFAHLGGSAPIEASSGQTKRFRLSRGGVRQLNRALHVIAVTRMRDCERTKAYVERRRAQGKTDREIRRCLKRYIARQMFRLLEQGAPS

SEQ ID NO: 511767 - protein, 460 aa, unidentified
MNVIHIGGDVSKGYLDSAFLNQARTFLQEGGRFDDTAMGHSQLRDRMLKLKEKDDSIHFIVGLEASGGLERNWLKFFREMKALCNIKVFLLNALAVRKFFERNLRRNKTDRISARNIAEYLFSGGRRKDFEYEPQMQGARTLYGCINAAIGRRVQMQTQLQSLLPTVQPELVQYCRDGVPDWILNLLIVYPTAAQLAKARSKSLCKINSITASRATKLIQAAKESVASQIDESSAGTVSFLANEIQEQNQKITDLQKSLMKSLKDDLAIKIIDSIKGLGIWTATVLRLEYGNIERFYSPEAAVAYSGLDPRIDQSGDELHNCGISRAGRIRIRAALYMPTLAAIRFNPIIREFYKRLIAAGKPKKVAIVACMRKLIHIIYACWITGRPFNPNYQTQHAKKAEKQKTSMQPLANIIASVTAPVSKKEAKRRKAAAMPQKGISPLMRGPGAASTSNSRKFSD

SEQ ID NO: 511768 - protein, 366 aa, unidentified
MTKSITPIGTPVGIDVHKRRCKVVELDHGEIKVRKSIANTREEWLEMLTELPPDAEIGLEVSTAGYYAMSVLEEAGWRERAHWVHTAGIDSNRRQKNDRLDAERLARKLAAHHLDPLPEAWFPPPEIRALRLRVRQRCWLALLRTRAKNHLQSLLGMHGLQAPGTDPFGAAGEKWLAEQTLPMPLGESIPQIQRLLQFLEEEIEISEKYLQAVDGQFPELTLLRTIPGIGPILSAVIWSEIGTIQRFRSAKALANNTGLVSSFYDSGDVKVSGPITRQGSRWLRWALVTAANVVIQYRNPFARRYHRLRRGKKPNVAKAALAHSLARCVYGVLKHGCPYREDRWGRQVGVLEQEARAGARSIKTVV

SEQ ID NO: 511769 - protein, 348 aa, unidentified
MNYYCGIDLGGVSSYAFVTDEKGNKLWSGPIATEKVAFEHLVKKFAGGGLSIAIEAGNQTAWVHEELVKLGAEVTVVNPTKVKLIAESRRKTDKIDAKILCELLRLNALPHPVHMPGPQARELRGLLVARRQLVSARSKLSNVARGMLRQTGVRLPAGGLSSLVGWKRLLAGGFEQEHLLVIVSAYFDSFVALTKSIRELDQQLAQREKNEPRVQRLKTMPKVGRIASLTFLAAVDDVKRFSSSRKLVGYSGLAPTVRQSSERTEYGAISREGRSELRAVWVQIAHLVVRDKTKATQPLRTWFNRVARKRGKKTALVALARRLLVIAYQLLRTEQDFDVGRLKKKRAA

SEQ ID NO: 511770 - protein, 368 aa, unidentified
MEKDSEVFVGLDVAKARHAVAVAEDGRQGEVRYVGEIGADTESVRRLVAKLEKRHGRLHFGYEAGPTGYGLYRQLSTLGHRCTVVAPSLIPRKPGDRVKTNRRDALQLARLLRAGELTAVWVPDEAHEAMRDLVRARQVAVEDIRRKRQAISSMMLRQGRTYPGKKTWGTRHMQWLQAQRFDHLAQHLVLQELLLAVRHADERRERIEAAIAELLPQWSLALVVEALQALRGINLVTAVTVMAEVGDLRRFESPRQLMGYLGLVPGERSTGESVHRLGITKAGNGRVRQALVESAWCYRHPPRTGRAKYYVHERVPPAVRDIAAKAQTRLCGRYRALSQRGKKLTVAVTAIARELAGFIWAIGREVQT

SEQ ID NO: 511771 - protein, 347 aa, unidentified
MGQVTYVGLDVHKKSITAAVGTVRTKPRILKVRNTPKGWDHLAEKLKGTEIQAVYEASSCGFEVYDEMTARGWRVEVVAPSHLAKSVKGWKTKTDARDAEDLWGRLVAAQEVGAPLPRVWIPPVELREDRELVRRRLALGDRVSQVKTSILSLLQIQKIRRPEELKTKWSKTHVAWLKAWCGPESRLAAPVKEALGSQLRELDFLLEEQGRLQDQVEAMAAEPRYEAQVKELTKVPGVAGLTALTFLTELGDVRRFGNRRQVASYLGLSPSSYESGEATDRKGHITHMGPGRIRKVLNQAAWCGVRIRPEVRAHFAQLAKRRGAKKALVAEMRRLGIELWHRAMAVA

SEQ ID NO: 511772 - protein, 355 aa, unidentified
MLIIGVDFHPQFQQIAWVDTETGEFQEQRLQHREEAETFYRALAVAGQKVRVGMEASGHARWLERLLAELQFELWIGDAAEIQNRRGRKQKTDRQDAQHILKLMLKDDFPKIWVPSWENRDLRQLLWHRHRMVQARTRIMNQLQAVALNEGLRCKKRLWRGGGREQLESFRLAAWASRRRRDLLELLDRLNPTIAELSQAVEQEAENNPEARRLMTHPGVGALTALAYVLIIGNTERFACGKQVASYLGLVPLEKSSGNRRRLGHITKQGNSMVRFLLVEAAQVTVRSLPEWRSQYFRLMMRRGRKTAKVAMARRLAICLYWMWREGRDYEQGRRSVRTQESPEILMVCRRTPSN

SEQ ID NO: 511773 - protein, 331 aa, unidentified
MDREYIGVDLHKAFFQVCAMTDRGERRWEARWPRTHDGIARFIARGVGPQCAIAVEATGPTWAFVDALGATGARVCVVDPRKTKLKAGFAAKTDRLDARRLADALRRESVVSIYIPPPPIRELREVCRGRHQVVRLRTRLAQMIRALLLRCDAGEPPGTQLYAPRALAWLAQVPLAPDADRSLRRLERLYHAVHADARAADADVKQRAAADPIAVALDAMVGIGPVMALTIRAEVGDIQRFARGPALACYAGLVPRVDRSADHVYHGRITRDGSPWLRWALVHAAMHAMKRPDGIGRWARRLAVRKGANKARVALARVLCDEVVARWPRTA

SEQ ID NO: 511774 - protein, 313 aa, unidentified
MLGVDVSKAELHGTWRDPETQAIGWQGVVPNSAAGIRQLLRRVPSGAVVVEPTGRYGEALIRATQAAGREVLLATPRKARAFLWAAQPRAKTDRVDSAGLALYGLSGRLRPYLLPSATVDQVRQLLTARRGLSQSLTTLRLQQASLPAAADALAPAITTLADQVKALDDRLAGLVQAAPDLTPAAALRTVPGIGPVTSAALAACLVDKRFTQPDQFVAYVGLIRVHQSGRRRGRFGLSKHGDAELRRLLYLAAKAATQTKHDQTFARRYAREQAKGLAKTAALNAVARKLAKVAWSIVAHNTTYDPARVDTQA

SEQ ID NO: 511775 - protein, 339 aa, unidentified
MQAVTIGLDIAKSVFQAHGVDSAGEVVLRRRLSRSRLLEFFEKQARCLIGMEACASAHFWARELARLGHTVRLIPPSYVKAYLKRQKNDAADAEAICEAVTRPSMRFVPVKSIEQQDIMVLHRTRSLLMRQRVQLSNAIRGHMGEFGVIAPIGRLGLEQLIAIAGDADDARIPGAARACLLMLAGQLRMVNRQVLENDRRIIAAARASDVGRRLMEVPGVGPVLASAFVASVPDPWSFKSGRNLAAWIGLVPRQNSSGGKERLGSITKQGDRYLRKMLVVGAVAVLRYAQKNSARRPWLVNLMARRKPKVAAVALANKTARTIWAIMTSGSRYREPLAA

SEQ ID NO: 511776 - protein, 315 aa, unidentified
MTQTNITTAGIDTSKAKLDIAVHGRTERWQVANALPGWRTLAANLVKAGVTRAGIEATGGYERGVVEHLRAAGLNVLVLQPIQVKAFGRVHLRRAKNDALDAVLIAACADAINQPRVAPDPRLAELTEYLTFLEQAEEDIARFKTRLEHIDEPGLRHIVNSDITRLKARRAAQIRDIAKRLRAYDDLARRLDLVLSIPGIGERTALALIIRMPELGQISREEAAALAGLAPFDDDSGQHKGQRHIAGGRGRLRRSLFAAALPAAYRWNKALIALYARLKARGKAHNSALIACARKLLIYANTVVQRGTPWTEKAA

SEQ ID NO: 511777 - protein, 421 aa, unidentified
MSKRVVHDEVLYVRSAGLDLGKRFLVACIRTPNPKRAGTWSLQTERFDTTMPELRRLLDWLLEARVEVVVLEATSDYWRSVYYLLQPRLNMMLVNPSHLRGIRGRKTDPSDAAFLARAGSSGMVMGSFVPPREIRELRDVTRRRTELAADRGREIQRLEKELEDTGLKLTSVLSDVTGVSSRRILEALIAGERDPHVLAELTVAGARRKISELVTALDGEFTAHHSWMCRHLLDQIDHLAQLLIVLDARVAGIVTELARDQDLDHLDTIPGIGRSAAEIVIAETGGDMAFFATAGHLSSWIGVCPGMNESAGVNKSGHTRHGNANLKRVLGTAAMAAIRGKDSYYAVYYRRVAARRGAQRALVAVMHKIVIAIWHVLHNHVPFHDLGADYFTKRDPQRAIRRMTKEANSLGLTIRFDPIGA

SEQ ID NO: 511778 - protein, 363 aa, unidentified
MIVIGADTHKRTHTVAAVFAASGQLAGELTAPAREPGFRELLAWGRAIDADRIWALEDCRHVSGAFERFLVAMGERVVRVAPKLMGATRKGERARGKSDPIDARAVARAALQEGPEALPAAHRDEEALRIKLLLDHRDDLVKARTEDQQRLRWHLHDLWPELQVPTGALDRKVWHDRLARKLSRAEQTTRVQIARELVLEIRRRTRRINELQRQLAELVSDYAPGLLALEGCGSLSAAKIVAETAGVRRLGTDAKFARLAAVAPIPASSGKRIRYRLDRGGNRQLNRAIHCIAVSQGHCYPPAREFLARKQAEGKSRREALRCLKRHLARRIWRLLVESEIGRSTTTVDSQRGSLSPQITKAA

SEQ ID NO: 511779 - protein, 352 aa, unidentified
MTQQLVEVTGGVDTHQDTHTAVAVDSAGRVLGSAQFPATADGYAQLLAWLHAFGTLVLVGIEGTGAYGAGLARHLRVAGVRLVEVDRPDRKTRRWQGKSDPVDAEAAARAALAGRRTGTPKDRDGQVEALRNLRVARRSAIGARADAQRQMKTLIVTAPEQVRAQLRGLSSAKLVATCATAALEPGQAGGPAGAVRLALRSLARRHQHLTAEITDLDTLIAPLVAAINPRLLAAKGIGPEVAGQLLVTAGDNPARLRSEAAFAMLCGVAPLPASSGRTQRYRLNRGGDRQANCALWRIVITRMATDPATRDYVQRRTKDGLSKKEIIRCLKRYVARDVYALLTQPDDLDLAA

SEQ ID NO: 511780 - protein, 346 aa, unidentified
MKIVGCDFHPSFQQVAILDISTGEVEELKLMHATGEAERFYRELASPVLVGMESMGNSLWFERLMERLGHELWIGDAAQIRASYVRRQKTDKRDAAHLLQLLIEKRFPRIWVPSHLERDQRQLLLHRHRLVQMRTRVKTELQHLALNQGLQQKRSLWSVRGRADLEKLPLEGWTRRRRLDLLKVLDMLETQVGELDEAAGKVASANAGARLPMTQPGVGPITALAFVVTIGDVARFKRGKQVASYLGLIPSERSSGQKRRLGAISKQGTVFLRTMLVEAAQSAVRHDEQFKKEYAHRCHSKPKGVAKVAAARKLAVRLYWMLRNQTPYTHAVHNEGSPSHPVVGAS

SEQ ID NO: 511781 - protein, 355 aa, unidentified
MRTDYQKKRFLAKNQEAFIGIDVHKESWQVTIRAEGEEVFHSRLPSQYQALGKLIERLPGCTVKVAYEAGPCGFSLYDKLTADNIATIVVPPTLIPVESGNKVKTDRRDSRKLAHLLERGMLKKVYVLSEEDRADRELVRTRRQINEHRSDAMRQIKSKLLFYGVKPPFTAKQRWSKAYVKWLKEYTFDRDLLRLSLDYLIGLYEYLTSPLIKITKQVVLLARSKKYSKRVQLLKSVPGIGTLTAIEILVELQDMKRFKSSDKLAAYIGLTPSEFSSGQYLRQGRITHCGNKRVRACLVESGWILIAKDPFMRKRYQELKNRKGAKKAIVAIARMLIIRVRRILLDNEPYLLKAA

SEQ ID NO: 511782 - protein, 338 aa, unidentified
MSLYAGIDLHSSNSVLAVTDENDRPLREGRFPNDLPTILKALEPFRDELAGVAVESTCNWYWLVDGLAEHGYPMHLVNTAAVPQYDGLKYSGDDTDARHLAHLMRLGILPEGYIYPRAERAVRDLLRRRFYFVRQNVGLLQSVQSAWARHTGQCLSANAFRQLTGEAIEQAFPDPCVRLSVLAQIRVWQGIESQVQQVEKWVLAAHPRHGEREALCSTPGIGRILSLTIALETGDIARFAHVGDYASYCRLVKSERISNGKKKGQGNRKCGNKYLAWAWIEAANFAVRFSPPIKRWYDRKAAKRHKVIAIKAVAHKLARAGYYLMRDGGTFDVARAFG

SEQ ID NO: 511783 - protein, 337 aa, unidentified
MNSVGIDISKGRSTVAVMRPFGEVVTSPFEVRHTDSELSELAKQLKSLNGETRVVMEATGNYHAPVAKLLHDAGLYVSVVNAKLVHGYGNNELRRVKTDRKDAVKLANYGLDRWLTLPKYIPEEDTRLLLKNCCRQYRQYSKVQTILKNNLISLLDTVFPNVNRLFSSPIRGDGSEKWVDFVAEFWHCRCVSEKSERAFTSKYLRWCRKHGYNFSEEKACAIYAEASGHIGVMPKSETTKLLVEQAAAQLRATSAALATLKQEMQSLASKLPEYPVVMDMFGVGPTLGPQLIAEIGDVRRFYSKKALVAYAGLDAPPNDSGDETGRHKSMSKIGASS

SEQ ID NO: 511784 - protein, 464 aa, unidentified
MKRHRRQSNAKPRPPSTLERINPDVAGIDCGSAEHFVAVPPNRDERSVQSFPTFTGDLNRLADWLTTCRIKSIAMEATGVYWIPIFEILEARGFEVILVNARHIKNVPGRKSDVSDCEWLRDLHMVGLLRGSFRPADAIVALRAYLRHRASLVDSAGQHVNRMQKALVQMNIQLPLVVSDITGVTGLLILRDIVAGQRNPSILAKHRDYRCKASVAEIVAALTGNYRPEHVFVLQQNLQLFDAYQQQIAACDTAIEEHLRALAADAPAPATELPSPRSRQKPRDNEPRFELRGPLHQLTGTDLSQIDGIGPYTALRLITEIGTDMSKWPTEHHFTSWLTLAPKNRISGGRLLSSRTQPSANRAAAMLRVAAMSVGRTQTALGGFYRRLAYRVGKAKAITATARKLAILVYHTLKGKFVYEDPGADAYNAQHRARTLGRLRKQAANLGFELVSLSTGEIIPGAVS

SEQ ID NO: 511785 - protein, 348 aa, unidentified
MTNEQSTQTFASIGIDIGKDVFHIVGFDASGKVVLRKKFKRLALEAELAKLQPSIVGLEACLSAHFVSRTLRRLGHTPRIIPAIYVKPFAKGQKNDYNDAEAIAEAALRPNLRVVREKTQDQLDLQALHRVRARLVSRRTATINQIRAFLIEHGIAVRTGANALRSSLFAILEKRADELSPRMIDVIVGLHEDWQRLDERIDTLTGEIEEISQTETNCRRLMSVPGIGPIISTAMVAAIGSGEAFERGRDFGAWLGLIPRQYSTGGRPILGRLSKRGSKYLRTLFIQAANVILMRPQNWERFSFGPWLSGAAARMHRNKLAAALANKLARIAWSVLRHNKRFDEALTV

SEQ ID NO: 511786 - protein, 351 aa, unidentified
MQYIAFDSHKRYTFASVEDQETGKSHDTRIEHTRGALTHFLSGCEPGSPVAVETIGNWYWIIEEIESAGMVPKLVHARKAKMMMASSKKTDKLDAHGINRLQRVGTLPTVWIPGSDLRDRRELFRTRMSLAQKRVNTKNRIHATLAKHGIQIEDTSDIFNLKGKAAIEKSLNLLPEHTQFATKLLLQELDELQEKIKAFEDRIVATYQETSEIVLLRTLPGVGAILAEVIACEIGDVSRFPTAAQFASYAGTTPSVHPSGGKVRYGRAPSDTNHYLKWAYVEAVNIVTQKRWRHRCEHVGVLYDRIRARKGHSLAIGAVSRHLAEATWSILTKKEGYKEPVIKKQVSSTNG

SEQ ID NO: 511787 - protein, 355 aa, unidentified
MTSTKYIGMDVHKESISIAVRNAVGKVVMECVIETKASMIVQFIDGLRGDVQVTFEEGTSAAWLYDLLKPHVSKLVVCDPRKNKSMREGNQSDKIDARQLAELLRLDHLTPVYHGEHGLRTLKELVRSYLTVTKDLGRVMTRVKAIYRSWAIPCTGKQVYAARHRAEWLGKINERGVRRRAEFYYQQLDALRVLRQQVRRDLLAESKKHKAWKLLCQIPAIGPIRAAVLLGILQTPHRFRTKRQLWNYGGLAIEMHSSADHRSVDGHLQRSRKNVLVRGLNRNCNHDLKNLFKGAAVVASSKPGPFAEFYAALVGQGMRPEMARLTLARKIATIVLIVWKKGVSFDAQHLKPQTA

SEQ ID NO: 511788 - protein, 322 aa, unidentified
MRYIGIDVSKATFVVAYSSDKGGEIRTFNNTTAGIRQFIGTLPKDGSIHCVMEATGNYSALLLYMLNVAGITVSMENPLKVKNFAKAMLSTVKTDKSDARLITLYGEKMNPRPFKVQGEAILRLRQKRTVIRQLTKQITAMSNLRGSLACLPVPDKGATHTVDETIKFLEKKRDRLQSELTDLVEVEFSRQLALLTTIKGIGITLATALIITTGGFTYFQNAKQVSRYLGICPTYEQSGTSVNIKGHINRNGDAYTRGLLYIAAWPASRFNAQCKETYTRLRQNGKSGKLAMIAVANKLVRLAFAVVAHDKEYVDGFVSNRP

SEQ ID NO: 511789 - protein, 340 aa, unidentified
MQAARHIGIDLHRNQFTCCVRLENGRNYLTEWKLEDLPRFVKKLRPADEIAVEVTGNTRLFYEAVAPWVARVVAVDPNQFKVISHSVKKTDPNDARNLALYLEKDLLPEVRMKDKTQAQLASLTQTRDTLVKLRTALKNKVNNILSAHGINLEKEALSSEKKLNEVLAMRFDPMVKIELEVIVEEIRSLNQRVAKLEKTIADEGSKLEGHKNLTSIKGIGPLTGSILLSVIGDIHDFADESKLAAYFGIVPRVSNSNETERSGRITKRGSKLGRTALVQCALIAQRYSPYLKRYYEKIKARRGTGKAIIALARKLLGIIYRTLKNKWVFEDFPNFVLAEG

SEQ ID NO: 511790 - protein, 309 aa, unidentified
MDTIVVGIDVSKDRLDVSVQPAGTALSYNRDAVGIEGLIEALAPLAPQLVAVEATGGFEAVVAASLAAAGLPVVVVNPAQVRSFADALGKRAKTDRIDAQVIAQFAAAANPPVRALPDAATQTLADLVTRRRQIIQMIVAEGQREKRASVRARKSIQRLLKSLRAELSEIDAEIDESVRGSAIWREKENLLASVPGVGSGTARTMLAELPELGTLNRRQIAALAGLAPFTRQSGKWRGKSFISGGRASVRTALFMAAMTAMRCNPALRAFHHRLRAAGKPKMVALIAVARKLLTVLNAILRDKTKWQNA

SEQ ID NO: 511791 - protein, 411 aa, unidentified
MGLLQQVLPASTLVVAIDPGKVSNRVWLSTGEAGEVVPPLSLPVLRPGLEELHRLVIDHLGPSGQVFAIEATGGLHQAWMRELNQRFPGSVRLFAPSETTAARAQLGSRRFKTDDRDCAALTYLARQGQGRLVPDRVQDALAAAVRHRRGLIAEHKVAQQRLHDQLHALCPGLAAPDGHGRALNVDSVVGQAVLDCAAAFAGRPPSPRSLRARARGRILDRDTEYWIDRWRTCLPPPVDAPARAARLGRSMIRWRALTADIAAVDGEISALLGGSEGQVLTTLPGVGASRAAAFAAFSLSIDRFPSAEHLYSATGLAPGSYQSATINRRTPISRQGLPEHRDALMNLAWGLSQHCGPFIDRHRELRARGLRPIPARIALARHACRLAYTLLKTQQSFDEQRYRRARHQSER

SEQ ID NO: 511792 - protein, 441 aa, unidentified
MVAGVDIGSREHWVAGPLKEDGTPNVRRFSTTSDELKELVDWLESQQVESVAMESTGVFWIPLYELLEARGLDVLLVDARAFHHAPGRPKTDRLDCQWLQRLHSCGMLRGSFRPSASFIPLRALQRQRGNLIALRTRFIQWMQKSLDQMNVQVHHAVTDLTGVTGMAIVRAIVAGERRPEALAALRDRRCQKSRGEIAKHLTGTWREDHLFNLGSALSNYDFNEAEIARYDAEIARCMAALQLSELKTAAIPNHPKPAKERELRKAGGLEVRERLWRATGKDLTRIDGISADGAQLIISELGLSADAFPDESHFAAWLRLCPPTKVSGGKPLKTRRNGLSANRISGVLRMGAKAVGRTQTALGSYFRRVSRANGYSVAIFATARKLSALVYRALRFGDEYVDIGEKAAEAAYEERRLASLQREAKVRGFALVPLASALPTG

SEQ ID NO: 511793 - protein, 391 aa, unidentified
MPYTYFCGIDISKDSFSVAIKNGSFILKDKLFSMNSSGFSRFENIISNLKPHLSIGMESTGIYHKNLFNFLKVRGYNTIEIDPYKMWRFFRFTNSKPSTTDKKSAKTIAQFLEFNKNNLKTDKNHPQNEKYSLRYFVREKERITHDIAKTKTEIKRILALVFPEIEKTNFLFSKEILAILVKFPSANKIRNISLAEFTEQITPISKKGRKGDLTPEGIYRLASGSIAFSYPLYEQLLKIKINRLLNLLEEKENISKLIDQIADKFFKREIEILTSIPGIGKESAIYFMAEIIDIKRFANKRKLVGFCGLDPVIKQSGNYKASFRISKRGNAHARRIAFIMAGSVKRNCPYFREYYLKKRKEGKSYTEAVIATSTKLLRTIYTLLLENRCFK

SEQ ID NO: 511794 - protein, 412 aa, unidentified
MKDLLEISCGLDVHKEKIVACILTGPLGKPTRSEIREFSTLIPDMIALRNWIVSKNCHHVAMESTGIYWMPIYEILEDAFYGDITLLVVNARHMKNVPGKKTDMRDSEWISTLLRAGLLNGSFIPEKRIREFRDLNRYRKSVIRDITSQKNRIEKFLQSSGFRLSSFISDIFGASGRNIILHLIEHGQIDKTALDSCLKTKTRNRIDEILMSVNGTLSEHQKAFLRILMTHYASLKKHLAEIETSLEEDMAPFALQVEQLNSIYGISTTASCAIIAEIGIDMKPFKTAEHICSWAGLCPGNNESAGKRKSTSVTKGNPYIKSMLCEIAWVIAGKRNTYLSAWYWRIKQKKGAKKAIVALARKLLVIIYTMLKQGTLFDESCFETRRKHCEQKQLSRYIRELEKHGYHVEAQS

SEQ ID NO: 511795 - protein, 344 aa, unidentified
MKYFTGIDVSLRFVSICVVDEAGVVQYEGKVPAEVDLIVAALRRFSAEVRQVGLEAGTLTQYLTYGLQKAGYEVLCLEARQTAATLAAMRNKTDRNDARGLAQILRSGWYRTVHVKSLESHQVRALLASRKAILTKCVDLENELRGLLKIFGVRLASQVAHGSFDQTVRAAVSATPELSMSLLPLLDARTVLYKTYLKLDNAVKAVVRHDPVCKRLMTVPGVGPVTSLTFKAGVDATDRFRSSRNVAAHFGLTPRRYQSGETDNPGRISKAGDVEVRQALYTAAHAMLTRSYAWSTLKAWGLRLAKIRGLRRAVSAVARKLAVILHRMWVDGTDFRASRPQEAA

SEQ ID NO: 511796 - protein, 414 aa, unidentified
MDVLHPRCAGVDISKRDAKVCVRIADPGRAKAKSTVTTWGAVTNQILALRDHLIGEQVTLVVMEATSDYWKPFYYLLEDGPFEVMLVNARHVKNLPGRKTDVSDAAWLAQLGAHGLVRGSFVPPEPIRQLRDLTRTRTTITRQRAREIQRLEKLLEDAGIKLSSVASDISGVSGRLMLDAMIAGQRDPAELAELAKRRMRSKIPELTEALTGRFGEHHAFLARVHLDLIDQHTHAIDDLTARIEVVIEPFRGARDLIITIPGISTLVADVIIAETGADMTQFPTAAHLASWAGTCPGSNESAGRIKSTKTRPGNPYLKGALGIAAMSAARSRGTYLAAKYRRIAARRGPVKAIVAVEHAMLIAIWNMLTTGTPYQDPGGDFYTRLNPDKAKNRALDQLRQMGYDVTLNPLAHTG

SEQ ID NO: 511797 - protein, 322 aa, unidentified
MESHKLGIDISKKTFDVALLREGKFKHKKLRNSAAGFKELSLWLERLNVASLHACMESTGSYGEALAQYLYDAGYQVSIVNPARIKGFAQGELIRTKTDKSDASLIARFCLAMAPSLWTPEPWEIRLLRDLSRRYDSLLEMRQQEVNRLDVSGSELRCDIEEHIKYLDNSIAETKKRIRDHIDDHPDLKRKKDLLETIPGVGEATINVVLSEFADISRFDSAKQLASFIGLAPRHRLSGTSVRGRASMSKIGNAKVRKSFFMPALVAMKYNPVLIEMRRRLLKAGKPKMLIVGAVMRKLIHIIYGVLKNNQPFNPDFQVKNV

SEQ ID NO: 511798 - protein, 417 aa, unidentified
MTASTGGDSRPVQVIIGVDTHQDQHVAVAINEHGIWLGEHRVMTTQKGYAELQQWSQSWGEICAFGIEGTGAYGAGVARFLTSQGYTIVEVNRPDRSTRRRKGKSDPTDAEMAARAVLSGVANATPKSGAGEVEMIRMLKITKDSAIKARTQVINQMKALVVTAPAKLREILEGLSSRDLAQRCAAFRPGPLGDPSAAAKYALRSLGRRYRQLTAEVQDLEAQLDRLTRMAAPALMDTFGVGPDTAAALLVTAGSNPERLHSEASFAALCGVNPIAASSGKTHRHRLNRGGDRQANAALYRIVLVRLRHDRRTKVYMQRRIGEGLSKTEVIRCLKRYVAREVFALLSQVSPRLCSQSEQGCPDSGVVRMGQPCSKIELTRGEDRATLGSDPSASTGAVRIGRAQLCLSFAYPVAQKR

SEQ ID NO: 511799 - protein, 349 aa, unidentified
MLYTGLDYHRSFSYITTMNGDGEIIGQKKLPSNGEIVDFLKEFGESMEVAIEATPSWYWLYDHLEEEGFDVRLSHPLKTKAIAYAKVKTDKVDSATLAHLLRSNLLPLSYVPEKPVRLNRELLRYRASLVKIQTRIKNKIHTILAKNNLSHDFTDLFGKAGTAFLHSLSLPENYKIALEGYLSILETLRHEIIGVSKRVRQLAEDDQDSRLLMTIPGVGYYSALLIKSEIGDVRRFPSAKQLCSYAGLVPSTHASGNMCYHGHITKQGSRWLRWILIEAAIHAVKRPGVLRRFYFKVERKKGGQIAKVATARKLLEWIYHILRDGRTYQEMEKITVLLSRGEPGNCPGQ

SEQ ID NO: 511800 - protein, 430 aa, unidentified
MKSNTQNAKIEAITEKTLVLGIDVGSETHYARAFDYRGIEYSKKPFKFSNTEAGFVTFKEWILDIKERHEKDKVVLGMEPTGHYWFNLGKFLQDNEMKPVLVNPHHVKKSKELDDNNPTKNDRKDPKVIAGLVREGRYMIPYLPDGVYADLRTASNIRFQLQAELTRIQNRISRWFNIYFPEYKTVYGKPDAKSGILILKAAPLPEDILTLGIDGVNQIWRDAKLRAVGKARAKTLIEAAEHSVGSKEGAVAARMEIRMLLEDYESRSIRLQEVMTLIEGLVKQIPMAEKLLEIKGVGIRTVSGFLAEVGDISRFNNPKELQKLAGLALVENSSGNHKGETTISRRGRKRLRYLLFEVAMSLVAKNPEFRELHNYYTTRRLNPLKKMQSLMAIAAKLIRVFYVMLTKGVNYDPKKMVNDIKRPAVYLQTA

SEQ ID NO: 511801 - protein, 467 aa, unidentified
MNMKSKTPKSKKEKKKLSVDQGWEAINPRAAGIDIGAKEHFACVPAEATPKNVRSFGTFTADLNALADWFKECGVTSVAMEATGVYWIPVFQILEERGLAVILVNARQTKNVAGRKSDVQDCQWIQRLHTYGLLQGSFRPEDPYCVLRTYLRYRDELISARSTQCQHMQKALQQMNVQLTQVLSDVTGVSGMAIIQAILEGERDPVKLANMVDRRVRATAVQIQKALEGDYREEHLFVLQQAFSLYGTYEEKLNACDEQIVRETATLSDKVDPQRKPLPPRKEGRPASKDKMQGQDMREVLYRKFGADLTAIEGIGVTTALVLLTEVGPNVSGFKTEKHFCSWLGLCPDNRISGGKVLSSHTRRVINRASDALRMAAVTLERSQSALGGFYRRMKGRLGAAEAITATAHKLARIIYRLIKHGEAYVRQGMEDYERKFRERKLYALRKTALSMGFNLVAKQEVTSLVS

SEQ ID NO: 511802 - protein, 345 aa, unidentified
MHNDTRIAVDLAKSVFEIGVSSQPGKVSRRLRVTREKFLPTMAQLPQGTVIMEACGSAHYWARENQKLGHSVVLLPAQHVKPYVLRDKTDRMDVNGLLEASRNENIRPVPIKSPEQQLLASLHRLRSAWMGDRTARLNTLRGLLRERGVFIPVGAEHVVPHVWAAIEDADSAIPDALRLLFSEACQEIRDFERRIKDCERQLEALAKQMPDVQRLLTIPGIGLITATALVAFVGDIRRFPSSRHFASYLGIVPRERSSALIRRLGGISKRGDIYIRMLLIHGARSVLRAAQTQKRPDRLRAWALRLRDHQCYNKAAVALANKLARIVWAVWRQPEATFISVPHAG

SEQ ID NO: 511803 - protein, 358 aa, unidentified
MAGKVTEAAVVGGVDTHKDLHVAAVVDQNNKVLGTQFFSTTRQGYRQMLAWMTSFGALKRIGVECTGTYGSSLLRYLQNAGLEVLEVTAPDRMELRKRSKSDTIDAECAAHAAFSGIRTVTPKTRNGMIKFLRVLKTCRKTAISARRVALQIIHSNIISAPDELREQLRNMTCMQLIRTLGSWRPGASEYRNVTNVYRISLKSLARRYLELHDEIADLDVMIAAIVDELAPELIKRNAIGYESASQLLITAGDNPQRLRSESGFAALCGVSPVPVSSGKTNRYRLNRSEDRAANSALHIIAIGRLRTDDKTKEYVARRVAEGHTKMEAIGCLKRYISREVYTLLRNQNRQINSIPITA

SEQ ID NO: 511804 - protein, 346 aa, unidentified
MKILALDLGKYKTVGCEYESESGAHRFKRDFTTPAALQKMVQEVNPDRVVIEVCSIAGWVCDLMGSLGIEVQVANTSDDAWRWRKVKQKDDRRDALKAARLSAVNQLREVYIPSREVRQWRALITYRRQLVRRCTQVKNHIRDLLLREGQILARGNKCWNQLGTELLTSLARPLSEVGMAELWRGELYEELQQLELLQVRLATVQEKLHTIGQADGRVQLLQTTPGVGPRLAEAIVALLDEPQRFRNARQVSAYIGMVPKAFDSGESERRGHITRQGSRLVRSLLVEVAWAGLRHNAWVRQTYQRLSGGKKARKKIAIVAVGRKLLVRCWAMLRDKRAWNWQPQIT

SEQ ID NO: 511805 - protein, 371 aa, unidentified
MKSIIYIGMDVHKKTYSLCALLKETGEIIGETKIPADVSLIIKFIENAKKSVDSDDVQIKTGYEAGCLGYSLYWQLAAKGIECDILAPSTMHRSAKNKVVKNDRRDAKNIAANLANGTYKSVYVPTDEDVEIKEYIRMMHDFKIELKKVKQHINAFLLRFGHHYPGKSKWIPAHIKWLKELELSDMYREILDEYLSQLEILSEKIERFKYRLEELSQKETYNEKIGQLRCIKGIDTTAAMTMHAETSDFDRFPTANAFASYCGLTPGEDSSGDSYHRLGITKQGNSMIRTTMVEAAQVLVRGTIGKKGKKVKSKQKDQDVKVIDYADKAVVRLQKKYHRMIIRGVKRNIAITAVARELACFVWGIETGHIS

SEQ ID NO: 511806 - protein, 349 aa, unidentified
MIVGVDVHRRAHCAALIDERGVVLGTLSFPNTAAGVGKLRTWLGARDAGSAVIGIENGAGYGQMLCSALAAAGLEVLNVPAWRTKRDRGKHGFGKSDPGDAVAIARVVLCDRERLGPALEPELVRALAIVETLRRQTVARRTDAIQRLRALWTQFDPEAEAAVGNMRAARTLRRLRRLNLGSGVLGDAATSCLHRIAAEIARLDVAVGDLDKQLAELVAQSGNPLEDVCGAGLQVTATLIAQSGDVRRFRDRAAYARYGGVAPIPCGSGTTAGRHRLHRGGNRQVNAALHRIAIVQAQWDPAAQAYLERKLAEGKTPREARRALKRHLANLVYRRLKGWAEDALPATAS

SEQ ID NO: 511807 - protein, 346 aa, unidentified
MIPVASDVHKGRCWMAMIPPGEDIKMLEPIECTREAWRKRLAELPPEAEIALEVSTSGYFVMSVLEEAGWRKRAHWVHTAGIDSLRKQKSDRLDTRRLVRKLAVQDVEPLPEAWFPPAPIRELRLLARQRCGVARMRAQSKNRVNSLLEIHGLRPQRCVFTAKGRAWIQQQALSSGAQSCFERFFRLYDFLTEERKTSEAELETAAAAFPEVALLRTIPGLGHMLAAVVWSEIGDLARFDSADALLNYSGLVPSSYDSGEVSIHGPITRQGPVWLRWALVTAANALTRSKGPLGQRYWHLRRCHKLPNVAKTAVAGSVARCAYGVLKHGAPFQAERWGRRAGKLEQ

SEQ ID NO: 511808 - protein, 411 aa, unidentified
MDIIYDKCCGIDVHKKLIVACFRCGKKQDVRNFGATTRELLELADWLKEGGCEMVAMESTASYWKPLYNILESSDLNAMVVNARHMKAVPGRKTDVKDAEWIADLLQHGLLQPSYIPDKDQRELRELVSYRKSLVGERTRELNRLQKMLEGANIKLSGTVTDINGKSARSILEYLLTGEFIDEAKYDEMYEKKIIAHNLKANKEQIIDDLNGLMSPLQRRMMKELLAHLDELNKHIKNLNDEIDNFMKPEEKQASQAIQDITGIGNTSAQAIISVIGTDMTRFPTDRHISSWAGLCPGNNESAGKRKSGKTRKGNSLLRTTLITCAHSAVRNKKSYFYAQFMRISAHRNPKRAYVAVAHSMLIAIYHILNEGVVFKDLGADYYNQFNKEHKINAYLKKLKALGWEAPVVAA

SEQ ID NO: 511809 - protein, 395 aa, unidentified
MFIVGIDIAKRSHEAIIIAEDGQVVRKAFSFRNNCTGYNLLLEQVRRLTLVKSQIVFAMESTAHYWLALYARLLKDGYAVMVLNPIQSHSLRELYIRKAKTDARDSLIIADLVRFGRCKASNVPQDKILALRELCRSRAYLVDMAADLKRKLIALLDRIFPEYESLFDSVFSKASIAVLCKYSTPQKVKNANLRKLTDILMESSNGHFGEWKAHQLKEAACSSFGIDDSGGVYSTLLGMFLEQILSLTAQADSLEKQISVFFQEFNNPLTSIPGVGTVLAATILSEIGDITRFSSADKLLAYAGLDPSVKQSGEFKSNQNRMSKRGSPYLRRAIWLASTVAVHRDPMFQTYYEKKISEGLHYMNVIGHVSRKMTAVIFAVLRDGQPYQPILQSAG

SEQ ID NO: 511810 - protein, 332 aa, unidentified
MSAYIGLDVHKDSTFVTVLDQDGRVAVQRKLPNEHVPSFLKQFNVEKIGLEASTHVVPLYRALVSRGFRVEVSHPKKTRYIAEARIKSDKVDSKAIAELVRLEALPQSYMPPPEIACLREKVRRRAFLVRERAKLKTKIRGVLAYEGVKPSESLGLFTRKGVDWLRSLCLEPIDCYLRVIMVLNGEIRRLSRELKQLAGLDEDVRLLMTIPGLGYYLALLVKAEIGDVNRFKSGDHLCSYAGLVPSTYNSGGVTRHGGITREGSRWLRWAMVEAAMTHVKYDTSITRSYHRIAEKRGRKTAIVATARRLLLSCYSVLKNRRAFKPFPSRSGV

SEQ ID NO: 511811 - protein, 348 aa, unidentified
MVLIGCDFHPSWQQVSWLNRETGEAGDQKLVHEPGAVEKFYRQFPAGTRIGMEATGNCQWFVELIMRLGHAVLVGDAAKIRASDSRQQKHDKRDARLLVQLLAEDRFPQIWVPSREQKDLRQLLIHRYKLVRIRAQVKNGLQHLAMNQGVLKKRKLWSRAGEKVLRELPLAPWASRRREDLFKVREMLNGQIDLLDRAVVEAAEKNEKARLLMTQPGVGPITSMAFVLTMGDVSRFQRGKQVASYLGLIPREYSSGGHQRLGSISKQGNTFLRMLLVEAAQGAVRCDESFRNEYLHRCHSKPKGVAKVAAARKLAIRLYWMLRSNTKYPEIVHVESSSRVALVVPHAG

SEQ ID NO: 511812 - protein, 375 aa, unidentified
MLSARPAGATTRPVAREDGNHHHGTPQPPRVTIGVDTHKDLHVAAARDQLGRRLATTQVEASGAGYAQLLGWARSLGQVQAWGVEGTSSYGAGLARFLAAHHQQVWEVNRPDRAARRHRGKSDPVDADAAARTVQAGEASGTPKAQDGRVEMLRALRVARHSAVKARTQTINAIKALLVTAPTELREQLATLPTTALIRQAATLEPGTLATPTAATMLAVGGLARRYQHLDAEIGLLTGKLDQLTAKTAPKLRALLGVGPDSAAALLICAGDNPSRLRSEAALAALCGSSPVEASSGKTRRHRLNRGGDRQANAALHRIVIVRLRWHQPTRDYLARRTTQGKTKKEIIRCLKRYVAREVFAALRQTDQHDLTAAA

SEQ ID NO: 511813 - protein, 386 aa, unidentified
MGQKAFVPQEYDVFAGLDVDKKSIAVTFSNHQQGFVRSFHMPYSVENLLKHVRKHFADQKVAFVYEAGPSGYGLYDGLAAQGYNCLVAAPSMIPRAPGQRVKTNRLDSRGLSESLRGGQLKSIHVPSPIYRELRHLTQLRDTLVSEVAGMKQRIQSLLLFEGIAFPAAPAGSRWSLKVKSQLRKLQCSGSVRFKLDQLLDQVEFSEKQVVKVTQEIRKLCQNEPELAQCMKYMMSVCGIGWIVASQLLARIGDWRELKNVRQLAGFLGVVPTENSTGEKTDRGSITRTGHGRLRSKLIQASWSAIRQDAELREFYSSVCRRHPRHVGPRVAIVAVARKLSARIAAVLMEQRPYVVRQKVHSAPLTQEETSPQGTTRRPGEPGEKNS

SEQ ID NO: 511814 - protein, 314 aa, unidentified
MNQTYVGIDVSKARLDVAVIPSGESFSSPNDEEGIEKVVGRLRELQPALVLLEATGGLERRALARLVTAGLPAMAVNPRNVRDFGRSLGKLAKTDRIDAVILARFAEAVRPEWRPMADEQTRQLQEHLTRRRQIVEMITAEKNRLLAVEHRGIRKQIRASIEWLEKQLNINEYDLDQSIKETPVWREKADLLKSVPGVGRVTVNTMLALLPELGTLTRRQIAALVGVAPFNRDSGTLRGRRAVWGGRATVRSVLYMAALVGTRFNPTLKAMYLRLIAAGKRKKVALVACMRKLLTILNAMLRTRAPWRSPEIPA

SEQ ID NO: 511815 - protein, 337 aa, unidentified
MKRYLGVDLHRTQFTVCTRLENGRTYLRQWPIRELKLFAAQLSKEDEVAVESTGNTRLFHDAVVEHVAHVAVVNPSQFKVISQSVKKTDKNDAELLALYLAKGLLPEVRMKERSQREMSHLAQTRDLLVKQRSALKAKINNLLSAEGINLKREALSSNKALERVLGLPLSPLMLAEARVLVGQIRSLNQSIAELEELIEEEGPKLAGHENLMSIKGIGPVSAAVLLSVIGDIRDFSDPGKLAAYLGLVPRVQNSNETEHSGRITKQGNKLARTALVQCALVAKRYSSFLQNFYQRIQRRRGGGKANIALARKFLGVIYHTLKNNWVFEDFPNFVLAS

SEQ ID NO: 511816 - protein, 342 aa, unidentified
MNEVITIGVDLAKNVFQVHGVDEVGEIVVRRQLRRRQVLSFFEKQPRCLIGLEACATAHHWAREIASLGHEVKLMPPRYVKAYVKRNKNDAADAEAICEAVTRPSMRFVAVKSAEQQSVLVLHRTRELLVRQRTMLVNALRAHLAEFGVVARVGLPQVKELLAVIADEEDDRIPSLARTCLAGLARQLLTLEREIVASEKRIHAWHRASEASRRLETTPGIGPITASALAASIGDASVFKNGREMAAWIGLVPKQTSTGGKERLGRISKQGDHYLRWLLVAGAMTVIRHAKRRGTTDPWLANIIADKPTKVAAVALANKNARIAWALLSHGGTYRRPATDAA

SEQ ID NO: 511817 - protein, 398 aa, unidentified
MESQLRVGIDVGCHAHRVGIADPAGSILEEFDISHSEAGFQEFFRRVEERRAELGFPVAVAMEGYNGYARPLDRLVQEKGYRLFNVNNLKLARFKEVFPGAAKTDPIDARKILELFHLREQLPMAKDVLQEVLPAPEVNERLKRISRRRRQLVTEKLRVLNRMQADLQAVSPELLAATHDADNLWFLRFLSFRDDLRQLAKLRRATIRQIPSVGAKYATVIEEWQAKATSSDEVEYVGPMIVDDAKRILELHQQIHALDEALAKLAAESEIARRLSTIPGFGKTSIAELAGEIGTLSRFSGEASLALYVGMSPLTVQSGQSSRARAPRQVNTRCRAAMMTTVARHIGCVPQSRAYYERKRAQGKTHSQAIRALGRHMVRVIWAMLRDGRDYEPRGDAA

SEQ ID NO: 511818 - protein, 368 aa, unidentified
MSETIVAYQSFVGVDLHKDTVTLAAVDPQGEVSARLKIHTKSVGKIEAWLLALPRPSALAVEAVGFVEWFIDRFRGCVDRIDIADATELANRRGKRRKNDPNDAVDIARRLARGECPLGYIADEELMQLRKLGRHWRQLGSILARAKHSMRSILLAANLRGPKLDGASAQRWLLAHGHRLKPVQRRAFRNFLDVIQLVELQRAPLRHVILKATRHERFAPLVELLQTVPGIGLIWACIIVAEIGPFDRFPHADALEFWAGLTADMKESAGRTQSGHITKAGSRTLRWALCQAAVTSCHCDARQEAIRQRLIRRNGGIKAKANVAMGRRLLGILYAMVRDNKPYEPGPRRNRTSAANKARARKRRKEAA

SEQ ID NO: 511819 - protein, 378 aa, unidentified
MRSALARCGSTEACAHLKSGCPSRLPHSGDERRAVITIGIDPHKTSVTAAALDPVGETVGHRRVACTAKTADQLIGWADAWPDRRWAVEGASGLGRGVAQQLIAAGEQVIDVPAKLAARARLLGSGSSRKSDLVDAVSVGSVALYNSKLRTVEREDEAVVLRLLSDRRDDLVSERTRTVNRLHVLLRDLVPGGARRDLSTLQAGRFLSGIRPLTTVDIERKRIARALLEDLRRADRQLRAIGTTIETAVAASNSSLTEVFGIGPVLAAKIAGHTGDITRFASKAHFASYSGTAPIEASSGDLRRHRLNRRGNRQLNTALHTAAVCQIRSPGPGQDHYRRKLAELKTTKEAQRSLKRQLSNVVYRHLVDDHRRRQLTFD

SEQ ID NO: 511820 - protein, 349 aa, unidentified
MIMLGIDAHKRTHTVVAVDELGRQLGTRTTTATTSSDHLDLIRWAEQFGPARTWAVEDCRHLSRQLERDMLAAGERLVRVPPKLMAHSREAARTYGKSDPIDALAVARAALREPDLPTAHLDEEARELRLLVDHREDLIAERTRHINRLRWHLHDIDPSWDPKKRAMTTMKHLGLIEQRLTGLESVIGRLALDLVRRIRALTQDINELEAQLDQRTRTQAAHLRDIHGVAAVSAAKLVGEVAGIQRFRSRHAFARHNGTAPTPVWSGNTERHRLSRAGNRQLNAAIHRIALTQARSYPDARAYLQRRQQAGATRKEALRSLKRRLSDVVYRAMLSDASDTSTTAIVTAA

SEQ ID NO: 511821 - protein, 382 aa, unidentified
MHARQTTLEMLNDRGQTVKRQTIRGGLDKVVEEVEKLPGPLSIAYEASCGYGYLHDRLAPLAKRVVVGHPAQMRLIFKSKRKNDRIDGGKIAKLLYLDVMPQVHVPGVDVRQWRGLIEFRAATLNRRVALKNQVRALLRGLGLAASVPRGLWSKKGIVWLKDLSGLGETEALRRDMLIDELSEVNRRIKLLEQALAKIAAAHPAMRLLMTIPGVGIRTAEAVVAYVDDVNRFGKMTQLGTYFGLVPCQDSSAAVNRLGHITKEGPATVRKLLCEAAWQARRRSRRVSGWFERITGGDTDRRKIAAVAVARKLVVVMGHMLRSGEAWREGPASTSSSTNTSMRTGCARRLRGSPPEDTVTGNDRRSSVAGAVAGPTVNGERRR

SEQ ID NO: 511822 - protein, 345 aa, unidentified
MSQQHFVGLDVSVKETAICVVDLRGEVVHFASVESHPVVISEHLQGLGIDFGRIGLEAGPLSSWFYAGLVEADLPAILVETRHMHAALSARINKTDRNDAQGIAQMMRVGLFKAVHVKTPASQQRRLLLISRKLLQRKAYDIENDLRGQLRTFGLKVGTVGTARFDARVRELVEDHSAIAAVVIPLLLARDALRTQLARLHKLLLEAVRVDPVCRLLMTAPGVGPVVALTYRTCVDNPARFGRSKCVGAHYGLTPRLYQSGEVSRTGRVSRCGDAMMRTALYEAALVLLTSPRGRWSSLKAWGMGVARRRGVQKAIVAVARKLAIVLHRMWRDGTQFRWSAGQTA

SEQ ID NO: 511823 - protein, 340 aa, unidentified
MTKLYVGIDVSKDKFDVSYTIDGQNFFGYSTFVNDKKGIKKFFKQAENFMQKYEQKEIHFCMEATGIYHFELCEYLQNSVHIVSVVNPLKTKSFSKSLMLRTKNDKVDSSMLSLYAFLHNPPHTPKLPESIRKFRSLVRYKEALSESRTQEIARLKSSLDSDVKQLINKKIRFIEKQSAETIFKIQNLIKEDEFLSTQMKLLKTVDCVGDKVAWVMLAEFKFEDIESISPKAMVAHAGLSPREYSSGSSVRTRSHISRMGNSRLRKILFLPALSCIHRDNYFTHFYLHLIERGKSKKLAVIAVMRKILLTSMGVLKNQQPFDPNWAEKTRTKYLESLKVA

SEQ ID NO: 511824 - protein, 341 aa, unidentified
MNIKRVGIDLAKSVFQLHGVDGQEKVILRKQLRRTQLLDFFKKSPPCLIGMEACSSAHYWGRELQKLGHTVKLMAPQFVKPYVKSNKNDANDAEAICEAVARPTMRFVAIKTIAQQDIQAIHRIRSELVQQRTAKVNQIRGLLAEYGIVVGRRVEVLGKALPLLLEDAENGLSADFRLLLDGLRQDFATLNGRIDEMDKTIKALADSNADAKRLQQIPGIGPITATALVCAIGDGKQFKRGRDLAAWLGLTPRQHSSGGKDCLLGISKRGDAYLRTLLIHGARAVLKVAGQKDDPRSRWLQNLCSRRNKNIATVALANKNARIVWALLSKKTDFLPEGEPA

SEQ ID NO: 511825 - protein, 484 aa, unidentified
MDEPNEAGPLVRRLVGIDLGIASEHTVRIVDGSGRRVAAARCLPIRDSLLRLEERALAGTPAGTLLEVVFEPTGPAWFPVARFFAARGHRVFRVSSAKAADLRRFYRRHTKSNGIDAETLARLPLVDPDGLSELASAEGAAAVLDRRVRATDRLTLQAATHKRRIKDLVRQLLPMTPLTGDLGKADRAVLERYADPRTLLRLGPDGLTKLIATVSHGHQGRERALAWLTAAEQAIELYGPDDPAMPYADLAAEVATEIRLLTAIETELAAHAAVREQAYQQVDPDQLARSLPGLADVGAPAMLALLGDPGRFADGHRFKSYLGLAPKASETGDTDRKGEPMSKAGPSLGRATLIRAADTARKLDPQLAKIYYVQMTERGANHLKALCVVAGHLAIRLHTVMRRGTPYQLRDVDDQPVTAQQAKTIIAERWTVPDEVRKRRRSRKTPAHKTRKAPHQTQTARPRGDLPRPGSSPPGSGPVNPAMA

SEQ ID NO: 511826 - protein, 416 aa, unidentified
MNAVGIDVSSRKSTVAVLRPLGEVVCLPFDVTHDIAGLASLVEKLKALDGETRVVMEHTGRYYEAVAKALHEAGFFVCAVNPLLIKEYGANSLRRVKTDKADAIKIARYALDNWADLRDFTPMDAIRYDLKTLNRQFQLASKQRTASANNLIALLEQSFPGIRKCFDSPVRSDGTQKWVDFAHSFWHVDCVRKQPFAAFCERYRKWCKRHAYLFKLSNAEEVYALAKRAVVLTPKSKVVKVLVQEAANQLISISRSVEVYRAEMDRLAAMLPEYPVVMAMYGVGKSYGPQLMAEIGDVRRFERKQALVAFAGIDPMPNQSGDKNVRSNKSSKRGSPYLRKTLFNVIRTYLQCAPQDEPVFQFLNRKRAEGKPFYVYMLAAANKFLRRYYAKLRDFFASLDTLQPVAPIPTILKATL

SEQ ID NO: 511827 - protein, 311 aa, unidentified
MQTVIGIDIAKHHFDLHLLPTATAKHFANNARGIRQCRRFLLALQPDKIVLEATGGYERALVMDLQTTLLPVVVVNPRRVRAYAQAMGYLAKTDDIDAAVIAEFATSPRVLVRPLPDPQTRQRQALSARRRQLVQMHVAEQNHLEHAFHKDIVRSIRQVLKTLEHQIENVEKQLAQLIDGDDTLRRQVEILRSVPGIGETTATMLVTQLPELGCSNRRQIAALVGVAPLNRDSGQFQGKRITGGGRRQVRTHLYMPTLVAIQHNPIIRDFYQRLLTCGKTKMTALIAAMRKLLTILNLMLKKNESWNPKNA

SEQ ID NO: 511828 - protein, 351 aa, unidentified
MIIIGVDYHPSFQTIAFLMEETGEYGEQELNQGDGEAERFYRELKERGVGVRVGMEATGHARWFERLLAELGFELWIGDPAVIKTKRVRKQKTDREDARLMLKLLLENRFPRIWVPSPENRDLRQLLWHRHRLVQMRTRIMNQLQAVAMNEGYRWKKKLFGQQGRALLEKLSLAPWASRRRKELLELLDQLDPKIAELTAAVEREAKKRPEVVRLMTHPGVGPITGVAYVLVIGTPDRFPCGKKIGSYTGLIPCEDSSAGRQRLGHISKQGNTLLRFLLVEAAQAAARCNADWRRRYMHLMMRREKRIAKVAMARKLAVRLYWMWRNNWQYSQLVEFGSNAGKLGYVHGVK

SEQ ID NO: 511829 - protein, 391 aa, unidentified
MSVYVGIDVAKRQHRIAVLDASGVPLEKPFSIANTYDGMSTLLERLSIWAEALEIGLEATGHYWLALFEWLTRAGFTVHVLNPLQVHAYQRSGIRKRKNDTIDAVWIADFVRIGGARQTSDPTVMPIYMQLRQLSRFRFSLVEQIGDTKRRILSLLDRVFPEYESLFASVFLLSSRQLLADAVTAQEFAAFDLDELTRILKTASRGRLGREQAENLQQAARRSVGVTFLADASRIQMGCLIAQLDFLTQQVDEIDGSLTELVAALPNQYLITIPGIGPVTAAAILGEIGDIQRFETLKQLVAYAGIDPVVYQSGQFEARQTRMSKRGSPYLRHALWMAATVARLHDPELKVYYQKRRDAGKAHGTVIGAICRKLLARIFVILRDQRPYQPR

SEQ ID NO: 511830 - protein, 354 aa, unidentified
MTTSSKQNMITFASVGIDIGKEVFHLVGFDIDGKIVLRRKIKRLALVSEFKKLPPCIIGMEACLSAHFVSRTLRKLGHDPRIIPAIYVKPFVKGQKNDYNDAEAIAEAALRPNLTLVKEKTQEQLDLQALHRVRSRLISRRTATINQIRAFLIEQGITVRTGAHALRNSLFAILENRKDEISLRMNELIVDLHEDWQRLDERIEAITDEIETVSKKEENCQRLMSVPGIGPIISTAVVAAIGTGEAFGRGRDFGAWLGLVPRQYSTGGKPILGRISKRGSKYLRTLFIQAAHVILMRPHNWQKFSFGPWLTEAATRLHRNKLATALANKLARIAWSVLANQKSFDTNRNEEPAI

SEQ ID NO: 511831 - protein, 382 aa, unidentified
MQASTAGTPTAGHCGTIFVAIELSQKTWLVTLHSPDRERMSRHKLDGGDHGELLAVIERTRTRVTEKLGSVPCVVSCYEAGYDGFWLHRLLETAGIRNFVFDAASIAVEQRARRAKTDRIDGELLLRTLMAYLRGEPRVVRSVRVPSVEAEDARRASRERDRLVTEQTAHTNRIKGLLRLHGMAVGNPRRRDWLAWLARQRDWQGRPVPPQLLAEVTREHARLTLIRDQLAALEEAQATQAAPAPAPMRERRDLLLRIKALGPAFTGTLVSELFYKDFRNRREVASYCGLAPSPWRSGGMDREQGISKAGNRRARQKAIELAWLWLRHQGDSALSRWFHARTANAGKRAKRIAIVALARKLIVALWRYLTTGLIPEQATMKA

SEQ ID NO: 511832 - protein, 408 aa, unidentified
MNPLYVGIDVSSKNNVIYLMLPNGDKHSSFSLANSHDGSTQLVKRIFTAMTSNNIDSVLIGLEATSVYGDNLVYFLKEDTTLASFDRKIHVLNPKQVNKFKESYNDLPKNDYVDAFVIADCLRFGRINKEVYMDDYRYKALQNLTRARYFAVTNLTKEKQRFINVLFKKYSTMTQEKVFSDTFSTTALAVYEKFESAETLAKVDLQELTAFIMEKGKNRFPDPDAVAKALQKAARSSYRLPKTVNDSVNQVLAISITSIRALESQIKAFDKAITKQMELLPNVLISIPGIGPVLSAGIMAEIGDINRFQNQAALAKYAGLAWQQHQSGDFEAQTTRMIHSGNRFLKYYLCEAAFSLVRCDKEYSRFYHLKYKEVNRFQHKRALALTARKFVRLVFALLKDNRLYRPAE

SEQ ID NO: 511833 - protein, 351 aa, unidentified
MKYYKTMTKYNCGIDLHTRQMYICVMDLDGNILVHRNIRNNDFAFFLKLVEPYKDDLTVTCESCFVCFWLADACEDAGIEFVLGHAYYVKSIAANKHKNDKEDSRELAECLRTNRIPPAYVCPRDLRPVRKLLRRRNKYVKNRAELTGHSTCEVMAAGNQPLSISTNSKERWQEGIRSSFDNPVDLFTTEAELEIIGSYDRVIMRMEQRIEKHARDFKQQDYRLLRTAPGIGKILALTILYETIDIKRFPTVKDFVSYCRLVAGTNESGGKDFGGKGRKMGNPYLKWAFMQAAILGKRADPKLNAYYARLERKKGKHTANAIVAAKIARAVYFMLDRKTGFSVDQLIKGRR

SEQ ID NO: 511834 - protein, 373 aa, unidentified
MTKNLRYLGLDVHAETIAVAVAEPGGEVRSLGIIPNEPSAVAKLVRKLGGREQLRACYEAGPCGYVLYWQLTKLGVACAVVAPTLVPTKPGDRVKTDRRDAEKLARCHRAGDLTAVWVPDAAHEALRDLVRAREAAKADQLRARHRVSKFLLRHGRRAPGDVKPWTQRHRRWLDTVTFAPVAQQTTLADYIHEVDHAGARLERLETALDLAIAAAPPAMQAIMRALQCLRGVRQLTAATIVSEIGPLSRFSHPRQLMGYSGTVPSEYSSGSSVHRGAITKTGNAHLRRVLVEAAWAYRFPPKCGDALRTRQRGQPPGITDIAWKAQQRLHTRYRRLLGRGKPVPHVITAVARELVGFIWAIGIAAEREVPVAA

SEQ ID NO: 511835 - protein, 334 aa, unidentified
MDNSVLYVGIDLHERESQLAIFEKDGALLEERRLATGELASFLSSLPGEKRIAIESVGFVYPIYDKLSSLQDCTVTVANVNRLQLISRSSTKHDSADARILGDLLRTNYLPVAHMKDEETREKLAVVQERVNYGVKRAELRGSVRWLLKRRGIEVEKPFGLEGRARLRELHLQEVDNRIAELDLVESFVERLNAQIVDIASRDHRARLLDTLPGLGPYTALYLACALDDVDRFPDSKHACAYLGLVPWLDESADTRHLGHITKKGDKWLRRNLVECAAVAVRKDARLNEFYTRLRHKRGERRARIAVARKLVSYAYWMIKRNKTYEELSPWTTT

SEQ ID NO: 511836 - protein, 401 aa, unidentified
MPTIWAGIDAGKRTHHCVVLDQTGSALLSTRVDNDETALVALIDVVLGIAAGGQVCWATDLNAGGAAMLIALLAAQDQQLLYLPGRIVHHAAATYRGDGKTDAKDARIIADQARMRTDLQPVRRADPIATDLRLLTARRTDVVCDRVRAINRLRETMLEYFPALERAFDYSKSKAALTLLSGYQTPESLRRIGAARLTAWLKARGCRNSAAVAQTAVDAAQAQRSTLPTQTIGALLVARLAAEISAIDDELKRIETEITDRFERHRSAGILTSMPGFGPVLAATFLAQIGGNLEGFDTVDRLACVAGLAPVPRDSGRISGNLHRPRRFNRRLLRTCYLAALSSLKNSPASRTFYDRKRAEGKSHKQALIALARRRINVIWAMLRDHTHYQEPQPANTALAA

SEQ ID NO: 511837 - protein, 392 aa, unidentified
MEPQIRVGIDVGSKSHRVGIASPEGELLEEFSIPHCRQGFDRFFERVEHHRRGLAVAVAMEGYGGHARPLDKEILRRGYTLMNVNNLKLARFREIFPAPAKTDELDARLILDLFRLDEHLPLSRGALARVCEVPEVNQRLQRISRRRRELVEEKVRVQNRMRSDLMSVCPELLSITGSVDNQWFLSFLTCRDDLTQLARLRPESLHKVPGVGKKYAEKIHSWQAVAHFSPEVSWVGPMIISDASRVLELISQIASLEAGMRELAPSSEIARLLSTMPGFGDISVAELAGEIGTLERFAGEASLALYLGMCPLDNQSGEYHGSKVPRQVNKRARKAMMNALSHHIKHAPQSRGFYEKKRAEGKSYNQALRALGRHLVRVIWCMLRDGRDYELR

SEQ ID NO: 511838 - protein, 457 aa, unidentified
MGNARARRIPAQLVEDEDYQLRHERVAGIDIAKAKGDVCTRLPPQRDGGRRASRVEDVPARAREILDLAVRLIADGVELVVMESTSDYWRIWFYLLESAGLNVHLVNSAHARQLAGRPKTDKLDAQWIARLAEMGLLRPSFVPPPEIRALRDLTRTRLQLVRDRTREWQRPEKLLEGALVKLSSVVSSLARTKTARDILEAIAAGERDPKALAALAAAHVKGGRAAIEEALEGMMPGGHHQMLIRVHLDHITFLDRSVSAVEDEIRAALDAIPAAWGIGADGVPSPDPGPGAAVLAAAARLAEIPGVSPGLATAIIAETGLDMTRFPTAAHLASWAGLAPVARQSGPRSRKPKKGQGDHYLKGYCTQAANGAARTGTFLGERLRRLSKRLGGNRAKCAVARSILVIIWHLLASPEARFTDLGPDWHARSGDRDRKIRAHLRQLQALGLDVTITPTAA

SEQ ID NO: 511839 - protein, 385 aa, unidentified
MHVGIDAHKRTCTVCVIEDGAVRESFAFPTTREGVSEFMERIPSRATVVVEASTTGKVISRMLADKHEIHMVAPPERKRPIKTDRRDAERIVREDMLQYLRRCYIPSASIEETRFLVFQQIQIGRKIGRVKNQVHALLERNMIHDLDGFSDIFGVQGLRRMVEVQLPTQEKAALARYLEELKLHTAHHRQLETELARLAESDRDALLLMSIPGIDFFTALTVKSRIGDVARFPTKKHLCSYGAVVPGASNSGEYVSRHNRVKHGDMILKSALTCAVRGAVSAEKNSAVKRFYLKHSRRMGAQKAEVAAARKMACIVWKVLRTQQPYMEEDERLTARKRRILSLKAKRQDSAPSDIRQLAEDLVGDVTVLERYPVGFNQEFEGRLT

SEQ ID NO: 511840 - protein, 348 aa, unidentified
MLIIGCDYHPGFQQIAFVDTETGDLGERRLTHREEAEQFYGTLKGRNVRVGMEASGHACWFERLLSNLQFELWIGDAAEIRTKRVRKQKTDRQDAQLLLRLLIEDRFPRIWVADAENRDLRQLLWHRHRLVQMRTRVMNQLHVVALNEGLRRKKALWRPAGRSELESLVLAPWASRRRQDLLDVLDQLTPKIQELSRALDDEVEKRPVTRRLMTHPGVGPLTALAFELVIGTAQRFHCGKQIASYVGLVPSEESSGDRRRLGHISKQGNSLLRYLLVEAAQVTVRSQPQWRSQFFHLAMRRGRKIAKVAMARKLAVHLYWMWRRGWDYEQFEKLGSHAGEPGNRHGVK

SEQ ID NO: 511841 - protein, 320 aa, unidentified
MENMNQWVGIDVSKATLDVYIRPMGKAFQLANTEVEISHLVEQLKSYDLNLIVLEATGGLETELVIQLQAALLPVALINPRQGRDFAKATGRFAKTDAIDAQILAHFGEAMKPQVLAIESEGARQLSELISRRRQLVEMQTAEKNRRTRARGKALTDIEAHIDYLAQRLKQLNQEIEELAQNNQQWIDKVNLLKTTPGIGQVISTTIVSDLPELGKLTAKQISRLVAVAPINHDSGQHKGKRMINGGRAHVRATLYMGAVVAIRHNPVIKAFYERLVERGKSKKLALTACVHKMLVILNAMLRDHLPWRICDNFQPIVNA

SEQ ID NO: 511842 - protein, 344 aa, unidentified
MKFFTGIDVSLRSVSICVVDEAGEVRYEAKVAAEVEVIVATLRRFSAEIRQVGFEAGTLTQYLTYGLSAAGYEVVCMEARQVAASLAAMRNKTDRNDARGLAQILRTGWFRTVHVKSVESHQVRTLLSSRKMILTKCIDIENEVRGLLKVFGVRLPARVGHGGFDDLVRPRVVALPDVAKCLLPLLDARSMLYRTYSQLDTAVRGLARQDPVCRRLMTVPGVGPVTSLTFKAAVDEPHRFRSSRNVAAHFGLTPRRYQSGETDNPGRISKAGDPGVRLALYGAAHALMTRSDAWSVLKAWGLRLAKVRGHRRAVIAVARKLAVILHRMWIDGTDFRAARLEVAA

SEQ ID NO: 511843 - protein, 332 aa, unidentified
MSVYVGIDVHRKRSQVAVVDQDGKVLANRNVNNGVTPILHVIGGLPPGTPAAFEAAYGWGWLVELLENYGFEPHLVHPLQCKAIASARLKNDKVDAAILAQLLRADLLPEAWIAPPEVRRLRALLRHRAQLVRLRQLLRNRIHAVLADHGHDRPAGYWSGPGREWLASLDLPAVSAEVTGDALALIDAVDAIIGRLDAEIRGHARSDPRVKILTGLPGVGPYTALVLLAEIGDITRFASARKLASWAGLTPTVRGSDRTVRHGHISKQGSAWVRWILCEAAQKAKRSPQFAARYQSIAKRRGTKIATTAIARKLLTRAYHLLTDASTAGAPS

SEQ ID NO: 511844 - protein, 416 aa, unidentified
MMTESYRIFVGIDWGADAHQVWVTDAAGTAVGEQTVDHTGTAIAALVDWIVGLAEGDARAAAVALETPRGPIVDACLARGCQVFAINPKQLDRFRDRFSVAGAKDDARDAEVLSSAVRTDRRAFRHVTAEDPLTVQVREYSRQDTELGEDLRRLANRLRDHLLRTWPELLRLVPAADEPWFWALLKRAPTPVEGRRMRPAQVRQLLRDHRIRRITAEALLTVLRAPSVSLAPGVREGVRVRILDLVDQLPVLARQRRAAERRLATTLEAMTQGPDGESVREHTDVTILQSLPGIGTRIAATMLAEAADALRDRDYHALRLLAGAAPVTKRSGKSCVVIMRYACNHHLQTALYHWARGCMQRDPRSRAHYAQLRRAGHGNARALRGVADRMLTVLIAALKTHMPYDATRRRPWAAGA

SEQ ID NO: 511845 - protein, 342 aa, unidentified
MSEVTIIGVDLAKRVFQLHGAHQDGSVAFRKKLSRGQFLAFLAQQPKCLIAMEACATAHGWGREFEKLGHDVRLIPPIYVKPFVKRQKNDVADAEAIVEAALRPTMRFVAVKSEDQQARAMLFRTRQMFVGQRTQMINALRGHLAEHGLVAARGPAHLKTLADAIADTDTTLLTEVRELGRMYLEQIEGLNARVAELDAKMRCAAKKADSVRRAQTMPGVGPVTALAIETFAPDLTTFKRGRDFAAWLGLVPKQHSTGGKARLGKTSKMGQRDIRTLLVSGAMAVLQAVERFDTPNNGWLKRLLTRKPRMVAAIALANKMARGLWAMMTKQEDYRNPVATMA

SEQ ID NO: 511846 - protein, 363 aa, unidentified
MQYHNDTELSSLEETRCQFNGGKCVIKLGIDVHQEFYVVVEQMGGNNPKPPQRFGKGVFLGWAAKLKRPAAEVHAVYEACGFGFTLQRQLVALGIKCYVVCPQKLDERNKRVKTDSLDAKALCLKLDRFVEGNRDALALVRVPAEKEEQLRAIHRQREQLVKARKQLEAQGRSLMVNHAIEPVQQWWKRRAFAQLQVPQWMRTLLLNSQPILLVLEEKIRALTVQRQSAATPNQPRGLGQMTSVVIDREIGNWHRFNNRRQVGSYTGLCPGEYSSGNTRLQSCVTKHGNPRLRAALVELAWRMVRFQPNYKPILKWRALLAKGRLASGAARKKAIVAVARQLAIDLWRFRTGRGTPEQVGLTI

SEQ ID NO: 511847 - protein, 375 aa, unidentified
MKEKVRFLGLDVHAETIAVAVAEHDGEVRSLGTIANREESIRKLMKKLGPVEQLRACYEAGPTGYVLYWQLTQLGVECAVVAPTLVPVKAGDRVKTDRRDAEKLARSHRSDDLTAVWVPDEGSEALRDLVRAREAAKQDQLRARHRLSKFLLRTGRRPAMGLKAWTERYLAWVQQIQFSQPAQEFTLLDYLHEVQHMDERVQRLEQAITEAVKLASSQVQEVIRGLQALRGVAHLSAVTIAAELGNISRFESARKLMGYSGAVPSEDSSGQRQRRGNITKTGNAHLRRIAIESAWSYRFRPAIGPRLRQRQEGVPEEIKEIAWKAQIRLHKRYLKLTAAGKDKKKIITAVGRELLGFVWAIGIKAETAGKLQMAA

SEQ ID NO: 511848 - protein, 428 aa, unidentified
MERENCNRLAEFRQLRKDIRGSDEHLIVGIDVAKERHTAFFGTATGETLYRRLIFDNDNDGFERLLLQAEAMKVQHGLEKVVFGLEPTANYHKPLGEYLIKHGHAVVLVATDAVKKNRSLLDGRWDKNDKKDPANVADLISQGKCLFYEHPSQEVRDVRNLLSLQRKLKKLEHSTRMRMRNHLVAQYFPELDTCCNWGANEGLAIVKSCLDPAAISALHYDEFLHKIHTRGVTLAQQRRLSTVWQRAFKSIGCECGLSAEYEAQMVVTMLGQVRMSIAATQQQIKTVCEKFPEYEYLLSIPGFGPDISAKALGAIGDPFRFDNASQVLKLVGLDLSASRSGKNSNNITPSISKKGKSELRYALYQAALIASSKDTHFIAYFTNKLRGREKEKGIKTKMRVKLSAKMMIIAWTLMKKKEFFDPKYLNIE

SEQ ID NO: 511849 - protein, 351 aa, unidentified
MLLIGVDYHPSFQAIAFFDEETGECGEPELNHSDGQAERFYRGLQQRGICVRVGMEATGYSRWFERLLAELGIEIWMGDPAEIKAKRVKKRKTDRNDALLLLRLLRENNFPQIWVASPENRDLRQLLWHRHRLVQMRTRIMNQLQALAMNEGYRWKKKLFSEQGRAQLEKLVLAPWASRRRQELLELLDRMNPTIEELTAAVEQEARKRPEVLRLMTHPGVGPLTALAYVLIIGTPARFQRGKQIGTYVGMIPCEESSAHKQRLGHISKQGNSLLRFLLVEAAQAAARIHPEWRRRYLRLAVRRHQSIAKVAMGRRLGVRLYWMWRNGCEYSPSLEFGSYVGQLGTGHSVK

SEQ ID NO: 511850 - protein, 316 aa, unidentified
MPLHHFGIDIDKAALTVACHELPGRTERVSNDAASIDAWLRRLPADSVLAVEATGACHQALLQGAVRHDLPIYLLNPRDVRHYAESLRRRAKTDRVDAQVIARYVAHEKGNLRRYRPAPASAAHLEQLLRRRALLAQTQAQLRLGCSDLALPAMDHLHASFKATLAALDEQLDALVAQDEQRARQREQLRSIPGVGPLNSLALVSLFWRLPSITPDGLIAFVGFDPRPRDSGNYRGQRRISKRGDAETRRLGYLAAQTFARHPVGRPLYDRYRQRGLSATATYVILARKILRLAHALVSQGTTFDPQRFAAACAGT

SEQ ID NO: 511851 - protein, 355 aa, unidentified
MDSKKYIGMDVHKESISIAVRNAAGKIVMECVIETKASMILQFIDGLRGDLQVTFEEGTWAAWLYDLLKPHVTKLLVCDPRKNRSMREGNQSDKIDARRLAELLRLDHLNPVYHGEHGLRTLKELVRSYLTITKDLGRVMSRVKALYRSWGIPCTGKQVYTSRHRAEWIGKISEPGVRRRAEFYYQQLDALRILRQEVRRDLLAESKKHKAWKRLGQIPSIGPIRSAELLGILQTPHRFRTKRQLWTYCGLGIETHSSADHRMVEGQLKRAKKQVEIRGLNVNCNHDLKNLFKGAAVVAATKPGPFEKFYAELLAKGMRPEMARLTLARKIATIVLIVWKRGVSFDAQHLKPQTA

SEQ ID NO: 511852 - protein, 341 aa, unidentified
MNLSLVGIDLAKNVFHVTGMDVRGNILFSRKLVRSKIASFFANLPICTVAMEACGGCFYWARLFKSQGHFVKIIPAQFVKPFLKSGKNDCNDSIAICEAAQRPTMRTVATKTIEQQDAELEHAYRRRLVGSRTKLVNEIRSLLHEYGIVLPVSVRKFKDNVCEVVEDGSSQLTIKCRNIIKVYIAEFISLTNRLNEITKKIENDFDESEVGQRLKDIPGVGPISGSAFVSLASHATQFKNGRSFAAWLGLVPSQYSSGGKEILGRINKKGNTYLRTLLIHGSRAVLSKAKLKSEIRDPRVKWGLELASRKGMNKAVVAYANKNARVIWHLLTKENEKYIYA

SEQ ID NO: 511853 - protein, 371 aa, unidentified
MSLVEKTVRNASSFPSLLMNLDSSLGLEPVCRIDKSQADFFRLLFWSKHKAMKKSKSYVGIDISKQSFDVAIENVQGKYIHYKLSNDPAGFTKLLKLLDEESICVMEASGPYYLKLAFFLSEKGISCSVINPLIIRRFSQMRMMRAKTDKKDAMLIAEYGKAEHPEYWQPEAGYVLELKQMQAYIEQLNKSRTGLIRQQEAFNQNPVKCLSVYQSMESMIKQLEGEIKLIEAKMESSVKQYHHKLFEQLKSIPGLGKKTAMQLIVLSGGFSKFETAKQLSSYVGLSPRIFESGTSVKAKVKICKMGMSRVRAMLYLCSWTAKKCNKACRELYERLLAKGKAKKLALIAVANKLLKQAFAIATKNEFYLKIN

SEQ ID NO: 511854 - protein, 349 aa, unidentified
MTEQRRFYAGECVYVGVDVHKETYTVTCVCHKQIVKTATVQAEPAGLAARLLRWFPGATLYSAYEAGFSAFVLHRVLTTAGITNIVVNPASIAVAANDKVKTDRRDAKKLAIDLADGRLRGISIPTEAEELARLLPRTRAQIVEHRATIARQIKAKLHQFGLIAPSSRRMISHRYLREIAAWSLAPELRVSLTLLAEQWRFATRQLIEIRRLLQEQAAAQAELEKVYRSVPGIGAVVARTLATELGDMTRFANERALFSSTGLTPRAYASGASVRRGHMSRQGSGRVRHLLIETAWRALPRDRVLQEIFDRIAATRGKKRAIVAIARRLTGRIRACFRQGTTYAVGTYA

SEQ ID NO: 511855 - protein, 402 aa, unidentified
MNAVGIDVSKGKSMVAIMRPFGEIVSAPFEIKHTASDINSLVELINSVEGESRIVMEHTGRYYEVLAHQLSKANLFVSAINPKLIKDFDNDSLRKVKSDKADAIKIARYALDKWQNLKQYNVMDELRNQLKTMNRQFGFYMKHKTAMKNNLIGILDQTYPGVNTYFDSPARSDGSQKWVDFASTYWHVDCVRKMSLNAFIDHYQNWCKRKKYNFSQSKAEEIYGKAKELVPVLPKDDITKLIIKQAVNQLNSASTTVESLRTLMNETASKLPEYPIVMAMKGVGASLGPQLMAEIGDVSRFTHKGAITAFAGVDPGVNESGSYEQKSVPTSKRGSSDLRKTLFQVMDVLIKTHPQDDPVYQFLDKKRAQGKPYYVYMTAGANKFLRIYYGRVKEYLSSLPES

SEQ ID NO: 511856 - protein, 338 aa, unidentified
MEHYAGIDVSLECSSVCVVDANGKILREARVASEPEALIGWFRSVGFGLERIGLEAGPLSQWLFAAMRQAGLSVELLETRHVRKAFEAMPVKSDRNDARGIAQLMRLGWFRPVHCKSMSAQETRTLLTARKLVQSKLHDVENSLRGILRGFGLKVGKTTELKFAGRIDELVAGHPHLQVVTKALLSVRAVLRTEFAAFQKQTRKMAQSDARTRLLMSTPAVGPIVALTYASAIDDPARFTSSKQAGAHFGLTPKKYQSGETDYTGRISKIGDSSVRTALYEAAHIILTKPLKGCTQLKSWAMRIARRAGMSKAKVALARRLAVIMHRMLADGTPFKAA

SEQ ID NO: 511857 - protein, 340 aa, unidentified
MSEITTIGLDLAKHVFQVHGIDAEGTTVVRKRLRRGQVLAFFSRIPRCLVGLEACATAHYWARELTALGHEVRLMPAQYVKAYIRRNKHDAADAEAICEAVQRPTMRFVPVKTTEQQATQLLHRGREQLVRQRTMLVNALRAHLAEFGMVAAQGLRNVGELIAIVRDDGDTRLPGVARQVLQVLANQIEQIETAVAGLERQLLAWHKANPVSQRLASIPGIGPIIATAIATTVADPKVFRSGREFAAWLGLVPRQNSTGGKTRLGGITKRGNRYLRRLLINGASANLLRSKATKADPWVIGLRRRRPPLVVAVALANKTARIAWAVMLREKEYQPRAMAA

SEQ ID NO: 511858 - protein, 340 aa, unidentified
MTATTDHYLGIDVHKRQAQVAVLDDEGTVVEEIRVANADLDEVAEKYTGSRAAIEAGSNYFTIYDRLDEELDVTLANPAKADWLENQKQKNDRKDAKNLARFLRLGEVPESYVPPEEYRRYRALARGRKKLVDKRSDFKNEVNSLLDQNGVTYDGSLWSNQGREFLRELTLDTASELLLEQWLEAIDEFTVKIKRMQQRIEEVATKVKEVETLMSAPGIAAFSGLLIHGEIGEVERFDRAAEVVSYAGLDPVIRESGDSRREGQISKEGNGYLRWILVQCANTAVHNAKDPYLSQFYWRLRNKRNKPHKVAIVATARKLLVALFNMLRNNEPYDPPEVSA

SEQ ID NO: 511859 - protein, 399 aa, unidentified
MLAVGIDISKSKSVAAILNQDGSMHTSPFEFHHTQPELDAFIKYILNSNQSATILMENTGHYHYPVLKAFQEAGLPVCMVNAYQIKKFGDMDLRKAKTDKKDAVRIARYALEKSYSLVPYTSMEQKYEDLRFLARQYNQRMLTLKTNKVFLLNLLDETMPGITNILPLTTRTPETSLSVLFINRFKSYDRIKKMGKNRFLDAFEKIARKSRNRQTKTYGLAIYETALYNITTRGENEYTLGAQDQCLELVCESQKAADSIILKMQTLAETLPEYAVLRSMAGVGDRLGPLILAEIGDIRRFHSGKALNAYAGNDAPPYQSGTFESHNRHISKRGNAALRKYCFEVMQALKLTRPQDDPVYLFLLKKEQEGKPYNVAKMAGVNKFLRIYYARAMETLKQQ

SEQ ID NO: 511860 - protein, 382 aa, unidentified
MKVTYQTCCGVDVHKSFLVATIVKTTGGIEPSYQKKRFSTFNNSILEFKQWLLDNDCHDVCMESTGKYWVPVFNLLEDDINVVIANPKWVKAVKGNKDDTKDSKWIGDLFRLGLVRGSYVPCKKIRILREYTRYRYKLISCRSSEKNRYQNALTVCNVALDSVVSDIFGKSSTSIIDYLLEQSGTSINHEEIASKLLRSLKSKEDAVIESVEGYQMTDAQKYRMRLVRAHMDYITAEIGTDMSQFSSSKRLCCWAGLTPGSNESAGKKKSVRITRAGVYLKPALVQCAHAAVKSDKSPYYKKKYDSLVKRRGKKRAIIAIARMILTAIYQMMSTGEQWNPSDLYKIDMPVALVEKQKAKAIKQAKKLLQREGLLPPDEPLAS

SEQ ID NO: 511861 - protein, 407 aa, unidentified
MELPALYKSVIGLDIHQAQITACALIEEPDGCTRIEQRQFGGFARDRRELADWAASLRPDEVVMESTGIYWKSPYAALEAVGIRAKVVNARHVRHVPGRKTDVGDAHWLAMLARAGLLRASFVPPAALRELRLIARQRQKLVGQLASEKNRLHKVLTDSGIRLGVVVSDLHGQSARAMVKAIIAGQAPQQVLNLASRRLKASREEIFDALQGDLTASHRFVLDELMQHIEEIEARIDRFDARLLAGLESERGTLALLQTIPGVDLIGAAMLLVEIGSDMDAFGSADRLASWVGVCPGNNESAGKRKSGHTRKGNPYVRRLLCEFAHAASRTTSVFKSKFQALVVRRGYKRAIIAIGHKILRTLFFMLKRREHYRDCATDYEALSVQRNAPRWIKALTKFGFITPASA

SEQ ID NO: 511862 - protein, 436 aa, unidentified
MATGPCLSALAGLASPLPACGERVRPSAERAERSEAGVRGRCRKRRLPRRSASSCTAPLYLHRDDFVRWKRRRFGLDGHPTRSLAMSPVPPPATTVGEPGIFATVTYDRTVAWFPPIARARQVTVNEIICGVDVSKDWLDAHVEPGGAAQRFRNDAAGIAALGAFCRAEGAGLLVMEASGGYERLAFLLLWQAGQPCGLVNARNVRRFAEAMGALEKTDRIDAAMIARFGQARRAAPTPPPSPAQQHLRALVTRLSQVTDDLVANRQRKGAAADPEAVESLEEVIALLLAQRRHLEGEIASLIDDDPLWACLDRAFRQIKGVAERSVARLLAEVPEIGSFSNRAVSKLVGLAPLADDSGQRSGRRSIRGGRAGPRSILFIVARIVAQHDPHFAAFQHRLQTAGKAKMVIRIALARKLLVILNAKARDARNQFAAAT

SEQ ID NO: 511863 - protein, 339 aa, unidentified
MKQIYAALDVSDKTTHVCVVDGEGTITWRGVCATDPQALATVLRKRCPDVVRVVLETGPLSAFLYHGLIERGVPAICVCARHAKGVLSTRVNKSDPHDAEGLAQLARTGWYKAVRIKQEATHIDRAQLKIREQLVKSHRTMANQLRGLLKLFGLRMGKVTTPAKRRARLDALFAQKPELKAVMLPLIESLEALEAQIKRSGSLLAASAAADPVASRLMSVPGVGPITALIFKSSIEDPARFASGQDVGAYAGLVPRRNQSGERDHKGRISKVGDPLLRSALYEAANNLLARVKRTCALQTWGKRLAEAKGPKRARVAVARKLAVLLHRLWQSETEFCWT

SEQ ID NO: 511864 - protein, 370 aa, unidentified
MQTVRSFVGMDVHKETISISVAEDGRNGPVRFIGVIPNQPDDIAKMAKRLAKHGELDFCYEAGGCGYNIYRQLTTLGHSCTVAATSLIPRKPGERIKTDRRDSQKLAILHRSGDLTKVWVPDATHEALRDLVRARVDASMHLMRARQQLLAFLLRHGRSYPTGKHWTQRHRSWLAGQTFQQEVHRIVFQDYVETVWTAQERRDALIERIGAMTANWSLGPLVEALRGLRGIDLLSAATFICTTGDLSRFESPRMLMGYLGLVPSEHSSGGSVRRGGITKTGNREARRMLIEAAWSYRYPARVAKEKAEILVRLPKNIRDIAWKAQTRLCARYRTMIARGKKPTVVVTALARELAGFIWAIGQEMRTPMTT

SEQ ID NO: 511865 - protein, 368 aa, unidentified
MGERITSFIGLDAHAESNAIGVADAGQMTAPRFLGTVGAKFSELTKALGKVGKAGELRIVYEAGPCGFAMVRQLREAGYHCEVVAPSKIPRKSGDRVKTDRRDALTLAGLARAGQLTFVTVPDERDEAMRDLSRARTDAVRARLKARQQLKAMLLRHDRRYSGKTSWTAAHERYLSEVSFGHRPQDIAFVEYRRAIGEAHARVGILTAALCQELEQWRMRPLVRALMTLRGIDEVVATSLVAELGELKRFAHAPDLMGYVGLVPSEYSSGQKRSLGGITKTGNGQARRMLIEAAWNYRFPARISLPLQKRQEGQPAAIREIAWKAQLRLAHRYRRLTARGLQHNKVCVAIARELTGFIWSIGQQVSIT

SEQ ID NO: 511866 - protein, 409 aa, unidentified
MRRIRKKRSASHIVGCAPKCAEPHAETPESVLTAANQRRQTVEEFISSFVGLDVHKDSIAIAVAEDGREAPRFVGTVGYEIKQLLKALHSAGKPESQLVVYEAGPCGYGLVRQLRSRGYCCEVVAASKLSRRPGDRIKTDRRDALTLARLARSGDLVRVAVPDERDEAIRDLSRAREDALRARLKCRQQLKALLLRHGRRYTGRSSWNPAHERFLSTISFSQPAQDIAFAEYRLAVREGHDRVERLTQALRTQTEQWRMKGLVAALSSLRGIDFIAAVTLVAEIGDFRRFSHPSELMGFLGLVPSEYSTGERQRQGDITKTGNSHARRVLVEAAWNYRFQARLSRLMHIRQDGQPKAIRDIAWRAQLRLCHRFRRLRSRKLHQNKICVAIARELAGFIWAIAQQVTVAA

SEQ ID NO: 511867 - protein, 352 aa, unidentified
MTTASIAWLGLDAHSKNCVLGHLDDQGRELQWWRFPTAPQQLIQHLHAIPATDKRLMLEESNLARWLGELLRPHVQRLVVCDARRNRLISHDPHKHDRRDAFALARLLRLHEFKPVWQPTDPQRVLFKRSAQAYENAVQRQTRLKLQLKALFQHWGLFPTGSTVFAQPGRARWLQQLPYDALRSQAGILYELLDQALASQRQCRRLLCQGGRPFPEVKRLRTVPGIGLVGADLFVAYVQDPTRFRKFSQLTRYCRLGIRDRTSDDKPLGYQQLDRQGVGTLKAISYRAFLQAAKRRTGPVWEFYQSSRRHTQSATHARLNTQRKILLTLWTLWLTGREFEPDTFSRSHLSDV

SEQ ID NO: 511868 - protein, 425 aa, unidentified
MKRPTPRGGKGRTMEVVYPCCCGLDVHKKSITACVLWAETKGKSRKEKRGFVTFTHDLLRLADWLAECGVTHVAMESTGVYWKPVWNILAEQFEVLLVNAQHIKAVPGRKTDQKDSEWIADLLQHGLLHGSFVPPRPTRELRDLTRYRVSLVQEINRIANRIQKVLEDANIKLASVATDPLGASGRAILEAMLAGEQDSARLAEMSKGLLRNKIPELKLALEGRVTEHHRFLLRQLVDHLRFTESKLTEIEQEIDRRMHPFEDKVIRLCTIPGVDRVTAWGLLAEVGLNMNQFPSSAHLSSWACLCPGSFESAGKRLSGKMRKGNVSLRRCLSQAAWAISMTKNNYLSALYRRIAARRGAKRAIMAVAHALLVIAYHLLKRKENYRELGADYFDRIDVNRIRRSLVRRLERLGHRVTLQPIAQTA

SEQ ID NO: 511869 - protein, 315 aa, unidentified
MTKPESTKISVGIDVSKQMLEIAVHETGESWSCDNNTEKCAALVPKLKQLQATSIVLEATGGFETLVTATMAAADLPVIVVNPRQVRDFAKATGQLAKTDLIDAQVLAHFAAAIDPQPRLAKSAEAQHLEALLARRRQIVEMIVAEKNRLANNRDRAVVKDLKIHIAWLERRLKSSDDELQRVLKDSPAWSQHDALLRSVPGVGPVLSLTLLAQLPELGQLNRRQVAKLVGVAPFNRDSGQWRGSRHIWGGRAAIRSPLFMATLCAIRINPTIKCFYQRLIKVGKAPKVAITACMRKLLTILNLMIKTQTSWRIA

SEQ ID NO: 511870 - protein, 423 aa, unidentified
MRFIGLDVHRDFCEVAIAEGGEVRVAGRVQTEPDALALFAESLGVDDQVALEATGNALGIARILEPHVGRVVLANPKAVKGITRAGAKTDKIDARTLAKLLAGGFLPAVWLPDEQTRILRRRISARAQLVRQRTRAKNQVHATLIRNLKGKPPVSDLFGARGRRWLAEQNLPADEQETIAACLRQIEFLDGEIALIERTLAEQVLASTQMRRLLTLPGVNFVTAAALIGAVGEIGRFPTARQLVSYLGLDPRVSQSGAEPARHGRISKQGPGETRHVLVEAAWHATRTLGPLRAFHQRVAARRGGNIATVAVARKLAVIAWHMLSRGEDYAFARPSLTREKIRKLELATGAERQKGKRIGVFATKEQHRLDKELAAQAELAYRRLVQDWQPAIKGTGAAPGRASRRPSSGQAARQETAPPPAL

SEQ ID NO: 511871 - protein, 467 aa, unidentified
MHTHQKSSDPVATIGLDIGKNTFHLVGLDKRGSIAMRIKVSRNQLARRLANLSPCLVGLEAGSGSHHIARQIQALGHDVRLLPAQYVKPFLKGHKNDYRDAEAVQRPTMNFVAIKTPEQSDLLSLHRVRSRLVRQRTAVINQIRGLLIERGITVRQAPGPLRKVLPEVLSSPPEALSPRILRLIAELDQDWRRLDQRLEALSAEIASLSEDDCACQRLMSVPGIGPIISSAVVAAIGTGSGFKQGRDFAAWLGLVPKQESTGDRTKLGRISKRGNKYLRTLFVQAAHVVLERRPAAATRAPFSQAGEFRKFSAIGRMPVLVLANGEILIESATILDYLDEIAGPGCALIPATGEERRKSPRILASATAACDKAIAINYERRRPREMIFVDWIARCRAQLDAALSKLEALNLQLTDLCRLKQTEITSACMFGYIKRVEPDAVSGGRHPLLDRLSAVCEARREFKACPQ

SEQ ID NO: 511872 - protein, 448 aa, unidentified
MGWRARPLVVSTDPLGRWRFSLMLPDVTQSTGKDEGLLFIGDDWAEGHHDVVLQDESGKTLARRRLPEGVDGIARFHELVASCWGEHSEPDAAQVVVVIETDRGPWVKALAAAGYRVYPANPKQAARHKETIAVSGKKDDFFDAACLADMGRTRRHQIRELAADSDIAEAVKIAARAHQKLVWERTRHLLRMRSALREYFPAALQAYAPLTLSGPDALELLGRAPDPASAARLAVTQITAALRRAGRRGDLAQRARDIQAALRAPHLSQPAVITEAYAASVQAGAAVITALNAQIKVMEAKVSGLFRRHPDAGAYLSQPGIGDITGARILGEFGDAPGRYASAKARKNYAGTSPLTIESGKKRTVRARYIRNRHLIDALHAQALSALTASPGARAYYGELRAGDVGHDDAMRRVASRLVGILHGCVKTGRGYDEAAAWSHRAEPPQAA

SEQ ID NO: 511873 - protein, 347 aa, unidentified
MIIIGCDFHTRSQQIAMLDTETGEVVEKKVEHENGEVKGFYEGLKEPALVGIETTGYTRWFAEMLAELGHELMVGDAAKIRASETRKQKHDRRDAWHIMELMAAGKFPRIWLPSAEERDVRVLVEHRHQLVQLRTRAKNGLQAMALSYGLRRRGRLWSQRGQEELQKMPLREGMARRREDLVQLVQQLGTWVKELDKRIEQEVARREDAQRLMTHPGVGPLTALGTILVLGPVERFPDYRHLTSYLGLIPKEDSSGGKQRFGHLTKQGNRLLRFLLVEAAQTASRYDPRLQRAYRRLAFRKGAAIAKVAVARKLAIRLYIMLRDKIDYAEFCRRGSHAGMLGDVALV

SEQ ID NO: 511874 - protein, 410 aa, unidentified
MKSAVITAVGVDVSKSKSTVAVRRPGGEILMHPFDVRHTNSDLKKLVSTLKKLGEDIRVVMEHTSMYWRPIALTLKKAGFFVSAVNAMLIHDFSDNSIRKLKTDRADALKIANYALTFWDTLPLLNDEEETRLLLKMQSRANERITATATVLRNGLIALADQTFAGVNLAFDPNTKNTDGHEKWVDFFLRYWHRDCVCQYSMEVFTESYRGWCKRKNYKFRTATAHKIYIMAQECVATLPKCESTKTLIGQACKSLNAVCEARHNTQLEMQRLAALLPEYEIVMQMEGAGPVTGPALMAEIGDVRRFKNKKALVAFAGIDAPPFQSGAFESKSRHVSKRGSPHLRRTIFLVSNIILTLSNPENAVFCFMGKMLRGKTLLCLYCCRKRKVLAHLLCSRERVPSLSSSSGCL

SEQ ID NO: 511875 - protein, 348 aa, unidentified
MNFYNPQKLFYCGIDLHARNIYICLMNKDREVLVHRKLGNNSTDLFLKILQPYKHDLVVGAETTFAWYWLADFCADNDIDFVLGHALYMKAIHGGKAKNDRIDSKKIALLLQGGMFPLAYVYPKEKRALRDLLRRRLHFVRLRGELFAHVQIVNYQNNNSPLPRLGNNKSIRDDVPELFENETTRKIVESDLDLIKYYDEFIPKLEWHIFSKTTQLYQKELAILSSARGMGRIIALTILFEVDSIDRFPSVQDFASYARVVKCTHESAGKKYGTGGAKIGNPYLKYVFSEAACLMAKYNPRIKTYLQKMERKHGKGKGKIILAHKIVRAVYYMLKRNTVFDIDKFLNN

SEQ ID NO: 511876 - protein, 410 aa, unidentified
MLFVGDDWAEAHHDIEIEADQGRVLVRRRLPEGVAGLAVLHALVGDHLQEGAEPEQVLVGIETDRGPWVQALIAAGYTVYPINPLQAARYRERHGVSGAKSDPGDAHVLAEIVRLDRAHHRPAAGDSLLAEQVRLAARAHQSMIWMRQRAANTLRSLLRECYPAALEAFSDDLAGRDALAVLTAAPDPATGRRLTPARVAGLLRKAGRQRNLQTRAEEIVAALRSEQLPVRDELAAVNAASVSALVAVLTTMVAQTAVLEEQVRLGFGQHPDAQIYLSQPGLGTILGARVLAEMGDDPTRYADARARKNYAGMAPITRASGTKRIVLARYTRNRRLADALYQQAFSALNSSPGARAYYDRHRTAGDTHHQALRALANRLVGILHGCLRHHQPYNETTAWASQTAPTTLAA

SEQ ID NO: 511877 - protein, 338 aa, unidentified
MELYAAIDLHSNNSVLVVTDAEDHMVFAKRLRNDLELIVTALRGCPGDIRAVAVESTYNWYWLVDGLRSAGFDVRLANTAAVKQYDGLKHGDDFSDAKHLAQLLRLGILPQGYICPPELRALRDLMRKRAQLVRQRTAQILSIHNLFARNLAKSVKGDDIKRLEDGEIDALALLEDQKCALRAHVAVMRCLEEQIRLLERGILAKGKLRQEFHALKTVSGIGDVLAMTIALETGDVHRFASAGKFASYARMVDSRRESNGKSKGVGNRRCGNKHLSWAFIEAAHCAVRYDPSVRRFYQRKCAKGLSVVAIKAVAHKLARACYHIMREGVPYDGTRAFA

SEQ ID NO: 511878 - protein, 362 aa, unidentified
MNDSITWVGMDVHKDSLVVAAVDGKSGSLLWRAEYPNSDKGVRRLVVQLKKSDSPRSVYEAGPCGYHVRRVLQSHGIACDVIAPALIPRKPGDRVKTDRRDAEKLARMHRMGELTTVHVPTPAQEALRDLVRTREDAMEDLLRHRHRLSKFLLRHGLRFEGRSWTKSHRLWLRSRKFEDGNLETVFTEYILSVEQEEDRLRRLDRRIEEESLRPDIADVVARLKTLRGIQTLTAMTLISELMDLRRFAHPRELMAFVGLVPSERSSGGRERRGSITKTGNTHVRRVLLEAAWHYRHPYRGGGKAILRRRKDQPPAIVEVARKADLRLHKKYFRLVLKGKRTPVAATAVARELAGFVWAAGRA

SEQ ID NO: 511879 - protein, 349 aa, unidentified
MSQGLNCAVAVIGIDIGKNTFHVVGLDDRGAIVLRQKWSRGQIEARLANMPPCLIGMEACVGAHHLSRKLKALGHDARLMPAKYVRPYSKGQKNDFRDAEAIAEAVQRPTMKFVVTKTADQLDLQALHRVRERLVSQRTGIINQIRAFLLERGVAVRQGLRFLRAELPRILATPPDVLSARMVQVISDLAEDWRRLDHRIDDLSNEITLLARQDAGCERLMSVPGIGPIISSAMVAAIGAGEAFSKGRDFAAWLGLVPKQISTGDRTILGKISKRGNRYLRVLFVQAAWVVLIKPMSWERHGLKHWIDAARKRLHRNVLAIALANKLARIAWGVLAGSRTFEASKLQTA

SEQ ID NO: 511880 - protein, 350 aa, unidentified
MDHFGGLDVSVKETSICIVDDTGRIVKEVKVASEPEALLKVLGNPTYRFKRIGLEAGPLSQWLFSALAEAELPVICVETRHMQAVLKAQINKTDRNDARGIAQMIRVGLYRPVHVKLLQSKAIAIENDLRGTLRNFGLKVGMVGKVRFEARIQELVENIPDLAVLVEPLLIVRRVLREQIVILHRRLLAIVREDEVCRRLMTTPGVGPVVALTYRATVDVPARFRKSKSVGAVFGLTCSRYQSGEIDWSGKISRCGDEMMRTMLYEAAQSMMHSKKWSWLKAWAMQIARRRGMKKAIVALARRLAVIMHRRWQYWPPYRSPRKNAAISAANAFGCSIAAKCPPFGIGVQR

SEQ ID NO: 511881 - protein, 421 aa, unidentified
MNMTSKSAQFAALIGIDWASQRHALCLYDCATGKRESSILEHTPEAIAQWARGLQERFRGNQIALCLEQSKGPLISALLEYPFFVLYPINPATAARYRMAFKTSRAKDDPSDAQVCLELVLHHREKLNPWLPNDAPTRELSCLLQHRRAAVDLRTLLTNMLRDALKSYYPQALELAGQDLFAPLGCQFLLKWPSLQELQKARKESVRKFYYAHNCRRMDVIEKRLDAIAQMTPLCRDLALLEPAMVQVRMLARQLLQLGGALKEYDSKIEQLFAQHSDALIWESFPGAGPTLAPRLACAFGTQRSRYQSAVAIQQYSGTAPVTEKSGKNQHWVHRRWARPHFTHQSFFEYASQSVLHCSWAKLYLKEQMARGKAYPTAIRALAFKWQRIMFVCWRDRVPYDETIYRQSLQRRGSHLARKLN

SEQ ID NO: 511882 - protein, 386 aa, unidentified
MQKLNDLNRSLAALEPDGTLIAVIEMSLSSWLVAGIVPGVERQPLKKLVVDESALLKLLHRWREEAEKAGRRIERIAVAFEAGRDGFWLARWLKARGIEAYVIHASSVAVSREHRRAKTDRLDTELLKRSFLGWLRGERDHCKMVEIPTMKDEDAKRPNREHDSLIGERSRIVNRMKAALVRLGIRGFNPKLKRATTRLDNLRTPEGEPIPPNALAELRRDMERRRLVNNQIRQIEEERLERIEKTPCDGPHVMVRLLARVMGVGIETADMLVHEVLSRNLRDRRAIARYAGLTGSPDESGRKRREKGLARSGNARVRRGMIQLAWRFLMFQKESALAQWFRARTETARGTRKTMIVALARKLLIALWRLVREGVVPDGVVLRPAR

SEQ ID NO: 511883 - protein, 416 aa, unidentified
MTSSPKTIPFERYLAIDAHKRYVMVGGLNAQQEPVLLARKIDVDAYPQWAQANLKSGDAVVIEATTNTWTLYDATAPLVGKVVVAHPFAVKQIANARVKTDKLDVYRLARLLAADLVPEVWVPPIEVRELRTLIAHRRRLVKLRTMTKNRLHSLVHRNNLVPPEGGPFAAKNRTWWEGLSLSSVEKLRIRQDLALLDHLEPQITEVDQELACLSTQPAWVDYTPYLLQLPGFGLINVMTILSAIGDITRFPHAKKLVGYAGLGSSVHDSGQTHHSGHITKQGRRELRWALVEAAWIAVDTHPHWKEQFQKLNRRMKSCQAIVAIARKLLVVIWHLMTERVADRKADPDMVAFKLMTWSWKLNDLQRGGLTARQFVRYCLMQLQLGENLTHVRRAGQRPIASVEEVLALRPELRSSV

SEQ ID NO: 511884 - protein, 369 aa, unidentified
MGDRIRYVGLDVHKEGIVVAVAEGGLRGEVRDYGRIANTPAALRRLAHQLGQDGLTLRFCYEAGPCGYGIQRQLSALGHECVVVAPSLIPKRAGDRVKTDRRDAASLARLHRAGELTAVWVPDPGHEAMRDLVRARLDAVRALRRARQQLSGFLLRQGCHYGRPAWTKLHRRWLAGLKFDQAVHHIVLEDYIAAVEAGEARRDRLTAQIEAMLPDWTLAPVVAALQTMRGMALVNAATLIAELGDLSRFANPRQLMAYLGLVPSEYSSGASIKRGSLTKAGNSAARRLLIEAAWCYRFPARISRELRLRQEEQPRPIREIAWKAQLRLCARYRKLARNGKPAKVITAAIARELAGFIWAIARHVSPAAG

SEQ ID NO: 511885 - protein, 350 aa, unidentified
MLIIGCDFHSRFQQIAMLDTQTGEIVERRLEHESGEAERFYRSLPHPVRVGLESSGHAQWFERLLAELGHELWVGDAARIRAAVVRKQKTDTRDASHILDLLMTNRFPRVWRPSPAERDVRQLLVHRQKLVWARIKVKNQLQTLAMNQGVCIRRKLWASAGRRALEGLTLGPWTSRRRKELLQMLDQLNGSVEELDRAVGEEAQKRADVVRLMTHRGVGPVTALAFVLTLGPVERFRRSKQVVSYLGLNPQEHSSGGRQHLGSISKQGNTMMRYLLVEAAQTASRFHPELRRNYQRLKSRRGSAVAKVAIARKLAVRLYWMLREKADHAQLVRMQGSPRGTLVDASPSRF

SEQ ID NO: 511886 - protein, 348 aa, unidentified
MRFYNGSHRHWCGIDLHARTMYVCILDAQGQVLVHKNLRSCPEEFLAVVAPYREGLVVAAECIFTWYWLADLCAREGIAFVLGHALMMKAIHGGKAKNDRIDAFKIATLLRGGMLPQAYAYPAGMRATRDLLRRRLHLVRHRGQLLAHIQMTAQQYNLEPLGKRIAYAANREGLAEHFPDAAVRRSIGLDLALLERYDELITDLELDLVRRAKQHDPQAFQRLRSIPGVGKVLALTLLYEIHDVRRFDRVQQFASYARLVRCAKESGGKKLGTGGAKMGNVHLKWAFSEAAVLFVRHSAEGKKLLARLEKRFGKGKALSILAHKLGRAVYYMLAREKAFDLRRFAATA

SEQ ID NO: 511887 - protein, 350 aa, unidentified
MLIIGCDYHPGFQQIAFVNTDTGELSERRLAHREQAEQFYRELKQKNASARVGMESSGHSRWFERLLHELGFELWIGDPAEIRTKRVRKQKTDRQDAQLLLRLLLENRFPRIWVPDVANRDLRQLLWHRHRMVQMRTRVMNQLHVVPLNEGLRRKKALWRPAGRKELEAIALAPWASRRRQDLLDLLDQLTPKIEELTHALEEEVEKRPVTRLLMTHPGVGPLTALAYELVIGTPERFHCGKQLASYVGLVPEEKSSGDRRRLGHISKQGNVLLRFLLVEAAQVTVRSQQEWRSKFFHLAMRRGRKIAKVAMARKLAVHLYWMWRQGCDYGQTLKLGSHAGEPGNRHGVQ

SEQ ID NO: 511888 - protein, 345 aa, unidentified
MKIVGCDLHTRYQQIAMLDTETGELIERRLEHANGEARAFYAGLQGPVRVGIEATGHTRWFERLLAELGHELWIGDAAQIRAAMVRKQKTDARDAAHLLQLLVEERFPRIWRPTMAERDLRQLVWHRQKLVWMRNAVGNQLHALAMGEGVCRKKQLWTKQGRAELQALNLGAWASYRRQELLEMVDQLDGSLEKLDRAVEEQSQQNEAAVLLRTHPGVGPVTSLAFVLTLGPVERFKRSKQVVSYLGLNPREHSSGGKQRLGAISKQGNPMMRSLLVEAGHSAARLDAELHKDYQRLKLRRGSGVAKVAIARKLAVRMYWMLRQQANYAQLVRMQGSPWATLVEK

SEQ ID NO: 511889 - protein, 343 aa, unidentified
MQIRSVGIDLGKTTFHLVALGDNGKVLLKKKFTQRQLIIFTANLQATLIGLEACAGAHFLGRALREQGHDVKLIPAQFVRPFVKSNKNDFLDAEAIAEAVGRQNMRFVPIKTDDQLDLQALHRVRDRLITRRTSVINQLRAFLLERGLVFAKSPAKLRERMPEILENAEEDLTPRMRNLLALLWNEWKDLEQQVVDLNHEVELIASSDAACLRLRQIPGIGPLVATAIVASIGNGAAFHKGREFAAWMGLVPKQYSTGGKAKLYGISKRGNRYLRKILIHGARAMVLRCKRDRVPMGAWMTALEARAPRNVLIVAAANKLARIAWAVLSSGQDYRAVQEPVAA

SEQ ID NO: 511890 - protein, 343 aa, unidentified
MNEIRVLGIDLGKDVCSVVGFDSAGQVLLRRRMRRDSILKLASGMPSCVMAMEACCGAHHLGRLLREQGHDVRLMSPEYVRPYVKAQKNDDRDAEAIAEAATRPTMRFVDLKSDEQLDMQSLHRARDRLVGERTTLINQLRAILLERGIVMAKGRRKLELRLDQLLAGEVAISRRIRQLVEDMRAQWRALDERIGAFDAEFVAIAREDAATKLLATIPGVGPLNATAFVASVGRAETFGRGRDLAAWLGLVPRQMTTGGRPKLLGISKRGNGYLRRMLIHGARAALPSLAKGRTLLGEWLRGLLARTHINTAVVALAAKMARIIWAVLRSGRPFQVEAMPSAG

SEQ ID NO: 511891 - protein, 346 aa, unidentified
MKQITTIGLDLAKNVFQIHGADAEGAPIFNRKLRRAEVLRFFEKLPPCLVGLEACGGSHYWAREIAALGHDVRLIPPVYVKPFVKRGKTDAADAEAISEAVTRKTMRFVPIKSADQQAAVMVLKTRALMVRQQTQAINALRGHLSELGVIAGVGVTKVKALIEIVRDEADDCLPKAARLALAEIADQIEALTRQIEKLERGIVAEAKRDEDMRRLTAIPGVGAITAASVKALVPDPDGFKSGRHFAAWLGLTPKSHSSGGKERLGGISKMGNPTLRSLLVCGATSVLRRAKGNDKAPRWLIGLLARRPFKVVAVALANKMARIIWALLTKGATYRNTGAASSAASA

SEQ ID NO: 511892 - protein, 338 aa, unidentified
MGTYAGIDLHSSNSYIGIIDEQDRRQFGKRLPNSLTQILVALEPFKKNLEAVVVESTYNWYWLVDGLQEEGYKVHLANPSAIKQSEGLKHTDDKWDSFWLAPMKRLNILPEGYIYPKEERPVRDILRRRLLFVQQRAAQILSLQSAISRNLSLRMSGNAIKKLKDEDTEDLFESPFLVLIAKSNIAVIEFLTKRITAIEKAVKSEAKLREEFQLLKTIPGIGDILALTIMLEVGDIGRFPKVGNYSSYCRCVKSEKISNKKKKGENNRKNGNKYLSWAYVEAANFAIRCSPEAQKFYQRKMAKTDKIVATKALGNKLARASYYIMRDRVDYDSSKLFG

SEQ ID NO: 511893 - protein, 370 aa, unidentified
MSQFSTLFIGMDVHKESIAVAYVAQDHGAEVTSLGTIGTRQCDIDQLIRKMQSKAKHLIFIYEAGPCGYWLYRYFTKKGYDCWVVAPSLIPKKAGDRVKTDRRDAVQLARLARSGDLTAVYVPKVEDEAIRDLTRAREDTLSDLKDAKFRLKAFLLRHDIRYTGRANWHPAHLRWLSEVVCQTPAQQIVFQEYVRAVSEHTERLQRLEQELQEQVKSWRLHPVVEALQALRGVQFTVAVTMVAELGDLSRFDTPRELMKFLGLPPSEYSSGERRHQGSITKAGNTHARQALVEGAWAYRYPAKVSRHLQLRLENQPKRIQDISWKAQVRLCTRYRRLVAKGKHANVVTVAIARELAGFMWAIAKEVPVTT

SEQ ID NO: 511894 - protein, 369 aa, unidentified
MNKVLYVGLDVHADTIAVAVADEGRLGEIRYFGTISNTADSVLRLTKRLVEAGKVPTFCYEAGPCGYGLYRHLTKLGFECAVVAPAMIPRKAGDRVKTDRRDAEMLARLWRAGELTPIWTPDEEQEAMRDLIRTRKQALDALKIAKQQLLSFLLRHGLRYQNGSYWTTRHRRWLAEMRRFRYPHQQLAFEELKRAIDQIEARIATLDNAIEEAVPRWHFAPVVDALRALRGVNTLIAATVVAEIGDITRFGNPRQLMAWLGLVPSEHSSGSTTRRGRLTKSGNALARTMLVEAGWSYRHMPKEGQPYLKRSAHLPQEIRDIGWKAQTRLCKRFRHLSNTGKPQPRVLAAIARELAGFIWDIARKTPLST

SEQ ID NO: 511895 - protein, 357 aa, unidentified
MATGSVAQVGVSVIVGVDTHKDDHVAVAKDELGRSIGGISIPATAKGYRTLLSWARGLGEVRAFGIEGTGCYGAGLARYLCGQGQAVIEVNRPNRQARRRRGKSDPADAEAAARAVLSGEADGAPKSGDGAVEMIRVLRVARTTANRSRTQAINALHGLVVTAPAELRERLHGLLAPRLVRTCASFRPSEVSDPSDATKVALRLLAKRCLDLEQEIQVLDREIERLAREACPALLDVYGTGPETAGALLLAAGDNPERLRSEAAFAKICGASPVQASSGKVARHRLNRGGDRHANSALHRIVMVRLRWHHQPTMDYVARRTAEGKSQREIVRCLKRYVAREVYMALAEGRTQPLAGP

SEQ ID NO: 511896 - protein, 360 aa, unidentified
MTRVSKKARRGKYLFCAIDLHQEKMLVGFAVDKGKAKFKEFSTTEAGFHSLVRRLNRLQAQHGCDEVWVAYEASGCGFVLADFLEEAGLRIFVLAPTHLPHTVKSRSNKTDKRDVVRIQEVLRGHVLAGNSLPAVWSPPRELRDDRELVRRRLSLKEELARAKNRVHGLLRRYGIKKPEGVKTNWTKRHRAWLASLGKVLNPGAARALGSLLRELSYYESECSLIEKDMVSLAGEDRYRSRVSKLTEIPGVGLLTAMVFLTELGDMDRFPNRKTVGSYLGLVPRTWESGEQDDRKGRISRMGPSRVRKVLNQAAWSMIRWSPYWKAWFKRRTPGGKRRKKMIVAVMRHLGIMMWRQARAA

SEQ ID NO: 511897 - protein, 309 aa, unidentified
MIIHPGIIGIDVSKAHLDIFDAGSGRTERFPNSSEAVRSLAERLQARKQAFAIFEATGHYDRHLRSVFDAQGLAYARVNPSRARDFARAAGFLAKTDAVDAKMLAAMGQALAPQPSPSRDTARETLASLHKRRDQLVAMRASERVRFSEAPELGDSLQSHIAWLDAEIARLDASVDAALAMSAELAADTRLLRSAPGVGPVTAATLIALMPELGSLSPKTAAALAGLAPFNADSGQFRGVRRISGGRRRVRQALYMAAVTAVRSASRFKRLYEDMREKGKPAKLALIAIARKLIVTLNAMLRDKVAFQR

SEQ ID NO: 511898 - protein, 360 aa, unidentified
MNPTIVAVDLAKTVFQLAVADTHWRVIEQHRLSRSQFERWFLNRSVSLVVMEACGSAHHWARWLNGLGIEVKLLPAAYIRAYVKRNKTDAADACALLEATRCADIVPVRVKSIEQQALQGLHRIRSLWMMTRTSRINALRGFCREFGLLIPQGARTGIEVIARVLADPEATVPTLIRGSMTLLIEEIRLLEMRIAQLEKELTELAKQSPACTTLLSIPGIGLLTATALVAATGGNVTHFKDARHFASWFGLTPKEYSSGSTRYLGRISKRGDRYLRMLLTHGARSVLRAATVAQRAGRAIDGVKQWGLAVQARTNHNKAACALANKLARICYATLRDAVPYGQAVSREMEKLQHTALMTA

SEQ ID NO: 511899 - protein, 366 aa, unidentified
MKKSSTVRVNGNMIFKGHKLTIGLDLGDRWSCYCVLDEAGEIILEQKLPTTPEAMKQTFERIPRSLIALETGTHSPWVSRLLRELGHEALVAHAQKVQLISKSKRKDDRHDARTLARLARIDPELLGPVRHRSAKAQIHLTVIRARAELVSARTALVNAARGLAKSYGQRLPKCGTAQVSQELAAELSVELREALEPLLAEVESLNERIKEYEVRMEKIARESYPQVELLKQVKGVGTQIALTYVLTLEDPYRFPKSREVGCFLGLRPGRRDSGESQPQMHISKEGDPYLRTMLVQGAHYILGPFGEDSDLRRWGLKLAARGGKNAKKRAVVAVARKLAVLLHRLWVSGEVYEPLRNSHEALRAVA

SEQ ID NO: 511900 - protein, 344 aa, unidentified
MEQYVALDVSLKEISVCVIDGKGAVTFEGKVAAEPTLLIALIRRKAPQLVRLGLETGATSPWLYHALKGADLPVVLMDARHAHAALSMRPTKSDRSDARGLAEMLRMGWYRAVTAKSFTAHERLALLAARRRLVEIRVELDGQIRGLLKTFGLIVGPGNTDALVRRAEALAKGNATISGLVAKLAEVRRHVVAQVAALDRDIRRLVRREPVLKRFTTVPGVGPITAAAFLSTFDDPKRFKHARDVGPYFGLTPTRYQSGETDRHGRISKCGDAFTRTCLYEAANVLLTKVQRFSPLKAWGTRLVQRIGAKKARVAVARKIAVILRCIWTDGTEFWWTREEARMA

SEQ ID NO: 511901 - protein, 337 aa, unidentified
MKRYLGVDLHRTQFVVCTRWENGEQEIRQWRIGELAKFVEQLQSQDQIAVEAMGTTARFYDAVAGRVARVVVVNPHQFKVISESVKKTDRKDAQALALYLEKDLLPEVRMKPKQNRELMHLAETRDLLVKQRSALKGKINNLLAMQGIELRRESLSSKIALERVLALPVSGMVQLELRILVEQIRSLSESIVELDERLEEEGQQLPGYENLTSIKGIGSLSATVLLTVIGKISDFADENKLASYLGLVPKIANSNESERSGRITKQGNKLARTALVQCGLVAKRYSPYLSRFYDRIKQRRGGGKAKIALARKLVKIVYDTLKNQWVFEDFPSFTLAA

SEQ ID NO: 511902 - protein, 415 aa, unidentified
MDILVERCAALDVHKDTVVACVRLPGPDGGRLQELRAFKATTAGLGGLADWLDSYQVTLVGMEATGCYWKPVWQVLEDRVCCWLLNARHVRNLPGRKTDMADAAWLCQLVEHGMVRPSFVPPKPIRELRDLTRYRKAQIQERTREVQRLDKVLQDAGIKLSSVASRALGMSVRLMLEAMIAGTHDPEVLAELAKGRLRAKLPALREALAGRFRTEHHGLLVAQILAHIDYLDEAIASLSARIEQLIAPFSEQVALLTTIPGVERRTAEVLVAELGADMGQFPSAAHLASWAGMCPGNNESAGKHGSGRTRKGSKWLRSALTEAAKAAARAKGSYFSAQYSRLKGRRGPGRATIAVGHSILVVAYHALDRGVAYHELGEDYFQQRQQQAADRYAKRLVRQLEQLGHKVTLEPADAA

SEQ ID NO: 511903 - protein, 395 aa, unidentified
MFIVGIDIAKRSHEAIIIAEDGQVVRKAFSFRNNCTGYNLLLEQVRRLTLVKSQIVFAMESTAHYWLALYARLLKDGYAVMVLNPIQSHSLRELYIRKAKTDARDSLIIADLVRFGRCKASNVPQDKILALRELCRSRAYLVDMAADLKRKLIALLDRIFPEYESLFDSVFSKASIAVLSKYSTPQKVKNANLRKLTDILMESSNGHFGEWKAHQLKEAACSSFGIDDSGGVYSTLLGMFLEQILSLTAQADSLEKQISVFFQEFNNPLTSIPGVGTVLAATILSEIGDITRFSSADKLLAYAGLDPSVKQSGEFKSNQNRMSKRGSPYLRRALWLASTVAVHRDPMFQTYYEKKISEGLHYMNVIGHVSRKMTAVIFAVLRDGQPYQPILQSAG

SEQ ID NO: 511904 - protein, 385 aa, unidentified
MGSQTFIPRDYDVFSGLDVDKRSISVTFTDHDRFLKSLRMPYSAEHLLNHVRKHFPNKKVAFVYEAGPTGYGLYDGIVAQGYPCLIAAPSMIPKAPGQRVKTNRLDSRSLSENLRGGQLKSIHVPSLLYRELRHLTQLRDVLVSELAGMKQRIKSLLLFEGIEFPPAPAGSQWSFLVKDKLRKLACSGTVRFKLDQLLDSLEFNEKQVLKAIREIRRFCQNDPELSQCMQYLMTLPGIGWITASQLLARIGDWRELNNIRQLGGFLGLVPTEHSTGERTDRGSITRTGDERLRSKLIQASWSAIRQDGELREFFRTVYRKHPREVASRVAIVAVARKLSVRVAVVLMKQRPYEVREKVHSAPLTQEETSPQGTTRREPEPGEKNS

SEQ ID NO: 511905 - protein, 375 aa, unidentified
MYLVKCSSCPFKPQAAASPISPRSCVRPSESVGAAAQLDTTRTITWAAESESTREGLQMSSSSSLTILGIDISKDWLDAHILPGGRSWHISAAPECISRWVKQLPDGINLAVIEASGGLQNLTAATLSKAGIPVAIVNPKQVRDLAKALGQRAKTDAIDAKMIAEFGLRVQPKPSQLPDQTQILLADLIKRRRQLVQAEVAEGNRLKRIQAKPVRRDIEVHIRWLERRITGIDKQINELIQDSPMWLANEKLLTSVPGVGPRTAHVMLGELSELGKLSRRQIAALVGVAPYNHDSGKSRGKRYVSGGRAPVRAVLYMAALTASRFNPVLSQFYRRLIEKGRPKKVALTAVMRRLLTILNAIIRDQNPWKSVSINS

SEQ ID NO: 511906 - protein, 342 aa, unidentified
MRYIGANVHKNNTLFAVLAQEGKVEQRTRIENNLQALREFVGGLPKPAHWVIEAGYHWQPFYEVVEELDLAVSPAQPLKVKLMAEARIKTDTIDAATLAHFLLLNYLPIAYIPPREVRDLLEILRHPARLVKTQTMAKSRIHALLAKNGIRHQFNDLFGKAGRRFVKGLHLRPWYQLALQQLLALLDTLQMLIQEVTEVIEKEAKATPEARLVATIPGVGYYSALLILAEIGDINRFPNGKKLCSWAGLVPSTYSSGGRTYHGHLTKQGSGWLRWILTQAVPHAARGTSQLGAFFQRVARRGGRNAAKMAVARQMLIIIRRMLVRGEPFRDRHHSRPSPYSF

SEQ ID NO: 511907 - protein, 420 aa, unidentified
MKAWNQITHYAGFDWAKDHHDVIVLDGGGKIVADFRFEHTAGGWEQFREKLAAFAGVAVAIETKFGTVIERLQEIDCCIFPVHPQSAKAYRQRKVPSGNKTDHVDAWSLADALRLDGANWKQLAPQEPLIKELRLLCRDEVALIRDRTALITQLRQTLYDYYPAALEAFDDWTMPAAWAFILAFPTPEALVKGGKRKWEKFLHTHKLGRPETYQRRLEIFARADRFAGSPPAIHAKSRLAVTRAKQLQLLQTQINEYRQEIRRLFAQHPDAGLFESLPGAGEKIAPRLLSEIGDDRALFPDAQALQCLAGTAPVSFQSGQIHRVHLRRQCNKSLRNAVHLWANLSREFCPWAETYYKALRAKGKSHACALRALGQRWLKIVWKMWQTRAPYDADLHARNQIKHGSWVLQLVNKTDASAKA

SEQ ID NO: 511908 - protein, 408 aa, unidentified
MNTLYVGIDVSSKSNVVYLMLPNGDKHSNFSVANSHEGSTLLVKKIYSALTSHSLDTVLIGLEATSVYGDNLVYFLREDATLAPFNRKIHVLNPKQVKKFHDTYNDLPKNDYVDSFVIADCLRFGRINKEVYMGEYRYKALQNLTRARFFAVQNLVKEKQRFMNVLFKKYSTMTQEKVFSDAFSTTALAVYDEFESAEALANMDLHELTDFIIEKGKNRFPDPVAVAKAIQKAARSSYRLPKTVNDSVNQVLSISITSMKALESQIKEFDKAIKALMELLPNVLISIPGIGPVYSAGIMAEIGDINRFDNQASLAKYAGLAWKQHQSGGFEAEVTRLIPSGNRFLKYYLCEAAFSLVRCDKEYSDFYHLKYKEVNRCQHKRALALTARKFVRLVFRLLKDNRLYCPAK

SEQ ID NO: 511909 - protein, 361 aa, unidentified
MNEGQATTERCGVVGGVDTHKDLHVAAVVDSHDRVLGSECFPSTRHGYKQMLIWMRSFGELTRVGIECTGTYGAGLLRYMQQAGVTVLEVTTPDKSDRRKRGKDDTLDAQNAAHAAYAGIRTVTPKTRDGMIESLRVLKVCRKTAMTARRVALQLIHNTIVCAPDELRESLRVMTRMQLIRTLAAWRPDLSDYRSLTSAYRIALKSLGRRYLELHDEIADLDVMIAALVDELAPDLISRNCIGYESASQLLLTAGDNSNRLRSEASFAALCGVSPVPASSGKVTRHRLNRGGDRAANSALHIIAIGRLRTDPRTKAYIDRRVSEGHSKLEAIRCLKRYIAREVYHVIRQRNRQIGQVQIAT

SEQ ID NO: 511910 - protein, 354 aa, unidentified
MSLSSDADWIIGVDTHLDTHTAALCDARGRAVAQLQVPATTAGYVQLLAWARSAAAGSRAVWAVEGTRHYGLGLARHLTGAGEQVTEIDSTKRVGKHRAGKSDAIDAVRAARELLARPHPAQMRADGDREALRLLMIDRDNAVASAKTARSALASVLVTAPAPLRERLRHLPRQRRAKECAALTCPANADRQTLILHQTLIRLGQRIAALASVAAELEAQIAAIVEEMTPGLVAAEDGLGALSAAQLLLSWSHAGRIRSEAAFAMLSGTAPVPVSSGRTDRHRLNRLGDRQLNRALHVVAVNRMRFHPPTQTYIQRRLAEGKTERDIRRCIKRYLARHLYRALNKQLNQAPQTT

SEQ ID NO: 511911 - protein, 347 aa, unidentified
MNFYNTTHLHYCGIDLHARSLYVCIIDQDGKTLLHKEIAANPETLYQLITPYLDDLVMGVECMHCWYWVADFCEDHGIHFILGHALYMKAIHGGKTKNDRIDSYKIAKLMRGGNFPLAYVYPRALRATRDLLRRRTRIVRHGADLKAHIVNTTSQYNLPPNKVNLKNVCAREQLKSTFENPEAQRNIDLDLSILDCYHHELSKLEWHLEQQAKHHNPVCFTLLRSIPGVGRILALTILYEIGEIQRFESVQNFASYSRLVKCKAESAGKTYGTQGNKIGNAHLKWAFSEAAVLFLRGNPEAQKYLQRLQKRMNKAKALSALAHKLGRAVYFMLKQEKVFDERKFLAG

SEQ ID NO: 511912 - protein, 357 aa, unidentified
MKKLFIGIDFSKEKLDATIILACGMNEIGSREYGCFPNNTTGYRKLCNWVKTNAWNTIAEEWLFCGEDTGSCSIGLSKWLYGKGYDIWIENAYAIKHSSGIQRVKNDKADSAIIAEYAWRQQDKVVPFEPLNESLAQLREIFLYRHKLVGQRVAMELRKEDKSQSNKSKAISFINRKSKHHIAEINKTIAECDKAIDSIIEADEELKENYAIITSIKGVARQNATCMLVYTNNFKKFGYDPRKIACYYGVAPFGKQSGTSVNTPAHTSHFANKLIKSLLGQAAHIAKIYNPEIRDYYQRLISKGKKPQVALNNVKNKLIRIIVALVRKKVPYDQNTYKYYEEREVIERKKNEKLIYC

SEQ ID NO: 511913 - protein, 411 aa, unidentified
MQTLVERGCGLDVHQATVVACLLMVRREGKVQKQMRTFGTTTRELVSLREWLLSEGCTHVALESTGVYWKPIYAILAGALEIVVANAQHIKKVPGRKTDVKDAEWIADLLCHGLLRSSFVPPKPIRELRDLMRYRRKWVESQAAERNRLLKVLETANIKLANVATDVFGMSGRLMLRALITGKATPQEMADLAKGLLRKKIPELQLALEGKLEEHHRFLLELQLQRLEAAEKDLAALEQRIRQKLEPYAAQLGLLDEIPGVDWTLAAVMIAELGVDMSVFGSVSQLASWAGLCPGNNESAGKRKSSRIPSGNVYLKSGLVEAANAAARAKGTYLRDKFFRLKARRGYKRAVVAIAHKILVAIYHRLSQKVSYNDLGDLYLDKLNKNHLTRNLVHRLERLGYQVTLTQQKAA

SEQ ID NO: 511914 - protein, 314 aa, unidentified
MAMEQRCLGIDVSQAVLDAHLLPSGETWSVSNDARGIKGLVGHLKAARDVLVVIEATGGYQHEAAVALSRAGASVAVVNPRQVRDFGRATGQLAKTDRISAEILAMFGERLRPEARFVPDEELELLAALIQRRRQLLEMLVAEKNRLRVTRAAEVHKELKTHVRWLEKRVKDADKKLDEAVRKSPMWRAKDEILQSTPGVGSVVSRTLIGELPELGTLNRKEIAALAGVAPFARDSGTMRGKRTVWGGRASVRCALYMAALVGVRYNPVLREMYQRLLGRGKLPKVALVACMRKLLVTLNAMVRDGNHWQEVRA

SEQ ID NO: 511915 - protein, 391 aa, unidentified
MGVQRRVVIGMDPHKRSVTVEVMEADERIVGHCRFGTDVAGFAELVAFAGQWADRVWAIEGCEGIGRHVAQRLLAAGEQVVDVPAKLSARMRMFATGQGRKTDDTDAHSIALVGVRISGLHPVVSDHQLEMLRLLVDRRRRIGQEHVTKICQLHQLLLELVPGGAKKDLSAAQARKILAGTRPKDEVGKLRKRVALELVVDLERIYLRKKQANKELITLLKTTGTGLLDLHGIGPTGAARLLVEVGDITRFPDRGHFASWTGTAPIDVSSGDRQHHRLSRGGNRQINAVLHMMAVVQLRNRTEGRAYYDRKVAAGKSPNEAMRCLKRRLSDIVYRALLDDYVTAKATGPGGHRGASHQSSVAGSHPHTSTSDKPLPGPVTTKPTTTLPKAS

SEQ ID NO: 511916 - protein, 342 aa, unidentified
MDPVGIDVHQKYSQVCEMVGGEVVSQVRLATTQAGLRRHFGGRERMRILLECGGSSRWVARLLRELGHQVVVINPRRVRLIAESTLKTDKIDAEILARLAGLGSELLQPVYQRRPEAEALRTRLGVRRTLVQARTAMLNSVRGTLRCLGYRMGSSSPGKLIERFYALGLPVEVEESLEPLLEMIVRLTERLAVLEAELERHSRQDELLRRLRTVPGVGPVVSCAFRAWIDDPYRFEHSRDVGAYLGARPCIRDSAETKKRGRITREGDSEMRRLLVQSAQTLLNTKQDCSLKRWGLELAKRSGRNKAAASAWRASLPCSCTVCGSSRRPSSPSHGRPEPKRA

SEQ ID NO: 511917 - protein, 338 aa, unidentified
MIGVDLAKSVFQVHGASMTGQPKFRKKLSRQGFAEFMAKQPPAIVVMEACGSAHYWAREMNSLGHEVKLIAPHYVKPFVKRQKNDAADAEAIVIAAQRPEMRFVEAKSTEQQSRAILFRARERLVHQRTELVNALRACLYEFGHVVPQGLHQLGRIKGILDEPNSDLPELMRDECGDLIKQIAEKTVRIDARTAKIKALAAEADTARRLQTIPGVGPLTALAVEAFAPPMESFGSGRDFAAWLGLVPRQFSSGGKERLGRVSKAGQSDIRRLLIVGAMSRLNWLGRRSIPEGSWLARIAARKPRMLVAIALANKMARTIWALLTKNEDYRDSAQVAAA

SEQ ID NO: 511918 - protein, 373 aa, unidentified
MPRYSTAFGMDVHLRSTTVCALDAETGEAVARRFRGNPWGEVAEWMSGFPGPSLAAYESGYLGFAPQRELSGLGVDCVVAAVSRVPRSAADLSSKNDRNDAARMAKAILSHDITPVWVPSPEIEGLRDLAGAHDAATARLAAAKQRLLAFLARRGYAYGGTTPAGNPRRYWTYGFLRWLDKVRPADDGGIRALAALRSEVEAADETREAVLAEYRAAVAAGPLSAEVEALQSIKGCGFALAAAFASEVGDFSRFRSGRQVTSYFGLAPKQRSSADSVRLGGISGAGNALVRRLAVEGSWSYVQASHQPKLMPKGSGVPLEVRMHGRKGSERLLRRREEMLARGMPQAKANAATAAELVRWLWALGAMCREATE

SEQ ID NO: 511919 - protein, 345 aa, unidentified
MLPASFLRLYSPAISALNIVPLWTRDNSREGFRSLIDRISTYVPLTQVQVVLEVTGHYHRALLQYWQELDIPVYVLHVQKRQEGLLKTDKRDALALANMLYKQLEKGIQVGDPLQAVRRLVAPTEAAAQLRGMVRHHYELTAESIQRKNKLTAICDELFPEFTRLLRNPNLPTALALRSGFPTPAALAAAPWFEWREARGRTCSVSDAQLRELQRLAAQSLGTKDPARVRGLVSEQKQLIRELDLIGQHLAQLEAEMIHMVGTSREGKILTSIPGIGPLAAATLIALIGNIANVERASQRKLVCGLGPKGSTIGVHSGLDTLVVAWGQTDETDDVSHRVEGYPMG

SEQ ID NO: 511920 - protein, 396 aa, unidentified
MNPDGEKLDALKVKNDLQGASHLRDRIVATADKLSASEIHIGLESTSVYSWHPAMYLHQDPALKALGAKVFTINPKLISKFKEAYPDLDKTDRLDAWIIADRLRFGRLTTTIVMQEQYIALQRLTRMRYHLIHSLTREKQYFLQNLFYKCNAFTSEVESSVFGHAILEMLSEKYSLDDIATMDVADLADYLKEKGKNRFPDPERVARCIQKAARDSYRLSKVVEDSIDLVLGVSIQTIRSIQAQLKELDKAIERILDGMNGARCLRSIPGIDKVYAAGILAEIGDIERFNDQAALAKYAGLTWRRHQSGSFEAEDTKRIRSGNRFLRYYLVEAANSVKNREPEFGEYYRKKYQEVPRHQHKRALVLTARKLVRLVDALLRNDQLYTPRRKVNHAKG

SEQ ID NO: 511921 - protein, 350 aa, unidentified
MTTMTPEPGSVTGGVDTHLDIHVAAAVNHLGGVLDTKSFPTTAAGYRRLLRWLRSFGPLHAVGVEGTGSYGSALAQHLTEDDVRVIEVSRPNRQVRRRHGKTDVIDAIAAARAVLSGEATATPKAHSGPVEALRLLKIVQRSATKSRTQAGNQLRAIVATAPDDLRSRLRSLKTTELVTTCAAFRVRAEDDSLATVTRLALRELAQRIQLLDEQLARTKTRLARITTSVAPQLVARKGVGPDTASAILVSAGDNPHRLRDERSFAALAGSNPIPASSGKTTRHRLNRGGDRQLNAALWRIAIVRLATDPDTQAYLARRTGEGKTKTEAIRCIKRYIAREVFAALPQTAAG

SEQ ID NO: 511922 - protein, 338 aa, unidentified
METNKWFIGIDVSAKYVDVCWTGDKTTASQHLQIEQGAKGWRQLKRKLLKTGVMPAQAHVVMEATSTYWMSIAHYLVACGMQVYVVNPRQAHHFAESYQRHNKTDQVDAELLMRMGIERHEHLPRWMPPPACYEELYERLVLRESLLDAKLRLANVRHSFSQRPYLDSSVMRQLDEQIDQLACRVDALKAQIVELLMTGQWAQMAQHILSIKGMGPLTTAWLLIATVGFTTCMDREQLAGYAGLAPREHRSGSSIHRRAKTGPGGHARLRRHVFMAARSACVHNPRIRSFYQRLVDRGKPKKVAHCAAARKLLGIAFALVKKGEDYRCDYPLPQAISS

SEQ ID NO: 511923 - protein, 368 aa, unidentified
MKQQTSCATETHNKSSKTIDYTGKTIHVGIDVHLKDWQIASVNETVVLGNHRMEGKVENVVTHLQKKFPGATFKCVYESSAWGFKLQRQLVARGMECIVVHAADVSGSDKERKRKTDKVDAVKLARYHAAGLLQGIYVPDEELQKQRNLVRFRCKLTRDLTRSRNRLKSLLKYQGIETPKQFGKARWSRNFLTWVEQEAQKDIVLKDTLLFMLAEVKFLRQLLLEVERKLRTLMNSEKYNDSIKLLMGVPGIGRTIAILWLLEIGDVRRFENIDRLNAYVGFRPDTNSSGEIQHDRGISSRRHNQLRVSLIQATWQAIRTDPAMLETYQQLIKRMKGTQAIVRIARKLVRRIRAIQLNAIPYQKGVVG

SEQ ID NO: 511924 - protein, 391 aa, unidentified
MYFIGIDIGKRQHEACIIDSSGQIQSKMFRFSNTQAGGQKLIEWMRAVDPNLASFCVGMEATGHYWLALYTFLCKQGIRPLVINPIQSDAFRNMYIRQAKNDAKDAFIIAEILRFGRYTTTELANEQILALRQLSRFRFNLVDSISDLKRQVIGILDILFPEYERLFSDLFGKTSSELLMEYTTPEEILAVDTEELAAFIAKHSRNRFGLDKAQELKSAAESSFGVGIALDAYRLQLRLLLQQIRFMEQQLRALEDKITTYLAAVDTNLMTIPGIGPVLAAAILGEIGDISRFSTGVKLVAYAGIDPTVKQSGEYTGTRNRMSKRGSPYLRRAIWLAASVAKTHNPILKAFYEQKRAEGKHPLAATGAVARKLTYVIHAVLRDRKPYEPIA

SEQ ID NO: 511925 - protein, 350 aa, unidentified
MKEHSNERVAKVVGIDLAKRSFHVYGVDERGQRVISKTFTRTRLSEFMANLPACTVAMEACGSAHYWAQQFRSHEVRLIAPQFVKPYVKSNKNDAIDAEAICEAAQRPTMRFVAVKSIEQQDIQAIHRMRSLVVERRTAQVNPIRSLLLEYGIEIPQGRAAVGRCLAEILEDADNGLSDCFRAEWRELAKELRHLDLRVDHDDAQIEAMAQSHPQAQALMTIPGLGAQGATALVAAVGEDPRLFKNGRGLAAWLGRVPRQHSTGGRDRLLGISQRGDVYLRQWLIHGARAVLRWVERQDDPTRRWATGLKARRHAHVAAVALANKIARIAYAVLTTGQPYDPTKGAFIQA

SEQ ID NO: 511926 - protein, 350 aa, unidentified
MNKNMTIGMDLGDKNNTVCVLDRDGEIVLRKELVNTKESLVKFFGKYKGSLVAIEAGTHSPWISRELEAMGFEVLVGNPRKLRAIWDAEDKCDGRDAEMLARIARMDRSLLYPIHHRGEAAQMDLAVMRARDELVSVRADLVNHVRSTVKGTGNRVNKCSTEAFFRKSQESIPERLRPALMPIIEAIEAISEKIRAFDKEIATTLQARHPEAKRLSQVPGVGPVTSMGFVLSLEDPARFTKSRSVGAYLGLTAKRDQSGQTDKQLRITKAGDEYVRRLLVGCAHYILGVFGPDCDLRRFGLKLAARGGKNAKRRAIVAVARKLGVMLHRLWVTGAEYDPDFLTNRMKQAA

SEQ ID NO: 511927 - protein, 310 aa, unidentified
MGEHVGIDVSKGHLDWAVGMEGSADRVPNTSAGVRRLIASLRKIELDSIIVESTGGYERRLTEALTKAQLPVILVNPWRVRRFGEGLGVLAKTDPLDARILALFGERARPERRPLPDPRQREMADFVRRRRQLISIIVAEKNRLDTASKTIRRDIQSVVQLLERRVVKLDEKIDAAIDGDDEKAEIRTRLQTVPSVGPGVARTLIVDLPELGHLGRRQICSLVGLAPFAKDSGKKAGARRIKAGRAAPRSALYLAAMNGARFNPVLKAMYERMLETGKPKKVALIALARKLLTILNAMVRDGKDWQEMSA

SEQ ID NO: 511928 - protein, 354 aa, unidentified
MDKGSKLDFSGQHIYVGMDVHKKSWSVSIHTEQFEHKTFTQPPEVDKLTCYLARTFPGATYHTVYEAGFSGFWLHDQLKEKGIDCMVVNPADVPTKNKERAGKTDRVDCRKLARSLRNGDMKGIYVPPRVKVEDRTLVRTRQSMVRKQTRCKNQITSILFFYGITIPEESRWSRRFIHWLESIHMERASGDFALKAHLEELTHLRQIIANLNRAILSLSRTEEYRSDVLLLKSVPGISTLTAMILLTELADISRFSSLDKLASYAGLVPDIKSSGETEYSTGITFRRNAAMRSLLIESSWVAVRKDPALMMAFDKLSRRMKKTQAIVHIARKLLNRIRFVLKNRQKYVPAVMSL

SEQ ID NO: 511929 - protein, 343 aa, unidentified
MDHYAGIDVSLESASVCVVDASGRIIREAKVGSEPDILVAWLRGLGLPLARVGLEAGPLSQWLYAGLRDAGLAVELLETRHVRDAFKAMPVKTDRKDARCIVQLMRLGWFRPVHCKSLPAQEVRALLTARKLVQSKRHDTEMSLRGILRGFGLKVGMTTARTFAGRVRDLVAQHPTLTAIAEALLAVWVALGEQLQRLEKRVRAAARADARTRLLMSVPGVGAIVALTYAAAIDDPARFKSSRATGAHFGLTPRKYQSGETDVTGRISKIGDAGVRTALYEAANVILTRPVRASSLKSWGMRLAARAGMRKAKVALARKLAVLLHRMLSDGTEFIAHRAAARA

SEQ ID NO: 511930 - protein, 413 aa, unidentified
MEVIHPRCAGIDCSKKDAKVCIRIQGQGPRVKTSTVSTWGATTGQILTLREHLVAANVTCVVIESTSDYWKPFYYLLDDDLDVILVNAASVRNLPGRKTDVSDAAWLADLGAHGLVKASFVPPAPVRALRDLTRTRTVITRERTREVQRLEKLLEDAGIKLSAVATDITGVSGRAMLEALISGQRDPAVLAELAQRRLRSKIPALTEALRGRFNDHHAFMTRLFLDRIDAHTADIGRLDERIEEAMQPFRPTRDLLMSIPGFSRIVAEVFIAETGGDMSVFPTAGHLASWAGVSPGSNESAGRVKSTKTRPGNRYLKGVLGIAALSAARSKSTYFAAKYKRIATRRGPMRAIVAIEHAMIIAAHNMLTNGDFYRDPGANYYTAHQPARTKSRAINQLESLGYRVTLEPLTESA

SEQ ID NO: 511931 - protein, 329 aa, unidentified
MDISIKEIVCTTIDEKGNVIRKEKFENTFENLDAFLKNFSHEDSFVMESTGFYEPLYDFIESKGFKVKLANPLKIKLIAESRMKNDDIDSEILAKLLRNNWIPESYVPDREIREIRRVVRTRMDIKRTITSYKNRIRIEMKRLHVDFNEDPFTMNGKIFLRTLNSDRINSYLNVLNGLEEEVKSIDRYLKKYEGIEEVRLLQTIPGIGLFSALIIYSEIGDVNRFSSSSKLLSYAGTVPSVRQSSDVMQYGRITRQGSKNLRWIITECLHIHLRFDPSSSVSRFYRRISRGKRKKGRAIVAASNKLLKIIYWVLKERRPYTSSSAEQPR

SEQ ID NO: 511932 - protein, 427 aa, unidentified
MAPKIAGIDVHKRMLAVVVADVELVGEYTFERRRCGSSPSELRELADWLVAQHVEEVVMESTAQYWKPVWATLERYWKPAAQQRADAATRAGTLHLAQALSNRARPGRKKDFPDAERLVKRLVADELVLSFVPDPEQRLWRTLTRTKYQLTKTRVQLQNRLEALLEQAHLKLSSLVTDLLGVSARRMLQAVADGATEPGALADLADARLRATPEQLRDALGACAELHPIYRRLLKMTLADLALLETQMRQLDQDLADLLRPPHDHVERLADVPGLGVDSAQQIIAEVGPTAATFPAARQLASWVGVCPGTEESADVNESPRSPKGNRQMRRLLNQAANAAGKYKGGVFQLLYRRYVPRLGHQQTIAIIAHRLCRLIWKILHEGVRYEERGSALNQKSKRARAARMIRELRSLGYRVEPALCASALPV

SEQ ID NO: 511933 - protein, 421 aa, unidentified
MTRRIAGIDIHKNVLMVVVATVLEKEIDGGMEQQIEYEGRRFGSGTQERGHLVAWLRERQAQEVVMESTAQYWKPVWMDLELHFPKLHLAQAHSNKAPKGRKNDFADARRLTRRMAAGELILSFVPDAEQRTWRTMTRGKQQLVRDRVRLQNQTEALLEEMRIKLSGVVSDLFGVSGRRILEALAGGETHPEKLADLGDDRLKCGREALVDALTGHNESMHLQILKLSMERLKLLDWQIEALEQMAAGASRKHPAAVTRLAGVPGFGVDSAQQVIAEVGSDAKSFPGAGELASWVGTIPGSDVSAEQNHSSRSPKGNTFLRRIFTQAAQAAVKTKGCHFQNVFRRLVPKLGYKGAIWAIAHRLCRLAWKILHDGVSYIEQAAETTPQAKKRRAQRLTQALRRLGFQVALTPIAPKAEVAQG

SEQ ID NO: 511934 - protein, 339 aa, unidentified
MAIITTVGLDLAKRYFQVHGADKQGKVVLKKKLSRAEVLSFFVNLPPCLVGMEACGGSHYWAREIGKSGHTVRQISPQFVKPYVKSNKNDANDAEAICEAVSRPSMRFVTTKSIEQQDIQALHRIRDRLVGNRTALANQTQGLLLELGVTMPQGIRHLRTMLPIVIEDLDNNQTLLEKDYLSDLYSELVELDEKVAAYDAKLAAICKQSAECMRLLKVPGIGPLSATAIVAVVGQAKEFKNGREFSAWLGLVPRQNSSGGKTKLQGISKRGDIYLRTLLIHGARAVAYRCSSRTDARSEWLRAVCDRRGMNRAIVARANKTARIVWAVLAKGEAYKEAA

SEQ ID NO: 511935 - protein, 367 aa, unidentified
MKKISTVAAQPSRNLSQAQLTIGLDLGDRSSWYCVLDEAGAIVLEQKLGTTPKAMKEVFGAIARSRMALETGMHSPWVSRVLSELGHEVIVAHARNVRLIGESRRKDDRIDAQRLARLARIDAQLLCPVRHRSAKAQADLTVIRARAGLVRARTALVNTVRGLAKSYGERLRGCNVRNMNPEKAEGLSPELRTALEPLLAGIESLSERIRECNERIETLAQQNYPQVAMLKQVKGVGTLIALTFLLTLEDAHRFGKSRDVGCYLGLQPGRRNSGQSEPQMHISKEGDPYLRTLLVQGAHHILGPFGADSDLRRWGLKLAERGGKSGKKRAIIAVARKLAVLLHHLWVSGEVYEPLRNRKPTAMPAAA

SEQ ID NO: 511936 - protein, 346 aa, unidentified
MKKIFIGIDFSKEKFDATVIKAEGVEECAQRQHEVFDNKVSGFRRLLRWVKSVVDEPDTGLWLFCGENTGGYSKALCNFLYGSGYDMWLENALSIKRSSALQRVKSDKADSGIIAEYAMRNYDQMRLYKPLGRNLERLREVFLYRHNLVKLKVCMTLRKGEKQLTQEKSDISRFMTMSSKHLISEFNKKIAECDKRIQQIIDEDEELQRNFEIITSVPGVGAQNAVCLMVYTDNFSRFDYDSRKIACYYGVAPFGRQSGTSVNTPAHVSPFANKLIKALLTQAALASVNFCPQMAIYHHRLLEAGKKKPVAVNNVKNKLLHIVTAMVRKGEKYNPDYDYHATINAA

SEQ ID NO: 511937 - protein, 364 aa, unidentified
MKRKVYVGMDVHKETIQIAILPSNTKALVKEQQIKHEEGQIKKFIQKLKSEGTEIHCCYEAGVTGYPLYRYLKTLGVNCIIAAPGKIPRQSSDKIKTDKRDAIKLARLLRSGELESIHVPSEEDEAVRDYLRSRDSLRLDLGRNRQRLMKFLLRKGITYSTTKYWTASHYKWLNNLHFENEILQATFNDYYSRVRVQEENLKAMDQKIQEIAKSEPYREKVGILRCFRGVDYLTAMFLLSEVNDFKRFKIAGSFMSFLGLVPGEYSSGSKRKQTGITKTGSPRLRRILVEAAWQHRFPGTGSKVVVARRVGQSALVVSLAEKASLRLHKKFKSMQLRGKTPQVMITAVSRELSGFLWAAMNLVA

SEQ ID NO: 511938 - protein, 379 aa, unidentified
MRGPVPVLSAVPARAFHPLLLGTNEGMAMITMAETRCRVTGGVDTHRDVHVVCALDERGAELGVESFPTNPAGYRQVLRWLRRFGEVERIGVEGTGSYGAGLTRYLHAQGVEVIEISCPNRQRRRSHGKSDPVDAIAAAKAAFSGDATTAPKTRTGNVEAIRALRTADRSARHARIKALNQMRALLLTGPEELREQFRGTTPWRMVRTAARLRPGDPATAGGATKYTLRLLARRVLELEAELKELKSILKPLVAATAPELVAQHGVGTETAGALLVAAGDNPERLRDERAFAHYCGTAPIDASSGTVVRKRLNRGGNRHANEALWRIVLVRMVSDPATRHYVERRTKEGLSKREAIRCLKRYVARELYPLLAQTAPCNR

SEQ ID NO: 511939 - protein, 372 aa, unidentified
MNYNTVYVGMDVHKESFTLYSCKYEDEKASHYQRTPASYKNVLRYLAFLRTIYGEYTRFVCGYEAGCFGYSLYHQLENFNVECVILAPTTMLEQRSKRRIKTDKRDAEIIARSLAQHNYSPVHIPTETDNQTKEFIRMRDDHKAELKKIKQQILSFCLRQGYQYDGSGNWTAKHVKWLRSLKPAGLYKEILDEYLLTYTILTDKLNRLDQRIEELASKEEYKESVSKLTCFLGIKTHTALSVIVEVGDFQRFVSARKFAGYLGLVPGQHSSGDDRNGLGITKAGNTHVRRLLVESAQSYTRGKIGYKSRVLRSRQAGNSPQVINYADRANERLRRRYYKMVLKDGKKYNIAKTAIARELACFIWGMMTDNIY

SEQ ID NO: 511940 - protein, 320 aa, unidentified
MSEPYTVGIDVSMDRLDVAILPGGQRLFVANDAAGWAELVGRLQRCAIAAIGLEPSGGYERGVVRALLAAGFSVRRINPNKLRQFARARGVLAKNDRLNAQLIAEYVAIMPTRPVQSDPAAERLAEIVTMRRQLCDAHVAAENQASHLEDAMLRRIAKRRLARIEADIRLLDKRLAELVAAELGLARRFRLLCSMPGVGATLAYTLLALLPELGAIGRKQIAALVGLAPYDFDSGKCRGQRHIYGGRMAVRNVLYMAALAAFRFNPALKAFHRRLLAAGKKPKVAIVAVMRKMTGVLNAMLRDKTDWVDHTTGRHIVPAT

SEQ ID NO: 511941 - protein, 421 aa, unidentified
MQVLYERCAAVDVGKDVIAVAVRVPGDGPDGRATHKRTFKTFYGVLREAARWLTSLGVTHVAMEATGVYSMPVYYALIEHGEFTQVLVCNAGHVKNVPGRKTDFADADWLVHLLECGLLRGSFIPPADIKAARDVIRYRTKVVQSRTSEVQRLGNVLQDAGIKIDSVASSIATKSGRAMIEALIDGERRPRVLADLALGRMRAKIPDLAMALEGRFDDHHALMCRLHLDHIGHLDAMIAKLDAQIEAMMAPFRAERDLLTTIPGIGPLAAAAVLSEIGASVTEYFPDAAHLASWVGICPGNHESAGKRHSGKRRHGNQHLQPVLVETAWAAVRCEGYLRALYHRHVMRWGGYRSPTAKKKAIIVTAHAMLVIIWHVLATGTPYDELGADYFTRRLDPERETRRLIAKLEALGHQVSLQPAS

SEQ ID NO: 511942 - protein, 408 aa, unidentified
MQVTFGIDVSKSTSTVCELIGESKNELTITNNRPGFIQLLHELTAFSKHPQIIFEATGVYSRTLQSFLEDYGYDYVILNPLKAKKEMDMGLRHNKTDKTDAYHLALIQRLYHHPINQLQSQTYKQLNALSRFYDQLTADLVMAKNRLHQALQSTFPEIENLFSSAKGKNYWQIVVRYPHCDLVRREDKKQLINWLMSLKGIAFKHALRTADKLIELAYQAYPVVSCSSIEVEQVQYYAHRLLNLSDQRENLIARMVKLAKSLPNHDLENLESIPGFAQTTAVRVLAELGDLRRFSNPNKINAFIGIDPGRYQSGEMDSNLSITKHGNAVARKLLYRAIGQIDNAAKTNPCHIADYYESKKLSSQTKGFKKIAIASIHKLIRTIYALIINDQLYDYNVATHNPKDFSRN

SEQ ID NO: 511943 - protein, 361 aa, unidentified
MNATTVAVDLAKSVFQVAVADANWMPIESHRLTRAQFERWFANREVGRVVMEACGSAHHWARWLNGLGIEVRLLPAAYIRAYVKRNKTDAADACALLEAARCADIVPVQVKSVEQQALQGLHRIRSRWMGTRTSRINTLRGFCREFGLIVPQGARTGVEAMSRALADPHSAVPPLIRETMKLLIEEIRLLEQRIAQLEGELTRLARQSLACTQLLTIPGVGLLTATAMVAATGGGVAHFKDARHFASWFGLTPKEFSSGSTRKLGRISKKGDRYLRMLLTHGARALLRAAELARRAGKTLDGLRTWATEVQARTHHNKAACALANTLARVCYAVLRDHQPYGNPLPRQAKKLTRQAFAIAA

SEQ ID NO: 511944 - protein, 343 aa, unidentified
MNTVTLIGIDLGKHCFHLHGQDAQGRMVFRKKLSRSQMLTQLANFPVCRVVMEACAGAHWIARRLSAMGHEAKLISPQFVKPFVQGNKNDFADAQAICEAASRPNMRFVSPRNESQQTISATHRVREALVRDRTSTTNQIHAFLLEFGISLPKGPAIIKRLSAVLAEHEVALPPRLIAVIERLRAHFKYLDEQIKAVESELAQQLAEDERSQRLLEIPGIGPITASVLAVELGDAHQFANARQFAASIGLVPRQYSTGGKPTLLGISKRGDKNLRRLLVQGARTIMQRIQTRTDVLGEWVREMLCRRHSNVVACALANKMARIAWAILAKGKHYQSRSAVVAA

SEQ ID NO: 511945 - protein, 362 aa, unidentified
MRNTTTGEAGDRLTIGLDMGDTYTQACVLDEDGEVIEESRVSTTPKAFRRRFASLPPARIILEAGGHSHWASRLLGELGHEVIVANPRMLRFIYGSDSKNDKADAAYLARVGKLDPALLHPIVHRSEQSQADLTLIRSRDALVRVRAALVTHVRGLVKVFGTKLPSCATEAFAIKAESQVPELLRPALEPVLAIIASLTTQIREFDRKIRALAKESYPDTSLLSQVGSVGRVTSLAYVLTLEDPSRFPRARAVGSYLGLRPRQADSGDLKPRLRITKAGDEMLRRLLVECAQYLLGPFGRDSDLRRWGLKLVERGGKSAKKRAVVAVARKLSVLLLRLWQTGEVYEPLRNARLRGELTPSPS

SEQ ID NO: 511946 - protein, 341 aa, unidentified
MKQASTIGLDLAKNVFQVHGADEAGAVVFRIKLRRDKLLAFFADHPPCVVAMEACASSNHWAREIAKLGHKTRLIAAHYVKPFVKRQKNDAADAEAICEAALRPSMRFVRVKTEDEQASAVVFRARDLLVRQRTQIINALRGHLTEYGIVAPTGAAHVARVVELAADSTLAIPDAARTCLAMLVEQLQAIAKQIAKLDREIAVRARQDERARRLMTIPGIGPVTAVAITALAAPPETFTKGRDFAAWVGLTPSQHSSGGKDRLGRISKMGERTLRRLFIIGAAAVVSWAVRGRGPANPWLMSLLGRKPRMLATVALANKMARTVWALMAHGGTYRAQAATA

SEQ ID NO: 511947 - protein, 426 aa, unidentified
MKICIFQDDSLPLLSKGGTGQLERETGVRDYRPLPRVNEPSWSFQLSCKVQIECHWHNSLFRVRDNTTIGQFLHKDECKGMKKIFIGIDFSKEKFDATLIKAEGLKEYAPSAHEVFDNKASGYRRLARWVKSQSDGLTAESWLFCGENTGGYSTALSNYLYSCGYDMWLECAYRIKHSSGIQRVKNDRADSRAIAEYAMRNHDKMVAYKPQSPSLARLREVFLYRHSLVKQKVALTVRRSEKRLTQDKSDVKTFMSQTSRHLITEVNKAIGKCDKKIEEIIAADDELREVFEIATSMPGVGVQNATCLMVYTDNFAKFGFDARKIGCYYGIAPFGKDSGTSVHTRPQVSPFANRMIKSLLSQAALAAIRFDPKMYDYYQRLIKRGKHPLLAQNNVKNKILHTLTAMVRNKQKYNPDYMYKTKEKAA

SEQ ID NO: 511948 - protein, 408 aa, unidentified
MNAVGIDVSKGKSMVAALRPMGEVALLPQEFLHTGVGLEQMAYAILALGEDTRVVMEATGRYHEPVAAALHEYGIYVCVLNPLYIKQSGGGSIRKVKTDKADAMKIAKYGLDNWVDLREYTPMDTVRQQLKLCSRQYNLYMKTVVSLQNNLISLTDKTFPGVNELFSSPERADGHQKWVDFVMTFWHCDCICRVSEKAFTERYQKWCKRKGYHFSEEKALDIYAESCGHFTTLPKNDNTKLLITTAAQQLLAGKTTLAALRAEMTRLALQLPEYETVRAMYGVGETTAAQLMAEIGDVRRFPRRSSIVGFAGVDPAVDQSGKHETQSTSTTKRGSPHLRKTLYQIVCTYLRKAPADEPMYQFLDKKHAEGKPYFVYMTAAQNKFLRIYYARVKECLEAFDAQQGTSQG

SEQ ID NO: 511949 - protein, 430 aa, unidentified
MKSNTQNAKIEAITEKTLVLGIDVGSETHYARAFDYRGIEYSKKPFKFSNTEAGFVTFKEWILDIKERHEKDKVVPGMEPTGHYWFNLGKFLQDNEMKPVLVNPHHVKKSKELDDNNPTKNDRKDPKVIAGLVREGRYMIPYLPEGVYADLRTASNIRFQLQAELTRIQNRISRWFNIYFPEYKTVYGKPDAKSGMLILKAAPLPEDILTLGIDGVNQIWRDAKLRAVGKARAKTLIEAAEHSVGSKEGAVSARMEIRMLLEDYESRNIRLQEVMALIEGLVKQIPMAEKLLEIKGVGIRTVSGFLAEVGDISRFNNPKELQKLAGLALVENSSGKHKGETTISRRGRKRLRYLLFEVAMSLVAKNPEFRELHNYYTTRRLNPLKKMQSLMAIAAKLIRVFYAMLTKGVDYDPKKMVSDIKRPAVYLQAA

SEQ ID NO: 511950 - protein, 410 aa, unidentified
MEVFLERCAGLDVHQASVVCCVLSGAPGRKAQKLLRNFGTTTRELETLRAWLAEHGVTHVGMESTGVYWKPVYAVLEGHVDLIVGNAHHIKNVPGRKTDVKDAEWIAQLVRHGLVAKSFVPPPAIRDLRELVRHRRTLIETRTAGRNRVLKLLEGANIKLSGVASDVFGVSGMAMLEALAAGTTNATEMAGLARGRMRRKHAALEAALDGRMREHQCFLLDMQLRSLGTIDQDLEALDARIGAQLEPFQAQHRLLMQIPGVDWVTAASIIAEIGTDMDVFATARRLAAWAGVAPGNYESAGKQKGAGTRRGNVFLKSALFAAASAAVRTKGSYYRDKYNRLRARRGPVRAIMAIAHKLLIAAFHMLSTGEAFRDLGESYLDQVARKRSTAKLVQRLSTLGYDVMLVPKAA

SEQ ID NO: 511951 - protein, 400 aa, unidentified
MKDRYGSVAYGGMDVHYKFSNVTFRDASGKVAVRERVDHRDREALREQLRRWPAGTPVVMEASFGWGWLSQEMRSAGLEPQLSNCYKVEQMRKARGMAKTNRKDADLLSLLPAETKPWWRVWLAPPAVRDRREWLRYRMSLVALQTQTKNRIHACFHRQGIYHEYSDLFGSAGRQFLLQVCATGRHAGGEVPPGALANLSGQVRLLFGLRSELARVALALRRELKRDALAQRLNGIPGFGLILSHVVAAEVGRIERFKNHRKLASYAGLAPHPRDTGTQDASRAPLGRHLATHCQRTLKWAFIEAAHGAVRTGGRWRALFDRVTGGGKKDRQRGYIKVARELVKVLYVIWDRGTTYQDDPPPRPGRREARSRGALRDSRSGTGQPCHPMVPAASGRETSQ

SEQ ID NO: 511952 - protein, 335 aa, unidentified
MLYAGVDLHLKVTQVAVVDERGELVLNRRVRSDREELLRVFGEAGPEQALEVAFEATYGWGWFADLLEDAGIPAHMAHPRANKAITSARVKNDAVDAKTLAHLLRTDLLPESWIAPPPVREGRRLVRMRTSMVRIRSRLKNQVHAIFADYGLHPTESSLFAGNNLTELCRRLPILTRKRVEANLRLIEDIDKELDLADAQIHKLFARDAGVRRLLPIPGIGIITAAIIVAEVGDITRFPSARHFCSWCGLTPTEHSSAEHTRRGHISKQGSRWLRWVLVEAACHSYRNHELAVLQGNVASRRGDKIARIALARRLATLSFYALCNPEGCRAFPAR

SEQ ID NO: 511953 - protein, 460 aa, unidentified
MAKHQRKKSPAEQQLPAQLHAVNLHAAGIDVGAEAHWVAVPVEADPQPVRVFLAHTASLHALAAWLTLCGITTVALESTGVYWIPLFELLETQGFEVILVDPGTMPKNGRPKTDVHDCQWLQRLHTLGLLSAAFRPDDPVVVLRSYLRLRLTLLADAARAIQHMQKALTQMNIKLQHVVSDITGVTGLRIITAILNGERDPLRLAVLRDWRCKEDEATIAQALHGTWREEHLFALHQAVAAYEFCHQQIAECDAKIKAQLLTFEDHSQGECLPPRPRKRHRNRLSFETRPLLHRMTGVDLTKIEGIDETTALIVLGEIGLDMSRWPSEKHFTSWMGLCPRVRVSGGRVLSSRTRPTANRAAAALRLAAASLHHSQSALGAFFRRMKARLGTPKAITATAHKLARLIYAMLKHGTAYVAESMDTYEQKYRQRVVNNLSRRARDLGYDLVAKREAVTQVGLG

SEQ ID NO: 511954 - protein, 342 aa, unidentified
MEEYVGFDVSKEETGFCVMDKAGAILTQGKALSDPQSLFEALREHTLCPERIVLETGTMSGWLARGLHEYGLPVDVIDARQAHAVMKLQHNKTDANDAHLLADMARTGFYRPVSVNSESSHKRRILIKARAHLVGQKRATENAIRGFLGSLGLRFARGSGKLAERVHLALKERPDLKPMIDPLLAIAAALKIQIKRLDAEVSRAARDTAAARLLMTVPGVGPVTALAFAATIDDAGRFAKSRTVGAYLGLTSRRYQSGEMDYSGRISKYGDGLLRHLLYEAANSLLTVVRKAHPIKDWARRIKKRSSHKKACVALARKLAVIMHRMLITGETFRWPQQETVA

SEQ ID NO: 511955 - protein, 393 aa, unidentified
MICVGIDVAKDKHDCFILNSEGEVLADVFTIPNNAEGFDRLLQTIRRCARPEDKMKVGLEATGHYSYNILGFLLDKGLPTYVINPLHTNLYRKSLSLRKTKTDRVDARTIAAMLMSDVDLKSYTDTAYHNEELKSLTRYRFDKVRERAKLKQSVSRLVTILFPELEKLVSSLHSASVYALLSEFPGAKQISSTHMTHLKAVLKNASQGRYGQEMAETIRNAARSSVGSVMPAKSLELQHTIRLIRELDAEIEDIETAIQAIVDEMQSPITTIPGMGVRMGAVILAEIGDFSRFDSPDKILAYAGMSPSTYQSGQLSLSGAYSHMEKRGSRYLRYALYNATKHVCHWDPTFAAYLAKKRAEGKHYNVALSHAAKKLVRLIFAMEKSQRPYCAAA

SEQ ID NO: 511956 - protein, 356 aa, unidentified
MSRDIKYIGMDVHKEAIVIAVLNSNGKLVMESIVETKASSILQFIHGLQGELHVTWEEGTWAAWLYDLLQPRVQQVLVCNPRRNALLKEGNKSDKIDAQKLANLLRTGMLRPVYHGQHGLRTLRELARSYQTISQDLTRVMNRIKALYRGWGIACGGTRVYAARYREEWLHKIEHLGVRRRAELLYQQLDGLQKLRQTLRPELLAESRKHKAAKLLRQIPCIGPIRAARLLALMQTPHRFRSKRQLWTYSGLGIETRDSAQYCFVRGQLQRAKKPQQIRGLNRNHNHEMKDIFKGAATRASCGVGPLRDFYVGLLDKGMKPEMARLTLARKISAIALTLWKKEERFDAEQLKTQVA

SEQ ID NO: 511957 - protein, 411 aa, unidentified
MVKENFIYVGIDLHKETHTAVMIDCYNQKLGEITFPNRPADFPKLVTKVKKCNTDGKEVVYGLENAYGYGRALAVWLIDKGYLVKDVNTAISHRQAKHRGAMYRKSDSDDAKAIALATLNMLDKLPDACPNDAYWSLGQLVHRRDNIMKQRTRLVNQLHEQLCIVYPSYKQFFNDISRPTALYFWEHYPSRKYLKGKSVEDLRAELVPVSHNKCSTKTCEKILDAIAGDKVKNNAYQDARDMVTLSIVSDLQHYDKQLAEVDKMLEQMYKMLGCTLTTIPGVNVITAVKILAEIGDIKRFSNANKLAQFAGIAPLHLSSSGKGKDVATKQGNRRLQATIYFLAIQMVQLSSKGTPRNPVVRAYYEKRKAEGKTSQQALICISRRLISIIYGMLKNGTEYRMPVVENAGEKL

SEQ ID NO: 511958 - protein, 345 aa, unidentified
MDKIIRIGMDTSKHVFQLHGVNAGEKPVLRRKMRRKEMIDFFTTCPPTLVAIEACGGSHHWARLLTSFGHEVKMIAPQLAKPYVKRNKNDAADAEGLCEAMSRPTMRFVPVKTVDEQAALMLISVRTRLIANRTQLANAIRGYANEFGVSAAKGLAHIPLLLERIQADGTVPELAQELFMSQAEEYAQLERKIADVEAKVKAWQRNDERSIRLNTIPGIGPIGSALLIMKTPAPELFQSGRQFAAWIGLTPKDHSTGGKLRLGGITRAGDEALRAVLVAGATAVIHHARRSGKASRWLAELLRRKPPKLAAVALANKMARMAWKLMVSGETYSAQSGPALTGCAA

SEQ ID NO: 511959 - protein, 456 aa, unidentified
MAKKPKKDKKADNAVLPVMLPDAAGIDIGATEIFVAVPADRAAENVRSFPTFTQDLYALADWLGLCGVKTVAMESTGVYWIPLFQILEDRDFEVCLVNAHHVKNVPGRRTDVSDCQWLQFLHSVGLLRASYRPDQDVCAIRSLLRHRETLVQMAAAHVNHMQKALDQMNLQLHHVISDITGQTGLAIVDAILEGERNPLELAKLRNERIKASEAVIAKSLVGDYRPEHLFTLRQSLDAYRSYQKLIGDCDREIRRLVEEFQSPLQSGVSASETLPSQDKKRKASAGEGILRRELQRVFGIDLTKIPGIHTGIAQTLFGEIGPDFTKFRSASAFASWMGLCPDNDISGGKVLWAGTRKVNCRAATALRMAAQSLHHSKSALGDFYRRMRAKLGAPKAITATAHKLARIIFHLVTTRQEFDDSRFAADQLHFQKRQEAKLRARAKAIGFGLIPLVQPE

SEQ ID NO: 511960 - protein, 412 aa, unidentified
MTAIDQFAAHVGLDWADRKHDVCVQFKNGERTFHVIKHTPEALDTWLNELHQKVKGRIAIALELKKGPVVYALQKYPFVTVFPVHALSLARYRQTFWPSGAKDDPQDAELALDLMLRYPQKIKAIEPDNADIRLLLQLVEQRRLLVEDKRRFVNRLINTLKQYYPQPLEWFSHRGSLLLCELIIRWPSLQKLKRARRDTVRHFLNAKGGRATALTEQRVASINNAIPLTADPSVIEANALMATALATQIKVVSEIIKTYDERIETLFDPLPDAELFKSLLGMGPCMGPRMLAALGDNRDRFNSAEEIQNYVGIAPVTERSGQKSWIHWRWQCAKFVRQTFIEWAAKTVNSSYWAKLYYQGMREKGKSHQSAIWALAFKWIRIIYRCWKTRTRYDEAKYLLALEARKSPLLMP

SEQ ID NO: 511961 - protein, 375 aa, unidentified
MKEKVRFLGLDVHAETIAVAIAEPDGEVRGLGTIPNRADSLRKLIKKLGPAEKLRVCYEAGPTGYVTYWQLAELGVKCEVIAPTLVPVKAGDRVKTDRRDAEKLARCYRSGDLTAVWVPDEGSEALRDLVRAREAAKQDQLRARHRLSKFLLRSGQRPPSGIRPWTRPYLIWVAQLRFTQMAQEGTRLDYLHEVEHMRERVARLEQAITEAVKLASPALQQVINDLQALRGIADISAVTIAAELGQVSRFDGARQLMGYCGAVPSEDSSGKRTRRGSITKTGNAHLRRIVVEAAWSYHRPPCIWYGLRKRQESISEEVKEIAWKAQHRLHKRYMRLAAAGKDKRKITTAVARELLGFIWAIGTRAETVARQRIAA

SEQ ID NO: 511962 - protein, 377 aa, unidentified
MKKELYLGLDVHKDCIITAVAEEGRKGEVRETGAISNDLHAVEKWIGRLRQTHGKEVILRACYEAGPCGFGLARRLKQLGVECEVVAPSLTPKRGGDRIKTDKRDARKLARLLRAGELTAVYIPDARDEAIRDLCRARSDAVDDRRRSRHRLKGFLLRHGYRYQGKSSWSAAHERYLRELVLPHPAMKVILEEYLQAIAAAAERIARCEAAMGDLLEQWPLAPAVRALMAMKGFQTVAAMILVSELGEVHRFTHPRQVMAYLGLVPTENTSSERRRQGHITKCGNAHARWLLVECAQHYAAPPKVSKELSRRQEGQSHEVRAISWRAQNRLHRRYTRLLARRLQRNKAMVAIARELCGFIWELLRTQPCYQAQSTPL

SEQ ID NO: 511963 - protein, 436 aa, unidentified
MEVRMVNTLSAGMNNEAVHCFIAIELSKSGWVVGFQTPLSDKTSRYQVKAGDANGLLELIERVRTRVARQLSRPIEMMSCYEAGYDGFWLHRVLEAHGIHNHVLDPGSLQVNRRARQPKTDRIDADRMVRALIRHLRGEPEACSVVRVPSIELEDAKRLHRERRRLIAERVQHVNRIKGLCATQGIYDYSPLRKDRLTRLDDLHTGDGRVLPPQLKAEIVRELKRLELVLEMIATVETERDAILTNPASTHVNAGKIKMLAKLKAIGPEFATTLVGEVFCREFVNRRKLGSYVGLGSSPFRSGSLDRDQGISKAGNPTARSVMIELAWTWLRYQPDSALSIWFRERVGTLKGRPRRIAIVAMARKLLVALWRYLETGLVPTGAVLKASSCATWVARAQWAPALDASSTVNQKHIALKIGVAMRSMPHYAPPLREIS

SEQ ID NO: 511964 - protein, 347 aa, unidentified
MKLTTLGIDLAKSIFRLHGVDARGVAVLRRQLTRQQLLPFLAKLSPCLVGMEAGPGAHFWAREIGRLGHIVRLMSPHFVKPYVKSNKNDANDAEAICEAVGRPSMRFVPNKSTAQQDVQALHRIRAQLIKWRTALANEIRGLLTEYGIVVTRGIAPLRRMLPAILENVENGLSGLFREMLVEMAERLRVLDERIRQYDLRVARVFGQDERCQRLAKVEGVGPLIATALVAAVGNAHEFKSGRELSAWLGLVPRQHSSGGRTVLLGISKRGDRYLRTLLIHGARSAVRTVEGRRDPRSVSISRLKGRQGPNVAAVALANRNARVLWALLTRGESYRPAPYSARVPQVG

SEQ ID NO: 511965 - protein, 394 aa, unidentified
MIYAGVDIAKTDHVIGAVDERGTETCRPMPFKNTEAGLERAVAWLEGLAGSPSDVVVGMEATGHYWMACYSFLVARGYSVAVINPMQVKAVRKLKKLDKVKNDRVDAWLIAETLRIGQYDETRLATDEMASLRSLSRYLQSLRGMVAELKTQCICLMDAHFPEYAGIFSDMFGAGSRAVLSKSPLPFELARRRADSLARDIAEASRRGGKSSGYAAKIKAAAKSSIGVRLGQEAASFQVKSLIRQIEFADSECAGVEARLRSLLDEVEPLVLTIPGVSYVTGAQIVSEIGDVSRFRNAPALVSYAGLNSSVSQSGQFDSGGGPITKHGSPYLRRALWLAANRARQYDPGLRAFYDRKRAEGKPHRVAVTAVARKLCHIVFAVMRDQVPYDPGRE

SEQ ID NO: 511966 - protein, 355 aa, unidentified
MFSYYQTTTEYSCGVDLHSRQMYICVMDRNGEVLVHRNVRGNNFEYFLKLVEPYKHSLTVCCECTFNWYWFADACMDAGFEFILGHALYMRAIHSFKSKNDRQDCFQIAHLLRSNLIPPAYVYPREKRAVRALLRQRTTFVWKRSEILTSLSMGVMANGNKPLNSCNKPRDTWLEELRAVYADADPILMLSVETSMHMVKEFDSIIGKLDWALHKHTKDHFGVEYNTLKTTPGIGVTLGLIVLYEIDDIRRFKSVQDFLSYCRLAKGTVASAGKIKGTQGGKIGNGYLKYAFHEAAVQGKRRNPELTKYYQRLEAKKGKHLANGILACKLARAVYFMLRDHKVFDIGKLTRKRAA

SEQ ID NO: 511967 - protein, 331 aa, unidentified
MKIKQTIGIDISKLTFDVRIHSNQCYCIFDNTPKGFKELIKWVDKNNPISKEQTLFILEHTGIYSEEIALFFTKKDISFSLIPGLEIKKSLGISRGKDDKVDATKIALYGHRLRDEIKPTKIPSLAINKVKRLLTLRERIVKQRAGHKSTFTEQKRIYLRKENKLLFEIQEKIIKYLTKQIKSIELEMKQIIEANQELNQQYKLVVSVKGIGNQTALFMIVTTNSFTKFKTWRKYASYCGIAPFPNTSGTSIRGRTKVSNLANKKLKSLFDLCAKSAIQNNPEMKIYYHKRVEQGKNKMSTINIIRCKLMARVFAAINRQTPYVNTLKFVV

SEQ ID NO: 511968 - protein, 390 aa, unidentified
MVAGKKSGKTEGCKMNSIVAGVDLGDRESLATVLSPIGDVTDRFTFPMNEEGYAFFASRVPKDARVAFESTIMAYPISRALRMHGYSDVTVAHPKTLAWIVRSKKKNDRVDSLKIAKLHMAGMLPESHLLDRNEQVVRDLLVQRVKLGVEIGRLKNSVIGYLKREGVYDSLPRTGDNFSLKRRQAIRSLRFHDKRDLVLGTMMDRLRFLEKQCTPLEDSVRENARLSDDVKILMTITGVDYYLASLISSFIGDVERFPSDDHLASFFGIVPTSRDSADVKRRGKMTKDGSSIARWALSVMVDTVMQHNEPIKEYYTSVKKRTGSGKLAHVSTMRKLTRMLYHMLKTKQHWKWENPRLTERKMASFRWMEVTDPSSGWKGIEQHAQPLMCA

SEQ ID NO: 511969 - protein, 401 aa, unidentified
MKRLSGGIDVGSESHHITILDEEDNVLCNQKISHQLSEFAESIKLFKQIEKKEGGKLSFALEGKNGYSAPFDRILLDQGFSLYNVDNLKLKRFREAFAGEWRDDQRDSLMLSKMLKLKEHINSQREKVFIKIEKPSLVTESLKLFSRHQQTLIDERVRLTNRLRKKLLEVCPQILELGKVKNKKIIAILTKYPDFSKYKRITLCSLLKIRGIGKKGAFFLLKRLNHIEYMPGLTDIYKTIILSYAKRISELQKEIKDIDKSLDKIGEKNKEVKHLKSLPGVATKLASRLIGEIGDIHRFPSEKQLAIYCGIACVDNNSGKVTKAKAVYKANKICKQALITMAGGSIRLSLQCRAYYLKKRAEGKSHNHTLRCLARQMIKVIHKMLTEDRDYMVRKELRKVA

SEQ ID NO: 511970 - protein, 394 aa, unidentified
MIYAGVDIAKVDHVIGAVDETGAEAARPMKFKNSEAGFERCIAWLESVAESEDDVFVGMEATGHYWKACFAYLMAAGYRVCVVNPMQVHAMRKLKSLSGVKNDRIDSWLIAETLRQGDYDETRLATDEVQALKQLTRYHQGLKQELAAVKTQAICVLDAYFPEYAALFSDMFGAASLKVLAECPTPSEVARKRASSIAKLLSEGSRGRLGDAKAAEVKAAAKSSVSVGIRLGEEAASFQIRTMVSQVEFLNATIAKVEKEVASLLGKVEPNITTIPGVSTTTGAQIVAEIGDVKRFRNAASIVKYAGLNSGVDESGKYSAEGVPITKHGSPYLRRSLWLAANRARQYDPRLKEYYDKLRRKGKPHRVAVTAVARKLCHVVYAVMRDGKPYDPAK

SEQ ID NO: 511971 - protein, 384 aa, unidentified
MLADQLDYVVGVDPHRDSHALAVVHVVSGAIVFESTVVASSDGYAHALKLVDQHAPARRAFAVEGTGSFGAGLTRFLSGRGEQVLEVGRLRRERHSGGKTDALDAIRAARSVLTSERPATPRAGGERQGLQALVAAREGAVNAKRAGLCQLRDLLITTPEPLRSELRPLTRARLLQRLAATRPGGGRDPELRGSMLALRSIARRVLQLTAEERELACEIEALTRKLAPQLLDQPGVGPHAAAQLVLSWSHRGRIESEAAFARLAGAAPIPASSGQTIRYRLDRSGDRKLNRALHMILVTRKRSHPATIAYIERRLQEGKSHRLHRETPPRRQEPTRSKPLPQALPRPQPLPAARTPADDCLTFIEASLAQTGAVSLDRGSHSGG

SEQ ID NO: 511972 - protein, 370 aa, unidentified
MKQPSTLYVGLDVHQDSMAVASVVQDHGAEVVSLGHIGTRQCDIAQLIRRRQATSPHLVLVDEAGPCGDWLSRERTHKGQVGWGVAPSLLPNKPGDRVNTTRRDAITLARLLRSGDLTPVYVPKVAEEASRDLCRARAEASRALKTATLRLKAFLLRQDSRDTGRATWGPAHLRGLSEVIGPTPAQPMVFQAYVRAVTEHTARLQRREPARHEPVHTWRLQPVVEARQSRRGVQFPVAVTLVADLGDLTRVDHPRQLMSDLGLIPSASSSGDRRRQGGLTKAGHTPARRVLIDGAWASRYAAKVSRPLQLRLDTRPQPRQEIRWTAQVRRCQRYRRLIGRGKNPHPVVVALARELRAFLGAMAREVPRTP

SEQ ID NO: 511973 - protein, 349 aa, unidentified
MLHVGLDLSRKRVDVCVISSEGELVEHFRAPCDRDGLYGLTRRVAVYEEPIRGVVESMNGARYVHDELVRYGWEVLVADAVRVKGLAPLACKTDKVDARVLAELSFRDLVPAIWLPTPELRAERERSRWRLHLVKHRAILKNRVHSSLIAYGHQVPMADLFGVAGRRLLASLDFPEPWLGHVQASLELIDDLDRRIGEIEEWLRRSGADHRYLPLLLTCPGIGWITGYTIAAEIGDINRFASPVKLTGYTGLCPRVSQSGEIDCRGPISKHGPRYLRWGLMEAAIAASSHPLYRERYQRTRRRLGRQRGPKIAQIELARKLSEAIWYMLIRNQPFKPFVPAGAVLPLTA

SEQ ID NO: 511974 - protein, 357 aa, unidentified
MKKGYQKDKTLARGRDVYIGIDVHKENWHVAARVDGEEVFHGSMASEYHSLRKLLDRFKECRIKVAYEAGPFGFWLHDRLSGDAIETIVVPPSLIPMESGNRVKTDKRDSRKLARLLEGNILKKVYVLDEEDRADRELTRTRRQLLEHRGDVMRQIKSKLLFYGIKSPFSQKRENWSKRYVKWLRDLTFDHAVLKAPFESLIDLYEYLTSQVKKISKQVVALSRSDKYRHKITLLRSVPGIGILIGMELLVELADMERFKTAEEIASYMGLTPSEYSSGQHVRQGRITRCGNKRARTCLVESSWHLIVKDPLMRFKYMKLKTRKGAKKAIIAIARNLIIRIRRILLQDEPYVVGMAA

SEQ ID NO: 511975 - protein, 390 aa, unidentified
MQVMHPVCCGIDVHQKSIVCCILDGPLTSNEPKKYQTTFGTTTKELKAALDWILEHQVTHVFFESTGQYWIPLFNIFSDSDLELVLANPQHIKNVPGRKTDVKDAEWIAQLGRCGLINQSYIPSQEVLQLRYLTRYRLSVKQRLTQIKNHIHVILQRANIKITSYLSDIFSKTGQALLTLFIDGEVINEDNVESCIHGRIKASTRQLIEAMEGKLSTVDRFLIKECMEEYKLQKKISDELNKEINEYILEHFPEEYQLLLTIPGISDNCCATILAEIGPNVDAFKTDKKLASWAGMCPGSNESAGVKKSSHTTQGNKYLKQALVMSVLSVQRAKEETFSLFYQRISSRGSKMKAIIACGHKMLRIIYKILQSHQPYNSQKALGLRQQTNA

SEQ ID NO: 511976 - protein, 433 aa, unidentified
MSKRNHLKERLNEKLQAITFSTLVVGIDIAKKNQWARFVDCRGIEHGKALKFGNNKNGFEKILTTIFELCKKDDFTNVVIGMEPTGHYWKPLANYLLKQGLIVVLVNPYHTKKSKELDDNSQTKSDIKDALTIAKLVKDGRYFETYLPHDIYAELRGLTATRTSMLKRLKSIKNTIIAVLDEYFPEYESVFKCIFTGKASRQILKSCPIPSLILELGEDGVLTEIKSAVKKTVGRKKAKQLLEAAQNSIGVDYGESSAVFRIKQYMTELEMIENQLVEVEEEMNVALEKTGLSEYLLSIPGAGVVSMASVLGEMGDPLRFENPRQMSRMAGYNLIEDSSGKNKSGTCISKRGRKNLRCVLYKMALTMVAVNPEMKQLYSYLKTRENNPLKKMPALVVVSKKILTMIFTLSKKKEYYNPEKVFGNVRKEQLRVA

SEQ ID NO: 511977 - protein, 352 aa, unidentified
MTVTIVETRAPARAITGGVDTHAGAHVAAALDPVGGLLGVQEFPATPAGYAQLLGWLGGFAAVCLVGIEGTGSYGAGLARYITAAGVRVVEVDRADRQDRRRAGKSDPLDAVSAARAAQSGRAAGAPKGRDGAVEAIRALMVAQRTARSERTQTINQARALVVTGPDDLRIRFATHAPADLVAELASLRPRPGAVVGYATRIALRELGRRAQFLDRQLERLDEFIVPLVTARAPGLLALYGVGPDTAALLLITAGDHPGRLRSEAARAHLCATAPIPASSGKVTRHRLNPGGDRQANHALYRIVITRMSSHPPTRAYVARRTKEGLSKKEIIRCLKRYVAREVYPHLRGPAG

SEQ ID NO: 511978 - protein, 342 aa, unidentified
MLADQLDFVIGVDSHSDRHALCVLAASGEIVGEQELPADAAGYRQALRLAERQAPRRRLWAIEGTGCYGAGLARFLAGHGERLREVERPLRTGSRGRLKSDPLDALRAARLLLSGQPLAQPRRGKQREALRALLTTREGAVAVRRAGLCQLRSLLVLLPEPRRGQLRGLTRGRLLTRCANLRPRPGAGQLLALRSLARRILAADQEAAELEREISQHVRRIAPALLDQHGIGPITAAQLLISWSHRGRIRNEAAFARLASAAPIPASSGNRSRHRLDRGGDRQLNRALHTIILARRKHDPTTIAYIDRRQQEGKTPREAIRCLKRYLARSLYRLPEATPSTA

SEQ ID NO: 511979 - protein, 495 aa, unidentified
MVCLIPIRKTFQFLCSPGWPPPQAHKRFMAPGSRRSKGSSHNLQVLNPRSAGVDIGSRFHVAAVSPDLASDPVRRFDSFTANLREMVEWFATCGVTTVAMESTGIYWIPLFELLISAGIDAVLVNARYAKNVPGRKSDINDAQWLQRLHSYGLLRASFMPDEQLAALRSYVRQRDMLVRRRASHIQHAQKALMQMNLQLHHVVADIMGVTGRSIIDAILCGERDPDKLAMLRDRRCKNSAITIAAALDGNYQDEHLFELRVAIELFDAYSEQIQASEQMIQERLGALAQEDPEDQCSHSYGAEPADRNEQSARRRKRSCSFDPRPVIQSMDCHRILEIPGLGPSSLLTIISECGLDMTKWPSAKHFTSWLGLAPHNKISGGKLLSSSTNRGVRQAASAFWTAALVLSRTSTALGAFHRRVAIRIGKAKAVVATARKLATIYYQVLRYGVSGKDPGVEAYKASQQQRLMTGLKRRAKQLGMSLVPLEKTVSMTGVS

SEQ ID NO: 511980 - protein, 316 aa, unidentified
MDHKQTVYGVDVSKAKLVMGEYHSEQVMQIDNAPEPIARWLASLPQGSVVAMEATGCYSELLAHMAQAAGMLVYVLNPRALRHYARALGLRAKTDRVDALLIARYAMHERAKLRAWQAPSPSADTLARLLRRRQVLVSARQTLMQSLSGMSALKAQRQSLQASLKRMIANLELLIRVEIGKQAELAALYRRLTTIVGVGPIVGAQLVAALMRFEFARQDAFIAYTGLDPRPDDSGTRRGRRRLSKHGPGLLRCLLFNAARAATRSKLFKPLYQQLLARGLQTTEALVVLARKLARIAFALFKSGGVFEAQRHLKTA

SEQ ID NO: 511981 - protein, 341 aa, unidentified
MFKNKSMKVFYLGVDVSKKKLDLCLRSNGKDILYDVIPNDLSSIKSWLTRTFEKYFLSEDSLVVCAEHTGQYTYPLVCATKSIGVYLCLEDAAKIKYCHGIPRGKNDKIDACRIAMYAERYNDCLQPYTASELIIQKLKNLSTERSMLVADRAKYQSQLKDQVDYMEHSIYIAKCNRVEGIINTFTDYIAQIDLEIKELINQAPVIAHQMDLLMSVDGVGERVALKMIMETDAFTSFTDPRKFCCHAGVVPFVYVSGSSQRSKNRVSNRADKSIKHLLHMAALSVSQVKNSPLKKYYDRKVEEGKNKMSVLNAVRAKLVTIMFAVIRADAFFSRNYQNSLA

SEQ ID NO: 511982 - protein, 346 aa, unidentified
MKVLLKQTVGIDVSQNELVVSLGRMDEQISIEVYAYKVFPNTKKGFSSLVSWVNKQTLTNAEVRYVMEATGVYHESLAYYLCSNQKQVSIILPNKISNYVRTLDIKTITDKSASQAIARFGLERQLEVWQPPLKIFNDLRQLCREREQLVQERTMLKNQLHAEHTSATSSANSVKRTKKRIAMIDEQEKEIREEIATLIKGDEAIVKKMKVITSIPGIGNLTAVTIIAETNGFELIKNKRQLVSYAGLDVREKTSGTSVKSKPRISKRGNRNLRKIMHFPALAAIRTDESFRYIFLRLVSRHGIKMKAIVAIQRKLLELTYILWKSNSSYCPNYHNQSITIETITM

SEQ ID NO: 511983 - protein, 360 aa, unidentified
MSTQRTSVGLDVHARSVVACGLDGETGELFERRLTPDHHEILGWIRSLPGRAAVTYEAGPTGFGLARFLLAAGIECLVAAPSKLQRPAGDRVKTDARDARHLARLLHLGQIIPVTIPDVEQEAARDLVRAREDVRGDLMSARHRVSKLLLRQGIVYYEGKTWTKVHDTWLRRQRFEVPGLQLAYDTAYDTMTAAVDRRDRLDAAIAEMAATSAYTAVVTRLGCLRGVSTLTAFGLAVEIGDWQRLTGRSIGAYLGLVPTESSSGATRSQGAITKTGNGHARRLLIEAAWQHRRPYRPGVALRRRWDKAGPAARARGQQGNRRLHARWNGFEQRRKRPVVANTAIARELAGWCWSLAVLDE

SEQ ID NO: 511984 - protein, 340 aa, unidentified
MQITTLGIDLAKSVFQLHGVDADGAVVLQKKLRRGAVLDFLGELPPCLVGMEACATSHHWAREIAALGHEVRLIPPAYVKPYVKRQKNDAADAEAICEAVSRPNMRFVPVKTEEQQGVLMLHRSRDLLMRQRTMILNAIRAHLAEFGIIAAQGPRKVAELVTRLREEDGLEVPTLARTALMALAAQLDGLAIQIRGIERQLMAWHRQSAASRRLETIPGVGLITATGLAASVPDPGVFRSGRQFAAWLGLVPRQSSSGGKERLGPVSKMGNGYLRRLLVVGATSVSRRAGTDDSRTGLWVRSLLERKPARLVTVAIANKTARTAWALLVKGESYRAAPAA

SEQ ID NO: 511985 - protein, 360 aa, unidentified
MRIIGCDLHARQQTLAMLDSNTGEVVKTTLEHEGNTVREFYSNLPRPVRVGIEATGSMQWFVNLMEELGIECRVGHPAEIRAAEPRKQKHDRRDADLILKLLVEDRFPAIWLPTKELLDLRALLRHRHQWVRLRTRIQNALQAIALANGLRRGSSLWTPGGQQAIATLPLSPHTAYRRSELQAMYVKFETDIEILNREVEQQAGARPGARLLMTHPGVGPITALATDVFLGDPSRFADSKGLASYVGMIPGEHSSGKRQRLGGLTKQGNPLLRFLWGEAGLHAVRRDPELKRFYRRKLIQKGLGKARAAVARKLGIRMWIMLRDQIEYNEFCRRGQMQQKSGDACAGMPGRRYGAKSPAD

SEQ ID NO: 511986 - protein, 345 aa, unidentified
MPIVGGLDIHRKQLTFDYLDTVSGEVKRGQIAPADRVHLRAWLARFAGRDDVAFALEGCTGWRYVAEELSAAGVAAHVGEPADTAAARGRKRHAKTDKTDSRHLRQLLAEGRLPECWVPPGHILECRELLELYHDLRAEHTAWVQRIHAVFFHQGAPQLSAGALRTGQGAAAVRAAAAAHLSPAGQLQVATALDMLTCLEGHLEEVRHRLLVTARHLTGARVLAARLYGVGPVTALAMTSWLGGAGRFSSSRKAVRFTGLDITVYSSGSKRSPGHLSRQGPAVLRWTVYEAGKVHARSCAPDHAYYAAVKDRKDGKRAALSEARKIVRQGCHILAELGDDALTAV

SEQ ID NO: 511987 - protein, 465 aa, unidentified
MKNHPPRRRPPKPRLSPSALERITPHAAGIDCGSAEHFVAVPPDRDPMPVQAFPTFTGDLNRLADWLTTCGVTSIAMEATGVYWIPVFEILEARGFTVLLVNARHVKNVPGRKSDVSDCEWLRDLHMMGLLRGSFRPGDAIVALWAYLRHRTSLIESAGAHVQRMQKALIQMNIQLPLVVTDITGVTGQRILRDIVAGERDPQRLARHRDYRCHASEAEIVAALTGNYRPEHVFVLQQNLALFDTFQQQITACDAAVEAPLETLVARATPPTTPMPTPRVRRTRSRNEPSIDIRIPLHRVTGVDLTQIDGIGPYTALRLIAEIGTEMSRWPTSQHFTSWLTLAPQNKISGSRLLTRTQPSANRAAALLRVVAMSLGRTPTALGGFYRRLGYRVGKGKAITATARKLAILVYRMLKGELVYADPGASAYDAQHRGRILRGLCKHAAQMGFGLVDLATGEVIEGAVS

SEQ ID NO: 511988 - protein, 342 aa, unidentified
MKDTMIGVDLAKSVFVLHAATMTGEVRYRKKLSRGQFLRFLSEQPPAIVIMEACGSAHYWARELVKVGHEVRLIAPQYVRPFVKRQKNDAADAEAIVIAARQPEMRFVPPKTADQQARAVLFRARERIVRQRTELVNALRAVLYEYGQAIPQGIAHIQRIEAIVERAEIDLPELVREECRDLLAQIDEKTARIKEKAKKLVDLSRQSGIAHRLQTMPGVGPLVALAVEAFAPAMENFRCGRDFAAWLGLVPRQFSSGEKERLGRVSKAGQADIRRLLIIGAMTCVSWAGRKPPVHGSWLSRMLAKKPKMLVAIALANKIARNIWAMLTKQEDYRDPALAIMA

SEQ ID NO: 511989 - protein, 359 aa, unidentified
MNPSTLSSAEVAVTLGVDTHKDVHVAVALDELGGYLGTLSVPATKDGARRLMSWATGLGTFERAGVEGTGCYGAGLARFLRAEGIRVFEVVRPKRRDLRRAGKSDPIDAEAAARAVLAGTVVGEPKGTDGEVEMIRVLRMARRSALKARTQAANQLKALLVTAPEELREELRGLSTIKLVCRASRFRTGESLTGVMVATKFALRSVARRYRHLCEEISELDEQLGRLVAEAAPALVAVEGISTDTAASLLIAAGDNPERLTSESAFAHLCGVAPIPASSGKIVRHRLNRQGNRDANRALYVVALGRMSRDERTRTYVARRTAEGKSKKEIIRCLKRYIAREVYRILVSPLHTSTPISVP

SEQ ID NO: 511990 - protein, 341 aa, unidentified
MKLIRVGIDLAKSVFQVHGVDRSEKHVWRRRLRREEWIDVVRERAEPGCEIGMEACGGAHHWARELQKLGYRVKLIAPQFVKPYVKSNKHDAADAEAICEAMARPGMRFVPVKTVEQQDIQAIHRVRASLIEQRSAKANQIRGLVAEYGLVAPKELLHLRRALPRWLEDEGNGLTVRFRWLLRGLRDELATLDERIAELDLEIEQIAKSEPAAKRLMELRGVGPIIATAMLATMGDARQFRNGRQMSASVGLTPKQHSSGGKERMLGISKRGDAYLRSLLIHGARAVIRTARAKDDPLSKWVIRIADRRHPNVAAAALANKTTRIAWAMLSRGTNYQPDVN

SEQ ID NO: 511991 - protein, 405 aa, unidentified
MNAVGIDVSKGKSTVTIRRPGDIVLMPPCDIPHTQSAINALMEQIKSLDGETKVCMEHTGRYYEPVANWLSDAGIFVSAVNPILIRDFGDDSLRTPKTDKADSKKIARYALDRWAKLKQYGSMDKTRSQLKTMNRQFGFYMDQKTAMKNNLISLLDQTYPGANDFFDSPARSDGTQKWVDFVYTYWHVDCVRGKSLQAFTEHYQKWCKRNGYNFSALKAEKIYQSSSDLIAVFPKDDSTKTLIRQAVTMLNTASQTVEALRLKMDQTAATLPEYPVVMAMNGVGPSLGPQLMAEIGDVTRFTHREALTAFAGVDPGKNDSGKRNQKSVRTSKKGSPSLRKTLFQIMDGLIKRSPVDDPVYAFMDKKRSEGKPYYVYMTAGANKFLRIYYGRVNEYLASLEESKES

SEQ ID NO: 511992 - protein, 320 aa, unidentified
MQTPTQVLNIGADVAKDEIVVACSEGSFPTRPLANQRTALRAFLKSLPEGSCIGMESTGIYHELFANLAHKLGFVVFVLNPKDARYYAKGVGLRGKTDRVDAEMLARMIAHEHTNLHIWIPPTPEQREIDRLIKRRAKLSSLRQALGMSLKGLDGFKTDLKTLRVRFDQVIAHIDQRVKTLIEASPDRKEHVMHLSTIYGVGQVVSAALVNTLERVPLKNADAFVAFTGLDPRPDDSGQHRGKRRLSKRGPSELRRLLYLAALLAIKTKTWRPLYEHYRGKGLSSTAVIVILARRIARAAWSMYTYKTEFDSGRLTKGLT

SEQ ID NO: 511993 - protein, 360 aa, unidentified
MFTERTSVGLDVHARSVVAAAIDGVTGEVFRARLVPAPQEVIRWVGSLPGPVAAVYESGPTGFGLSRALAAAGIRCQVAAASKLQRPAGDRVKTDARDALHLARLLRLDEVVPVRVPTEVEESARDLVRCREAARADLMRARHRLSKLLLRHRIVYSGGKAWTQAHDYWLLKQSFPLAGTQAAFQDAYETVVLAAGRRDRLDTAILEMAADGQFTPVVRRLSCLRGISTLTAFSLAVEIGDWDRFTGAGIGADLRMVPSEHSSGASRSQGPITKTGNAHVRRLLVEAAWHHRKPYRPTAVLSRRWQLASPAAVARAQAGNHRLHQRWVGYSDRKKRPVLANVAVARELAGWCWSLAMLPE

SEQ ID NO: 511994 - protein, 341 aa, unidentified
MMIIGCDFHPRFQQIAFVDQETGECGELRLSHPQEAEQFYRSLGGRQVRIGAEATGNFRWFRRLIEELGQEFLLGDASTIRACCPRKQKTDKRDARHILTLLVEDRFPAVWQPPVENDEMRQLLLHRCRLVRMRTRVKNQLDSMAKNEGLLSLRVWSPKRRSEIEALPLPGWYAHRRADLLVLLDELDKRIKPLDEAVRKAAEGNAEACLLMTHPGVGPIVSLAYVLTIGDWRRFPRGKQVGSYLGLIPAEESSGDKRRLGHISKQGSTLLRWLLVESAVHAQRHDPSWHRQYVRLSMTKHHGVAKVAIAHKLAVRLYWMLRSGDDYRKVMERGSHVGQSV

SEQ ID NO: 511995 - protein, 345 aa, unidentified
MHNIITGVDLAKEEIQVCVCKRNKVQSNQAMTPIEFGSWLASSKPMTIVLEACSTSNYWKQKALEYGHDARLISAKLVASVRQNQKTDKNDALAVAQAAQLTDVSFINGKSKEQQELQTLVRLRELAVKHKVAMQQQIKSLLLEFNIRISPSQGGLSGVVEGVLEDAENGFSMVFRQALSTSWQQLQRGIESIKQYDLYLEKAANGHEICKSLQALEGVGPLNAVNLYMALGCGEMGQFEKGRDASACIGLTPIQHSSGGKVKLGSVGKYVKNNMLRSCLVSGAMSAVNQAMRRPAKTKKEMWIQQMVERRGKRCTAVALANKTVRTAFAMLTNGTEYKAELLAA

SEQ ID NO: 511996 - protein, 453 aa, unidentified
MRVMYERCCGLDIHKASITACALITEKGKTQEETRRFGTMTDDLRALAGWLQQKEIRHVAMESTGVYWKPVWNILEPAGLELLLANAQEVKVVPGRKTDQKDSQWIADLHKHGLLRNSFVPPRAIRDLRDLTRTRAILTQEHSSICNRIQKVLEDANIKLGSVASDVFGVSGRAILRALMNEENDAEALANLSKGTLRKKIPQLRRALEGQVTPHHRLLLTEHWDRMEFLERQIADFEIQIAGRMKPTPEEMALMMQDATEDAPAPLSPREEAIQLWMEIPGVGWTAACSMVAELGINMDQFPSAAHVASWAALCPGNNESAGKRLSGKTRKGNVWLRRTMCEVAWAASHTKDTYFAAQFRRIASRRGNKRALMAVAHSILVTAYHMLKHKRHYTELGADFFDVINRDKVRDRLVQRLSKLGFDVTLKSKGTLESVDHLADNSHPVVPASPKS

SEQ ID NO: 511997 - protein, 349 aa, unidentified
MIIIGCDYHPSFQQIAWVDSETGECGEQRLPHSDGEAEKYYRGLKGHGVRVGIEATEHARWFERVLAELTCELWVGDPAQIWAMRVRKQKTDRQDAQHLLKLLVEDRFPRVWVPSAENRDLRQLLWHRHRLVQMRTRIMNQLQAIAMNEGVRRKKGLWSKQGRRQLESFSLAPWATRRRQDLLELLDRLNPSIQELSTAIEQEAVQRPEVKRLMTHPGVGPLTALAFVLIIGSPERFRCGKQIGSYLGLVPCEDSSADHQRLGHISKQGNALLRFLLVEAAQATVRSDPEWRRQFLHLAMRRERAIAKVAMARKLAVRLYWMWHKGWDYQQMVQFGSHVGQPVVSHGVK

SEQ ID NO: 511998 - protein, 426 aa, unidentified
MKPNNPPEFTALIGLDWGDKSHAIALEPAGGSTETSTLEHSAETLHQWLDQLEQRFGARQVAIAIETDQGAVVYALLERPWITIYPIHPATSTRHRTMFRPSGAADDLPDALVLLSLLQHHRQRLRPLQLDDETTRTLARLVEARRKAVDRRTLLLNQLVSTLKNYFPQALELVGEDLCTDMALDFLAKWPRLIDVQAAKPATLKSFYHRHNVRRPQLIQKRLDRVRSARLLTRDPAVIEVSVRVVQLLVAELRVLVEHITAFESAIAQDFARHPEKTFFSELPGAGPTLAPRLLAAFGTLREQYPEVACMQRYFGVAPVTEKSGSRAWIHWRWNAPTFTRQTLVEWAGQTIVFCPWAKAFYERQRARGSAHHAIMRALAFKWLRVLWRCWQKRQPYNQEQFLRQLEKRRSPIAARARQLAVEMAA

SEQ ID NO: 511999 - protein, 347 aa, unidentified
MTLYCGVDFHSRRQTICYCNTADGEVKVKDLHHYDDDVRSFYEQFKGEQVIVGYETSGYARWFEQMLFELGIEVWVGDAAEISRLAKRRQKNDRRDAEHILELMLKGEFPKLYRTEVKSQEILRLLRHRNKLVKHSTMVKNSLRRILIETGLLFKEGLASRKAKQKFRDLKLPPLLAAERDQWLELLIQLEEQIAGLEKQLKQEAESDERVQRLLTHPGVGLLTALCIVHTLGEVSRFATTRKVAAYAGLEPMEHSSGEKRRYGVISKAGSRLLRFLLGEAAHMAARSDEELKQFFRRLKAKCGMAKAIVATARKLLIRCFIMLRDEIDYAEFRQRGVEARSARVYT

SEQ ID NO: 512000 - protein, 330 aa, unidentified
MNVVSTLGIDLAKNSFSVHGVDGAGAVVMRRTVSRSQLAELVMQLPPCLIGMEACSGAHEWARRFGRFGHAVKLMAPKFVTPYRKSGKNDGNDAEAICEAVSRPNMRFVPIKSVQQQADLSLHRVRQGFVEERTATFNRVRGLIAEFGYVLPNGVEQLRRQVPGLLEGLPVRVARCVRDLLEHAERLRSKALEYEREIRISVRDNELARRAHTRPGIGPITASALVATVGNGHDFKNGRQFSAWLGLVPRQYSTGGKTRLGHITKRGDPYLRTLLVMGARSVLQRAYRERDPLSRWALALQQRRGYHRACVAIAAKNARVAWALLAKGLT

SEQ ID NO: 512001 - protein, 342 aa, unidentified
MKFYCGIDLSARDCHVCVIDEQLKIVVQQKLRNDLPGIIKLLQPYKANLKIVIESTFNWYWLVDGLQAEGFDVVLAHTLGLYLITGAKVKTDRRDAYSLAKLLLVGAVPAAYIYPVETRPVRDLLRRRMHLVQVRAGEYGSLRRLLLRQGILSSKQQEIKTATEAELEQWFEHPLVRLHASQELRRIELYSEQIAELEKSILALAKTAPSYELLQKLPGVGQTIALTILYEVGELTRFANVKVFSSYCRVVPGIAQSGNVSGRGRASKQGNHYLKAAFSQAAVHAVRCYPKVRRYYERQLQRHRGRGRQMICYNIIAHKLAQAAFHVLKEQTEYREELLFGR

SEQ ID NO: 512002 - protein, 400 aa, unidentified
MISVGIDVSKGKSTVCILKPYGEIVSKPFNITHTQKDLSELSSMLFRLNDEVKIVMEATGIYHLPVLTYLQEKGFFVSVINPYLMKSYRNESLRKAKTDKIDSRIIANYGIDHWFKMKEFQTSGEIYEELKLLGQQYRHYMKLHLLSLAELTHLLDLTMPGIKNLLASWNETNRKDKRSDFVERFWHYDVITSMSEQEFTEEYILWAKEKKYVPSQEKAKVIYTLAQESIPTLPSETSSVKMLVTEAVRVLKEVDATLGLILSRMQEIAKTLPEYSVVREMGGVGNTLAPKLIAEIGDVPRFRNGKALVAFAGIDPPPYESGQFVGCNRKISKRGSASLRKVGYETMRSLKMRSRPEDPVYRYVVKKESEGKSKKSAKIAGLNKFLRIYYARVTELYKNI

SEQ ID NO: 512003 - protein, 340 aa, unidentified
MVLYGGIDLHANNSVIVVINEQDEVVYQKRLSNDLPLILEQLAPYHLALKGLVVESTYNWYWLVDGLMEADYRVHLANPAAIQQYSGLKYSDDHSDARWLAHLLRLAVLPEGYIYPKAARAVRDLLRKRAHLVRQHTANVLSVQNIMARHTGARFSVKRIQELTKQELTTLLADEVQVLAVTSSLVVLDCLRHQIKTLEKTVHTRLNHTPSYEQLLTVQGIGTILAQTIALETGDIRRFPTVGNYASYCRCVDSTKISNGKRKGTGNVKNGNPYLAWAYMEAAQFAIRFQPEAQRFYQRKRAKSRNNTVLARKAVAHKLSRACYYMMRDLVPYEATKAFG

SEQ ID NO: 512004 - protein, 445 aa, unidentified
MHYKRLLTWIDGSSSYLSVGLDVGADFTWMSIALPNGAFIGKPFKIVHSDPRSRDLAVTKIKEAQETYSLKSRCFLESTGIYHIPLLCFLRDKGFDCSVINPIITKNSTNINIRKLHNDKFDSKKAALVGLNVSLKTSIIPEDSIVDLRNLVRDYYYFKDLQSAVALKLTAELKMSFPAYAKVFSKVTTQSSLKLLSSYPLAGDMLEASKDDIVETIRSTARFGEAYALRKYDAVIAAAQDASVFGRALPSNAVRIRLYIDTYQEYQKHLDALLKALHETVERLQDTLIYDQICLLQSLRGIGFLSAVVLIAEMGDFKLFPSPKKLYAYFGLDPAVKQSGKLNGDKVHMSKRGSNLARRVLYMVALNNVKVDKGSGTPVNPVIYDYYTRKCSGKKKPVAMGAVMHKICNIIFAMLRDNKPFEIITPEEHCQRFAAEYPDKIRKAA

SEQ ID NO: 512005 - protein, 353 aa, unidentified
MNSLADLREVVDVVIGVDTHVQTHSAAVLDTATGGVLDEITVAATAEGYAELVEFANDHATLRAWAIEGTGGHGAGLSRHLLEMSEIVVELDRPKRAARRNGAKSDPLDAIRAAREAMARPRLGTPRSGGERQALSVLLAARRSAINASTEAQQQVFSLVIAAPEPIRARFRGQKLAAMLNTAASLRVHSSWDVETTSTVVSLRTLARRAHAMLKEARELQKAILAIIRSWRPDLLEEFGVGPIVAATVLCAWSHSGRIHSEAAFAMLAGVAPIPANSGQVTTRYRLNRYGDRNLNTALHTVVQSRIQYQKATRDYVARRTAEGKTSREIKRCLARYVARDLYRLLESGVATA

SEQ ID NO: 512006 - protein, 340 aa, unidentified
MGEYIGLDVSLKETAVSIRRDGKRIWRGKCASDPQLLAALIRKHAREAERVVFETGPLSIWFFHALTAEGLPAICIDARHAKAALDMAANKTDANDADGLAHLAEVGFYKEVRVKSFDSMLARTLVAARTRLVRIGTELSNQIRGLMKTFGLVVPPASGSKFERQVEAMLADNADLGRIIRPLLEAWHAVRLRAAELGRKLLSDARRSDACQLLMSIPGVGVVTATSFVTAIEDPTNFKHSRSVGAWVGLTTRRYQSGEIDYDGHISRRGDSHLRGLLYEAATVLLVRSRSECDLRKWGLQLRERLGFKRAAVAVARKLAVIMHTMLITGEPFRETRATA

SEQ ID NO: 512007 - protein, 408 aa, unidentified
MGACAGVDWASDKHDVLIADETTGRQLLAATFAHTEAGIARLCKALADHGTQRVAIERPDGLLVERLIETGLVVLAIHPNQVAAARPRFRAAGGKSDGFDSFVLCELARTDHHRFRELEADRDETKALRAMTRAREDLVQARVAIANQLRNELERFWPAATNIFADIDSPIGLAFLARYPSPADAHALGHKRLAAFLARHRYSGRKNPDQLLTRLRTAPTGRAGAMETEARRNTVLALVATLKTLVTQISQLTSDIAHAVRSHPDGPIFLSFFRRPDSVICAATLLAEIGDCRARYPTADALAADAGQAAIAIESGKRKHAAFRHACDHRLRAAITTLADATRHWHPWATDVYHRARARGHDHPRAIRTLGRAWTRILWRCWQDHIPYDPTRHGSLQRHITATIPAGG

SEQ ID NO: 512008 - protein, 359 aa, unidentified
MSKSTAVSVSEQVHWVGVDVAKKTFDAALVRDGQKWPCTPLSSLPVHSFVRTREGVGEFLSWLDSLITGDEAPALTRAVMEATGRYSIELAVWMAELRPSLAPAIEQPQQTAAFMKSLGLRGKTDRMEARALGFYGMERQPCACQPASKEESLLRDLVRYRDFLVEQRVAEQNRAQEMKHCPLVAKIAGGRLALIDNDIKKVEAEMRKVCESAPELKNDIAHLSTIYGVGFIVAAIVRSELGDLRRFAKAKQLTAYAGLSPSVRQSGTSVNGRAHMNKRGNPRVRKALYLSAMVAVRGKNELQQYYVKLRDEGKSAMSALGAVMRKLLVLMRAILISGKPFDPLWKTQPQCAPILGQKT

SEQ ID NO: 512009 - protein, 377 aa, unidentified
MKRVKFVGLDVHAETIAVAVAEQNGEVRSLGVIPNREDSVRKLVRKLGPVEEPRFCYEAGPTGYVLYWQLTRMGAKCEVVAPTLVPVKSGDRVKTDRRDALKLARNYRAGELTPVWVPDAAHEALRDLVRAREAAKKDELRARHRLNKLLLRQGRRPPMGVKLWTIKYLEWVKREVHFEQMAQEATLLDYLHEVEHAAARIARLDGAIAEAVKLAPPKMRAVIAALQALRGIAHVAAVTVVAELGELSRFARAKQLMGYGGIVASEHSSGEHTRRGGITKTGNAHLRRVVVEAAWTYRHRPAVGTSLRKRQEHVSEEVKEIAWKAQQRLHQRYKKLLANGKNKGVVVTAIGRELLGFIWAIGIKVEAAQKESLQRAA

SEQ ID NO: 512010 - protein, 443 aa, unidentified
MKVRYERVAGIDVHKEMVKVAIRSPGEGGERKTEVLEFRAFYGVLQEMARFLRERGVTHVAMEASGVYTEPVYHALCEQDFTEVLVVNPQHVKALKGHKTDARDCRRIAELLECGLLRGSYVPSAEQKEMRDLTRYRKKAVQARTSEIQRLQKVLESAGIKLGSVVSDVTGKSATAMIGALIDGERRTEVMADLALRSLRAAGKQADLKMALAGRFTEHHAMLCRMHRDQIKLADQAVGKLDQQIAAMASRWQRELDLLLSIPGVGVVVAAIWLAEIGPAPHLWFDSHGKLASWVTLCPGNHISARKRKHGKTGDAGTYIKPALIEAAWGAIRVKGRLQSRYNRLLRRFGGPKNPGAKKKAITAIAHTLLKIAYQVLKSGQPYTDPGADFYTRRESPARQQAWLERRLQQLYPGRTVTVTIGPAPGSYPPPGAPVQAALPGHH

SEQ ID NO: 512011 - protein, 299 aa, unidentified
MLIIGCDYHPSVQQIAWVDRENGECGERRLLHSDGEAEGFYRELKQRGVSVRVGIEATGHARWFERLLAELGFELWTGDAAAIRAKRVRKQKTDRQDAQHLLQLLGEDRFPRVWVPSPENRDLRQLLWHRHRLVQMRTRIKNQLPAIAMNEGVRRKKGLWTKQGRTQREAFSLAPWATRRRPDLLVLLDRLNPSIEKLSAEIEREAEQRPEVQKLMTHPGIGPITALAFVLVIGPPDRFRCGKQIGSYLGLVPSEDSSGDHRRLGHLSKQGNAMLRFLLVEAAGAALRFEPDWRRQFVT

SEQ ID NO: 512012 - protein, 387 aa, unidentified
MKSIIAVGIDVSKEKLDVSFYDGKNHIIKVYSNKEDGIAKLINDAEAIKKKVEQKDKNQDDMKQVDKNHLYDCELHFIMEATGSYHTKVLFELSNKNYTVYLLNPLISKRYSEEQLRRTTTDKVASKLLAEYAYSSISSYLLGIQNERYNILISSKFDSREKDELDLKILLKTLEGLKKTRTRILNQIEALNQYPKGYGIDASKSLNNVLKEIDKEIKEIENKISGILNNGEKRDLYERLKTIPGIGDRSASVIIAYFGSFSTFESPKQVPCYTGLTPLIKQSGKSVGAKEIYHISKIGSPYIRQVMYMAALSAARYNKQCNILYNRLLNKGKSKKLIYVAISCKLLRQAFGIIKNGTVYDPDFGLILDEENKRNNNKEGLRCTASC

SEQ ID NO: 512013 - protein, 357 aa, unidentified
MSTRTAVGWDIHRKFSQLSVVTQCEQGEIRVVKRMRLEHADRASMRNELAKLPPATPVAMEGAFGWPWIADLLDELGLDPHLGHPPAIRVLAKNEAKADRMDADRLGRFWLRGIFPESYLSTPEVRQLRERMRYRMALVHLRTGIKCRIQAILHRQGVSHDYSDLFGKGGRAFLTKLAVPEACRAALDGWLAQIDLLEAQLAKVEAWMKQHLEEDEITRLLQTIPGIGLILAHVIRAEIGQLTERFPSRRHLTSYSGLAPLADDSADRHGRRHIAPACNHTLRWAFIEAAHCVIKSKNCPANLRCLHHRLTHGGRANKSAAKVAVARELCELVYVIWKKGEPYREITSPVRSQRAKR

SEQ ID NO: 512014 - protein, 369 aa, unidentified
MSSQLLNYSLGLDCSSDDFKVCFLNFDTEQSYKVKGSRKFDNRPGCFKELVDWTEKRRKDKSVPLRITMEVTGVYHERLAYYLHETGYEISIVAPNKAKHYLRSLGHKTKTDKMDALGLARMGAEQRLEKWQPSSEQMLKLKRMTRHRAALQKQITMTSNQLHALSRAAGDNQEVMDMKRALLDFLRQQVKQTDKKLEAILAQDEQVSQKVRAIAASLDGVGELTVMSLAAETDGFKHFSSEAQLTSYSGYDVVANQSGKTNGKTKISKQGNTHIRRALFMPAFNVVRYETGKFPALYERVHQRTKIKMKGYVAVQRKLLCLIYTLWKNDTVFEENYGEAQSQDVQQEQTADLNIGQCRAGAPLSGVAA

SEQ ID NO: 512015 - protein, 316 aa, unidentified
MAQRVVERRVGIDVSKSTLDIWDWERRHHERIDNTEAAIEQWLNSCETPMQIAVEPTGTFHLTVAQQAHERGHAVYCVDPYRVSHYRESVGQRAKADRTDAWVLARYLCHEQAQLRRWQPLDARVRQVWQLLTRRAALVKARGQVAQSLRDVSMVRADSEPLMAAFAVTIRRLERRLDALVNELGWRPAVQRCEALPGVGSLNAIALVAAFHRGEFTRADAFIAFLGLDVRVRDSGTFRGKRKLSKRGEPEVRRLLYNAAMAARRSPLWEPYYRALIDRGLSTTAALVALGRKLARVCFALLKHNRTFDPSCCPGG

SEQ ID NO: 512016 - protein, 443 aa, unidentified
MKPKRRTHLRGPRGQAFADRIRGVCPEHILCVSIDISKDFHVVLLHNGLGEIVTASFEIDIFRSGFERLCQAVEEAVARTQAQVILVGMEPTGHYYENLARHIQATRQDVTLINSYSVKENRNQQMMAKEKDDDIDSAAIGDLLRRGEGTPFRPPTGIYLQLQQLDRARLGEVKIQTMVKNRIIGHLDRIFPGLILTKAAAKERYQPLFATDFWECQTLQHLVRVCPDPRALAAMSPAELRAAFHEQDYRLGPVTGQRIIAYAQKVLWPDPEVVAIRRQLLATDLQTLDEVSARVAHYTEQLEQLVAQTPYQILTRVKGLTPIQVASLAAAAGDPANYTHAGQLFRRSGLVSGRNDSGARQRRGKGQGVIKSGDVYLRRALNAMLNGLILHQPVLGRYYHRLKQSKPVGVARVATIRRINGILWATVRDQRADTLIWRGDQMT

SEQ ID NO: 512017 - protein, 327 aa, unidentified
MIEHYIGVDLHQAFFQACAVDATGARLWEERFPRSGGGIAALLARCDRRTALAVEASTPTWHFADALGDHVGDLRIVDPLKTKLKAGYAAKTDRLDARRLADALRRDSVVGIYYPPVAIRDLRELCRYRHALVQVRTALINRLRAVLLRQGVVDRRRLARPRCDAWLTLLALPPHAAASVAGLRALLVTVRAQVADAERAVLAAAAQDPIATALQAIPGIGPVLALLIRAEVGDVRRFPTPGHLASYAGLVPSVDNSARRIRYGRITRRGSPWLRWALVEAAIHGTRRTDRIGRWGRGLAVRKGAMKARIALARMLCADVVRHWPIG

SEQ ID NO: 512018 - protein, 369 aa, unidentified
MEQMYYIGLDVHKKKISYCVKDVSGRIHAEGAIPATRTDLDLWMKTLPQPWTAAMEATIFTGWIYDYLLPHAAALKVAHPLMLRAIAAAKKKNDRIDASKIADCLRCDFLPECYMASTEIRERRRTLRYRNLLVRQSVQLKNKIAVLLMEAGVSYNKQKLHKVGYFGDLLKTNPDINESLRSLLQLCRETLVRLQKIESALIRSLERDRLLAERVDRLMTIPAVGPITALTWALEVGDVKRFSSIKKAISYCGLCSAEKSSADVIKRGPLSKQRNKHLQCMLIEAAKLAPRNSSGLAMIYDRERQKGNANRATLAVARKLVAYLVAVDRSRHVSETFPLLIASCTICHFSSGVRSMRGLLPMLPPFGRP

SEQ ID NO: 512019 - protein, 420 aa, unidentified
MKSASNTLNNTLPKFPPNDVTAGIDWARDDHAIAIVDGRGREIHRSSVEHTADGLRQLVKALGQHGVGEVAIERPDGPVVDALLEAGITVVVISPNQVKNLRGRYGSAGNKDDRFDAYVLADTLRTDRPRLRPLVPDTDATVALRRACRARKDLVKHRVAAANQLRAHLRNVLPAVVGLFSEIDSAITLAFLTRFDTQDKIDWLSPKRLGDWLMRQGYSGKTDPAVLHQRILDAPGGATGNHGVTQAHITASYVALLRTLLEQIKVLEKQIDQQLDGHADAHIFTSLPRSGRVRAARLLAEIGDCRARFPTPESLTCLAGAAPSTRQSGRLRVVGFRWACDKQLRDAVTDFAADTRLVNPWAAGLYDRARDRGHDHAHAVRILARAWLHVIWHCWQDGVPYDPVQHRALQRLLATQPPAA

SEQ ID NO: 512020 - protein, 382 aa, unidentified
MILGQSRLAPFGLPYLGFDKLSEGEQSVTTPYDYHIGMDYHKSYSHLVVQDSAGKTLRSGRVKNDHQSLGLFLERYRENSHAVVEATRNWMVMYDWLEDICDDVVLAHPLKVKAIADARIKTDKIDATVLAHLLRADLVPEAWAPGEKARELRIALRERMFYVRLRTMTKNRIVTVFDRYPEQTTQLKKLGDLFGKAGRQQLATIKVSDIDRIQIDRGLDFIGDIDGRIKQSEMTIKAMTKTNGNVKLLKTIPGIGEFFARLIDAEIDDIGRFRNPKKLAAYAGLVPSTYSSGGKTYHGKIIKQGNKWLRWAFVEAVAPAVATDPQLRAQYEHLKFKGTNKARVAVARKLLTIAFQILRDQRPYERRANGEEGALSTISRLS

SEQ ID NO: 512021 - protein, 343 aa, unidentified
MVHYIGLDVSLKKTSICVVNQAGSVVREGVVDSEPEAIAAFVRSKAPGAVRVGLETGPTATWLWSELKQLGLPVICIDARHARAVLKMQINKSDRNDAAGIARIMQTGWFKEVRVKGLDSHSVRALLASRALLVKIKRDLENQIRGLLKNVGLVIGRAKFNVFAVRAEELIEDRPELIAVVGPLLKARQAIEQQTDDLDRKVLKLARYDAQVRRFMTVPGIGPITALCFKATVDDPTRFKRSRSVGAYVGLTTRRHASGEIDWTGRISKCGDAMLRSYLFEAAGVLLTRVPKWSALKAWGMRLAKRNGLRKATVAVARKLAVILHRMWIDRTEFNWSKKEVAA

SEQ ID NO: 512022 - protein, 453 aa, unidentified
MSQSQTQEARSAPPEFAAFIGLDWADQKHSWKLVVANSAECESGELKNTPEALHLWASDLYSRFAGRPVAIAVEQRRGAIVSQLSNFPHLVLYPIHPTTAARYRQAFFPSGTKNDPLDSALLLELLVQHRDRLRRLDPDTPATRLLQVLIEHRRKMVDEKTRQSNRLTAALKSYYPQPLQWFDDIDGPLGCAFLQRWPTLALAQRNHPGTLRRFFLQHNCRSEERIRQRLEGIHQAIPAVTDPALLEAGASVVSGIVRLSEALGHSIAEVDAKLQTVAAEHPKAPIFVGLPGVGKVLLPRLIAGFGTQLDRFPSANELQRYSGIAPVRSQTGNTEIVHMRRACPKFLRQTFIEFAIHSVAKSVWARAFLQYELASKKEYFVAIRALAFKWQRVLHACWRSNTPYDEQRYLQVLQKRNSPIVKLFPTAKAALETPTSIEWKSVAGFKTLAAKNT

SEQ ID NO: 512023 - protein, 362 aa, unidentified
MRGVTVREKLYVGVDLHKTQFTICVINEEGDSFEAGTKFPMDKEGYIAFADKMKKLSRRHDGATVSIAIESTANARFFRDIMEAKGFKVTVVNTLRFKVVNLSTKKTDKNDAKTLAEFLARDILPKSHLCRPESESLRRVLKSRTLMVQDAVALKNQAHAVMLAYGYITQPAQFQSKSSRTKLLARLPAKVKEIIEIIFETLDLVESQTHVLERRLRRITIDNESINLLMTIPGIGIVNACTIYAYIDDIDRFESYKNFSAYCGLVPWVQTSNETVYYGKITKRGPQELRTALVQCVVAMVRMPGKTADLGIMKQYHQLKDDKSSGKAIIATARKLSRIIYVMLKTMTPFDSAKLIKDDPKE

SEQ ID NO: 512024 - protein, 415 aa, unidentified
MALKIVYKICCGIDVHKTFVVACIASTNDKGVTSYESHRFSTYTSGLKTLLQWLLDRNCKDVCMESTGKYWIPVYNILESDCSIVLAHPKYVKAIRGKKTDKKDAKWIADLFKHDLVAGSFMPPADIRQLRDLMRYRFKLTCFKSSEKNRLQNCLTVSNIQLGNVVSDTFGKSAQAILDKLLENPADTSFDLEPLVYKSLKKKLPELRDAIDGYITPEQAGKLKVIKAHYENLESRKAELEELILALAAPYQQELTILQTAPGISSPFTAIGIISEIGTNMEAFPSAKHLCSWAGLTPTNNESAGKKKSVRVSKAGCYIKPLLVQCANAVVKSTKHPEMRNRYLRLKKRRGHKKAIIAIARMLLTALYHMLKSGENYNAELYRKSDLPPVNREITVEQALMIARNQGYKIKSATA

SEQ ID NO: 512025 - protein, 331 aa, unidentified
MKKKEIIGIDISKSTIDFIIYSNQKHFEEKNKKSGFKSMIKKVEKFSPYAPDEILYVMEHTGMYSHLISLFFTENDIEYVIVPGLEIKRSLGITRGKDDKIDAKKIALYGYRLREELKPTVMPSETIVKMKNLMRLRDRMVKQRAGYKASLKEYKSIYKRKDNVTLFLSQERIINHLSKSIKTIEKEMDSLIKEDPQIKQMYGLITSIKGVGRQTAINMLIYTDGFTKFENYRKFASYCGIAPFPYRSGSSIRGKTKISNLANKKIKTLLDLCAKSAIQHNTEMKIYYNKRIAEGKNKRSTINIIRNKLLGRIFAVVKRKSPYVDVFGFAA

SEQ ID NO: 512026 - protein, 341 aa, unidentified
MTITQIGIDIGKNTFHVIGLDAGNAIVLRRQFSRAGLLRFFAEKINEPADIAFEACSGAHWLAHRLIALEHRVLLLTPESVRPFAKAQKNDWNDALAIAEAARRPGRHAVGIKSEEQLDMQALHRVRQRLMTARTAIINQLRGLMRERGIVAPGGRARFERFVSEQLLGDGAALSPVSRALFATLAIEYESISVRLAEIDQELEAFARENPVCRALLPIPGIGFVVATALYSAVANISDFRTGRDLAAFLGLVPRQRSTGGKTVLLGISKRGNTYVRTLMIHGMRSAFHHRARRDNRMTQFMDRLVERGLHTNKIVVACANKVARIAWAVLTKNEPFRSAA

SEQ ID NO: 512027 - protein, 387 aa, unidentified
MRKSNQRVVGLDVHPDSFAGAILAGRDPATAQVLSTSTRVELKELERWAERQTQPEDVLVLEASGNAFAVAERLRVLPRQVVILDSHQAGQIGKAYCANDRVDAIKIARIYLSGLSGQVWQPDEKTLERREVFSAYQGVVKETTRLQQQLKSMLNEHCVRLGSGFRLSHPSALTRLVKLKEWSPVQLMLLTQLHTGLRAARVRRSQLRRHMAGEILAEPELLRLARLCGLSLVTIYGLSAAIGDITRFRHSKKLVAYLGLNPSVCQSGNYEGATALKRHGRGPLRALLIQSAKKLLQVHNPLQKWGLAVAARRGRNKAAVAVARKLCVAIWHVLSGHLIGALEPLARLQTKLGKLATELGLPQIKALGYESKNAFIQQKLYLLKSYP

SEQ ID NO: 512028 - protein, 338 aa, unidentified
MTWYCGIDLHSNNHVVAICDEADRVEVQRRLPNDVGVTLQVLEPYRLDLAGVAVESTFNWYWLVDGLMDADHAVSLANPAAIQQYQGLKYTDDRYDARWLARLLCLGILPTGYIYPRQERPVRDLLRQRGRLVQQRTANLLSAQNILARETGKMIKGKELKRLTVEELGERLVVPELVLAVESRLEIIRALDEQIRRIEAAAREQGRLRPEFRVLRSVPGIGEILALTIMYETGSIGRFPGVGNFASYCRCVQSQRLTNGRLKGRGNRKNGNPYLSWALTEAAHFARRYQAGARKFYQRKLSKRGPILAERALAHKICRAIYFMLRDQALYDEDLLFR

SEQ ID NO: 512029 - protein, 341 aa, unidentified
MDRELYIGVDVSKKTLDLAYYDGETIDWKNAHIQVSNDNAGFKKIGSWVAKVGKDFDTFLFCMEYTGLYNQNFRLWLESKEYIYGMVEPRKMHRFEPDLDDDQRSLDRIKTDELDAFRIAIYCEQNHKKILRNPSKLPSPVYLKLKRLLVERKQNTKQSTLCKQQLHDTCAYDTDLSVERKKLLLKNMQENQKAIDREIDSYMQEDASISKNYELLTSIPGIGRIIALETIVLTENFTAISNPRKYACYIGIAPFKKESGTSVRKKTGVSKKGFSEAKADLSIAVLSAIRNNPSIRDYWIRKRKEKCGGIVLNAIKFKLVLRMFAVIKRGTPYVETDAYKN

SEQ ID NO: 512030 - protein, 409 aa, unidentified
MAAVMIGVDPHKGSHTAVVIDQAEMALGEVRVRASAPQVQQLLEWAAAWAERTWAVEGAGGLGHLLAQQLVAAGERVLDVQPKLAARVRLLAAGDVNKNDPNDARSVAVAALRSAACPPVRADDHAAVLKVWAKRHRDLSRSRNQVACRLHAVLCELVPGGVSKQIHAAAAARLLDEIQAAGAVQAARRELAGQFLADLRRLDAQRRDTKKKLTAAIRTSGTTVTEVFGVGPAVAAAVIGDVRDISRFPGPDCFAAYNGTAPVEVSSGGRVIYRLSLRGNRRLNHAIHMAAVTQIRYRHTKGRAYYDKKIAEGKTPKEALRALKRQVSDAIYQHLKAGARRAAAAAGPGGHPGNGSVASAAGSHPGHRLFGQATPGPEPTLRPRPGPSKTTRQGNSRRTRPLVPEHTST

SEQ ID NO: 512031 - protein, 405 aa, unidentified
MSKSNAGQVGVDTASALARVDAVVLAGSRSYPAYVGLDVHRDTIAVSVAVCGRGEPEYLGEIRHTDKAVGKLIERLGRRFDGEAVLFVYEAGPCGYGLYRRIIASGHDCEVVAPSLIPRKAGERVKTDRRDAQMLARLARAGELTAVWVPDGEQEAMRDLTRAREDMKAIELKARQRLGAFLLRHGRVYREGKNRWTQQHWRWLERQRFDSDLQQVVFEEYVEAVRGAQRRVAALECEMERALESWSLRPVAEALMALRGVSRVTAMTILAELGDLTRFDSPRELMAYLGLVPSEHSSGSRRHQGGITKAGNGHVRRVLVEAAWNYRYPARKTAIIQRRAERTSAGVQAIAWEAQKRLHYRYRTLMSAGKCNNVAVCALARELAGFLWAIACEQAGRPHGSRAVA

SEQ ID NO: 512032 - protein, 358 aa, unidentified
MKYIGCDFHPSFQVIAMVDQETGDWVERKLLHTEEAKKFYEERKGPVVVGVEASGNTHWFESWLARCGHELWIGDAAAIARQEGRKQKHDRRAAQLILQLMLENRFPRIWVPTVGERDLRQLLIHRQHLVRMRTRIKNQLQHIALNQGWQKKRKLWSEAGLELLRRLELEPWSGQRRDTLLTMLAELEDKIRPLDLAVAKEAQGREAARRLATHPGVGPVISLATVLTLGDVGRFADSRSWVSYLGLNPSEQSSGQRRRLGSISKQGSPFLRYLLVEGAMSAARGDQSLARMYARLKAKKHHGVAKVAVARKLAVRLYWMARTEKSYPEVVRTQGSQSHSVAQVMAERLNRPPASPQK

SEQ ID NO: 512033 - protein, 394 aa, unidentified
MKLIGIDIGKNKHFFCIMDQQTGEIISQPVSFSNDKEGFDFLLQKIKSYPKDSILIGMEDTGHYHFALLKYLLDLQYTVALINPKTTDFNRKMQGGITKNDKLDTINICDVLDTPERKKQYRITKVNSFDLYEQKQLTRHHHNLKEEENVYKNRLQKCIDIVFPEFNKLFNSKYGIVYMNILKMFGSAENIANTDIRTIRKCFEIEGRGNRISLTPERLKECARSSIGISSSAEVIQIKHLTAQIELIEEQLTEIDKKIEEFSIQNNSPILSIPGISHFSGTSILAELGDISNYSKPSQIIKFAGVAPLHYESSQFNAQHTAITKKGSKHLRKTLYQIILPVIRHNPVFNKYYQLKISQGKGHRCAQGHCVRKLLRIIYHLLKTNQQFDPQLLR

SEQ ID NO: 512034 - protein, 390 aa, unidentified
MIYVGIDVASQKHDYYMMSDQGEIYTSRSITIPNNNEGYKKLHKSIQEFCGATKDYKVRIGLESTGFYHKNLVSYLLAQDYEVMVINPILTNMYKKSRKIHIQKNDNIDSIYICKYLMDTETVFKPYTTISYHTDALKALSRERFSLVDDLRLVKINIYKLLTQLFPEYLKLFTNVYQGSALDILGRYNSPLKISKARLKTISSMIHGRCKTSAETLIEAAKTSIGIQNDYLSFQLSQAIKRLKSIESEIDEYNNQISKYVDMINPNILTISGVGYITAGLILGEIGDINNFKNSEHLISYAGLDVKIYESGKYKATNLSISKKGSVYLRYALYQVAKVCWIHDPMFHEYYLKKQAENKHYYVILGHIEKKLTKVIYSVLKNNKPYSPQI

SEQ ID NO: 512035 - protein, 419 aa, unidentified
MSFKILKNNCCGLDVHKTWIYACIGITDSLKRTEYKEARFSSFTKGLQELCDWLSKYNCTDVCMESTGKYWIPVFNILEKNNIWVTLSHPKYTKPQKGNKTDRKDAKWICDLYMCGMVKPSFIPPADIRELRDLVRYRFKLTCMITGEKNRAHNCLTVSNLKLDDVFSDIFGKSSRSITEQILQHPGETFDVSPFVDRRCKTPIEEIQAAVDGAISNEQTVKLRQCLNHIDELEMHKAEIEREIFRLSDKYESVLNLIRTVPGFDKNPLTAIQVLSEIGGDMSVFPTAKNLVSWAGCCPRNDQSNHKIKSTRISRAGSYFKPVLVQIANALIKSKKHPEFTTRYRRIKAHRGHKKAIIAICRMILTAIWHILSDLKPYTSEGFLESRPVNKSKILTTSQALNLLKQRGYIIKDDVVPVT

SEQ ID NO: 512036 - protein, 367 aa, unidentified
MREITTTFVGLDAHKVSISVSMLIPGEGKPVEWQCTNDRASVRRMVKKVLRQAPAGVRFCYEAGPCGYALQRWIREERAACVVVAPSLIPRKRGERVKTDRRDARKLAELDRAGLLTEVHPPTEEDEAARDLCRAREAAHADMVRSRHRVSKLLLRRGWQWMGGKRAWSQGYRLWLRSLRFEHRADQWMFEDYLLALDQVETRLKALEAQILEVSHDPRYAEAVGALRCFRGIDTITAMSLVAELHDVMRFESPRGLMAYLGIVPSEHSSGEKERRGEITKEGNRHVRRLLIEAAWHYRLRPGVASLAKRRQGQSTRVIAIADRAMHRLHRRFNRMAERGKPRPKVVVAVARELSGFIWAALRKDLA

SEQ ID NO: 512037 - protein, 367 aa, unidentified
MKKVSTAAVKATKNFSQPKLTIGLDLGDRSSWYCLLDEVGEVLQEQKLSTTPKAMREVFGAMPRCRIALETGTHSPWVSRLLSELGHEVIVAHARSVRLIGESRKKDDRLDARTLARLARIDPQLLCPVKHRSAKAQADLTVIRARAGLVRARTALVNTARGLAKSSGERLRGCNVRNMNPEKAEGLSPELQRALQPLLAGIESLSERIRECNEGIEKLAQESYPQVALLKQIKGVGTLIALTYMLTLEDPHRFRKSRDVGCYVGLQPGRRNSGQSEPQMHISKEGDPYLRTLLVQGAHHILGPFGADSDLRRWGLKLAERGGKNGKKRAVIATARKLAVLLHRLWVSGEVYEPLRNSHQTALPVAA

SEQ ID NO: 512038 - protein, 347 aa, unidentified
MLADQVDYVVGVDPHRDSHALAIVHVLSGAVAFETTIAASSQGYAEALQLVDAQAPGRRAFAVEGSGSFGAGLTRFLTSRGERVLEVSRLRRERRSGGKTDALDAVRAARSVLGQERPATPRAGGERQALQALVAAREGAVNAKCAGLAQIRDLLITTPEPLRSELRPLTQAPLLRRLAATRPEGRRDPELRGSMLALRSVARRVLQLQAEERELGRQIEALTRKLAPQLLDQPGVGPHAAAQLVLSWSHPGRIRSEAAFARLAGTAPIPASSGQTVRYRLDRSGDRKLNRALHLILVTRKRTHPPTRAYIERRIREGKTRREATRCLKRYLARNLYRLLEHPPMPA

SEQ ID NO: 512039 - protein, 329 aa, unidentified
MHSTDICFVGIDVAATTLAVCRRRAGGTPRRKSFANTSTGHRKLLSWLDRGPVRVCMEATGPYGLDLAATLHAAPDIAVMVANPRAVRDFARALMSRNKTDRVDADTLSQHAERMPFKPWTPPPQALLELRHIARHITVLTNTKAAEKNRLHAARATRTTPACVIAALDDHIAALGRRITVLEIEAAHRLAEIDGVEHVLTIPGIAQKSAIQLVAELAVLPTDMTKRQWVAHAGLDPRLVESGSSINRPTRISRNGNRRLRKALYMPALAAAHRHPAFATFYQRLIAAGLTKLQALVAVMRKLLHALYAVLKYKQPFDPDKLFKPRQCA

SEQ ID NO: 512040 - protein, 352 aa, unidentified
MSATAAQNAIAVVGIDIGKNSFHIVALDDRGAIVLRQKWSRSQVEARFANMPPCLIGMEACVGAHHLSRKLKAFGHDARLMPAKYVRPYSKGQKNDFRDAEAIAEAVQRPTMRFVATKTAEQLDLQALHRVRERLVSQRTGIINQIRAFLLERGIAVRQGLRYLRAELPRLLAAPPDVLSPRMVGVIEGLAEDWRRLDERIEHLSGEITALAHQDAGCKRLVSVPGIGPIISSAMVAAIGTGDAFSKGRDFAAWLGLVPKQISTGDRTILGKISKRGNRYLRVLFVQAAWVVLIKPQSWERHGLKPWIEAAKKRLHRNVLAIALANKLARIAWSVLARGRSFEARPVMASAA

SEQ ID NO: 512041 - protein, 340 aa, unidentified
MDTIGLDLHKRESQLCVLTEAGEIVERRIVTSRERFTAVLGSQPSARILVEASTESEWVARHLESLGHEVIVADPNFAPMYATRRRGVKTDRRDARTLAEACRLGAYRPVHRASAPQRHVRAQLAVRDALIRTRTRYVSVVKALVRRDGLRLPPGNPVHTDAKLAALPLPVPLARELAPLRALFEPLNNEITAADERLAAVAAADPVVERLRTAPGIGPVTAVAFVATLDDVTRFASAHHVAAYLGLTPREYSSGEQQHRGRISKTGNARMRYLLVEAAWRVLRTADPAAAVLRAWADGIAQRRGRSVAAVALARRLAGILYAMWRDGKDYQAPPPAAAP

SEQ ID NO: 512042 - protein, 388 aa, unidentified
MTGNRRCIGLDVHREFAQVAIWQGGTVTQAGTFATTPEGVREFAAGLGPADEVALEATGNTWAIATVLASRAGRVVVSNPARTRAIAEAKVKTDKVDAAILAQLLAADFLPPVWMPDAATSALRRQVLRRAHIVRQRTRLKNQVHAILHRNLVPRCPAADLFGIKGRTWLAQQDLPPDEQAAACALLRQLDFHAQELTLIDRDPGQAALGRPEVLRLMTIPGVDATVALSIVAAVGDFTRFRTPEKLVSYLGLNPRVRQSGGQPASHGRITKAGPAHARGMLAGAAWSASKAPGPLRAFYQRVRARRGMQVAAVATARKLAVLCWHLTIKGEDYAFALPSLIARKQRKLELRAGAPPARGRKGDAAPYSLAAVRAACFRWSDGQSDRR

SEQ ID NO: 512043 - protein, 449 aa, unidentified
MRTSKLAKGKKMKLPKHLQHINPYAAGIDVGCRSHFVAVPEGSCEQPVREFSSFTDDLHQMADWLLGCGVTSVVMESTGIYWIPVFEILESRGLEVRLVNARHVKNVPGRKSDVLDCQWLQRLHSYGLLEGAFRPAEHVCSLRAYVRQRMTLVRYAASHIQHMQKALAQMNLQLANVVSDITGATGMRIVRAVLDGERDPLVLARLRDRRCKSSEQTIARSLHGNFRPEHLFSLKQAVDLYEFYQGQIAECDRQILDQLASFDASGNGPDAKPPTRLEEALQRMSGVDLTRIDGIDTNSALKIISEIGIDMSRWKSAKHFASWLGLCPGTKVSGGKVLSAKSKKVANRAAATLRMAAFTLFKSKSALGAYLRRQRSRLGAPKAITATAHKLARLVYAMLKHGTAYVDAGQKYYEERYRTRVVQNLKRQAQMLGFSLVEIAGQQPQNATP

SEQ ID NO: 512044 - protein, 416 aa, unidentified
MSEAPNSSPFERYLALDAHKHYVVVGGVNAQLEIVLRARKMDIEQYSQWAKENLTSKDCLVIEASTNTWDLYDTTAAVAGKVVVAHPLAVKLIANARVKTDTKDVFRLAHLLVGGLIPEVWVPPVPVRELRGLIAHRRRLIKMRSMTRNRLHSLAHRHNLVLPEGGAFVDKNQAWWKDLSLSGVERLRLEQDLAMLEFLEPKVQAVDTELARLSSSEPWKEAVPYLMQLPGFGLIVSMTILSAIGNIQRFPSSKHLVGYGGLNASLHQSGQANYSGRITKQGRRELRLALVEAAWTAVKTNPYWREQYQKLAHRMTDNKAIVAIARRLLVTAWHVLTERATDRRADPDMIASKLMAWSWKLTEAQRGGLTSRQFVRYGLMRLKIGQEITRIKRRNNRPIASEEEVLELLSDLNLSI

SEQ ID NO: 512045 - protein, 418 aa, unidentified
MSNKVTRAASPWSEQYQKLLPRTKGGIMVFVGIDVAKDKHDCYICDSDGLELYSPFIIANNREGFEELMERIRCVSDDLSKVKVGLEATGHYSYNILGYLISHGTPISLINPLHTNLFRKSLSLRQTKTDKVDARTICMMLSSGMDLSSYSESSYHMEELKSLTRYRFGKVGERAQLKQSLSRLVTILFPELEKLVPTLHMKSVYALLSEFPGAIYVANAHLTRLKHLLADSSKGRYGKEFAETIRDTARKSIGSDMPAKSLELKHTIALIHVLTEEIDEIEFSIQKIMDTLDAPILGIPGINYRMGSMILAELGDLRRFSSPDKILAYAGMSPSTYQSGQLISSYAHMEKRGSRYLRYALFNATKYVCMWDPTFKSYLAKKRAEGKHYYVAISHAAKKLVRLIYHLQMTGEAYCPQT

SEQ ID NO: 512046 - protein, 396 aa, unidentified
MAAIWAGIDAGKTHHQCVAIDESGHRLLSRRVANDEPELLELLANVLALGEEVTWGIDLADGGAALAIAILLNHDQPVHYISGRAIHRASESYRGEGKTDAKDAAVIADQVRIRRDLNPLRTGDETVTDLKILTGRRIDLVADRTRTVNRLRAQLTGIFPGLERVLDFTNKGPLTLLTGYQTPAAIRRLGAKRLETWLRNRTVLRADQLAEAAVEAAERQHTSLPGEKLTAQMVHTLAKEVMALNERVTELDKLIEARFRDHHHFEVITSMPGLGIILGAEFLAATGGDMSVFGTPDRLAGFGGVAPVPRDSGKLSGNLRRPQRYNRRLQRVLYTSALFSIRRSEESRRFYDRKRSEGKRHTQAVLALARRRVNVLWALLRDERCYELAPPTALAA

SEQ ID NO: 512047 - protein, 355 aa, unidentified
MNEITRVGVDLAKRVIQVCAVNCAGVRVASRALPRDKFLLWCAQLPAGCLVALEASSSAHHWARKLVALGLDARIIAAHLVVPYRLQGKSGKNDVNDAAAICEAASRPQMHFVSIKSVEQQSMLCIHRLREGFKQERVACINRIRGLLAEFGLVFPQKPEVLRQALPDAIEDASNELGGLARLALQRAYAQWQELDEHMRWCDERVAAHGKASEQVRQARQLMGVGPVTASAVVATVGDFKQFNNAAQFGAWLGLTPRQNSSGGKNSLGRITKRGDMYLRTLLTQGAKSAVMTAHMRDDPISRWAHALREKSGWQKAAVALANKNARILWAMFVRGRTFDVHHVSTKPGMVAAPI

SEQ ID NO: 512048 - protein, 370 aa, unidentified
MDSSSPYGIYVPDWSSCSQSQDKKESTMNISRIGIDLAKNVFQLHGVDRHGKAVWKRRLSRSKWLKALLDQAEPSCEIGMEACGGAHHWARELESRGYTVKLIPPQFVKPYVKSNKNDANDAEAICEAMSRPNMRFVTVKSVVQQDIQATHRIRSELMTQRTAKANQIRGLVAEYGLVAPLTLRALRAAIPDWLEDAENGLTDHFRSLLHGVWSDLISLDDRVQDLDRAIQQLANSNEVTLRLQQLRGVGPMVATALVATVGHAEQYAKGRQMAAALGLTPRQHSSGGKDRLLGISKRGDVYLRTLLVHGARAVVSQARHKDDRLSRWVTSIATRRHPNVAAVALANKTVRMAWAMLRNDTDYDPDFAIS

SEQ ID NO: 512049 - protein, 282 aa, unidentified
MDIVGGFDVHRKQITFDYVQIETGESHRGEIRPADREHLRGWLEEFAERFCGRQAAFALEATTGWRYVVEELQRAGCDAHLAEPADTRVLRGRKKRAKTDRLAAKHLRELLVINRLPESWVPPEHIQEIRTLMRMRHSMVEERSAYLQRIHAQLFHNGSPKQEKDLLSAEGREHLQNLDLPGAARKVVELCLRMIEHINEELEPIEAQLRSYARAQAGCRALMNHYGVGELTSVALFSELGDTGRFSSSKKAVRFAGLDVTVHSSDEKRAAGKLSRQGSPVP

SEQ ID NO: 512050 - protein, 354 aa, unidentified
MLIIGCDYHPGFQQIASVDTETGETQERRLGHRQEAEEFYRILKRQQIRVRVGMEASGQARWFERLLAEPQFEFWIGDAAKIRTKRVRKQKTDRQDAQLLLGLMLENRFPQIWVASWENRDLRQLLWHRHRMVQMRTRLMNQLQAVALNEGIRRKKGLWREAGRKQLESMALAPWASRRRHDLLELLDGLSPRIAELSERVEEEAGKCPAARLLATHPGVGPLTALAFVLILGQAERFHCGNQVASYLGLVPAEDSSGEHRRLGHISKQGNTLLRFLMVEAAQVTVRSDPEWRRKYFHLALRRGRKIAKVAMARRLAVRLYWMWRKGLDYQQWKNFGPHAGQPGTGVGVQSNTE

SEQ ID NO: 512051 - protein, 478 aa, unidentified
MTPRERLFPLGRFILHNAEQAPGAEASKINIVPMKSLPVINPNAAAIDVGSEQLHLSIAGDEPVVFGTVTDEVYRLRDYLKEHNANSVAMEATGVYWLYAYTVLEAAGLEVVVVNGRHVRNLPGRKTDIADCQWLATLHAHGLLRGGFVPPAAIRRLQDYQRLRSDHIIGAGSQLQKMQQSMERMNIKLHDVISDLDGVSGLKVVRAILAGERNPHVLLSLCDPQIQKKKAERVLQSLRGTWAPEHLFALKQALEAWEFYQKLLAECDQQIEVVLKEMAGPEPESQEPPAKGKPSGKNAPQINQLHQMLMRICGGRDVTAIAGIGDNLLLQLLAETGPDLKAWPTEKHLTAWAGLAPGSRQSGKRKANIQRQRNRAGRLFCAGARSLVNSVDKALGGFYRRMAARKGGLAAMKALARKLAGLYYRVLRYGLAYAEQGLQAYEAKYAESQRRLLTKLAAKQGFRLISLESEALMKKTPL

SEQ ID NO: 512052 - protein, 359 aa, unidentified
MQTRGQSLDFSGQNIYAGFDVHLKSWSVTIMTDEITHKTFSQPPEPEVLHQYLQRNFPGGTYLSAYEAGFCGYWIHHKLLRLGIHSIVVNPADIPTTNKEKVQKDDKRDSRKIAKALRSGDLVPIYVPSAKTIEDRCLVRTRSMLVRDSTRNKNRIKSFLHFHGIKILAAFENSRTHWTKRFINWLEAIEMKEDSSKLTLSLLVSECKKLRGTILTVTRSIRELSQTEAYIKQEKLMRSVPGIGPITAITFLTEIETITRFSNNDQLHSFVGIVPSTNSSGENEIIGDITPRGHSILRSAIIESAWIAIRHDPALMKAYHDYCKRMESNKAIVRIAKKLLNRISFVLKNMQPYSLSVVK

SEQ ID NO: 512053 - protein, 379 aa, unidentified
MDHAITDPPAETILHGALELSKNSWLLALQFPDRAQPSLYPISGGDTVGLMAKLTAARDRWAKMSGKAPSIVLCYEAGYDAFWLARFLKARGIECLVVDAASMQVNRRARRAKTDRIDVGMLLRALIAWGQGDRHVWSVVRVPNVDEEDLRRSHRERDRLVRERTAHINRIKGLLFGQGIRGINVKSKYKTLQIDKLVTGDGRPLPPRLASEITREIARLALIQEQIATLERERDQAPTPCKTTEKKRLQLVSLNGIGPAIAAVMTREVYYRQFDNRRQVAGFLGLATSPHDSGDVERSQGISRAGRGQVRGTMIQAAWLWLKHQPKSAITRWFVQRTAGQSGRIRRIMIIAVARKLAIALWRFLEQGLVPQGAMLANR

SEQ ID NO: 512054 - protein, 318 aa, unidentified
MSHGYDTFVGIDISKDALDVHGLKDGSPSRFDNTAEGRAMLLSLLPQAGACLSVVEATGGYERDLVAEAVTAGHHIAVVNPRQVRDFAKALGLLAKTDQIDAAVIARFAETTRPVPKGYEERQEQLRELIVRRRQLLDHRTAEKNRAEMAHSSLVRKSVLKHIEMLNKDIQRIEKAILQLVESNDDWRGRFERLKGVPGVGEQTAATLMAELPELGRLNRQQVAALVGVAPFNRDSGQFRGRRAIWGGRQSVRNALYMAALSAKKHNPVIRAFAARLLAKGKPPKLVLTACMRKLLIILNAMLHSGDSWSPRMATLTP

SEQ ID NO: 512055 - protein, 338 aa, unidentified
MERQYVAIDLHLKRSVIVRENEAGEQLGVVRIENDPFELARALREAGEHPDVAIEATYGWYWAVDVLEELGAKVHLVNPSGLNWEDRRVKNDYRDCCDLLDRLRLGKLPEAWIAPPPVRELRELVRYRARLVALRTGLKAQLKAVLAKHNLRPPVEDLWGVAGPAWLDTIELPRAYLVRVESIRDLVGAYNREVAMLEREIHRQLGDDAGYRAIQAIPGVGRTIGAIFVAEIGDISRFPNPQTLSSWAGLTPRHRESDTKVRRGRITKQGSRLVRWAAIEAVSNNRGGTRLQADYRRISERRPRAVARAAVARKLLHLVFYGLRDGEIRSLAPATETG

SEQ ID NO: 512056 - protein, 423 aa, unidentified
MKASILCVGADIHLGKIVLRAVDKANDHEVIKAFRVTNNLPGAETAATVIAQVAANLGYTHLQIGWESTGMLWIPFHRYLASCPQLQPFALEFVCFNPQLVSKFKEGLVLRKPKNDERDAFDVAARLRFGELPVSYLPSDFWQGLRRLTRYRCRLALTLSREKMRFQSYAFLKVSDWKRISAFSDIFGATSAALLTEFTTTELKEMTHDQLVDLISRRGRGRFQDPHATARAVQKSLRSSYPIDPQMDEMVTATLATGWEHIRFIKRLMKRMDKHIAHYIEPIPNPLISVKGLGNVITAGILAEIVDISRFPENKHLAQFMGLTWSKQSSGAWISQNSRLTKVGNSYLRYYFILGADKLRMFNLEYKAYYWRKYQEVTKYQHKRALVLTARKLVRLVHALLTKNVPYVRPRMLDNLTEDEALQ

SEQ ID NO: 512057 - protein, 419 aa, unidentified
MSFKIFKFNCCGLDVHKTWIYACIGITDSNNRTEYKQARFSSFSKGLHQLCVWLAKYNCNDVCMESTGKYWIPVFNILEQHKIRVTLSHPKYTKPMKGNKTDRKDAKWICDLYMCGMVKPSFIPPADIRELKDLVRYRFKLTCMITGEKNRAQNCLTVSNLKLDDVFSDVFGKSSRSITEQILQHPGEKFDVSPFVDSRCKTPIEEIQAAVDGNISKEQDVKLRQCLDHIDELQKHISEVEQEILRLSDKYEAALNLIRTVPGFDKNPMTAIQVLSEIGGDMSVFPTAKHLVSWAGCCPRNDKSDRKIKSTRISCAGSYFKPVLVQIANALIKSKKHFEFTTRYKRIKTRRGHKKAIIARCRMILTAIWHILTDLKPYTSDGFLESRPVKKEKVLTTSQALNLLRQRGYLIKDEPSPVS

SEQ ID NO: 512058 - protein, 367 aa, unidentified
MSENITAFVGLDVHKESIAIAVAEPGRAAPRFIGTTGPVLRQVQKALTHLGTPVQLLVVYEAGPCGYGLARQLASKGYRCEVVAPSKIPRKPGDRIKTDRRDALQLAHFARAGDLTPILIPEEPDEAIRDLSRAREDALRARMSARQQLKALLLRHGVRYTGKCSWTKAHERYLAQLSFPHPAQNIAFVEYRTAVKEADERLERITAALSDQVDQWRLRPVVSALMTLRGIEMVAAVTLIAELGDLKRFEHPKRLMSFLGLVPSEHSSGQSRSLGGITKAGNMHARRILIEAAWSYRHPPRIAREKQIRQEGQPRAVREIAWRAQLRLCQRYRRLSARGMHQNKTCVSIARELAGFMWDIARQVAIQ

SEQ ID NO: 512059 - protein, 324 aa, unidentified
MTDSSSSVSLFVGIDVALDEFDLARSDSDKLLTVANDAGGIAQIVGMLRSASPTTIVVEATGGLERRLLDALLDAGLPVALVNPAHVRYLAKGLGILAKTDAIDARVLAEFARLASPRLAQKRSENQSELEALVTCRRQLVLIRTEQTNRRGATFSKSAIKSIDAVLKTLARQIQSLDKLIRKLIESDDDMDHLDKLLRTAPGVGPVLSSTLVADLPELGRADRREINALVGVAPFNHDSGRLKGKRAIRGGRASIRSVLYMATVTAIRDNPIIRSFWEKLIKAGKLKMVALVACMRKLLGLLHAMIRDDLTWHELTVVKALDL

SEQ ID NO: 512060 - protein, 417 aa, unidentified
MSDLYVGVDVSNLKLDVAFLDRELRPVRPPATYENTPEGHIALRAAAVSAAQLLGPKVRIVVGMESTGNMHKCLEASLRTERRREIQVHVLNPMAIKSFRKVMLKDSKTDRMDAELIAMYLARIQPPAAPPPPEGLEDLRIATRSRRRLVESQTAAKNGLHSLLRRYLPGYRKVSGKGLSNRFLVVLSEFPSPEEILSCAPEALAALKNGARGQVGRAFAEKIRALAAKAPVERPGAPVRLLIKDLAAQILQFESRISKLEKAIEELAEKVFPGEMQLLCSIPGIGKVSAASVLAEVGTIERFASKDKLVGYAGIYPMVSESGESGKRSSKMTYKGNKFLKTTLLVASAAARQYNPAIAAFYERLRARQKSKRAAGGAIARKLAEVIYAVLRRRQPWSAEIAARGIAKAQAMAAARN

SEQ ID NO: 512061 - protein, 402 aa, unidentified
MNAVGIDISKGNSTVAVLRPLGKVALAPRGFVHTYTDMSQLVDLLGDLDGETRVVMEATGRYHEPVAAALHQAGFYVSVLNPILIHQSGGGSVRKVKSDKKDALKIAKYGLDNWADLRQYSPMDNKRQQLKLFSRQYNLYMKTIVSLQNNLISLLDKTFPGVNELFTSPERADGHRKWVDFVASFWHCECVCGLTEKAFTARYQKCCKRSGYNFSKTKAADIYAFSGDLFATLPKDDNSKLLISSAVAQLNASIGLLATIKAEVIRLSKLLPEYDTVIAMYGVGDITAAQLMAEIGYVRRFANRGSLVGFAGIDPEVNQSGKQNVKSTSTTKRGSPYLRKTLFQVVSTYLKLSPADEPVYQFLDKKRSEGKPFYVFMTAAANKFLRIYYARVKECLAILEDK

SEQ ID NO: 512062 - protein, 332 aa, unidentified
MNMHLQGGVAKGDRRPNAGVDVSKHHLDVCFNGQSHRVTNDAQGWDELTAMLRQEQVDLIVMEATGGYERGLLCALQSAQLCVARVNPRQARDFAKSMGVLAKTDRVDARVLCDFADVLARHAGRERYVTPMLEQARQTLAELMTRRRQLVDMRVAEHNRLEHAGPKAKRSIHSVIKLLDRQLESIDRQIDDHMDEHFKQQRQLLDSVKGVGPVTILTLTAMLPELGQLGRRQIAKLVGVAPLADDSGARQGKRMTWGGRAEVRSVLYMAAIVAMRHNPVIRAFYERLVAAGKPKKVAIVACMRKLLTILNAMLRDQATWNAARHLSFAIAP

SEQ ID NO: 512063 - protein, 388 aa, unidentified
MQGVAAQSTASIAIRTDLCATFVSLELSRSTWLLTSLSPGAGEKMSKHSVSAGDTAGLFSRFVELQQKARTRTGRTFPIITIQEAGLDGFWIHRLLQGEGIESWVVDPASVLTSRRRRRAKTDKIDGETLVRTLLAYKRGEPRVCAMVKAPTPEEEDRRRICRERKTLTAERVRHVNRIKGLLFAQGVGDYEPLRRNRRGRLEELATGDGRPLPEHLKAQISRELDRLEVILAQLKAVGSERDAMLEPAKEGPPTPALLLAQLKGIGPEFAAVLWSEGLFRSFNNRRQVAAYAGLAPTPWQSGSVAHEQGVSKAGNPRLRTTMIQLAWLWLRHQPGSALSIWFRERVQRNGGRGKKTAIVAMARKLLVALWKYAVHGILIDGTTAKAA

SEQ ID NO: 512064 - protein, 345 aa, unidentified
MVMIGIDPHKRTHTAVAIDTAERVLDERLVRATSKQVPELLEWVKRLDGGDRIWAIESAGGLGYLLAQQLLAAGEQVVDIPATLASRVRLLGTGRSDKNDPNDARSVAIAALRAAELVPVRVEDHASVLRLVSRRHTQLGWSYNKTACRLHALVADLVPGGISKEVVVCQVRSLLVDHPSIGAVAVERHALALDLVDELERLNRQRKALRKRIAVAVDASGTTLTEIFGVGDVGAAIILGQVGDVGRFRTADRFAAYNGTAPIEWSSGNPARPIHRLSPRGNRTLNHVIHIAAVTQLRHRHSPGRAYYDAKRTQGLTGRAALRSLKRRISDAIYRRLVADAARRS

SEQ ID NO: 512065 - protein, 347 aa, unidentified
MDEISKRGVMTVVGIDLAKTSFHLHGVGSRGRVVASKKLSRAKLARFMANSPPCLVGMEACAGAHYWARKFRQMGHEVRLIGAQFVKPYVKSNKNDAADAEAICEAVQRPAMRFVPVKTLEQQDIQCLHRARSMAVAHRTAQANQIRGFLAEYGVVVAKGIGNLRRALPELLEDGQSELTPMFRELLGELREELLRLDRRVADYDAHIAALSRQSEPCRRLMTIPGIGPLSATALVAAAGDVSVFRSGREMAAWVGLVPRQCSTGGKPKLLGISKRGDAYLRKLLIDGARAAARVAGNKSDRRSRWVTGLSERRGRNVAVVALANKNVRTAWALLSRGQDYTATAIG

SEQ ID NO: 512066 - protein, 455 aa, unidentified
MPKPKRIRNARTSPVPRILEPDAAGIDIAATEVYVAVPTDRDPEPIRSFSTFTDDLHRLADWLRACNVQSVAMESTGVFWIPLFQILEDRGFRVCLVNARHVKNVPGRKTDVSDCQWLQYLHSVGLLRASHRPAQTICAVRSIWRHRESLVQMAAAHIQHMQKALDQMNLQLHHVISDISGTTGLSIIDAILDGERNPETLAALRDPRIVASRETIARALVGDYRTEHLFTLQQSLRAYRQHQQWIAACDVEIERQLRVLPNNLADDQKPLSKPKDHHKPRRNEPGFDLRSQLYRIFGVDLTEVPGVSSLTAHALLTEVGPDLRRFPNAAAFASWLGLCPDNRISGGRVLSVVTRKVKNRLTMALRMAAQSLHRSQSYLGQYFRRMRVRLGTPAAITAAAHKLARILYHLITTRQPYQESTFAVMEERSRHRQLLRLKKQAASFGFQLVPGSSVP

SEQ ID NO: 512067 - protein, 387 aa, unidentified
MIYVGIDIAKLNHYASAISSEGEVLLEPFKFTNDNDGFYTLVSKLNRFEKDKVIIGLESTAHYGNNLLAFLVPRGYHVCLINPIETSTMRKNNIRKTKTDKVDTFIICKTLIMQPHRFITLYDIGLMQLKNLGRFRQKTVKQRSRLKIQLTSYVDQVFPELQYFFKSGIHQKGCYALLREAPSPESIASMHLTHLTNVLKSSSHGRFKKETAVELRVLAQKSVGTSDNSLSIQITQSIEQIELLDRQLELIESEMQDIVKSLDSVIMTIPGIGYINGGMILGEIGDVSRFSNPSKLLAFAGLDPSVYQSGNFEAKHTRMSKRGSRALRFALINAAHNVVKNNKTFETYYKQKMSEGRTHYAALGHCAGKLVRIIYKMLTDNVEFNLE

SEQ ID NO: 512068 - protein, 342 aa, unidentified
METVSIIGLDLAKNVFQAHGARADGSTAFRKKISRAQLLSFFASIPKCRVAMEACASAHHWARQIGSLGHEVQLIPPIYVKPFVKRNKNDAADAEAIAEAAARPTMRFVAVKSVDKQASGMAFKTRDLLVRQRTQTINALRGHMAEYGVVAPNGPVHIARLSEALVDVDSGLPAAVIALCQILFAHIGVLTEQIRLLEKELRERSRGDEIAKRLMSIPGVGVICAVAIEALAPPPESFSKGRDFAAWLGLTPRQNSSGGKTRLGGTSKMGQRDLRRLLVSGAMTVVRWASRKGAPEESWLGRMIKKKPRLVVAVALANRTARIAWALMTKGGVYQASDAIRA

SEQ ID NO: 512069 - protein, 329 aa, unidentified
MHDHYVAVDWAQSNMAIARMTKESSAVKVVNVPSSVKELQIFLSRLRGKKILTFEETSTSQWLYVELKDHVDELVVCDPYRNHLLSDGPKTDELDAVKLVKLLKEGFLKPVFHSAAEFIYLRKLVSGYEDMIKAGVRLKNQRAALFRAQGKDKREKNLTQKVESFVLEGVDRGIEAYEKERTRYEAEMEKQRKKHLMIRNLNGISGIGVIGAVKIAARVVDARRFEDKGKWLSYCGLVRLEKLSGGRSYGWKNPRYCRTLKGVFKTAALSVIGGENNFNNYHAFLLEKKHFSEHNARHAVARKIATIAWAVMKSGKPFDPARMDQGVQE

SEQ ID NO: 512070 - protein, 387 aa, unidentified
MPQPNDLSRSLVALDQDSTIIAVVEMSQSSWLVAGMLPGIERQPRKKLEPSAERLLGLLHRWRDEAVKAGRKITRIALAFEAGRDGFWLARWLRAHGVEAHVIHPSSVAVSREHRRAKTDRLDTELLKRGFLGWLRGERGHCTMARIPTIAEEDAKRPNRERECLVRERTRIVNRMKGTLARLGIRNFKPTLRKAAERLATLLTPEGSALPPNVSAELQRNMARLGFVVSQIKEIEAARQKRLEQEPETEPHAMVRHLARVVGLGVETADILVNEVLSRPMRDRKAVARYAGLTGSPDESGAKRREQGLAKAGNARVRRGMIQLAWRFLRFQKESALALWYRARTADSRVGTRKTMIVALARKLLIALWRFVTTGETLEGVVLRPAG

SEQ ID NO: 512071 - protein, 379 aa, unidentified
MEISSSTLPAVAAERATMFVALELSKSSWLVALHSPVADKVSMHRFVGGDVAGLLALIARKQTQAEARLGRTIRVLSCYEAGYDGFWLHRLLCARGIDNRILDAASILVDRRSRRAKTDRLDAAGLLRTLMALDRGESRVCGVVRVPSVAQEDARRRSRERTRLVVERGQHSNRIKGLLMTLGVRDFEPTRRDWQERLGGLRTADGRELPACLKAEITRECRRLHQIIVMIAEVEAEQAAALDAEEGRAAQLIRLRGIGLVSATVLADEVFYRDFRNRREVAGYLGLASSPWASGRVQRDQGITKSGNPRARRTAIELAWLWLRHQPGSLLTQWFRQRVGTTRGRMRRIMLVALARKLIVALWRYLSDGLVPDGAELKA

SEQ ID NO: 512072 - protein, 373 aa, unidentified
MEIRGTSPISKGSSKLAVFLSFLKLIVIMGIRYFIGIDISKATLDWAVFDGEGIVLQSQSANSQAGVKATAKLIKALPGFVIAESVCCMEHTARRTVGVHNAHALSCLHKLGLPLWLESSLQIKQSGGMQRGKNDAVDAARIARYACRFRDRMRLWQPPRHAIQKLAYLSALRQRLLVARQQLQQPIAEQHGFVDKSVSQHMANACRASLKAPDTDLASADKQISELIRHDERLSELFGLVTSVPGVGPTIAAEVFVATNERSAARFEHISDPKKLACHAGVAPFEHRSGSSVRGSTRVSQHARKRLKSLFHMGAMSAIQVKGEIQDYYLRKVSEGKNKMSVLNAVRNKLVHRVCSVVHRGQKYEKNYTPGFA

SEQ ID NO: 512073 - protein, 353 aa, unidentified
MVTLRRPREEGALEKISTIGLDIAKRVFQVHGADNRGAVLFRKRLRRGQVLSFFADIPSCTVAMEACASAHYWGRQLGELGHSVKLIAPAYVKPFVKRQKNDAADAEAICEAAQRPTMRFVAVKTEQAQAAAILFRTRDLLVRQRTQIINALRGHLAEFGMIVAQGPQNVPKLIAVVDDPTSGLPLMARQMLVLLVDNLRGLDNRVIELDREISRRAKADEVAQRLMTIPGIGPVTATALMALAPSAQTFRRGRDFAAWLGLTPLQRSTGGKERLGRTSRMGERTLRRLLIIGASSVARWATRKGAPAGSWLERMLGRKPPMLVRVALANKMARTVWALMAHGGIYRAPVATA

SEQ ID NO: 512074 - protein, 373 aa, unidentified
MDQDTTYVAFDTSKETLAVAIADSGRRKEVRFFGTIANRPDTVRKLIEKLTKQHQRLAFCYEAGPTGYGLYRQIRAMGYDCQVVAPSMVPVRPGGHIKTDRRDATTLAALFRAGELTGIWVPDAAHEAMRDLSRGRQAAMEGLRRARQQLLSFLLRHGRAYPTRSHWTRAHRRWLAEQRFEHAAQQIVFEELIQAVEQAQSRRDRLEQQMVGLLPSWSLRGVVAALQALRGVAQLSAITLMAEIGDFRRFTNPRELMAWLGLVPREHSSGASTVRGAITKAGNRRARRVLVEGAWTYRLPARVGLELLKRNRALPEAIKDVAWKAQVRLCARYRRLLRGGKPINVVTVAIARELAAFVWAIATTVMPPLEPTA

SEQ ID NO: 512075 - protein, 480 aa, unidentified
MNVKARRTKKQVNVENQAINLLSKEELNKKIEVVEKELRSYTWRELETNGKFAKNDKLSFITDDMLIVGCDIGSETHYIRAIDVRGRELSSGAFEFSNTSEGFANARAWVLALAAKNDKKQIVLGLEPTGHYWFALAAWMISNGISVVQVNPYAVKQSKEIEDNSQLKDDRKDPKLIANLVKDGNYGMPYLPEKVYADMRRLSMFRDQLTEDRIRNINRLHRELKIYFPEYMDAFGKIDGAFTLEILKVSAIPSDITALGAEGMKNIWHNAKLRGRGYSRANEIVSYAEKSVGLTDGTDAGREAVKWYAEQILRLDEQLSEIESALHEKCREIPYAENILAINGVGENILAGILAEMGDISRFDDVKEIQKLSGMGLVACSSGKHKGQTKISHRGRKRLRYWLFQAAKSAVSHADEFKQLHEYYTTRSNNPLKKMQSLVVIACKILRVIYTILKTGTTYDPQKLLKDIKHPAASQAPMAA

SEQ ID NO: 512076 - protein, 360 aa, unidentified
MSTITLGVDLAKSMFSACEMDGAGRVIRRQDLRREPFGQWLAQQLPGTVVAMEACSGAHYWARRCIAYGLQPRIMAAQFVTPFRKSGRTKNDRADAEAIATAARQGNMRFVPVKNIDQQVRLSWHRVREGYKAESLAIGNRLRGLLAEFGVIVAPSDLALRRRLADLDAAIGLPAELKELLRDLADHWKQVRLRLDACDARIEAHARDDERSVRLRAIVGIGPITADAAVATVGDAREFKQGRQMAAWLGLVPTQHSSGGHARLGEISCRGDTYLRTLLIQGARSSLQRAKAVATEKATPEQLWIRTLDGRMPFGKVLVAIANKHARQIWAMLAHDVDYDAHACLNHSLHQQNHAAAQAA

SEQ ID NO: 512077 - protein, 339 aa, unidentified
MRSSCICVKAASGEILAEDRIASNRSALDQWMKQRHQPWIAALEATMFTGWIYDFLKPHAEGVKVINPALAKAITAGKRKNDRLDARQMADMVRVGWVPECYMAPTGIRDLRRVLRYRNLLVRACTRMKNRASGMLMECGIEYNKEKLHQPGYFGELVESIPRRIDPVPEWLLDLLRMNRTTIDLFQKCQQRLLNALERDAKLRCRVERSQTIGGVGPVLSLSWALEVGEVGRLGSIRKAVSFCGLCSAESQSGDKSYHGPISKKRNKHLQSVLIEAAKLAPRWNPQLKQVYERELARGHRNQATIAVARKLVAYLMAVDRSGKPFEPRMAAQAVEAGL

SEQ ID NO: 512078 - protein, 369 aa, unidentified
MNKFSKYVGLDVHQETIAVAVADTAGEVRYMGEIVNTPEAIAKLVTQLKRRTERLAFCYEAGPCGYPICRQLRDLKQDCQVVAPSLIPKKPGERVKTDRRDALSLARLHRAGELSPVWIPDEAQEALRDLTRAREDMKHLQRQAKQRLLSFLSRHGHRYTGRSRWTQAHWRWLESIKFARPEQQIVQQEYIDAVQACGRRVASLDREVETAAHASQVWPVIEALMALRGISLLAAVTVVAELGDLTRFAGPPQLMAYLGLVPSEHSSGKRERRGGITKTGNSHLRRVLIEAAWTYRHAARKTAILQRRAERTTPEVQEIAWSAQKRLCQRFRNLMARGKLKNQVCTAIARELVGFIWAIGQHVVPLSRA

SEQ ID NO: 512079 - protein, 341 aa, unidentified
MPLFSYYVGLDVHRKSISFCVRRPDGTLSREGKIPAARDAIRQWAATFDAPWCCGLEATICSHWIHQELKLYATRVEMANPSRLKAISAAKRKNDQLDARTLADLLRCNLFPACYVPPPGYESLRCYLRQRALLVRARVMFKNKTAGLLIQRGVPYETHRLHGKRYYTALLAENSALVEDLKPLLAFNRTQIERLDEMDDAIVEQLIRDPLLKQRVERLKSITGVGNITALTWAVEVGEPSRFPNERHAVSYCGLCAAERESAGVRKRGPLSKQRNAFLQTTLIEAAHIAVAHNEKLKAIYEAECQHGLKHRATLEVARRLVRWLLAVDRQYFAFLSAAAA

SEQ ID NO: 512080 - protein, 400 aa, unidentified
MRVVFGIAVSKVSSEVAILVNGEKVHGYTIPNDAIGFTRLLGDLKTVHKPEIIFEATGVYSRRLQAFLDEHDYAYTRLNPLEAKKQLDSLRVWKTDQIDAEKLAQSQCVLNRKPTYVQEEDYQNLRDLSRFYQNLTEDIVRAKNCLHKVLQVTFPELENILSTPSGEQYWNLVIAFPCKDCVLELSKDKLSESIRQSTSKRISDKRVAYLAEKLIALANQSYCAVKKTSPILEEVHYYAKELLRLSEQRQAVLDQMVELAQPLPEYDILLSIPGIVETTATSIIGELGDIRRFQSANQINAFIGIDLRHYESGNFLAKEHITKRGNPYARKILFKCIHNIASASHTNPCHIADFYEKRKRQSQTTSTKPHTIASIHRLIRTMYYLIMHNKLYDYASTQNR

SEQ ID NO: 512081 - protein, 355 aa, unidentified
MTTVPHDEVRVTVGVDTHEDIHVAVAVDQLGRWLAETSIPTNTGGFARLVDWASEFGVIDRFGVEGTGSWGAGLARWLRAEGLVVIEVDRPKRKHRRHGKSDAIDAEAAARAVLSGEATAVPKTGDGPVEMIRVLRLTRRSAVKNRTMTANQINALVITAPDALRDQLRAMTTRRRVAVAAKFRTGDEPTTVLEATRYALRELARRYQHLTEQITRFDAQLDRLVAETAPELIAKVGVGTHTAAALLVTAGDNPQRLAREGSFAHLTGSAPLDASSGKQQRHRLNRGGDRDANCALYQIALTRSSVHEDTKRYLQRRIAEGKTKKEAFRCLKRYIAREVHQTLVRTPALQAALDT

SEQ ID NO: 512082 - protein, 389 aa, unidentified
MKIYVGIDIAKLNHFAAAISSDGEIILEPFKFTNDADGFQLLVSKLESFDKNSIIIGLESTAHYGDNLVRYLVAEFYQVCVLNPIKTCQMRKNNVRKTKTDKVDTFVIAKTLMMQDDLRFITFFDLDMMDLKALGRFRQKTIKQRTRLKIQLTTYVDQVFPEIQYFFKSGLHQHAVYALLKEAPSPKEIASMHMTHLANLLKVNSHGHFTKEQAKELRVLAQKSVGANDSAISIQITQTIQQIELLDSQLEKIEAEMTDIMKFNDSVIMTIPGIGYINGGMILGEIGDIHRFSNPNKLLAFAGLDPSVYQSGNFQAKTTRMSKRGSRVLRYALVNAAWNVVRNNATFKAYYDAKRAEGRSHYNALGHCAGKLVRVIWKMLTDEVEFNLE

SEQ ID NO: 512083 - protein, 316 aa, unidentified
MSSSVAFGIDVSKRQLEMAAHDLDRTWTVDNDAAGHQVLLAACRELTPTLIVLEASGGYEREIVAALSVAGWPVVLANPRQVRDFARSTGQLAKTDRLDAQLLARFAAVVQPTPRPLADAETTELAALLTRRRQLVDMLVAERLRRRQAIAAVHADLTQHIRWLEQRVKRVDHDLDRWIQRSPLWRAKEDLLRSVPGVGPTIARTLLGRLPELGQLSRQQLAALAGLAPFARESGTWRGRRHITGGRREVRHMLYLAAVSAARCNPVLKTRFTRLRTAGKPAKVALIAIARQLLSILNAIVRTQQPWAPTLDSQHR

SEQ ID NO: 512084 - protein, 346 aa, unidentified
MSTLYCGIDAGSSNCHVAMMDKSGEFVVDTDIPTSELQLTAFLESLQKEGESVRVHLEAAELAQWIRGIIVERTNIDEVVVSDPKEMAWIAKDPHKNDTLDARKLADLLRLNRTHPVYYSDDKKMQSFKKQVQHHESISAEKTRIKNKIKASLRTGGLIIKNSLAYSKRRREGILDSIEDQMIRESTEDLYEFLDTTESLCQKAEKRLSKMAKNWPIIEYFMEVPGVGLIMACRFVAYIQTPWRFATKEKLWSYCKMGLIIRNSDGKLLSSPRLDKQGNGTLKDLSRKVFESARRRKDNNAFKRAYYRYLKTTHNEMHARLSVQRKILTTLWTMWRKNERYNDQRG

SEQ ID NO: 512085 - protein, 380 aa, unidentified
MEYCTTIGADVSDRTTKICVMTKAEGGERRIVVETTCATTKAGLEEAFAKFDRSWPVAFETGTHCRWMDRLFRKMGFRTIIGNPGKIPSITKSNTKNDRNDARELARLALADPAMLHPVFLRGETFQQMLRFHHARNMLISQRTQTINQIRGFAKSMGHRIERTSTERFHELGKAEWPEELEECAWPLMGSLKTINLKIKAYDKLIARLAERPEFKAMVERVRAVYGVGIIGSTVFIAAIGGRPDRFGHARDVGAYLGMTPKQDKSGDDDKQLHITHAGTEIVRTALVECAGVVMMSNAKDTDLKLKGLRIAMRGGKIARRKAKVAVARGLAVAMLALLKDPEREYVPLSEEGRRGFERYRAEMEYLAMGKAAKREKKVA

SEQ ID NO: 512086 - protein, 416 aa, unidentified
MEAYYIAGIDVHKKMLAVVIAAVQPGEWEFQRRRFGTTPAQLRELAGWLREQGVSEAVMESTAQYWRPVWAALQGQLRLHLAHAHSNGARRGRKSDFRDAERLTHRLVAGDLVLSFVPDAEQQSWRDLTRTRYQLVVERGRVQSQVENLLERASIKLSSVITDLFGSSGRRILQALSEEAGAPWHSQNLARLAHPSLRASHEQLAEALDGHWSSEHRLLLQLHLERLSLLDRQIETLQQQMAESMKAHQAAVARLCQVPGIRTDAALQLLAEVGPTAAAFPSASHLASWAGLCPGQQESAGQSYSKRPAQGNWQMKRVFNQVAHAAALKKGSFFQHLYRRLIVRMGPQKAIGALANRLCRLIWKILHEGVHYVEKGTAPLDPRAIRRRQQKVAAEFRKLGYNVQYVPLQPVITLAT

SEQ ID NO: 512087 - protein, 328 aa, unidentified
MDVITERVAGLDVHKDSVVACVLGGAPAGPVERAVRTCGTTTRELLNLREWLEQQAVTTVALEATGIYWRPVFNVLQHDTPLAGEAAGVQLILANPQHIKHVPGRKTDVLDAEWIAQLTRHGLIAASFVPPRPIRELRDLARYRKKLVGALAAEKTRAQRVLEDANIKLGSVASDIFGVSGRAMLQAIVAGETDGPQLATLAQRKLRRKQAALGEALEGRPTAAHRFLLAQMLEHVAFLERAIGAVEAELATRLAAHEGAVRNLCTIPGVSLIVATALIAELGLDMSVFPSAQQVASWAGVAPGSFESAGKKRGARVLKGRTWLKSLH

SEQ ID NO: 512088 - protein, 412 aa, unidentified
MDVIVERQGALDVHKEQVTACVRVPDEHGERISHVAEFKTTVRGLLVLRDWLKAHRVTQVTMEATGVYWKPVWHVLEDEFELVLVNARHVKQVPGRKTDVSDAVWLCQLAEAGLLRASFVPPKPIRALRQLTRYRKAQVSERQREANRLHKALEDTGIKLDCVATDILGRSGRAMLDALIGGTTDPEILAELAKGRMRAKIPALREALEGRFEPLHALLIGAILAHIDFLEEQIQRISDAIEEQLAPFAPAIELLRTSPGIQRRTAENIVAEIGLEMGVFPTAGHLASWAGQCPGNDQSAGKRRSGRTRKGSKWLDDALKDAALAAIRTDGSYLQALYRRKKPQLGHGRAIGAVKHSIICACWHMLTTGELYTDLGGDYYARRNPERQTKRLIAQLERLGHRVTLEEQAVAA

SEQ ID NO: 512089 - protein, 367 aa, unidentified
MNKSKVLYVGMDVDKEKIAMAALEGSSNEFVGEQLVRNDPAAVAKYFKRFMKSETEVIACYEAGCFGFRLARQLSDIGIGCAVAAPGMLPKMPSDRVKTDRRDARTLAKALRNGDVHNVYVPTEQDEAVRDYLRMFEDMKGNVKRAKQRVLTLLLRKGIRYTESGNWTAGHWRWLRTLELDQPLTHATLQEYLTSLGELEESCQRIAARIEEIALEERYAEPVARLKAFKGIATLIALSFIIEIGDFRRFATAQQFMAFLGLVPSEHSSGSHRRQGSITKAGNSHLRKLVVEAGWHYRSYHPVSKRLAKRRKGLPPQLVAYAHRAGRRLNKKYLHLVFSGKPTQVAATAVARELSGFIWGTMTGKTA

SEQ ID NO: 512090 - protein, 370 aa, unidentified
MGNSSTLFAGLDQHKESIAVAYVGEDRSLEPIYLGPIGTRSCEIDAMVRKLQSKAKKLVFVYEAGPCGYGLYRRLTAMGHTCLVVAPALIPRKAGDRVKTDRRDAVELARLLRSGDLTAVHVPSVEDEAIRDLSRAREDAVGDLKTAKYRLKSFLLRHDIRFNGKADWKSAHLRWLGEVKCATPVQQIVFQEYVRAMAQGFERLARLEIQLQGEVKSWRLAPVVEALQALRGVAFTVAVTTVAELGDLTRFAKPRQLMAYLGLHPSEHSSGPTRRQGGIAKTGNGHARRALIEGAWAYRFPARISKQIQARQEKLPEAVRDIAWRAQVRLCKRFQKFVARGKNANLAVTAIARELAGFMWAIAKQVPIVS

SEQ ID NO: 512091 - protein, 426 aa, unidentified
MPFAGLDVHRQEIEAVLLNDQGQVLLRQRLPTERAAIERFARQHLYAARVALEATTNCWAIAAILEPLCAQVVVSNPLRTRAIAAAKIKTDQVDALVLAQLLRCDYLPGVWSPDEPTRQMRQSATERANLSADRTRVKNRIHAVLHQRLIQPPMDDLFSPRGRAWLSELPLDELGAAHLQRNLQQLDLIEQQLAAVDQQLARDSYHNPQVKLLLTLPGVDIVVAQALLSSLGDIERFPDPDKAAAYLGLVPSTYQSGNHCYHGRITKQGASHTRWLLTEAAQHIDRHPGPLGVFFRRLAKKKNRNVAVVAVARKLVTIAWHMLKNNEPYRYAQPKTVAAKLSRLRVRATGRKNKGGLPKGHKRTAQYGSGVRTRAVPALDSIYAQEQLPSLAPLKPGEAAMLAEHHLTDYAATIRHSQRVPRRSSP

SEQ ID NO: 512092 - protein, 406 aa, unidentified
MAVMIGIDPHKGSHTAVAVTATEEPLGKVRVRACPAQAEQLVAWAAAWPERTWAVEGAPGLGRLLAQQLLAAGERVVDVQPKLAARVRLLHTENTGKSDPNDALSVAVAALRSKAQRPVIADDHATVLKVWAKRHRDLSRAHNQVACRLHAVLCDLVPGGVADEITAGHAAKILGQITPADPAAEARKELAAELLADIRHLDAQRREIKKKLATAVKASGTSTTQIFGVGPVIAATVIGDVVTVARFPRRDHFAAYNGTAPVEVFSGEKKIYRLSLRGNRRLNHAIHMAAITQIRYKHSDGRGYYERKIAEGKTHKEALRCLKRRISDALYARLRADARNAAAASTRDPGGQPGNDSVSSAAGSHPEHRLFGSATPGPAPSLRSATALPQAMRPSEPSAKKTRRDP

SEQ ID NO: 512093 - protein, 351 aa, unidentified
MVVVGADVHKRTHTFVAVDEVGRKLAEKTVAATCAGHAEAVMWVRERFGGQVVWAIEDCRHLSARLERDLLTAGQQVVRVPPKLMAQTRASARTRGKSDPIDALAVARAYLREPDLPVASHDEVSRELKLLVDRREVLVAQRTATINRLLWRVHELDPTRAPKARSMDLAKHQGTLADWLATQSGLVAELARDELADIIRLTEAIKALGTRIGERVREAAPALLAMPGCGELTAAKLVGESAGITRFKSEAAFARHAGVAPIPVWSGNTAGRVRMTRSGNRQLNAALHRIAVTQIRMDGSLGQTYYRHRLAEGDSTREALRCLKRRLTRVVFGRLHTDHQNHQNACQPAAA

SEQ ID NO: 512094 - protein, 270 aa, unidentified
MITLGLDPHPGSHTVVALDNNGASLAHLAVPNTPEGLEQLHEFGSRFSPRRWAVEGAGNHFIAAFVAELLANSESVFSIPPSLTSQYRARRGRKKSDVVDAENVARALLANAQLPPLHAVEHQRELQELTRTQRRLSEQLKASRGALKELAAGSSVREVLQPVIEILVDQLKILRQQIRLRVKDIMPALLDVQGVGPIVAGVLLAEVGNPKRFASANHFASYCGAAPVERGSGQNCRMQVNPGGNRRLNWALHIVAMVRLGNDGGHPRPS

SEQ ID NO: 512095 - protein, 342 aa, unidentified
MDHFAGLDVSVKETCICIVDDTDRIVWEGKVASEPETLLKVLENPTYHFRRIGLEAGPLSQWLFSSLAEAELPVVCVETRHMQAVLKAQINKTDRNDARGIAQMIRAGLYRPVHVKTLRSQKLRMLLTHRKLLQSKAIAIENDLRGTLRNFGLKVGMVGKVRFEARIQELVENFSDLAALVEPLLIVRRALREQIVILHRRLLAIVRDDEVCRRLMTTPGVGPVVALTYRATVDVPARFRKSKAVGAVFGLTCSKYQSGEIDWSGRISRCGDEMMRVMLYEAAQSTLRSKKWSWLKAWAIQIARRRGMKKAIVALARRLAVIMHRIWVDGTEFRWTRETAAA

SEQ ID NO: 512096 - protein, 346 aa, unidentified
MKHSVGLDVSVKETAICIVDEDGKVVRESKAATEPQAIITFLNSAGLEYARIGLEAGPLSQWLVNGLTEAELPVICVETRHMKAVLKAQQVNKSDRNDARGIAQMMRVGLYKPVHVKTLASQQKRMLLTSRQLLCDKLQDMENELRGTLRNFGLKVGVVSAGHFEARIKELVAGQPPLEMIVVPLLTVRRVVREQLAKLDKMVLDQVRDDKLCRRLMTVPGVGPIVALTFRATVDQAQRFARSKTVGAHFGLAPRRFQSGERDYDGRVSKCGDAMMRTALYEAAQVLLTRTRTWSWLKAWGMQVARRRGAKKAIVALARRLAIVMHRMWVDGTEFRWRKEADTAAT

SEQ ID NO: 512097 - protein, 318 aa, unidentified
MNIIGLDISKDTIDATLHKTNGSIHYIKFKNNDDGLKQFRLWIKGNRIRKAYIGMEATGIYYEKAADMLSSYYTVYVINHLKIKDYGKSRFNRTKTDKADSNLIADYIKRHQDTLIPYQIPKNKALQKLINLKNQLQQQQKQIKNRLHSTEEDFIRNIHQDLIDTIQDKMEQVKIAISEQIKKQTDYNHYRNLQTIPSIGKDTASVLYAQLTEKHFKTANQFVSYAGLSPAIIQSGTSVRGRGRLSRYGNRRLKSTLYMPALCAYRFNAFPKLINNLKKAGKPKMVIIVAIMRKLAKLAYYIVKTGQPYDAERHRLNQ

SEQ ID NO: 512098 - protein, 343 aa, unidentified
MKLSRVGVDLAKNVYQLHGVDRYGKAVWKRRLRRAQWLQALLDNTDPSCEIGMEACTGAHQWARDLQSRGYTVRLIAPQFVKPYVKSNKNDANDAEAICEAMSRPHMRFVTVKSVEQQDIQATHRVRTELKDHRNAKANQIRGLVAEYGLVAKPSLLALRRAIPEWLEDAENGLTDNFRCLLHGLWDDLLSLEDRFKELDKAIEKIARSNEVAQRLQQLRGVGPIVSTALIATVGTGEQFKNGRQMAASLGLTPKQSSSGDKRRLLGISKRGDVYMRTQLIHGARSVVSHAKHKDDPLSRWATDIAKRRHPNVAAVALANKTARMAWAMLQNETDYDPNLAVG

SEQ ID NO: 512099 - protein, 386 aa, unidentified
MAHSINASRCLIPFDQGATLVAVVEMGQASWLVAGLVPGLERQPLKKLPVDQDGLLQLLHRWRLEAVRNGCPIQRIAVAFEAGRDGFWLARWLQARTVEAYVIHASSVPVSREHRRAKTDRLDTELLKRAFVGWLRGEPNHCSMASIPSQEDEDARRPSRERETLVSECTRIVNRIKSNLARLGIRGFKVTLRRAAERLETLRTPEGTAVPVNSIAEMKRAFARLESLKQQIKEIENVRGAHLEQSSDTDRGTMVRQLRQVVGVGVESADMLVQEVFLRPLRDRKAVARYAGLTGAPDESGQKRRERGLAKGGNARVRRAMIQLAWGHLVHQPNGPLAVWYRKRTADARGGTRKTMVVALARKLLITLWRLATSGVVPEGLALRAA

SEQ ID NO: 512100 - protein, 336 aa, unidentified
MDVHKKSWTAHFKTDLFDNKTVTMPAESESLINYVEKNFAGHAVSCCYEAGCCGYWIARSLQQRGWEVKVVNPADVPRRNKQDWQKTDRIDSRNLCKHLSDGNLKGIYVPGEEQEQLRALFRRRVHLARNLRSIKNHIKSQLLYFGIKLPAQYDNPNWSREMKTWIANIKWKYNSAAESMKSRLKQLEFMWYEELHISNELRAYCRKHYKKDYYLYKSVPGIGGITAAAIIAELGDIRRFNRLDELAAIVGLVPGIYQSSENKINLGMTQRSNHQLRSLLIEASWVAVRDDLGLQQYYRKYSHKEPNKAIIKVAHKLLSRIRAVIHSDIPYQKGLL

SEQ ID NO: 512101 - protein, 403 aa, unidentified
MSNYFAGLDWASQTHALSVVDERGGVVERFEIEHAAAGLAELQRRLRRLGSPPVAIERPSGLLVDTLVEAGFTVVPIHPNAVKASRPRYRSHGGKSDASDAYMLADLLRTDGHRFKALTPQGDEILALRALVRGRDDLVATRVQLANQLRTLLESFWPGAAAVFADIDSPIALAFVERYPTPESAKALGPKRMAAFCAQYAYSGRRTAEDLLARLHEAPAAVCAEMQMEAKGELARCMARTLRAVVEQIRLLSSRIEHHVASLDDGQILMSFPRAGRICAAQILAELGSVRERFTTDAQLAAEAGVAPVTYESGKSKAVTFRWACNHRLRAALTCLADNSRHASDWAAHVYAKAKARGCDHPHAIRILARAWLRVIWRAWTDRKTYDPTQHRAAQLLLKTAGG

SEQ ID NO: 512102 - protein, 426 aa, unidentified
MNEASSSEEPRFAAIVGLDWGDQKHAWSLQPAGSERRERGELEHSPEAVESWVSMLSKRFDGQPIAVAVEQSRGALVFMLAKYANLHVYPIHPRAAAQFRAALYPSGAKDDPVDGDLLLELALHHRAHLRPLRPDDEQTRLLRQLVEARRKLVDEKTRQVLRLTGNLKVYFPQVLDWFDKLDSPLVGDLLRRWPTLEDLQKARPATLRSFLTQHNCRSREAIQERMEKIPQAVPAIRDAAVIQSAAGMTRILVDLIATLREGIATMDGQIERTAKAHPDFPIFDSFPGAGPALAPRLLAAFGSLRERYATAADMQKFSGIAPVQERSGKNVWIHSRWACPRFVRQTFHEWAGHSIAFCDWARVYYERQIHHKKGHHAAVRALAFKWIRIAFRCWQDRVPYDDARYVESLRRHGSPLAAALAAQDQA

SEQ ID NO: 512103 - protein, 385 aa, unidentified
MFYVGIDIAKTKHDLACINETGETVITNFRFANSYQGFHQLKLKLKQLSPITQDIHIALESTGHYNYNIVAFLRELGYTVFAYNPFIIKQFAKSQSLRKTKTDKKDALLIASKLRSDVTPEYYQTDKVMDELKELTRYQNRLIQSRSKCKNLYIRLLDIIFSEINSYVSNLHSHFVYELLTKYPSAQKIARARVSSLLKIKRLTADKAHQIQETAKQTIGNASSALSLELVQLIESIQHYDKQVNQTQEEINRLMTGLDSPITSIPGIGSRLDAIILAEIKTIHNFKNPNQLQAFAGLDPAIYQSGQMDNTGQMVKRGSSYLRYALIQAAKLISIYSPHFKTYLKLKISHGKHYNVAVTLIAKKLIRVIYHLLKTNQTFDEAKLR

SEQ ID NO: 512104 - protein, 349 aa, unidentified
MKIIGCDFHPSYQQIAVLDSVTGEMVEKALSHERKEEVRAFYAALEGPVRVGIEASGQSQWFERMLAELGHQVWIGDAAKIRASCERKQKTDRRDAELLLRLLAEDRFPRIWVPTAAERDDRQLLLHRHKLVRMRTQVKNQLQAQALNQGVQRKRKLWSEAGRKQLESLPLLPWASRRRAELLQLLDQLEASIADLDRAVAEQAQARPAARRLMTHPGVGPVTALAFTLTMGPAERFQRGKQVASYLGLIPSEYSSGGRQQRLGHISKQGNPFLRGLLVEAAQSAVRYEPEMRRAYQRLAQRKCRGLAKVAMARKLAVRLYWMLRLQVNYAQLIQGSHAGQPGTFCGRG

SEQ ID NO: 512105 - protein, 356 aa, unidentified
MITIGVDAHKRVHVAVAVDGAGREIAHWRGANSVEGWQQLAQWAAALGETVHRGIEGAWNYGRGLAQYLLLHAATVYEVNPRWTAAGRQRARRVDKNDRYDARAVALVVWREAPALTPLLIDEETAVLDLLITEREDAVAEATRLRNQLHQLLLQLDPDYAAHLPSLRSKAGLTTLAAYTTAEPSPIQQHRAGAVRRLAERLGLAQRQAADLATQIQALAAPRFAPLTQICGISLLTAAALAGILGPGQRFTSDAQLAAYAGAAPLEASSAGRVRHRLNRGGNRRLNAILYRIAVTQARCSPQAQAYLARRAGEGKTRREAIRALKRFIARAIWRRWQECAALVPDATAECAPLAA

SEQ ID NO: 512106 - protein, 339 aa, unidentified
MKDIKILGVDIAKDVFQLCGIDEWGKVIYTRVVKRAQYVSTVASLKVGCVVMEACGGANHWYRTFMGMGIPTQLISPQHVKPYVKSNKNDRNDAQAIAEAASRASMRFVRGKTVEQQDVQALLKIRDRLVKSRTALINEIRGLLQEYGLTMARGAKRFYEELPLILASEAVGLTPRMKRVLNCLYTELLNRDEAIGDYEEELKAVAKANEDCQRVQSIPGVGYLTALSVYASVGDIHQFHRSRQLSAFIGLVPRQHSSGNKEVLLGISKRGNVMLRTLLIHGARALLRHVKNKTDKKSLWLKALIERRGMNRACVALANKNAPIIWALLTRQETYRCGA

SEQ ID NO: 512107 - protein, 414 aa, unidentified
MAVMKECCCGVDVHKNFIIAVIATLVGREVRFTKYKRFSTFTKGLREFKEWLREHNCFEICMESTGKYYIPVYRIVSDETFHVDVVHPKYVRAPRGKKNDKRDAKRIADMYMRDHIAEYSIIPPADILAIRDLTRYRRKTVNTITAEKNRMSNCLTVSCIKLDEVLSDIYGKTGQTIIEQIIKRGTCVFDPEPYIDKRVKATPEDFKMALDGDVTPATLLKMGMIKDRLDYLGKQKAELESKMESLSKDFSRQLEIVDSAPGIDSLSAISIISEIGVDMNTFGSVKRFLSWVGVVPQNNESAGKKKSTKIGKGNVWLKSVIIQCANSAVNSKKHPEIREKYLALKKRRGHGKAIVAIAKRIMTAIYYMLLRDEMYNPKISNDKAPKRGNIKLENLIEYYNSKGYTVVSKDGEIA

SEQ ID NO: 512108 - protein, 351 aa, unidentified
MLIIGCDYHPDFKQIAWVDAETGECGERRLRHSDGEAERFYRDLKLKGVPVRVGMEATGHARWFERLLAELQQEIWVGDPGQIKATRVRKQKTDRRDAEHILKLMLENRFPRVWVPSPENHDLRQLLWHRHRLVQIRTRVMNQLQAVALNEGVRRKKGLWSGAGRAQLESFRLAPWATRRRRDLLELVDRLSPRISELSRAAEQEAERRPEVQRLMTHPGVGPLMALANVLIIGSPERFRCGKQIGSYLGFIPCEDSSAGHQRLGHISKQGNAPMRFLLVEAAQAAVRSDPDWRLRFVHLAMRRDHRIAKVAMARKLAVRLYWMWRKGWNYQELMKFGSHAGQPGYVDGLK

SEQ ID NO: 512109 - protein, 399 aa, unidentified
MIYGLDVHKEFIQVCALGTKGSKRKEYRIAGTEEAIKEWARKLGPRDQVVLEATFHSWAIHAIVSRTAGRVVVANPMEVKAIAHARIKTDKVDAYTLARLLQADFLPEVVLPDASAWALRQLVSHRRLLVKQRIAIKNTIRSALNRRLIPQPEGEPFSGKTRRWMRSIELPPTERFLLHNSLDLLEAIDERIAAADAELLATAGVEEQARLLMTIPGVGVNVALGLLAAIGDIQRFPSPEKLSAYLGIVPRVSQSAGRCHHGRITKTGSTIVRSLVIEAAQILARSPSPLATTYWRVRRKRGHNVAVTALARKLVVVAWHLLQKGEPYRYAPAARTRQKLRALIPRDQRRRAARSPETLEQVYREAGLPELSPPSQAERRAAAANRRARTRITNSSPRA

SEQ ID NO: 512110 - protein, 422 aa, unidentified
MNTERIDSDEIAAFVGIDWADGEHEACLMVADSGPLERSRLKQSPEALSEWAHALRDRFGGRKIAVAIEQRKGPLIYALMSYEWLVLYPVNPKSLARYREAFSVSNAKCDQTDAELLMEMVRSHRDRLRVWLPEDEDTRLLQMLVEERRRVVDQVTRLTNRLTSVLKEYYPQALEWAGELKSEQALDFLSKWPTLEDLKRARPATVEKFYHRHGVRNKEKLQGRLAGIGAARHLTRDRAVVRASTMKMRVTVEQLRVLLKATREFDVQIEELFEQHPDASLFKSFPCAGKVLAPRLASAFGTDRQRWDDAAEVQKFSGIAPVTRASGQTRVVEKRGACPKFLRQTFMEYAAQSVKKSLWARCYYTAMRAKGVKHRAALRALAYKWIRIMFRCWKERIAYSEEAHQAALVRANSPLASRLAGA

SEQ ID NO: 512111 - protein, 313 aa, unidentified
METSVAGIDVAQQYLDLAVEPSRDACRLEYSENGLQDACQWLAQRGVQRVCLEATGGIERRLVRALRKHAFVVAVVNPRQIRDFARALGQLAKTDRIDAQIIARFAHKLEPQPTPEPSKSQEKLAALTTRRRQVTDMLVQEQNRLGSAHDPQVRRWIQRSLDQLRDQLDALEKEIQPLLQADEFRAKALTLTSMKGIGQTTAALLLSELPELGQLNRGQIARLVGVAPINRDSGTMRGKRTTGGGRTHVRTGLFMATLVAIRHNPQIKTFYQRLIAHGKAKMTAVIAAMHKLLVILNTMLKTNTHWNYLPKNT

SEQ ID NO: 512112 - protein, 322 aa, unidentified
MKNTSSESTHRKVFIGIDVAKETLAVFVSSTGEYLELANDGEGHGKIIELCERTGPEKICLEATGGYQTELMLALTEEQLPVSMANPRQVRYFAKGIGLLAKTDKIDAKMLATFAELAKPEITVMPGDEHRLLTALLRRRDQVQKMLTAEKNRMELAHPSVKSGLKKHVKWLEKDLARLDKEIRSTLRESSLAEDAEILETIPGVALISSASLVSELPEIGKVSNRRISALSGVAPFTQRSGKWVGKDKIQNGRKWLRKKLYMAAFNAVRYSPEFKAQYDRLVARGKPHKVAMVAVMRKLICVCNSMVKNQTTWNPSLAEAR

SEQ ID NO: 512113 - protein, 346 aa, unidentified
MEHHVGIDVSLELSSVCVLDATGKVIREAKVASEPEALVAFLHGPGVTITRIGLEAGPLSQWLYDGLHKAGLDVVLLETRHVKAALSAMAIKTDLRDARGIAQLLRMGWYRPVHRKSVPSQEVRALLAARKQMQIKAMDLEQTLRGLLRGFGLKVGDVSRGKLAARIRELVSGHAMLERIAEPMLMAREALWCEFAKLHREVLAIVKDDQVCRRLMTVPGVGAVVSLTYRAGVDDPGRFAKSKSVGAFFGLTPKRYQSGETDVTGAITRAGDASVRTALHDAANALLTRATKFSTLKRWAMDVAKRRGIRRAKVALARKLATVLHRLWVDGTEFVWGNGPATKAAA

SEQ ID NO: 512114 - protein, 336 aa, unidentified
METVCAVVGIDVSKKKLDIALLVDGKTKAKVVENSADGYKSLLEWLSKAKVAKETLHVCMEATGIYYEPVALALHDAGVSVSVVNPACIKGFGHSENIRNKNDTADAGLIARYCAAMKPAPWTPPPLEQRQLRAWSLRVQALKDIRQQEENRLEANTFTGMTDVAEHVKQHIAWLSAEINKLEDDIDDHIDRHPGLKHDAELITSIPGIGTTTVARILGQLGDIRRFDSAKAFAAFLGVTPKQRSSGTSIKGRTMISRAGSMSMRAALYMPSLVACRHNPLLRCFAERLLATGMAKKAVIGAVMHKMTHLIYGVIRTGKPFDPNYLTNGLAIQDGI

SEQ ID NO: 512115 - protein, 361 aa, unidentified
MKRVQSNKLDFSGQNIYVGIDVHLKSWSVAILSEYSALKRFSQSPEPEALHKYLVSNYPGANYFSVYEAGFCGFWIHEKLTGLGITNIVVHPADVPTMSKEKLRKTDAVDCNKLARELRSGSLEGIYVPKASVLEIRSLIRTRSMIVKDSTRTKNRIKSLLRFHGVDIPEEFTRFTIGRWSKRFLAWLHSIELSTEYGKKTLELHIEQFVRLRNMLLQETRAIREISRKAPFEKPMRLLTSVPGIGVTTAATLMVELDDIVRFKNADRLASFIGLVPMCHSSGESNGTGDITVRRHFMLRCLLVEAAWIAIRRDPAMTVAYTEYRRRMNPQKSIIKIARRLVNRIYYVLKHEKEYIPCVVE

SEQ ID NO: 512116 - protein, 360 aa, unidentified
MEYIAFDAHKRYTQVSVETEDGERRYEGRIDHVRGALRQFLTTCARGSPVAVETVGNWYWIVDEIEAAGQVPQLVHARKAKLMLGMVNKTDKLDARGLNRLQRAGTLPTVWIPPGPLRDQRDLPRTRMVLTREHTRLKNRIHATLAKYGLRLEGTSDLFGRRGRQWLRTTALPVLAPHSRYATERLLEQRDVVVAQIDGFEQRLRAVFTPTPELQLLRTLPGVGEVLAVVIWLEVGDIRRFPRAAQLAAYAGTTPRVHASGGRTHYGPARGDINRYLKWAFIEAASTAWRTRPARPHRHISRLYARVKQRKGHATAVGAVARHLAEATYWILSKREPYRDPASSTEGAARSAHERATLGI

SEQ ID NO: 512117 - protein, 331 aa, unidentified
MYNYIGIDVSKQSLKISDETKEYDVPNEKGLKTLKKLFRKNYGKDWKETRLIYEPTGPYSNYLREFVFKHKIRIYEMNPKKSANFAKALGNRSKTDDIDAKMLYKFHVLLKEEDFRIPEIDKVAEQLGAYVSSYRIIQKTRTMLSNHLQSREYENGIDPKLKESIKKEMEKLKQIEEALEKEMEAFGRDNPEIKEDFENLLSIKGIGVISATALLYLFRKYPDANRNEITALAGLDPVKRQSGSSINGGRKISKAGDSSLRKILYVSCLSSIRYNDRIRVFYEHLITNHKKPKVALIACMRKILLIAHQIYANKSEYKPLYIDNKSLCSSY

SEQ ID NO: 512118 - protein, 430 aa, unidentified
MKFKRSNRINQRIERISTHHLVVGIDIAKETHVAGPVNFRGIELSSTFCFSNDREGFERLMHWVVQLQKKHRLTKVIFGMESTGHYGVPLAKWLSGNNQDVVQVNPLTTKRNKENRDNRPSKSDPKDAIIIADAVSRGYYNDWVWTEGIYHKIRCAVNEQEALADDLASIGNRLQMLLDQAFPEFTKVFKDWSCPRAIATLKTSPLPEDLTGLCIEQIIASWYEAGMRRAGGTRGREAAARLLAAARASVGISESAAELRREIKRTVRRYEWIAADKKTVEDEIQTLLVQVPREELQPLEELGLGPFIKAALLANTGPLKNYKHGRQVMALAGLNLCESTSGKRKGQIVMSKRGRRQLRKYLYLAVVGLVANHPAFKSWHRHNVHHLKMKKQQSIFKLIGKLTRIMVALAHTGDAFDVHRAIPLGQPVAA

SEQ ID NO: 512119 - protein, 345 aa, unidentified
MDNYFVIGVVVSKNKLDYCLVFHDKVLKQGDTANETSVIMLTFNLLLREFNVPNEQIIICAEHSGQYNYPLIYSCECSKYKLWLENPNQIKFFCSGLQQGKNYKLNSKQIAVYASNNLNKMHLCHQQVSEVEHLKQLYSELEMLEIDCTKLHSKLVDQKNYMSEEVFNINAGRLINLMQGLEDAIKTIKSEIRCIFADNPFLSVQMELLTSIESVDTDLALKMIVETDAFTRFDNCRQFCSHIGIAPLNKILKTNEHLVNAGYPKNDKGIKTILNQAALSIIKENDSELKNYYIRKVKEGKDEKIVLNAIRVKLVARMFAVIKNNQSYQHVLMKDRAVSPMLVSK

SEQ ID NO: 512120 - protein, 357 aa, unidentified
MKKLFIGIDFSKEKLDATIILACGMNEIGSREYGCFPNNTTGYRKLCNWVKTNAWNTIAEEWLFCGEDTGSCSIGLSKWLYGKGYDIWIENAYAIKHSSGIQRVKNDKADSAIITEYAWRQQDKVVPFEPLNESLAQLREIFLYRHKLVGQRVAMELRKEDKSQSNKSKAISFINRKSKHLIAEINKTIAECDKAIDSIIEADEELKENYAIITSIKGVARQNATCMLVYTNNFKKFGYDPRKIACYYGVAPFGKQSGTSVNTPAHTSHFANKLIKSLLGQAAHIAKIYNPEIRDYYQRLISKGKKPQVALNNVKNKLIRIIVALVRKKVPYDQNTYKYYEEREVIERKKNEKLIYC

SEQ ID NO: 512121 - protein, 490 aa, unidentified
MSKRRKLSTFERLNSGKMNRAQRKELARRVCADDPGLEVVHRNVAGIDVGNESHYVAVAPGCDPQPVREFGCWTADLKRMAEWLKSCGVKTAVMQSTGVYWIAVFDVLERAGLNVWLSNARDTKNLPGRKSDVQESQWLMKLHTYGLLRNSFRPPEEIRAVRTVWRLRGRHVQDASREIQHMQKAMTTMNLQLANVISDVSGETGQAIIRAILKGQRNPRELAKLRDYRIKASEEEIACSLEGHWQEEVLFELQQSVDRYDFCQRQIAECDQRLQKCLAALPSRTIVPQRESKTDPAVNCPEGKHATEKSNKKKRSKPRDNEPKFALESELTRICGVDLTTIDGVKVMTIQTFVAELGTDMSRWPTEDNLVSWLKLSPNRPVTGGRVMRQRPLKTKNRVSTVLRTAATTLADSDSYLGARYRQFRAHLGPGKAAKAMAAHLARLIYQMLTHGQAWVDRGAQEHEKRRTHRETQFLLRKAAALGYRLEPAA

SEQ ID NO: 512122 - protein, 418 aa, unidentified
MKNNNTKKLKRISEKTLLVTVDMGKVKHTGYCRCPDGTETKPFDFANNRKGFEQFWQRVCEMKERHHLHEVVVGFESTGPYAEPLLHYLKDRGVRLVQVNPFHTKRLKELQGNSPGKTDDKDPKVIADIIELGHALSVIIPEGTYAELRRLTQARERGMQRLTALCNQLGDLVFVIFPEFLDVMKGVSGRSSRYLLIHCPRPEDIVREGVDGLTEILKKVSRGKLGRGRAYELYKAALDSVGIREGRESIVFEVADTISSIDACERFIGNIEKEMVNQLRCIPYSRCILSIRGIGMVTAAGLIGEVGDFRKFSTISEIMKHAGLDLYEISSGKRRGKRRISKRGRPLLRKLLFYGALNTVRKGGVMEGYYLNYRKRMHRQKALVAVARKLLGIIFALIRDDSRYRESYSQRHYMLEVA

SEQ ID NO: 512123 - protein, 342 aa, unidentified
MTSFQSFVGVDIASTTFMACIGTAPWKLTVKPVQFDNQEEGFVSFLGWLREHNLSAEQTVVCMEATGVYSEGLAYFLSASGYPVAVEPPLNIQRKFPANASKTDALDCQYIAEYACRYVDKLSFWQPRAEILEQVKVLLTTRAHFSVQLTGHKNALHAVNRKKVSSMLAKQAHQTMIEQIAKQIKAIDQEIRRLIDSDPTFKQTLLLLLSVPGIGLQLAAHLLIHMQETLNPRVLAAFIGICPICHESGSSVFSTPTSRHYGPSVLRKLLYLAACSVRTHKQPFRLYFFRKVAEGKHKKLILNNIQNKILKIACAVVRSNQPYIPSYVSVNPLVLQHPLTGS

SEQ ID NO: 512124 - protein, 361 aa, unidentified
MKKTTQHLIVEVPRGQSKIELTIGVDLGDVWSHYCTLNQGGEVVDRGRFRTTPKAIQKWFTDVPHARVAMEAGVHSIWISEQLEQLGHEVIVANVRELRAISHSDRKSDDVDAEKLARYARLDPEILRPISHRTVEQQEALTLIRARELLVRLRTAAVNAVRGLTKACGHRMPASSTKCFAQRGQAVMPPGLKLALGPILAQIAEMTLKIKQYDREIQRMTQTEYAETQPMMTIHGVGHITALTFVLTLGDKARFGRSRDVGCYLGLRPKRSQSGERDPQLGITKAGNTYLRSLLIECANHILRPHGRDSALRQWGLHLAARGGKQAKNKSVVAVARKLAVLLHHLWTTQEPYIPFYQQAA

SEQ ID NO: 512125 - protein, 388 aa, unidentified
MLAESHDEEQIIARVAALDIGKAELVCCVRLPAQRGPKRLQEVSTHSTMTRSLTELASRLVELGVQRVVMEATSDYWKPVFYLLEAHGLDPWLVNARDVKHLPGRPKSDVIDAVWLCKLAERQMLRPSFVPPWPIRRLRDLTRYRVDLVAARTAEKNRVEKLLEDACIKLSVVASDIFGVSGRAMMAALIAGERDPHVLAQMARARMRTKIARLEEAFNGHFDDHHRFLLARMLDRIDSTEADIAALDNQIQAHLVPFAAAAARLDEIPGIGAVAAAVIVAEVGVDMSRFPTAGHLCSWAKLSPGLNTSAGKTKGNGSTGHGNRYLAGILGEAAVVAGRTDTFLGARYRRIAKRRGNKRAIVAVGRSILVSIWVCPERGRECDVGRAS

SEQ ID NO: 512126 - protein, 341 aa, unidentified
MKQFIRIGVDLAKNYFQVHALASEGGTAVTRKLTRSKMLEFFSQIAPCRIGMEACGSAHYWARELKALGHDALLMPPAYTKPYVKRGKNDAADAEAICEAMSRPGMRFVPVKSVEQQAMLMLHTTRELLVKQRTMSVNALRSHLAECGIVVAKGVGRVDELLALAEKNTTLPHAARAAVRVLAQTLEALDKSLNTLEHEIANAHAQSEMSRLLVEAPGIGKLIATAIVATIPNPSVFRSGRNFAAWLGLTPRQYSSGGKQTLGTITKQGNRYIRKLLVLGATSLLNILGKRKGALRDWIVALLAKKPARLVTVALANKLARIVWAMMKTGEGFRTEIFSKA

SEQ ID NO: 512127 - protein, 470 aa, unidentified
MAAVMIGVDPHKASHTAVVISAAEQELGELRVRACAGQAGQLLGWAAAWPHRTWAVEGAGGLGHLLAQQLVAAGERVLDVPPKLGARVRLLAAGDTNKNDPNDARSVAVAALRSPGVREVRPDDHAAVLKVWAKRYRDLGRTRTQVVCRLHAVLCELVPGGVSKVITAGQAAQVLRSVTPPDAVAAARCELAAQFLEDLRGIDARIRETRKKLTTAVQASGTSLTGLFGVGPVIAAAVIGDVRDVSRFPSRDHFAAYNGTAPIEVSSGQRTVYRLSRRGNRRLNHAIHMAAVTQVRHRHSQGRAYYDKKLAEGKTPKEAMRSLKRQVSNAIFTRLRADARRAAARAGNPGGQPGNGSDSSAADLHPGHRLFGKATPGSRHHITTAAGNPAPGPASPRGRAGHSSIAATMPSAKPRVQVERPQRSEDERPEGAARRRPYSAARKAPGQDPPLKTQRPKDTAHTAKRTDRTS

SEQ ID NO: 512128 - protein, 430 aa, unidentified
MKSNTQNAKIEAITEKTLVLGIDVGSETHYARAFDYRGIEYSKKPFKFSNTEAGFVTFKEWILDIKERHEKDKVVLGMEPTGHYWFNLGKFLQDNEMKPVLVNPHHVKKSKELDDNNPTKNDRKDPKVIAGLVREGRYMIPYLPDGVYADLRTASNIRFQLQAELTRIQNRISRWFNIYFPEYKTVYGKPDAKSGILILKAAPLPEDILTLGIDGVNQIWRDAKLRAVGKARAKTLIEAAEHSVGSKEGAVSARMEIRMLLEDYESRNIRLQEVMGLIEGLVNQIPMAEKLLEIKGVGIRTVSGFLAEVGDISRFNNPKELQKLAGLALVENSSGKHKGETTISRRGRKRLRYLLFEVAMSLVAKNPEFRELHNYYTTRRLNPLKKMQSLMAIAAKLIRVFYAMLTKGVDYDPKKMVSDIKRPAVYLQAA

SEQ ID NO: 512129 - protein, 337 aa, unidentified
MEVRIGEYPVCIGIDIHKKYSYVAVVDELGEIKEEAKIENTKESLEQFASKYKGAKAVIEATGNYRFIYDVLENYMEVKLAHPYKTRAIAEARIKNDRLDAKMLAHLLRANLIPESYVPPKEVRELRDLTRLRKALIEDRTRIKNRVHAILTRNGINNYPDPFTKKGREFLENLDLSETDRKLLEINLSIIDKINREIDEIDRIIQEKAKIDGDAILLTTIPGISYYSALLIKAEIGDVNRFPNKFKLISYAGLCPSIKQSGNKEIKGHITKQGSRMLRWILIQCANIAIRHDEYLRNFYLRIKKRRGHNIAIVATARKMLVCIYFMLKRREVYNPK

SEQ ID NO: 512130 - protein, 358 aa, unidentified
MEETKVRIVGIDLAKRTYVAHMIEDGNPKSKVWDGKNDESGVLRLCSRLRAGDRVGMEACALAFHWAKVIQARVGCKVVVLNAGDLAVIYKSVKKTDLEDAGKLAWLMHRLPDEELPVVALPTEQEELRRAMVSELASKRRARTVLLNRLHSLFVRQGVVTIKKADLATLDKRKQTIGVLTGRTLVEAGRIEEELALVEAHNQQIQQEIRKELQEEPKVARLLSIPGVGPTTAMAFLAHVGDGSRFSRARQVSHFVGMTPRVDSSGETTRIGSITKRGCTAIRGLIVQAAWSATHSSMDHRLKQKYRELAARRGKGRAIVAIARRILELMWIVVTKDTDYWETDQESLNRKMAKLRAA

SEQ ID NO: 512131 - protein, 354 aa, unidentified
MQGTTKYVALDVHQATTVAAVRAASGRVIARTVLPTEEPAIVEFFRGMRGAVHVALEEGTQAQWLHDVLVPLVDQVVVCDRRGERQQGNKGDQVDADALSELLRRGSLRAVYHGSPHRAVLKELTRSYGNLVEDTTRVMLRLKALFRARGISAPGKGVYRPAGRAQWLAQLPDAGARSRAAVLYAELDVLRALRPRAKAAMLAEARRDPAWAVLRTIPFCGPVRVALLLATMRTPWRFRTKRNLWAYAGLAVVTKTSAEYELVDGRPVRRRRAPLTRGLNQNHNRVLKDVFKGAASAATVRPGPLQDWYHGVLARGGREELARVTLARKLAALTLRVWKNGEPFDPTKLTTQAR

SEQ ID NO: 512132 - protein, 352 aa, unidentified
MQETTTTVPKTTIGLDLGDRITHGCVLDAHARVVERFRFETTQAGLAGAFARRPVCRVVLEVGTHSPWISRALERRGHQVFVANPKQVRSISGSSHKNDEADAEQLARLGRSDPQLLRPIRHRGESAQRDRGLLAVRRQLVAMRTSLSCQVHGLAKALGDPLPRCAPEALVRKVRPHQDRFPGLDQLLDVVEVLDERIKRLDQEVERMCREVYPESELIRQVPGVGPITALTFVLTLEDPARFQKSRRVGSYLGLQPKQRDSGKRKSQLPISKEGDRELRSLLVQCAHWILTRGPDSDLKRAGLRRMERGGAAARKKSVVAVARKLGVVLHHLWQTGSVYEPLHHATQHAAA

SEQ ID NO: 512133 - protein, 412 aa, unidentified
MNNPQNYLFVGVDTHKAQHTAVVINCFHQKIGYAQTPNNPADFDSFLTRLKNLAHNDEQLVFGLEDTQGLGHSLAKWLIQRDYTVKEVNPVQTKREREQSTSPDKSDKIDAKAIASVLFNKYDELPVIKNEANFKAIRQLNNQRKSLVKEQTKVKNRLHNLIHQQYPEYKKFFSDTFGKTALAFWQKYPHPGELKHIGEKRLNNFLKKQAKSISNDKASNILALVDKDKPQDISTKTRESLIPMLIEQLKLIKQNLEEINQLLKKAVDNSQYKLTTMPGIDFRLAAHFISNIKIIDRFDSADQLARYAGIAPVEYSSGKSRNTTSKIYGCRDLNHAFYILALQQIGSYKNGKIKNPVAYNYYQKKLKEGKSKKTALTCLQRRLVDIIYAMMRDRSAYELPEIPNYEILNRAV

SEQ ID NO: 512134 - protein, 334 aa, unidentified
MEKTYFIGVDVSKNELDFAVVISNKVLFHQEVTNDKAGIDSFIKALKKQTGFDFENSLFCMEFTGIYNNILLNYLSLHKAFIWVENARQIKDSMGTIRGKTDKLDSILIAQYSYKNRENPRLWSPKRDIIQELDRLTAIRSRLKNAIKMLETPLVDSKDFIGKKAHKDTKNACQDSINALKKDVKNVEKQIDELIKKDPELSHLFELITSVKGISKVTATEIIITTNEFKDIDDPKKFGAFAGCVPFERSSGKKKGRPKVSSIANKKMKALLHMAAMSAIKYCKELKEYYERKVSEGKNKMLVINNVRNKLILRVFACVNKNQKYNENYTFSLV

SEQ ID NO: 512135 - protein, 369 aa, unidentified
MCVYVGIGVHRKRSQVAVVAEDGKVQLNRNVVNGTEPVLKLIGGLPAGTPVAFGAAFGWGWLVELLEGYGFDPHVVHPLRCKAIASARLKNDKADAATLAQLLRADLLPEAWIAPPQVRQLRALLRHRASLVRLGTQLRNRIHAVAADHGYDRSASYWTGPGRGWLAGLDLPLASREIVADCLAVIDHLAPVIERLDRELHQHAKTDPRVKVLTTLPGVGEFTALVMLAEIGDITRFPNARKLAAWAGLTPTVRGSDVKVRHGHISKQGSAWLRWVLNQAAQTAKRSPQFAATYSAIARRRGKKIATIAVARKLLTRACHLLAAGQAASGAPAASACAVAAASQTGRVAKPRARSPLRHEPATTPRSII

SEQ ID NO: 512136 - protein, 476 aa, unidentified
MNAKTTSKKNQVVSKNIFEREELVKKAEEISKDLRASSWKDLETHGKFAKNDKISFISDDMLVAGCDIGSETHYLRAIDTRGRELSPKAFPFRNNAEGFASAKAWLLELAARHGKTQIVVGLEPTGHYWFCLAAWLVSNGISVVQVNPYAVKQTKELEDNSQRKDDLKDPKLIANLVKDGNYGMPYLPEGNYADIRRYALFRDQLMEDRTRAVNRLHRELTIHFPEYKDAFGKVDGAFTMALLQVAPFPADLKAIGADGIRDLWHAAKLRGRGYSRAEEIIRYAEQSVGLQDGVDASREAVIHFAGQVAMLDEKLEEIGEKLHARCMELPHAENLLEIPGIGGTILSGIISEMGDLSRFDTAKEIQKMSGMSLVACSSGKHQGETKISHRGRKRLRYWLFQAAKSVTSHASEFKEIHAYYTTRERNPLKKMQSLVVIACKLLRVIFAIFKNGTHYDPKKMLRDIRRQTSTGMPAAA

SEQ ID NO: 512137 - protein, 345 aa, unidentified
MEITTVGLDLAKNVFQVHAVSDTGEVVVRRALRRAQVIPFFSKLAPCLVGMEACGTSHHWARELIGLGHEVRLMPPVYVKPYVKRGKTDAADAEAIGEAVRRPTMRFVPIKSVDQQAALALHRTRDLLVRQRTQLVNMIRAVLAEFGVEIPKGITYALAFVRRVVAGEAQDIPPLAGRVIAALAEQALEGQTRIRQLERELLAWHRASELSQRIATVPGVGLLGATALAATVTDPAQFRSGRQFAAWLGLTPLQNCSGGKERLGRISKMGDQYLRRLLINGMTSLVARNARRPDRADPRINALLARKPLRVATVAMANHAARTIWAIMARGETYRAPAPLETAAA

SEQ ID NO: 512138 - protein, 388 aa, unidentified
MIYVGIDIAKLNHYASAIDSDGVVLIEPFEFLNDNEGFYTLLSKLNSFELDDIIIGLESTAHYGNNLVSFLVTKGLHVCVINPIQTATLRKNNIRKTKTDKVDTLVIAKAVALMDHPRFVTLYNIALMQLKNLGRFRMKLVKQRSRTKIQLTAYLDQVFPELQYFFKSGIHQKTVYAILKEAPSATQIASMHLTHLKNLLLSNSHGHFKKETALELRVLAQKSVGTADRSLSIQITQSIAQIELLDSQIDAVESEMKDIVISLDSVIMTIPGIGPINGGMILGEIGDINRFPKPRKLLAFAGLDPSVYQSGNFIAKKTKMSKRGSSALRYALMNAAHNIVKYNQTFKEYYDCKRAEGRGHYNALGHCAGKLVRVIYKMLKDDVEFNLD

SEQ ID NO: 512139 - protein, 481 aa, unidentified
MSAGKKNANDGAPDGAVAAHGGDGAEVAEDRVQVVEYAAAIDVAKGSGMVCTRVPGSRPDRRRQKVWRAEATCGEVTALMDHLRCEGIQRLVLESTSDYWRIWYYLAEAAGLEVWLVNARDVRHLPGRGKSDRLDCVWHCKLNERGMLRRSFVPPQETRDLRALTRTRARLAQDQARHQARVEKILEDALLKISVVISDLFGASGRRFLDALVAGERSPKALAALGDTRLKATRRELEAALTGRFRDIHAFEIKTHLRLIDAINEEIALLDEKIAQQLALVPRTAPACVACGLAGGGHVPGCPDEGAAVLGLAGRLDEITGVGECNARVIIAELGTDPSQFPTPGHAAAWARLTPRSRQSGETARPGRTGKGNRYLRGALGQAAMAAASTDTRLGALYRRIARKRGKQKAIVAVSRVICEIAWILICDPGARYEELGPDYYSPRSPARQTRDKIREIERLNPGKKVILAPADPGAGAGQAA

SEQ ID NO: 512140 - protein, 371 aa, unidentified
MGKSTRERSEKPAMNKINASERATITTLGIDVGDRTSRYAGVDAQGELISEGGVATRESALHALLSQLAAGTRVVIEVGMHSPWISRSLEQRGFEVTVANTRSLKLISGSARKSDRRDARVLATIGQSAPQLLDPVEHQSEQAQLDRAVLRARDGMVRARARLITQARGIVKAIGGRIKRCSADAFASRAAEQMPELLRPALDPVVVEIERLTVQIHAYDQVIRKLVASYPGCGAVEAIKGVGPVTALAFVLAVGDPHRFSSSRRVGAYFGLTPRQHDSGDNAPQLRITKAGDPLVRRLLVGCAHYILGPFGPDSDLRRHGLILAARGGKNAKKRAVVAIARRLAVLMHKLWISGAAYEPLFNAIQTQAAA

SEQ ID NO: 512141 - protein, 408 aa, unidentified
MKTLHRRCAGLDVHSDSVVACARLTVRTKASHEVRRFSTATRDLLELADWLAAQGVTHVAMEATGIYWKPIWHILEGRFELVLANAAHIRNVPGRKSDVNDAVWISDLLAHGLIRANFVPPAQIQDVRDLTRTRTQLTREVAQHIQRIQKTLENANIKLTSVISNIIGTSGRRILKAMIAGETNPIKLAELGSTRLKCPRAELTAALDGRVTAHHRFLIAHHLSLIGELERHIAAFDARIEKLLRPLRDAVAQLITIPGVSKVSAQVILAEIGADMTPFPTSGHLLSWAGLVPRLDESAGKRRSTRVRKGAPWLKPVLVQCAWGAARTKGTYYQAQFFRLKARRGPKKAAIAVAASLLTAAYHMLKNGTFHQDLGADFLVKRDKARIVTKLASRIKDLGYDVSFTPAA

SEQ ID NO: 512142 - protein, 347 aa, unidentified
MNITTVGIDLAKLVFQVHGVDARGKVTLRKQLKRAQVITFFTQLSPCLIGMEACGGAHFWGRRLTELGHTVKLISPQFVKPYVKTNKNDAADAEAICEAVGRPNMRFVPIKNTEQQALLGLHRARQGFVAARTAQANQIRGLLAEFGLVIPAGIHYIERKLPEFLEDAENGLSVASRALFARLFEHFQVLERQVDELEREINAWHREDSASQRLQAIPGIGPLSASALVASVGDASVFHNGRQFAAWLGLVPRQSSSGGKTNLLGISKRGDTYLRTLLIHGARSVLLSLKRHPDRAEGWLARLAARRNPNIAAVALANKNARTVWALLAHGRDYQDGYRSINSVTTA

SEQ ID NO: 512143 - protein, 337 aa, unidentified
MKVTLIGIDLAKSIFQVCGVNQAGKRVFNRQIRRAKLMEFLMQHPGVTMAMEACSGSNYWGRELQKRGFKVMLIPPQHVKPFVKGNKNDRNDAFAITEAARRPDLRCVEPRTLAQTDMIQIHRVLDRMIRQRTALINQIRGFLNEYGVVVARGKEKLLAAMPDLLEDAENGLTQQSRALYLELHGQWRQSNEAIGRLEKRLKGQARADEAAQRLMKMRGVAEKIATATIAHAGNGHGYKNGRHFSANLGLVPKEHSSGGKQKLGGITKRGNQYLRRMLIQGAWSVIRNVDKNDDRLSRWAKQLIERRGKHKAVVAVANKMARIMWSMLYHQTEYRST

SEQ ID NO: 512144 - protein, 337 aa, unidentified
MDVLIGIDPHKGSHTAVAIDRNENQLGSLRVRATKAQCTQLLEWAAPFPERRWAIESAAGLGYLLAQQLVAAGEDVVDVPPTLSARVRVLGSGRSSKNDPNDARSTAIAALRSTRLRAVEPDDHRQILRMLADRHHALVALRTQAVCRLHASLAALVPGGHAGRLSTTKATEVLASVRPDNGIVAERKTQAQALLDDVARLDAELKAIKARIRTAVTASGTSLCDITGVGPVVAAIIIGHVGDVARFGTRHRFASYNGTAPIEASSGPRKRHRLNPRGNRQLNHAMHMIAVCQIRHPGPGRVYFDRKVAEGKTKKEALRALKRRVSDAVYRQLVDAS

SEQ ID NO: 512145 - protein, 326 aa, unidentified
MGQAPARKDGTKKMDSKEWIVGVDVSKDRLDVTVLQTGAEFEIGNDEAGWAELIEQLDGHEVKAVGLEPSGGYERGLAKALRKAGLSVRFVNPYRVRQYARSLGRLAKNDRIDAGMIARFTAQLPEREVRHDPVVEQMAELVAARRQLTADKVRLGNQLEQVRDPALRRMASQRLQRIKAEILLIEKRLTTLVAGDPNLAAKDRLIQSFKGAGPVLSHTLLALVPELGEVDRQELAALVGVAPFDNDSGKRGGKRFIWGGRAEVRRVAYMAALTAARSNPVLMAFRKRLIANGKPPKVVIIAVARRMLGIIAALLRNRQEWNPAHA

SEQ ID NO: 512146 - protein, 415 aa, unidentified
MGLPRWVGRAIGLDVHREFCEVAICEEGVTRSAGRVPATPDGIKTLAGSLLPSDRVALEVTGSCWEIARILEPHVNRVVVVSPDDTGITSARAKTDKLDARTLATLLWKGGELEAVWMPDERCRILRRRLARREQLVRSRTRAKNEIHAALQRRLQAKPPCSDLFGVKGRQWLASLELPLEERESVNAAMRHVEFLDAEIAAAEKLIAQQALSWPEIRRLMTVPGVNLICAASFIAAIGDLNRFLTSRKLVAYLGLDPRVKQSGEGPARSGRISKRGSPAARWALVEAAWTAVLQPGPLHGFYERTKTRRGHGKAIVATARKLAVLFWCMLTRGQDYAHQQPSLTRKKLRRLEITAGARKNTRQATGVWSTNAMMRQAERELAQQAEASYKRMVQDQLAGGRARKAGASVTPERA

SEQ ID NO: 512147 - protein, 331 aa, unidentified
MYVGVDYHKRYSVATKMDERGTVVEQVRLRNDPDTLVGYARRLPQGSKIALEATGSWYYFYELLEDTGSKIYLAHPLKTRAIASARIKTDKIDSTILAHLLRTNLLPTSYIAPRSIRDIREILRYRASLVSLRTSLKNKVHAILAKNGMAMPYTNVFGKKAIGYLKGLELRPCYRQGLDGYLRLATTLNTLIQEVTEMIEGMAQDDPRAQLLMSIPGISYYSALLIVSEIGDIDRFPSAKKLCSYAGLVPSVHASGGKIRYGSITKQGSKWLRWILVELSYHFIRGSEGLKNLYTRVTKSHGKATARVAVAREMLKIIYYMLRDNRAFIRG

SEQ ID NO: 512148 - protein, 425 aa, unidentified
MNTHPVTYAAFVGIDWADQLHSVCLRPADGQTDEQHPLPQDPEAIHTWARELQVRFAGGKIAVAVEQSRGPLIYALLQHAHLDLFPLNPARLTKYREAATAASGVKDDPFDAQLACEVVRLHPQWVRRLQPAAATVRQLQLLVEARRGFVEQRTAFCEQLGSALKCYFPQALKLVGELHSPLCAALLRRWPTLAALQRARPATLERFYRAHGVHSPERLAEHLALIRAAVALTTDAAVLGALPLQVAVLLGQLEALRPALADYDRRIAALFQAEADAALFASFPGAGPQLAPRLYVAFGADRARFASAEDLQCLSGVAPVTRRSGKMHLTQWRWHCPTFLRQTFQEFAGCSIPHSRWAKAFYQLQLSRGSSPHQAKRALAYKWQRILFRCWQDRQPYQEDIYLATLRRRHSPLIPLIDAAQNIAA

SEQ ID NO: 512149 - protein, 298 aa, unidentified
MRIVGMDIHRSFAQVAILESGQITRELRVDLVHDPLVDFAKTLSLEDEVVIEATGNSAAVERLMRPYVKRVVVANSRQVRAIAYARVKTDKIDAAILAQLHSAGFLPEVWVADEDTLRRRRQIAERMGVLEQIVRIKGRIQSVLHSNLIQKYTGYLFGKAGQRWLENLPLPEEERNMLKRLIAELERVSAEMAKLDQVLAQQTLDDPRALRLMTIPGISSIVASTVLAAIGDVSRFPTPQKLSSYFGLTPKIRQSGNQPARHGRISKQGNGDARKMLVEAAWSAKTAPGPLRAFFIRI

SEQ ID NO: 512150 - protein, 390 aa, unidentified
MFYVGIDIAKHNHEICILDASGESVDSLRKVPNSIAGAESLIAALGRLGLATSDCLVGMEATGHYWLAFYSYLMGKGFNLKVINPIVTDAYRSMQVRKVKTDPVDAKVIAKVLMLGEYSESPVANGETLALRQLCRFRSYEVDACSDLKRKAIAILDQIFPEYETLFSDTFGVSSREVLTSYATPEDLEKISTRKLTNLLAKASRGHFGKDKAMQLKETAMNSIGITVAVDAFAFQLKQILEQVSFIEAQVKSLDIEITRYMQESDTYIMTIPGIGPVLGAIILGEIGDIHRFSDGSKLVAYAGIDASVHQSGAFQGSKMSMSKRGSPYLRRAVYMAAMVASFSDPELAAFYQKLRSRGKHYKVAVGAVARKLCFIIFSVLSENRPYEKR

SEQ ID NO: 512151 - protein, 464 aa, unidentified
MTDVKRGSKRKKTTKAGPATLAVLQPMVAGVDIGSTEHWVCGPARADGKPNVCVFGTTTPQLHALAGWLVEQGVTSVAMESTYIYWIPVFELLESRGLKVVLVNARQLHNVPGRKTDFSDCQWIQLLHSCGLLRGSFRPTEAITRLRALQREMANYVAERSRCVQWMQKALDQMNVQVHRAVTDLTGTTGMAIVRAIVAGERDPARLAMHRDRRCHKSAEAIAQCLTGTWREEHLFNLATALRLYDWLQATIASYEAQLLAQLEALQPPERQQQDVPRHPNPTKEKTIRQRGEQPLRASLWRFAGVDLTRIDAIRVTAAQTVLTEVGPDVTAFPSEDHFVSWLRLCPQTPISGGKPLKKRRNGMGANRVAAVLRMAALGIQRSKTALGASFRRIARHKGVAVAVFATARQLARLIYRMLRYGQDYVDIGEAAFEAKFQARRLAGISEAARSLGFTLTKNEAAAG

SEQ ID NO: 512152 - protein, 444 aa, unidentified
MSDDVMIAVDPHKASNTAAVLDPVTKTVIEVARFANSVDGYSRLAGFAARWEQRRWAVEGCHGAGRFLAQRLVADGELVLDVPAKLAARVRVYSRGHGRKTDRHDAVSVGLAALDGTGITMVTGDDALVSLRLLCDRREELAAQRTQAVCRLHRLLAELTPGRMRRELSANKAQALLARIRPANDVGRVRVHIARDHLADIRALDARLKFIAAQIAALVTASGTGLTGLYGIGPVIAGRILAEVGDVARFATKDAFASYNGTAPIGVSSGDQIRHRLSRAGNRRINHALHMMAVTQIRNPDTPGRLYCERKRLEGKTGKEALRCLKRRLSDLVYYQLIADRHGTIGTCGSPTTPPPTRSTSISPATRSREAGPPSRPPHRPAPKGSSRSTGKTTASSESRSSTPAPASTTTSSNRPKPTAKTAALDREEPTCDLGGQRGKRFSC

SEQ ID NO: 512153 - protein, 355 aa, unidentified
MSGEKYIGLDVHQATISAAVRDSQGNIIMESILETKASTILDFFAGLRGTLSVTFEEGTSAAWLYDLVKPHVAQVLVCNPRKNTALKHGNKNDKMDARKLAERLRLNDLKPVYHGESGVRMLRELARSYLTMVKDQTRVMSRVKALYRSWAIPCAGRDVYYTRHRSQWLDKIPEPGVRYRAEQLYQQLDMLQHLRQQARRALLAESRKHPITTKLRQIPSLGPIRSALAVALIQTPHRFRTKRQLWTYSGLGLETRDSGEYQFIQGQPRRRKKQATIRGLNKDYNHDLKALFKGAATRASVQPGPFQEFYQRSLAKGIKPTMVRLTLARKIAAITLTLWKKGEDFDIHKLNSQAA

SEQ ID NO: 512154 - protein, 410 aa, unidentified
METIVERPGALDVHKAQVTACVRVPAPDGGRCQHVAEFATTVQGLLTLRDWLAAHAVTQVAMEATHVYWKPVWAILEDDFELLLVNARHVKQVPGRKTDVSDAAWLAQLAEAGLLRASFVPPEPIRALRNLTRYRKTQIAERAREANRLHKALEDTGIKLDCVATDILGVSGRAMLDALISGTTDPELLAELARGRLRAKLPALREALEGRFDRLHAVWIGAILAHVDFLDEQIASLTESIGEQIAPFEGAVDLLCSIPGVQRRTAEVIVSEIGTDMSVFSTPKHLAPWAGQCPGNDQSAGRRRSGRTRKGSKWLDWALEEAALAATRSKGTYLAAQYARLRPRRGHKKALGAVKHSMIVACWHMLSTGELYADLGGDYFERRDPDKTVKRLIGQLERLGHTVTLQEVAA

SEQ ID NO: 512155 - protein, 372 aa, unidentified
MASIIYVGMDVHTTNFTFCCYTADSDRGFAVAQTEPDYRQVIKYMERVQKQRGEECKFVCGYEAGCLGYSLYHQLTRCGVDCVILAPSTMHQEKGKRIKTDRRDAENIARRLAFSLYSPVYVPTTEDDAVKEYIRMRDDIKADLKRVKQQIIAFTTRHGFAFDGKSYWTQKHLKWLETLVFEHPLYKETLQEYLILYYMLDEKVAVYDTRIEEMSHLEHYEENVQKLCCFRGVAAHTALSLLVEVGDFQRFRSAKHFAAYLGLVPGEHSSSDKQIRTSITKAGNTHLRRLLVEAAQSYNRGAIGKKSAALKARQGGNPAEVIAYADKANERMQRKYYRIAFKSRHNIAKTAIARELACFVWGMMTGNISNAA

SEQ ID NO: 512156 - protein, 312 aa, unidentified
MAQVECFVGIDVSKRGLDVAIHPQSIAFNVANTPVGFTELIARLAPLSPSLIVLEPTGGYEKAVLRALRDAGFEARRIDAWRVRRYAEALGRRAKTDAIDAAVLARFAHGVARDEPELQESGDPRLCALVDARAQLVQDQIRLGNQLAQADDELIRSLIQRRLDLVESQIKEVATALEALIDEDAALKARFELLRTAPGVGQVTAFTLMARLPELGARDAKRIAALVGVAPYDRKSGTWRGRSAIRGGRADLRRVLYMAALGACRTYEPWKTFRNNLTARGNPPKVGIVAVMRKLVVTLNAMARSNQPFQPA

SEQ ID NO: 512157 - protein, 360 aa, unidentified
MSFNGTSVGLDVHALSVVAHAVDEESGLVERARLCPDHGEVLRWLGQLRGPLRVAYEAGPTGFGLARALAEARIECVVAAPSKLIRPAGDRVKTDVSDAAHLTRLLRLGQITPVTVPEADVEAVRDLVRAREDARADLMRVRHRLSKLLLRQGRVYSGGQAWTGPHQTWLRQQRFTDAHTAAAFNHHFEAVLSATAARDHLDEQIVAVAASPRWANTVDRLGCLRGISALTGLALAVEIGDWNGFTGASIGAYVGLVPTEYSSGASRVLGSITKAGNAHVRRLLIEAAWHHRASYRHPGPTMRARWAKVDPALKARGHAGNRRLHQQWCRFLERKKHPAVANVAIARQLAGWCWSLATLD

SEQ ID NO: 512158 - protein, 428 aa, unidentified
MDGEDHIRLEEFRQLKKQIRGSEEHLIVGIDVAKDKHNAFFGTARGKTLLKRLVFENTIEGFKRLLIQEEALKVQHGLEKTVFGLEPTANYHKPLGEFLIKCERMVVLVSGVAVKRNRELLDGRWDKHDTKDSANVADLISQGKCLFYEYPPMPLRELRSLVSFKRRLKKQEHGIKARIRNHILAQYFPELDRYYGQSESDGLAVVRWCGNPSVIAGLEYAQFAQLVAPRKRSLAQQKRLQVVWKLASDSIGCEAGAALEFEAKVMVEELQRIRELIRATEQKIEDICLQFPEYHYLLTIPGFGPDVSSKVLAAIGNPFRFTAGAQVLKMAGLDLSADRSGDRSDDATPVLSKKGKADLRYALYQAALIASLRDRHFILYYTHTLRGREREKGIKTKMRVKLAAKLLIIAWTLMKKKEPFNPEYLTTE

SEQ ID NO: 512159 - protein, 431 aa, unidentified
MTLVNAHALGVRRETTRMSQSSFPMPAPAPLAYVVGIDIGMQSCMMCCLTMEKRQVIKPSPFANKAEGFSSLFERLERLGTPADQILVGLEATSRYGENLYYALLSRGYRVCLLHPAQMHAFAKQRALRAKTDRVDATTIARALLSDDARFGYVPSEQVATYRELVRLQHQLSDDVVRYKNEIHALLVVLFPEVTEVFADPTRPTALAFLKRYPSAQAVAQAQVDTLSQLLHELSPKHYGRRTAERLLDVAKNSVSSGVAISARSTSLRILCDQLEHTQANLKQLEQEIESLLDQDPKVKGLLLIPEFGLMTVAVLRAELGDLDRFARMDQVVAYVGLDLEVKQSGKYVGQTKLSKRGSGRVRRILYLAALRSIWLEGSPFGAYYHRLVDRGMKKGMAVTAVMRKLLIVAAHLIQTQQVYDPGKVAAPSVG

SEQ ID NO: 512160 - protein, 341 aa, unidentified
MLKIVYPICYGMDIHKSFLVACIATTNEHGVISYKSKRFSTFTGDLRRLAAWLSENNCKDVCMESAGKYWIPVYNILELSCQIVLAHPKYVKAIRCRKTDKKDAKWIADIFKHDLISGSFIPPADIRQLRDLVRYRWKLTNFTTGEKNRAQNCLTVSNIKLDDVFSDVFGKAASAITTRLLESNEPFDVTPYLTKGIKASVEDIQNAVDGKMCAEQAEKLRIIRSHMDNLELCKMNLESLILFVVEKYLPQLNLVLTVPGIQTFSSIAVISEIGVDMSVFPTSKHLCSWAGLTPQNNESAGKKRPRASAVLALTSSRYLFSVQMPPSRATNILKSKTNISA

SEQ ID NO: 512161 - protein, 322 aa, unidentified
MNENTNYFGIDISKDVFDVMGSDGLFHQFSNEVTGFKKFIKLMECNSHCVMESTGVYHLRLAYYLIEHNIKVSVENPLSVKRFIQMKLSKIKTDKSDSKMIYEYAILNNPNLWTGQTKSQIECSHLLSLSNLYTKEIIVLKNKLHSEEAQGSPVTRVIRSIKRSLSYYKKEIETLETTVLKLVKEEYQDLHSRIKSIPGLGAKASALLIVLTDGFERFNTASELCSFAGLTPIIRESGSSIRSRPRISKMGNRRLRKVLFICSFSASKHNKACKELYNRIVAKGKSKKLALVAVCNKLLKQAFAIAKSHLWYDENYRSVLVR

SEQ ID NO: 512162 - protein, 473 aa, unidentified
MTPRRTKNGRMPPPVVDSLKVHNPSAAGIDIHSKEHWVAVPPDQAVPPPVPQPPQAPLYVCRFGTCTADLELLVQWLKACGVTTVAMESTGVYWIPLFELLEKHGLQVFLVDPRQTKQVPGRPKTDVLDCQWIQRLHSYGLLSASFRPEDQVVILRSYLRQRQMLMRYATSHIQHMQKALEQMNVKLTEVVDDVTGVTGLSIIRAILAGERDPQVLTRLRNQRCRRSEADIARALYGNWRDEHLFALKQALALYQTYQAQASDCDQAIAKHLGLCADRSGGKKLDPHPRGNRRRKNQPAFAVRDALLRFSGADLTIIEGIDQTTALQILSEIGHDMSKWPTAKHFASWLGLCPPQDESAGKKKRRPRRRKGVHPAARAFRMAAQGCHHAHHALGAFYRRIQARCGGPKAIMATAHKIAERVYRLLKYGETYVRQGMEAAEKAYQTKRLHGLARAAKQLGFNLVAIEATTPMAT

SEQ ID NO: 512163 - protein, 333 aa, unidentified
MQYYAGLDIHKKTCQAIICTDKGNIIKEGKITTEKEEIKEFFSEFKELTIAIEACNTWEHIFETLEMDGHQVVLAHPLKTRVIAEARVKTDRVDAKILMHLLRTGFLPTSYIPCREIRDLRNLVRRRIFLGRYTARLKNKIYAELLRQGIQYKRGPTLFNGRGRQWLRLLKISSVDSYLNMYESTLEEIKILERELKNRARQYKEAQLLTTIPGVGIYSALIILSEIEDITRFPCEEKLYAYAGVIPSVHQSGEHTYHGHITKQGSKHLRWILTEAVRIHLIWTDRHMIETKISRFYHRLCKKKPKNVAAIAAARKMLQIIYHMLKNQDEFRG

SEQ ID NO: 512164 - protein, 401 aa, unidentified
MWFAGIDWADVHHDVVVIDEAGRKVASLRVEHTPEGMRKLIAFLHEIAPFDQIACILEINHGLLITALLEAKLTLYPVNPKTVDRRRSASGAKTDLIDAYLLAKHGRSELADLRKLEPDSTLVQELKALTRDQDSLIQSQTRLVNQLTACLKVYYPAALQLFAKLHQPSTLLFLQTYPTPQEAQAASVEQIAEVLKRAQHKTAEKVAAKIVETLHQPALRADSVTLRTKSRLMLALVAQLLPLVEQLAAYDKEISALFLTHPDSPIFNSLPGAGKRLAPRLLAEWGDDQHRYADATAAQALAGTSPTPYESGNYSRVHQRYACIKPLRNALHQFAWLSTMQETWALDYYQRKRKEGKSHSMAVRALANVWVRVLFAMWSKKEAYQRTTFEDAQRLHAHRAA

SEQ ID NO: 512165 - protein, 359 aa, unidentified
MSQQPSDRSVIIGGVDTHKELHVAAVVDAHDRVLGTASFPTTRHGYKTMLTWMRSFGELSRVGIECTGTYGAGLLRYLQRAGITILEVTTPDKTVRRKRGKDDAIDAENAAHAAYAGIRTVTPKTRDGMIESLRVLKVCRKTAVAARRVALQMIQTQVVSAPEELRDLLRNMTRMQLLRTLAAWRPDLNGYRDVTMAYRIALKSLARRYLELHDEIADLDVMIKAIVDELAPKLVSRTAVGYETAAQLLITAGDNPNRLGSEASFAALCGVSPIPASSGKTQRHRLNRGGDRAANSALHIIAIGRLRLDANTQAYIARRVGEGHSKLEAIRCLKRYIARELYYVLRSRHREINQTQIAT

SEQ ID NO: 512166 - protein, 408 aa, unidentified
MRIVGLDIHRAFAEAVAWQNGKLTRLGRVIMRREPLEAFAQRLSQDDVVVIEATGNAASAAAVIGAHVGRVVIANPKQVRLIAHAKIKTDKIDAGVLAQLYASGFLPEVWIADEATQALRRQVTRRNQIVRQRSRLKNIIQSILHAHLIRSCPHQDLCGPKGRAWLSEQILPGDERLAVERHLREFDRLTGDLRVIERDLARSALADERVKRLMTIPGIDMVVALALVAAIGDIERFGRPEKLVGYLGLNPSVRQSGPGPAYHGRITKQGRGHARGMLVEAGWAAARAPGPLRSFFLRVQTRRGQHVAAVATARKLTILIWHLLTKGESYLWARPALHARKLRDLELRAGHKPARGQRGTAHAYNIKSHRDEERRWVEQAEVAYARFVAGWNPSGPKARTGAAKEERQ

SEQ ID NO: 512167 - protein, 370 aa, unidentified
MGNASTLHVGLDVHKDSIAVAYAPTDGGVAPIPFGTIGTRQCDIDALVRKLQRKGARLVFVYEAGPCGYWLYRYLTKKELPCFVVAPSLIPRKPGDHVKTDKRDALTLARLARSGDLTPVYVPAVPDEAIRDLARAREDALHDLNAGRFRLKAMLLRNDIRYTGRANWSAEHLRWLARLVLATPAQQIVFQEYVRTVTERTELLQRLEAELLEQAKTWRLAPVVSALQALRGVQFTVAITTIAELGDLTRFDTPRQLMSYLGLTPSEYSSGDRRRLGGITKAGNSHARRVLIEAAKAYRHRAKVSEAIQARQQQLPAAIRDLAWRAQVRLCGRYRRLLARGKHPNTVAAAIARELAAFMWAIAKAQPLPA

SEQ ID NO: 512168 - protein, 266 aa, unidentified
MIIVGCDFHPAWQQVAWVDTETGETGERKLEHSSGEARVFYASLSVPALIGVEATGNCQWFLDLMMELGHQVWIGDAAQIRASYVRKQKTDKRDAAHVLKLLLEDRFPRIWVPNREERDLRQLLLHRSKLVEMRTRVKNELQHLALNQGVQRKRKLWSQAGQQLLRSLPLQPWASRRREDLFSLLTLLDRHIGVLDEAVEKASQLDKMAQLLKTQPGVGPITSLAFVLTIGDVSRFQNGKHIASYLGLIPREHSSAGKQRLGGITK

SEQ ID NO: 512169 - protein, 313 aa, unidentified
MTKTYVGIDVSKRHLDVACSPQAQAWRVDHDEAGISAIVARLQELAPALIVLEATGGWETALARALTEAHLPVAVVNPRQVRDFAKATGTLAKTDRLDAQLLARFGATVHPEPRPLPDAATQQVQDLLARRRQLVEMLTAERNRLGQAPAHLRGRIAKHIEWLEAELAEVEGEVEAVEQACAAWPLQRQLLQSVPGVGPVVARTLLAQLPELGRLNRKQIAALVGVAPFNRDSGALRGKRAVWGGRAAVRAALYMAAVAAVRCNEVIREFYQRLRAAGKAAKVALVACVRKLLTILNAMVRHGTPWRSPLRSS

SEQ ID NO: 512170 - protein, 366 aa, unidentified
MPKMIWLGMDVHAASITVARYDDAAATATVRTIPNDRRRVPRLLAGLPADADVRACYEAGSCGYGLQRELAARGVRCDVIAPALIPRTPGDRIKTDRRDAEKLGRYYRSGDLTVITVPTLAQEALRDLVRAREDVRRDRTAARQRLGKFLLRQGFHYTGTHWTHRHWLWIRSHTFDGPTRVVFEHYCGHVVALNERLRDLERELATIAQSPAYQPRVARLVCLRGIGPLAAVILLAELYDLRRFPTPRALMAFLGLVPSEHSSGAQQRRGGITKTGNAPARRILIEAAWAYRHTAKQTRRTEHALTTQPAEVRAISERALHRLTARYRRLLGRGKPPHHAVTAVARELCGFVWAATIVSAAATSHP

SEQ ID NO: 512171 - protein, 342 aa, unidentified
MTIKQIGIDIGKTSFHLIGLDADDAIVLRKQLTRTQLIRFFERHAGARLSVAFEACSGAHWLAHQLMALGHEVRLLTPESVRPFAKAQKNDWNDALAIAEAAQRPGRHAVGVKSQEQLDIQALHRVRRRLVTARSATVNQLRGLLRERGLVIGNRRLRFERFLRERLLTGEIELSPVCRVLFTTLIQEYHTTDARLAEIDGELEAFARSHPTCRALLAIPGIGIIVATALFSAVADVSDFKSGRDLAAFLGLVPRQSSTGGRTVLLGISKRGNGYVRTLMIHGMRSAFYNRKKRDNRMTRFMERLAERGLHTNKIVVASANKAARIAWAVLAKNQPYQPLAT

SEQ ID NO: 512172 - protein, 356 aa, unidentified
MPIVGGLDIHRKQITFDYLDTVTGEVKRGQIAPADRAHLRAWLARFAGCGDVAFAVEGCAGWRYVAEELAAAGIAAHLGEPADTAALRGRKRHAKTDKTDARHLRSLLAEGRLPECWIPPAQVLEYRALLETYHDLRREHTAWVQRIHAVFFHQGAPPLGEGALRTEPGLEALRAAAAAHLSAAGQQQVATALDLLAATEAQLGPLRHQLREAARHLTGAKVLAERLYGVGPVTGLALTCWLAGKDRFSSSRKAVRFTGLDITVHSSDRKGPPGRLSRQGPPVLRWAVYEAGKTHARAAAPDHPYYAAVADRKNTKRAAVGGPQDRPAGLPHPGRARRRRAHRRLNPAPMTHHPRP

SEQ ID NO: 512173 - protein, 336 aa, unidentified
MDKANAVVGIDVSKKKLDVALLIDGKIKSKVVENTAAGHKLLLDWLDKSKVARQMLHVCMEATGVYYEPVAYALHDAGIKVSVINPGCVKGFSQSENLRNKTDGVDAALIARYAVAMTPALWAPAPLEQRQLRAWSLRVQALKDIRQQEHNRLEVHDITGMEDVAEHVKQHIDWLDDEIGKLEKDIDDHIDRHPGLKHDADLITSIPGIGSTTVARILGQLGDIRRFDSAKSFAAFLGVTPKLRSSGTSLRGRTMISRTGSTSMRAALYMPSLVASRHNPIMQRFSARLLANGMAKKAVIIAVMHKLAHLIYGVIRTGKPFDANYLAKGLAIQDGI

SEQ ID NO: 512174 - protein, 426 aa, unidentified
MNVISVGIDISKGKSMVTAMRPFGEVVFKPYEVIHTAAELESLAYSLKSIDGEVRAVMEVTGRYHEPIAEALHEAGIFVSVVNPKLIKDYGNNTLRKVKTDKADARKIARYALENWTELREYTPTEAVRLKLKQFSRQYNLYVKTKTALKNNLIALIDQTFPGANTLFDSPAKKDGRQKWVDFVTTFWHCECVHEKGETSFIERYRKWCKRKEYHFSANKAADVFTESLGHFCTLPKNSNTKLLITQAAVQLTAISGTVEIFRAELMRLAEMLPEYHAVMKLYGVGDTVGPQLMAEIGDVRRFNNRNSLTAFAGVDPGNNQSGNYEEKSSSTTKRGSAQLRKTLFQAVKTYLLHSPVDEPVFQLLDRKRAEGKPFYVYMTASAHTASLSCANSSFEKNILTFFKKVVDFYLQDLKYDYSKLYHIVY

SEQ ID NO: 512175 - protein, 394 aa, unidentified
MTKQTAQRSDLKAVPLLLNESLYIGVDIGKGTHVAGFLSKTLLERHDRFEACPALVFENSREGFRMLVERARSLAPLEQVFVLMERTGHYHRALQQYLQELDITVYLIHVQSRPTGMLKTDKRDALTLANHLYSQLELGVQVANKLHLVRRVVPPTEAAAQLKGLIRHRYELIRERTQRKNKLTAICDEVFPELTRIVKDPNSLVALALREQFPTPQALAIASFPTLQLIRGGARSISDAKLLELQRLAAQSIGVKDMARLRGLLLEQRQLIKELRLLREHVDQLESEIGSIVEQAREGQILLSFPGIGPVMAATMIAAIGSIHNFPSAATLKSYFGWAPIREQTGTSYDRSRLTRGGTRTMKQMLFLVVFQAIRLRDEEGQTLCSVLPGHLFR

SEQ ID NO: 512176 - protein, 371 aa, unidentified
MADYREAFVGIDVAKLKNAIAVAESGREGEVRYFGEFDASYASMRRIIQRIAAKFDRVHFCYEAGPTGYGLHRLIQSLGHECMVVAPSLNPRKPGDRVKTNRRDALALARLLRAGELTAVWVPDEGHEAMRDLVRARAAAVETLRVHRQQISAFMLKHGRIYPRMKGWTMRYLCWLQEQQFDHPAHQIALQEMVEAVRVSKERVERLEKVIEEFVPNWSLAPVVRALQTLRGVDLIVAVTFATEVGDVSRFESPRQLMGYLGLVPGERSTGETVRRGATTKAGNGRVRHMLVKCAWTYRHPPKVGARKLYRLEQAPPKVREIAWKAQSRLTALYRMLTGRGKRTTVVCTAIARELTGFMWAVAREAQAIRL

SEQ ID NO: 512177 - protein, 498 aa, unidentified
MVLLVCDPLPGKKTVGALATKEAGRNAQPSLVCVFCVLLRKQYSPLLRWLNREAWPAKAERRSTVKDTIARRAAEITPDTLIVGVDMARRAAHAAVFVTRDGQRVGRLSFYTTSAEFAALKDGAEAAAQRVGANRILVGIEPAGSAWRLLAQFLDEAGIPYRLVNSFTLRRQRDGDDLHHRKSDYRDAEMVAQMVRDGRYLRTQRHAGPYARLMILHREYRRQQNLLYAETNALTDLVEQLFPEFHTVFKDVLGVTARAVLRAGLTPAKIVRLPLSALRARVRRAALGRQARLVRLAALQEAARGSVGLRDEAEGLACRAQQVLARIDLLLAQCEASKERLRAQVLALPEGRRLAALPGLGPVLASGLLAEAGPLTRFSNIKQLPKLAGVIPIEHQSGTYRGRYTPMGKKGRPGLRWVCYRAALSLLRHNEVFREAYRRWTGRADHPLRRMEALGACMHKLLRVVYALARQSAAVLPAVTPVLPGDPVPALGRRCEVA

SEQ ID NO: 512178 - protein, 395 aa, unidentified
MACIAKTDERGNTKHTLRRFSTNTGDLRKLADWLILYDCKDVCMESTGKYWIPVFNILEQTCKVVLTHPKYVKAIKGKKTDKKDAKWIAELFKCDLVRNSFIPPFDIRQLRDLCRYHAKLTYMVSSEKNRSQNCLTTCNFKLDAVFSDVFGKSASRILDTLIAQGNSDFDIAPLLHKRCKATVEEVRDALDGELSYAQAEKLKLIKSHMQGLENLKSALENLIHQLAEQFQPEITLLLTVPGINSTLTAIRIIAEIGNDMSVFETAKKLCSWAGVTPQNNESAGKKKTTRISRAGAYLKPLLVQIALASSSSAKNPEIRIKYLALKKRRGHKKAVIAISRRLLTAIWHMFSKRESYNAELYHKADKPPKNRVLTPEQAFALLRRNGYQISEPAPA

SEQ ID NO: 512179 - protein, 417 aa, unidentified
MAATHSTAATVLVAIDISKHRHEVLIDIPGKKRRRRMTITNTLEDFRRLSATLASFDLPVRIGFEATGNYHRPLAHHLGQGGFDLKPVSSVGLARTREALHNSWDKNDPKDAQIILHMLEIGAVQFFHDPLTVGTADIQELSKTHEIVSRSKTELWHRILTHYLPLYFPEAERFHRSSRTDWFLAFLEKHPTRMITAMSREAFVSDAWQVVGRKVSKERLLSDVYATAVDSVGLPVHPDSDAVRMFRLVLAEGRSLVRQRDEIEARAVELLSDIPDYQLLTTIPGIGPINAMAILAEAGDLRRFRHHRQFLKFCGMDLATVHSGMFRGQSRISKYGNARLRRALWMAGQTAVLKRTSSFRDKFERYISKDRHDAHLRRKAYTAIAAKMARTVHAVINHGEPYRPFFEGVSPGGRTSL

SEQ ID NO: 512180 - protein, 339 aa, unidentified
MNLTPVGIDIAKRVFQIHFIDAATGEVINKPIKRAKLLEHFANRAPCLIGMEACGGSQHWARQLVELGHEVKLMPAEFVKAFNIRNKNDAADAQAIWLAVQQPSKAVAVKTEAQQAVLALHRLRQQLIKFRTMQINCLRGLLTEYGEVSARGRLALDKAMPTILERISERLPMALVDTLREQWAALSKIDEQVSTIERRLQQAAINDSGVKAITAIPGVGTLTATAAIASMGDVRAFRSGREFAAWIGLVPRQTGSGGKVVLGRISRRGDTYLRTLLIHGARSVLYRYKQPNPWLEQIKQRRPANVVVVAIANKIARIIWAILSHGCPYQQGHVSTRPA

SEQ ID NO: 512181 - protein, 343 aa, unidentified
MKISTIGLDLAKLWFQVHGVDATGHVAVRRRLRRSEVLAYFRSLEPCLVGMEACATAHYWARELIALGHEVRLMPPAYVKAYVKRNKNDAADAEAICEAVTRPTMRFVPVKDAEQQSVLMLHRGRSLLVRQRTMLVNALRAHMAEFGITAPQGLVHVEYLATVLDDDGAPLPELARSILRMIVAQYNDTSARIHALERQLAKWHRESRISQLLATIPGVGIMGASAIAATVTDPNLFMNGREFAAWLGMTPKQNSSGGKERLGRTSKRGDKYIRCLLVAGAVAVLRHTRNRTTKDAAWVRGLLARKPTKLAAVALANKTARIVWAVMARGEGYRSKEQFEPAV

SEQ ID NO: 512182 - protein, 342 aa, unidentified
MKEASIIGLDLAKRSFQAHGALADGSVAFRKKLTRERVLGFFAEQPRCVVAMEACGSAHHWGRAIRDAGHEVRLIPPAYVKPFVKRQKNDAADAEAIAEAASRPTMRFVAVKTEEQQARAMLFRTRDLLVRQRTQLINALRGQLSEHGVVAPQGPANVAILAQAIDDMTPSLPLLVVELARVYLDQIDGLSEKVAGLEKAIACEAKRGAMTRRLQTMPGVGPITAMAIETFAPPMEVFRRGRDFAAWLGLVPLQHSTGGKQVLGKTSKMGQRDIRRLLITGAMVIVRWACRKGAQEGTWLHRMLGRKPRMLVAIALANKMARSIWAMLTKGEDYRGPVAATL

SEQ ID NO: 512183 - protein, 360 aa, unidentified
MSQRTAGSRVVSTSPATTIGLDVGDRWSAFCVLDEMGAVAERGRLRTRAEEVTTAFTAYGPVRIVLEVGTHSPWLSRLLRARGHEVIVANARRVRLIAESDQKDDRTDAEQLARLGRLDPGLLSPIRHRGERAQRDLAVLRARDCLVRSRTALVNHVRGAVKAFGSRLPACSTESFPQKVKDSIPEALVPALAPLLETIADLTQRIRAVERAVVATCERDYPETRLLRQVPGVGPITALAFVLTVEDPVRFTKSREIGPYLGLVPRRRQSGRSAPELRITKAGDRQLRRLLVGCAHYILGPFGPDCDLRRWGLSHSPAGRGARKRTIVAVARRLAVMLHHLWVSGEVYEPLHRATPAPAA

SEQ ID NO: 512184 - protein, 437 aa, unidentified
MRVLYEHVAGIGVHKDMIKVAIRSPGEKPWTRKTEILEFRTFYGVLQEMARLLRRRGVTHVVMEASGVYTDPVYYALCEQDFAEVAVVNPAHARALRGHKTDAADCRRLAELFECGLLRGSYIPPAELREVRDLTRYRMKTVQARTSEIQRLGKALESAGIKLGSVASDITGKSATAMIDSLIDGERRGAVLADLAIGRMRTAGKLAGLSMALTGRFTEHHALLCRLHRDRIAGLDAAVADLDDQIAGRAGRWQRELDLLKTVPGFGDVVAQTWLAEIGPAPHRHFASHEKLASWVTLCPGNNISARKRKHGRTGDAGTYIKPMLIQAAWNAIRPKGRLQARYSRLVRRFGGEKNPGAKKKAITAIAHTLLKIAYQVLKSEVPYQDLGADFYTRRESPDQQRAYLERRLRKLYPGCAITITISPPEAVLTSTVSNAP

SEQ ID NO: 512185 - protein, 358 aa, unidentified
MRKINVVNFEGQTIFCGVDVHKKSWQVNIRCSDFELCSFTQPPSAEGLYNYLRSRYPGADFQVVYEAGFSGFGLQRSLRESGVNCLVINPADVPSSDKDKKRKSDRVDARKLSRELSNGTLSSIYIPAVEMEHARTLVRQRTMLVKDSIRCKSRIAHKVMFSGLEMGDYDGPQYWSRNYVEHLRGLHCPTPALRHALDLAIDEYVMVRKLLNQATCQIRALARQEPFAKTRELLQTIPGIGLINAMIILTEIQDINRFSNLGKLCSYCGIVPDKFSSGDKEAVRGITHRSNNHLRVAIVESSWTLIRKDPAMLMLYKKYCQSMVTNKAIIKIAYHLLSRLKHVWKTGEPYQIGLAGGV

SEQ ID NO: 512186 - protein, 418 aa, unidentified
MTSEFTFYVGVDWATEHHQVCISDCDGRVVRQQRIEHSGKAITDFMASMEDLAQGQVDRIAVAIEVPRGPVVEAFLEHRWAVFAINPKQLDRFRDRHTVAGAKDDSRDAFVLADSLRTDQRCFRRLSADHPAIVRIRELSRTEDQVGVDLRRTVNQLYQLLLRYYPQLLQICPTPDEPWIWALLEVAPTPERAGKLKVQRIRQLLAKHRIRRWSAEKVAEILSAPQLPLASGTADAVSEHALLLVPQLRLLSTMRKQVADRMEALLDEMAASSDDTPETQVFRDVAVLCSLPGIGRVVSGALLAEAAGPLQQRDYYAIRAHGGVAPVTRQSGKTRQVGMRYRCNTRLRNALYHWARTSVQHDPRSKQQYARLRAAGHSHGRALRGVTDRLLTVLIAMLKSGQSYDPTRRQSNVSAPAA

SEQ ID NO: 512187 - protein, 362 aa, unidentified
MKHHPAETALYGGLDLHKNNAFCALLDEHRNVVLEKRLPNDFAVIQQTLEPFQKRIRALAVESTYNWYWLVDSLQAQGYDVRLANPALMHENVGLKHADDRTDARFIARQLSLDILPEGYIYPEETRGVRDLLRHRMHLVHHRAAELNRVAALVARQTGRDISAGKLTPQDLPALFENHAPSIEIAQSGLRHVEYLGGEIKAIEKRVESQLPDPAAYARLLAVPGIGKILGSCILLETGPVSRFKSAPHYASYCRAVPTEHTSNGKKKGEGNGKSGNRYLAWAYVEAANFAVRHSPEINAWFQRKHARTPGLRVVAVKALANKLAKACFFILRDGTAFDAARLVGHLKTKPKDPSKDKPEPA

SEQ ID NO: 512188 - protein, 338 aa, unidentified
MKKNYFVGIDVSKQTLDVAFIVEQHSEKSTPCWKVFANNEKGLFEMKQWLQSNQVSLNDETLFVIENTGLYHRMLVDFCNKHQLQLCIENGAQVKWSLGIARGKSDKVDSRRLATYAVRFADRLKPAAALHEGIQAIKDLISLRNRHIVQLSSLRSHLKELKATTNPQAVKELEKIHLPLIAAMKVAIKKTEAAIIKKIQANDLTKKQYSLLLSIPCIGPVTAAYLIACTNAFTTCSSGKQLACYCGVVPFEYQSGISIKGKHHVHKMANKNLKALLHLCAISAIKYVQEIKDYFNRKVEEGKHKMSVINAIRNKLVLRAFAVIKNDKPFVDNRSSLC

SEQ ID NO: 512189 - protein, 334 aa, unidentified
MPYTHFVGIDIAATSATVSWRTAEQPALLPWQIAQQPAAYARLAQQLSALAAPADTLVVMEATSTDWMALALALHQHGFAVSVVNPSQPYHFARLRLQRTKTDAVDARLLADFAYHFQPACWTPPPPVLEQLRQSLALRDDLLGIRTQQRNRLHALQHNPQADLFLVTLVQQQLAQLQYQLDELTAHLTALLHGDHPWAEAIHHLLSIPGIGVISAAWIVVATHAFARCATPEQAVAFAGLAPHARDSGTSVRGQRSVGHSGHKALRDCLYMAAGVAARFNPLLRPLYERLLARGKAKKVARIAVARKLLQLAWALVVKQQDFDPHYAQSRLAA

SEQ ID NO: 512190 - protein, 354 aa, unidentified
MSQIPNSAIAVIGIDIGKNSFHVVGHDARGAIVLRQKWSRGQVEVRLANIPPCLIGMEACVGAHHLSRKLASLGHDARLMPAKYVRPYSKGQKNDFNDAEAIAEAVQRPTMKFVATKTAEQLDLQALHRVRERLVSQRTGIINQIRAFMLERGIAVRQGIGFLRTELPTILATRTDALSPRMLRVIEELAGDWRRLDQRIDGLSREIEALARQDQACSRLMTVPGIGPIISSAMVAAIGTGDVFSKGRDFGAWLGLVPKQISTGDRTILGKISRRGNRYLRVLFVQAAWVVLVRIKDWERYGLKSWIEAAKRRLHHNVLAIALANKLARIAWAVLAKGRAFELTRTDDAGVRPA

SEQ ID NO: 512191 - protein, 459 aa, unidentified
MKQRRKKQKKQPKSFSIINPDAAGIDIGSAEHWVAVPADRDQHPVRKFKCFTADLHNMADWLNKCGIKTIAMESTGVYWIPAFQILESRGFEVKLVNAKHVKNVPGRKTDVLDCQWLQRLHCFGLLSGSFRPENSICVLRSYWRHRDNLIRYAAGHVQHMQKALTEMNIQLHKVISDIAGLTGMRIIRAILEGERDTVKLANMKHGRIRSSTNEIAKSLEGDYRSEHLFALKQAVELYDFYQKQISACDQQIEDYLIQFDSKLDLDAHPIPPTKRKHRKPQGNEPHFDLRTHLYRITGVDFTQIDGLNALSVQNIISEVGLDPGAFPTVKHFTSWLGLCPNNRITGGHIKSSNTRKVVNRAATAFRIAAQSLSTSLSALGAYYRRMRSRLGAPKAVTATAHKLARIFYHLWKTGDQYKDIGIDYYEQKYKERILKNMKRKAKKLGYIIALAPATNENVS

SEQ ID NO: 512192 - protein, 348 aa, unidentified
MYPFYLGIDLHLKRTYVVLIDTEGEVIDQRRLLNTEIPEYLNQHVPHETFAVLEATRNWPFMYDLLSDHVKRVELAHPKEVKAIANAAVKTDRIDASVLAHLARLNYLPTAYAAPKEYRDLRLYTRHRSWLIKHRTQAKNRVQAVLASYNLISPVRDLFGVNGRAFLQEVTQDLRPAARWVIADNLALIDKLNEQINDLERNIPLSKEQAKNIKLLMSMPGVGKVSAMTILAEIGQIWRFKSAKSLCNWAGLTPRVRKSDAIVRHGKISKQGSAYLRSAMGQAAMVASRFSPRWYRVHERLEKRCGKRGAKVAVARRLLTVIYYMLKDNKPYLEDYTREPEKLQGAWT

SEQ ID NO: 512193 - protein, 348 aa, unidentified
MDHIGIDVHKRESQIYILAEGGEVIEHRIRTEGERFAAVLGARPRARLLIEASTDSEWVARCLEALGHEVIVADPNFAPMYATRSRKVKTDRRDARALAEACLLGAYRPAHRLSDPQRHVRGRLGVRDALVHTRTRYISVIRALLRQQGYRVPSGSAGSFVDRVQGLPLPGRLRSVVAPLLAVMRPLNQQLAYSDATIEHLAVQDPRVPRLRSVPGVGPVTAAAFLAAVDDAQRFHHAHQLEAYLGLVPREYSSGETQRRGPITKAGHSRPRWLLMQAARSILRCQPPAAEALWTWALRIATRRGKHVAVVALARRLAGILYALLRDGTVYAPRPPAALPDSVAALHA

SEQ ID NO: 512194 - protein, 409 aa, unidentified
MAVSACPVTSSTVVVAVDVGKTEFAFSVTDVTRALLLKPRTGCPMTGSVLRQVVADIAAVLPTGAAVKVGIEAAGHYHQPLLTAGSWPAGWELLELNPGHVTEQRRVLGKRTIKTDVVDLQAMTELLLAGRGAPVRDRSLVLTELTAWAAHRTSRVRLRTATKNQLLGQLDRTFPGLTLALPDVLGTKVGRLVAAEFADPARLASLGVSRFIRFGATRGLQIREPVADRLVRAAKDALPTRDAAVARAVLAADLVLLTDLDEQVEHAAIQLATLIPLSPFAPLLTVPGWAAVRVGNYGGALGDPARFDNYRQIYRTAGLNPIQYESAGKRRDSVISREGSVELRRALIDLGVGLWLNDPAAKARGRDLRARGKKGLVIACAMAHRANRIAFALVRDQAPYDPSRWNREV

SEQ ID NO: 512195 - protein, 313 aa, unidentified
MSQNNTTILYIGLDVAKLSLQLHLAGRFHLLANDAKGHTKLLKHLSGYPAAHVVCEATGGYEQAVVRALQSADVPVSIVEAGRVRYFARAQGQRAKTDPIDAAVLSEYGTTFKPAATAPASPQQQQLAELAQRRRQLIQLLVSERNHAEHYTDSFRVRQSRQLAKALEKQITQCDEAITTLIAQDTELARKAERLKAIPGVGPVVAATMLAEMPELGKLTTQTAAALAGVAPYNRDSGGQNGVRHTNGGRAAVRCALYMATLSAVRHDRILKEFYLRLRAAGKKPLVAMTACMRKLVILMNRLLKNYDFQLAN

SEQ ID NO: 512196 - protein, 315 aa, unidentified
MNPLFLGVDVSKDRLDAATLHSAAKRQFANDPDGVAQLVEWARQLGPERIVFESTGCYQKRAVGALLAASLPAVVVNARQVRDFAKGLGVLAKTDAIDAAILARFGQVVPTTVRPLPLPQIQEFQAVYDRRSQLVRMLAVEKNHRHAAGDSAKVLKNINGHIAYLEKQIQALEDQMDRFVDSCEAFRAKDEVLQSIPGVGPQVSRTLLAYLPELGQGTRQQITALVSLAPYNDDSGPTSHVRHIRGGRGKVRTGLYQAAVVAIRHCPEMKEFYGGLKARGKASKLALIAVARKLLVLANALVRSMTPYQTRPNSV

SEQ ID NO: 512197 - protein, 367 aa, unidentified
MKKVSTAVAKPMRNFSEQKLIVGLDLGDRSSWYCVLDEAGTVLLEQRLSTTPKAMREVFGTMPRSRIALETGMHSPWVSRLLSELGHEVIVAHARNVRLIGESRKKDDRLDAQTLARLARIDPQLLCPVKHRSAKAQADLTVIRARAGLVRARTALVNTARGLAKSYGERLRGCNVRNMNPEKAEGLSLELQTALEPLLAGIESLSERICEYNEQIEHLAQERYPQVALLKQVKGVGTLIALTFLLTLEDAHRFRKSRDVGCYLGLQPGRRNSGQSEPQMHISKQGDPYLRTLLVQGAQHILGPFGADSDLRRWGLKLAERGGRNGKKRAIIATARKLAVLLHHLWVSGEVYEPLHNSPQRPLAIAA

SEQ ID NO: 512198 - protein, 496 aa, unidentified
MKAKACKAKAKHSHSSKRGVKIAARRGAEGMEIVNPHAGGIDCGAQEHYVAVPPQSVEPGEPVVRCFSAFTEGLDALVEWLKACGVTTVAIESTGVYWIALCQKLEAAGIEVYLVNARHVRHVPGRKTDVKDCQWLQRLHSFGLLSASFRPEDMICRLRSLQRHRLNLVWTAGAEIQHMQKALQQMNLHLHHVVSDITGVSGLRIIEAILAGQRDAVQLAKLRDHRVYKSTLAQMQAALVGDYRPEHLFVLGQSLQAYRFYQARTQECDLEIERQLQQLAQRFESPSALGAELSQPEALDEADAPSQNPQPAKRKVKRKPQANEPKIDLADYLRRICGVDLTQVIGLNVLSVLLIVSEIGVDMSKWRSAKAFSAWLGLCPRNKISGRKVLDTRTCKVISRVATTLRLAAQSVGRTDTALGIFYRRKKGHLGPAKATTATARKLACLVYHLLKYKEQYREPDPNTYQLKVQKSILAKIQKQAATLGFKLLPTALVPA

SEQ ID NO: 512199 - protein, 322 aa, unidentified
MGEQYVGIDLHRRRSVIVRMTPDGEVLETVRIDNDPVALSLELAKAGPDPEVVLEATYGWYWAADLLQACGARVHLAHPLGVKMFGYQRVKTDARDSTNLAELLRMHRLPKAWLAPPEVRELRELVRYRAKLVALRSGLKAQVHAVLAKQGVRVPMSDLFGVAGTRLLDQLRLERAYALRVASLRRLLAAYDQEIAMLGREIGQALAGDVGYRAIQVIPGVGPVLAAVFVAEIGDVHRFAGAPQLCSWAGLTPRHRESDTTVRRGPITKQGPRLVRWAAVEATQRLPAASKQAADFHLLRLVYYGLRDGQVRCLAPAPREAM

SEQ ID NO: 512200 - protein, 321 aa, unidentified
MNYVGIDVSKATFVVAYSSAKSSETKTFENTTKGVHKFILTITPEDTHCVMEATGNYSMLLVYLLSKAGITVSMENPLKIKNFARVMLSVVKTDEIDARMIAMYGEKMNPAPFKLRSDSLMVLKQKRTVLRQLKKQLNANTNLQESMEALPFIDSVCKKILDKTVKFLMKQIKEMEEELFSLANIEYRKQMDLLTSIKGIGVTLATALIVATGGFTYFDNAKQLTRYLGLSPTYQQSGTSVNLKGHINRNGDSYLRSQLYVAAFSSLRCNTECKACFDRLRANGKPGKVAVIAVANKLVRQAFAVVTQGKEYVDGFISAKK

SEQ ID NO: 512201 - protein, 336 aa, unidentified
MKYSGIDLHSNNSVVTVTDEEDRVMAEKRLPNDLATILGFLLPWRDELVGVVVESTYNWYWLVDGLQEAGYRVHLAHCSAIKKYEGLKHSGDEADARHLAHLLRLGILPTGTILPREQRALRDLGRKRMQLVRSRTQHILAVENITARERGARISSEQVKRLSVETIDQMPVPEDVALAVKANVAVIHTLSVQIDLLEKRLQKAVPRTEYDLVTTIPGIGRILATTILLETGPIDRFASPGNFASYARCVDSQHTSNGKKKGKGNTKNGNKYLSWAFIEAAHFAMRYCAEAKRFYERKKSRTNNVVAIKALAHKLARACFHMLKERKPFDVTRCFA

SEQ ID NO: 512202 - protein, 344 aa, unidentified
MDHFAGLDVSVKETSICIVDDAGKIVREVKVASEPEALLAVLKNPAYHFKRIGLEAGPLSQWLFSALAEAGLPVICVETRHMQAVLKAQINKTDRNDARGIAQMMRAGLYRPVHVKTIRSQKLRMLLTHRKLLQSKAIAIENDLRGTLRNFGLKVGMVGKVKFEARIRELVENLPDLAVLVEPMLIVRRVLREQIVILHRRLLAIVRDDEVCRRLMTTPGVGPVVALTYRATVDVPARFRKSKAVGAVFGLTCAKYQSGEVDRNGRISRCGDEMMRVMLYEAAQSMLRSKKWSWLKAWAMQIARRRGMKKAIVALARRLAVIMHRIWVDGTEFRWTREQAAAAA

SEQ ID NO: 512203 - protein, 424 aa, unidentified
MPAEPSTQSGHFDGRDSVTAQPQAVWIGIDIGKTHHQAAAIDNTGRQLWSVRVHNDQHSIERLLDKARTTDGSPVIRWAVDLTSPESALLLAVLVAADQTVTYVPGRVVNRMTGAFPGEGKTDAKDAVVIAETARLRRDLTTITTPDDVVAELGLLTAYRADLMGEWVSRINRLRALLLRIFPELERAFDYTTRTGLALLTRYCTPAAIRTAGTDEIGTHLRELGVRRPTIPGMVTKALAAAEAQTVAVQAESTTEQLVIRLAEQLLDLDHEIKALDKQIVERLRSHHQAHIIESVPGIGARLGAELLAITAGDLAAFGTAAKLAAYAGLAPVPNDSGTRTGILHRPKRYHRRLRHVLFMAAFSSAQREGPSREFYQRKRAEHQRHVQATIALARRLVDVLWALLRDQREWRPSGPLGVASVAA

SEQ ID NO: 512204 - protein, 426 aa, unidentified
MSKVGKNHCAIINLCTKGVSCMEYNAVGIDVSKGKSMVCIERPMGEIVFSPFEIKHTKSDVDRLIKRIQGLNGDTKIVMESTGRYPLPLLTRLTDAGLFVSMVNAKLIKEYNPDNSLRKVKSDKADAKKITAYTLDKWLLLKQYGNMDKLREQLKTINRQFDFYMNQRISLQNNLIAMLDLTFPGVSNYFSSPIKQDGHCKWVDFAYTYWHADCVSGKSFKSFSEHYQNWCGKHGYYFSKEKATSLYNNAKELITILPKDSATKQLIRQAIDVFNTMSEAVERLRKQMDQIASQLPEYPIVMEMTGVGHTLGPQLMAEIGDIERFTKRSAITAFAGVDPGVNQSGSYNQQSVHTSKHGSPELRKTLFQIMQILIQLAPEEDLVYKFMQKKRTEGKPYYVYMTAGANKFLRIYYGKVKAYLSGLKNQ

SEQ ID NO: 512205 - protein, 425 aa, unidentified
MNYKQNEKINQVKESTLVVGIDIGSTTQYARAFDWRGIELGKVFPFSNSREGFESFKAWMQHLQDKYKKLDAIVGIEPTGHYWFDLGAYLEDEGILLVMVNPYAVKQTKELDDNSQSKNDRKDPKVIAKLVTEGRYSAPYTPDGVYADLRIMVANRKRLIREMTQIKNRFARWFAIYFPEYTDVFGDYEAQSSMLLLKKVCTPEAIVELGAEKINQIWRDAKLRAVGMKRATTLCETAKRSIGLKKGSSAAQYEMKLLLEDYEYKKAQLDAVMEEIEKLCGKIPESEQMLAIKGIGVITVAGFLAEVGDVRRFESPRQIQKLAGLSLRENSSGKHKGQTTISKRGRSKLRAVLFNAAIPLIAKNPEFKSLHEYYTTRANNPLKKKQSVIAISCKLIRVFYAILANGVTYDSQKLLSDIHRQPQVA

SEQ ID NO: 512206 - protein, 436 aa, unidentified
MRGCRCSMIMGFTKPIEHFNLQRKKVITMNTLYVGIDVSSKSNVVYLMLPNGDKHSNFSVANSHEGSTQLVKRILSALTSHSLDTVLIGLEATSIYGYNLVYFLREDATLAPFNRKIHVLNPKQVKKFHDAYNDLPKNDYVDSFVIADCLRFGRINKEVYMGDYRYKALQNLTRARFFAVQNLVKEKQRFMNVLFKKYSTMTQEKVFSDTFSTTALAVYDEFESAEALANMDLHELTDFIIEKGKNRFPDPDAVAKAIQKAARSSYRLPKTVNDSVNQVLSISITSMKALESQIKEFDKAIKAQMELLPNVLISIPGIGPVYSAGIMAEIGDINRFNSQAALAKYAGLAWKQHQSGGFESEVTRLIPSGNRFLKYYLCEAAFSLVRCDKEYSDFYRLKYKEVNRCQHKRALALTARKFVRLVFRLLKDNRLYCPAK

SEQ ID NO: 512207 - protein, 384 aa, unidentified
MQKPNDLNQSGIVLKQDSTLIAVIEMSLRSWLVAGIVPGVERQPLKKLAVDESALLKLLSRWRGEAEKAGRRVERITVAFEAGRDGFWLARWLRARGIEAHVIHASSVAVSREHRRAKTDRLDTELLKRAFLGWLRGERDHCKMVAIPTTKDEDAKRPNRERLSLVGEHTRIVNRMKAALIRLGIRGFNPKLKKAAGRLEDLRTPEGEPIPPNTLAELHRDMERRRLVSDQIRQIEEARLERMEQVPGDGPHAMVRLIARVIGVGIETADMLVHEVLSRKLRDRRAVARYAGLTGAPDESGSKRREKGLAKAGNARVRGGMIQLAWRFLLFQKDSALAQWYRTRTEGGRNRKTIIVALARKLLIALWRLVTTGEVPAGVVLRAA

SEQ ID NO: 512208 - protein, 428 aa, unidentified
MADVANATPTYNLVAIDIARYWNAVLIETPAGRQHRFRMANTAADIDRLLKFLHGLQGACRVALEPTGDYHRSIAYRLLVEAFEVVGINSVAQARYREAMFNSWDKNDPKDATVILEMLRRGAFQRYVDPMLAGSHDLQELAKTYYQVSRARTKVQHSLINHGLPLYFPEMHRYWATTRNEWFVRFLLQFPTPAHVRLLTRDQFVEAAWDVVGRKVDKRAKLEEMWEMAGATAALPHAPDSLAVETFRVTLRRYQDLNTLRAELEGRAEQALASEPDFVHLKTLPGIGSVLAMTILAEGGNLRRFGHHRQFLKYCGFDLAKTQSGTQRGREQLSKRGNARLRLAFWLAAVAAVHMRENSFRAKYERYIRAAPDDADLRRKALTAVAAKMARVAYSMIKRNQPYRQFFEQSLPSGSIPLSVAVGALATP

SEQ ID NO: 512209 - protein, 344 aa, unidentified
MSQQHYVGLDVSVKETAICIVDSHGKVVHRATVESHPQVIGKHLIGLDHSYARVGLEAGPLSPWLYAGLVEAGLPAICVETRHMHAALSARINKTDRNDAMGIAQMMRVGLFKPVHVKTPASQQRRLLLTSRKLLQRKAYDIESDLRGQLRNFGLKVGVVGAAGFEQRVRDLVLDLPFVADVVLPLLEARSALRTQLAKLHKMLLDQVRTDPICRRLMTAPGVGPVVALTYRTCVDNPARFGRSHCVGAHYGLTPRLYQSGETMRVGRVSKCGDTMMRAALYEAALVLLTSPRGRWSWLKVWGLAVAKRRGMQKALVAVARKLAIVLHRMWRDETDFRWSAAAA

SEQ ID NO: 512210 - protein, 317 aa, unidentified
MNTLPQPVPAVHLGVDVAKSELVVDFAGSIRSFANDTKGIAALLKVAARTTPAPHLVCEATAGYERPLAAAAVLAGIPVSVVQPQRVRSFARSLGRLAKSDPLDAGMLSRFGAHATPIALASKDAIRQQLDELVRTRAELIDSLQREVNRAEHHQLPVIARIHKDLVARYRRHIAAIDANAEKLVASSVELSKADELLREVAGVGPQTSRVLLALLPELGRTGRRGIAALAGLAPYDRDSGKTKGKRFIQGGRSRVRRVLHMAALVAARCNPVLKVVYLRLREAGKPFKVALVAVARKLLIHLNSIMEKYYSNPLAA

SEQ ID NO: 512211 - protein, 325 aa, unidentified
MEKLYGGIDIHKEKLAGCIMDRDGNITREHRFPSSKKAVERFLCDIPSSGITIAIEACGMWRGTYKILTDMGYEVKLANPKKTHDIACKKKTDRIDAKILADLLRTKYLPEVWIPDEQTLKFRDLARHKSNLTRLKTQVQCKIKSYLLRKGVKYGKLWNEKTLSTLAKEDQDIQNLINVYNSLKKEEKEIMKRIKQIARNRKETTLLMSMPGIAEFSSLMILAEIGDIQRFRSPKELVSYAGLCRGIYQSASTERSVHNTAVNKWLKWIIYECSGRAIMLDQRFQQYFYPIQKRKGANTARRATARKMLTIIWYMLTNKETYRAS

SEQ ID NO: 512212 - protein, 402 aa, unidentified
MEIYCGIDWSERHHDVAVVDRAGVLLGRRRITDDLAGFTDLTALLAEHTGDEFTAVDVAIETDRGLLVAALRAAGHRVYAINPKAVDRYRDRHAVSGAKSDPGDALVLAHLLRTDRDHHRPLAADTELGQAVSVLARAHQDMVWARQQDTNRLRSLLREFFPAALTAFADLTTKTALTVLVAAPTPAAAAALTRANLIALLHAAGRGTRPADAARLVEVFGQPQLHQPPAVEDAMGEAVRAIVRTVAATSESIKDLEKALNASFEQHPDAEILDSLPGLGLVLGARVLSEFGDDPNRFTHAASRRAYAGTAPITRASGRHRAVLARHIRNRRLADACYLWAFAALTKSAGARAFYDRRRAAGDHHNAALRRLGSKLIGQLHHCLHQRQPYNELLAWTQPEPA

SEQ ID NO: 512213 - protein, 490 aa, unidentified
MGKGSGQGSTEPEFTYRRVLRLIYSVGIDLHQGSHRARCLDERAQLCDGFTFQTTAEGLAKLEEHIFLNGANPIIVLEPAGLPWLMVAVYLRSRHPSCRLVKARMQKVAALRRYLRGPVKSDRLDALTLAKMPFIDPEQLIEIYLPPAKIHALQRLTRQRKRMESDVSGRKIRISAILDGYLPGVRRAFGEAWSSSFRAFLRGRINPFSVVRDGEEALHGFLSKAGPRSKVQARHVFLACRNIAHVCQKSMTAGTLNEEFFIDLQDEVARELRLLEASEAESESLARRIAELYQKLHHSDNLSTIPGVGPHTAPIFLSSVGDPARFRNQSAFANWEGVVPGARQSSNVEAKGLRMTKAGPSIMRMALYQAGEIGRRNDPHLAAVYYREMVYHGKNHRQAMGAVMSHLGARVLAVLKENRPYEIRDLEGKSIDKHEAKRLILSQYHVSEEVRRQRRRRNTKVNRRRETATVSIHEAAKAPQTVQVMSVSRK

SEQ ID NO: 512214 - protein, 342 aa, unidentified
MYYIGLDVHKKTISYCVKDASGQVHQEGQVGATRWELDGWMKTLPQPWTVAMEATIFTGWIYDHLLPHAQQVKVAHPLMLRAIAAAKKKNDRIDAGKIADCLRCDFLPECHMASTQIRDRRRTLRYRHLLVRQMVQMKNRISGLLMETGVSHNKRRLHKVGYFRELLASNEEVNESIRPLLRVSRDTIVRLQKTEYALVSSLQRDPLLAERIKRLRTVPGVGPITALTWALEMGEVSRFPSIREAISYCGLCGDEKSSADKVMRTPLSKQRNKHIQRVLVEAAKLAPRQDHDLALVYEREKQKGNANRATLAVARKMVAYLLAVDRGQRDFVAFADPQSAAA

SEQ ID NO: 512215 - protein, 375 aa, unidentified
MSDHSEAFVAFDTSKLRNSVAIAEAGRAGEVRFLGEIENSAAATAKLVRKLAGKYQRLTFCYEAGPTGYGLYRQIKSLGYECLVVAPSLIPRKPGDRVKTNRRDALGAVKLLRAGELTAVWVPDPRHEAMRDLTRARGAAVEDLRRKRQQVSAFLLRQGRHYSDGKKTWTKAHMNWLASQKLEHPEQRIAFEEMLLAVRQAQERIERLEQAIRAAVPDWSLAAMVTALMAMRGIDLVSATALLGEIGDLSRFQTAPELMAYLGLVPSEASTGDTVKHGPITKAGNRRARRMLVECAWSYQHPPRVGKEKQEKVAAAPRAVREIAWKAQCRLNRRYRALIRRGKLKTVAVTAVARELAGFIWAIGREVTTADAAAR

SEQ ID NO: 512216 - protein, 358 aa, unidentified
MKSTIPTILAGVDTHSTTHTLALLDEHGRVTDTETFNADPKGYERLIAMIGDPALCLGVGVEGTNSYGAALSRRLAAAGYTVHEVLRPKRSVRRSDGKSDPIDAIAAARSVLAGDGISTPKASDGWCEALRHLIAAREQLVTSMTAISNCLAELLTTAPEGIRERYRSLPSKRRIGKLAACRPSGGIVERNVLSSLKTLASSWRELHDRADVLECRMRQILEENARPLLDVYCMGTMSAAQLAVIGGDNPERIRSEAAFAKLCGACPLPASSGKTNRHRLNRSGNRQGNRALYNVALVRMSHHQPTKDYVVRKTKEGKGKLEIMRCLKRYIAREAYRALIAIRNGEAGREPAVERGAG

SEQ ID NO: 512217 - protein, 347 aa, unidentified
MRFYTKQHKYYCGIDLHAKKMYLCILDGTGEIVLHRNIKTDRDVFLKTIEPFTEDLVVAVECMFTWYWIADLCTQEGIPFVLGHALYMKAIHGGKAKNDKIDSHKIGALLRGGMIPMAYVYPAKMRATRDLLRRRNHLMRKRAELYAHIQNTRSQYNLPEFLGRIAKPQNREGIVERFQDPSVQKMMDTDLAVIEAYDPIIAKMERDIIKMADQHDPVAYALLKSIPGIGRILGLVILYEIEDIHRFPTVQDFVSYCRLVKSAKESNGKKYGPSGKKIGNAHLKWAFSEAAALFLKGNEPGKKYLDRLANKHNKGKALSILAHKMGRAVYFMLKNKKPFEQNKFLGL

SEQ ID NO: 512218 - protein, 411 aa, unidentified
MEAAVITAVGIDVSKSKSTVAVRRPGGEIALRPFEVHHTNSDLKKLASTLKKLGGDIRIVMEHTSTYWRPIALTLKEAGFFVSVVNAMLIHDFSDNTIRKLKTDRADALKIANYALTFWDTLPPFNNEEETRLLLKMQSRANERITATATALRNGLIALADQTFPGVNIAFDPNTKNANGHEKWVDFFLRYWHKDCVCQYSMEAFTESYRGWCKRKNYKFRTDTAHKIYLLAQEGVATLPKCESTKMLITQACKSLNAVCEAKQSTQLEMQRLAAMLPEYEVVMQMEGAGPITGPALMAEIGDVRRFKNKKALVAFAGIDAPPFQSGAFESKSRHVSKRGSPHLRRTIFIVSNIILTRSNPENAVYCFMDKKRSEGKHYYVYTVAGSAKFLRVYYARVTEFLRSQPSSDAC

SEQ ID NO: 512219 - protein, 404 aa, unidentified
MKQLLYAGIDWATKTHAVGVVDDHGGIRARFQVPNTGKGFGGLIRRLTKLQVAGVAIERPDGPLVEAMLDAGLRVVVITPRQVKALRSRYRAAGTKSDAADALLLADVLRTDGHRLAPLCPDSDATQVLRALSRTRKDLQKARVALCNQLTAQLERCFPGAVGLFADLHSATAIAFLRRYPTSQAATGLTPATLAAFLRRIHYSGRTPIAVLWERIRTAPAAATSPDQAAGRAVCVTALLDAIQACHGRERELEAEIIERLEVHADQAVFTSLPKAGRGIRAAALLSEIGDVRTRFPDEEALAALAGVAPVTRASGKLRSVGFRWACDKKLRNAVIDFADDSRHASPWAAKVYADALARTRRHPQAVRILARAWIRVIWRIWQDHTSYDPAKHGGAVRHLAAQA

SEQ ID NO: 512220 - protein, 369 aa, unidentified
MNTVMSTAKKHKHFVGMDVSDRKLHLCILDESGDIVSESSISNDLESIQELSTLWTIPKDVLIAMETGTYSPWLSHFFKAKGFDVLVGNPRRIRAIWQSDHKTDRRDAHLLARIARFNRSLLYPVTHRSLEAHKDLAVLKARDLLVKGRTRLIGSIRGMLKSFGIRLPDCDAAAFHRIVKDDIPNDMRISINPILKSIEKMTEQIKRLEKSLKKLAEKKYPETIKLQQINGVGPITAMAFVLTIESPDRFLKSRDVGPFLGLVPKKDSSGNLDKELSISKAGNKLLRRLLVGASHYILGPFGTDCDLKQFGEKLLKRGGAPKVVKRKTVVAVSRKLAVKMHAVWKSDGDYNPFMEKPRQKKKNQKPEAA

SEQ ID NO: 512221 - protein, 351 aa, unidentified
MVVVGVDAHKRTHTLVVIDEAGRRLAEMTVAATPDGHLEAVTWARRWPEHVFALEDCRHLTRRFERDLLVAGEAAVRVPTRLMAGARQGGRQQGKSDPIDALAVARAALREPNLPVVRLDGEARDLRLLVDHRDDLVKERTQVQSRLRWHLHELFPGLEIAPRALRRYHVMNEVEERLEGIPGTVARIARELLIRCRELTVRANELEREITVLVRRLAPSLLTLPGCGVLSAAKLVGESAGASRFRSRAAFARWNGTAPIPVWSGNSTRHRLTRGGNRQINAALHRIAVTQLRGVGTIGREYVERRMSSGDTKTEALRLLRRRLSDEVFRRLLADETVHSTGSSDAFLAAA

SEQ ID NO: 512222 - protein, 341 aa, unidentified
MTLVGCDLHSRKQQVAVLDTTTGEVLEQELAHDGDTVERFYRALRPPVTIGIETTGYTQWFHTLMHRLGHTVVVGEAAKIRAMVVRKTKTDRRDARHLLDLLRHDRFPSVWIPDGDTRDRRTLVAHRVRLVRMRTMVKNGLQAIALSQRLALRSKLWTRHGLAQLQALRLPAHTARRRDDGLELLAWLTARIDQLDEQIATIANNDPRAQLLLTHPGIGPLTALTTVLVLGPIARFPNSQHVVSYVGLAPAVDASADKQRLGKITKQGNALLRWVLGQAAPLAARADDDLRRRYFSVLHRRGRPKARVALARKHPGRLYVMLRDHIDYAEFCRRGQTPHPA

SEQ ID NO: 512223 - protein, 376 aa, unidentified
MKKIVICGADVHDNSITARIAVNKDAPETRVFRYTAKGRNSLFKYLKFVARNNGTELIVMAYEASSLGFGLCDEARDAGIECYVLAPTKMPQSEEQGKRKTDARDALKILEQLRGYLLAGNELAKVWIPDPQTRDDREVVRMRLEVADKLTSVRTQVRTLLKRNKVEKSKEIGKAGTVSDRQWLQRLTEPGHELALGGRVALASLLRQIAALEAEIQKLDEAVKTLAATDRYRAAVEVLDTQLTGVAVLTATVFLTELGDMRRFKNRKKVGAFLGLVPSSHESGERNDRKGHIARQGPARVRKVLCQAAWARIAFDKEEHKVHARIVEKNPKKKKIATVACMRRLGVRMWHLALEAQLQAGVYLDKELPQAQLRAG

SEQ ID NO: 512224 - protein, 404 aa, unidentified
MKGPIVSIDVSKGKSDYQAFKDLNVKFTDVRSIKHTKEGFDKIVNLVKDMERKLETEVCVVYEATGVYHRVLKKVLEDNNIKQFIINPLLSAKTRKNDSLRSPKTDKLDPKSIAKTYYNQSLHSSYKPQTTYHELRELSRYYEDILVHIRKDKVAFRAQLDIVFPGYDTLFDDLYGAVSLTVIEKYPHPELLQKKSINTVSKIIQKKTRHRQAVSNKMAFKAIEYSKTIYSGCGKDDIDVLILERLIKKLNEDLNEAERTINEMIRLVQELPDFIIIKSIPGIGDNLAARIIAELGDMTRFKKKNELVAYAGLDPRIYESGQKDGAHMHITKKGNKRLRCLLYLAVTCSIRLKRDDNSIKDFYIKKMQQSNPMCSKAAKTACASKLVRIIYSMCKTGELYQYNK

SEQ ID NO: 512225 - protein, 398 aa, unidentified
MESQLRVGIDVGCHAHRVGIADPAGSILEEFDISHSKAGFQEFFRRVEERRAKLGFPVAVAMEGYNGYARPLDRLVQEKGYRLFNVNNLKLARFKEVFPGAAKTDPIDARKILELFHLREQLPMAKDVLQEVLPAPEVNEKLKRISRRRRQLVTEKLRVLNRMQADLQAVSPELLAATHDADNLWFLRFLSFRDDLRQLAKLRRATIRQIPSVGAKYATVIEEWQAKATFSDEVEYVGPMIVEDAKRILELHQQIHTLDEALAKLAAESEIARRLSTIPGFGKTSIAELAGEIGTLSRFSSEASLALYVGMSPLTVQSGQTSRARAPRQVNTRCRTAMMTTVARHIGCVPQSRVYYDRKRAQGKTHNQAVRALGRHMIRVIWAMLRDGRDYEPRGDTP

SEQ ID NO: 512226 - protein, 392 aa, unidentified
MKVTYQTCCGVDVHKSFLVATIVKTTGGIEPSYQKKRFSTFNNSILEFKQWLLDNDCHDVCMESTGKYWVPVFNLLEDEINVVIANPKWVKAVKGNKDDTKDSKWIGDLFRLGLVKGSYIPCKKIRILREYTRYRYKLVSCRSSEKNRYQNALTVCNVALDSVVSDIFGKSSTSIIDYLLKQSGTSVNHEEIASKLLRSLKSKEDAVIESVEGYQMTDAQKYRMRLVRAHMDYITAEINDVDKMIENMISSNPDFENAIQFLCTIPGVKRDSAITIISEIGTDMSQFSSSKRLCCWAGLTPGSNESAGKKKSVRITRAGVYLKPALVQCAHAAVKSDKSPYYKKKYESLVKRRGKKRAIIAIARMIFLLPSTRCCLLVSSGIRAIFTKSICL

SEQ ID NO: 512227 - protein, 440 aa, unidentified
MAMRKQTDTVFPNAAGIDVGASSHWVAVPPEAVEESVREFGVMTDDLHGLADWLLACEVEIVALESTGVYWIPLFEILEQRGLQVWLVDARQMKYVPGRKSDVQDCQWLQRLMSYGLLRAAWRPAGEVCELRAIARLRETLLAEQASWVQRMQKALVQMNIQLTEVLSDVMGMSGQAIIRDIVAGERNPEVLARHRHRRVKASTEEVIRALTGNWRQEHLFVLSQALSMYDDIARHLRECDAQMQVLLGQRAQCTINVGAVPRAGSKARAAFDVRQMLANWAGVDLTRINGLEVSSVMKILTEIGPDLSRFANVKHFCSWLGLCPGTKVSGGKVLSAGTKRSANRVRQALKMAAMTLSHSNSALGAFYRRLCSRMDKPKANTATAHKLARMVYFMLTRGEAFVDQGQQRYEELQRERSIAALKRRATALGFQINPVGAAA

SEQ ID NO: 512228 - protein, 348 aa, unidentified
MTLVGCDLHSRKQQVAVLDTTTGEVLEQELVHEGDAVERFYRALRPPVTIGIETTGYPQWFHALMHRLGHTVLVGEAAKIRAMVVRKIKTDRRDARHLLELLKHDRFPTVWIPDPDTRDLRALVAHRVRLVRMRTAVKNGLQAIALGHRLALRSKLWTERGRAALKGLVLPRHTTRRRDDNLDLLMWLTARIDDLDAQIAAAAAADPRAALLLTHPGVGPLTALATVLVLGPIARFPDSKHVVSYIGLAPAINASADKQHLGKITKQGNALLRWVLAQAAPLAARADEDLRRRYFAVLSRRGRPKAKVALARKLLVRLFVMLRDRIDYDEFCRRGQLRRTARVPVAAM

SEQ ID NO: 512229 - protein, 290 aa, unidentified
MNIVTVGIDLAKNVFVLHGVDQYVKAVFIKPKVARSQPLEMIAHLPPCLIGMEACSGAHYWAREFSRFGHTVKLMAPKFVAPYRMSGKRGKNDAADAAAICEAVTRPNMRFVPVKDIDQQAILCLHRTRQGFIEERTALYNRLRGLISEFGIVLPQKVERLRLMQLPGIGPTTASALVASLGGGHDFKNGRQLAAWAGLVPGQYSSGSKARLGRITKAGDAYLRSLLVMGARSVLAGLGGKQDRFSRWARNRVERRGYWKAAVAIAAKNLRLAWAVLHYGDDFRRIDEAA

SEQ ID NO: 512230 - protein, 346 aa, unidentified
MEHYVGIDVSLELSSLCVLDLTGKVIREAKVASEPEALVAFLRSLDLAIARVGLEAGPLSQWLYDGLHEAGLAPVLLETRHVKAALSAMAVKTDRRDARGIAQLLRMGWYRPVHRKSVPSQEIRALLGARKQLQIKVIDLEQTVRGLLRGFGLKVGEVSRGKLPARIRELAAGHVMLEKIVEPLLVAREAMWREFAKLHREVLLIVKEDQVCRRLMTVPGVGALVSLTYRAGVDDPGRFAKSKSVGAFFGLTPTRYQSGETDVTGGITRVGDASVRTALHDAANALLTRAHRFSTLKRWALDVAKRRGMRRAKVALARKLATVLHRMWADGTEFAWGKDPAGAAAA

SEQ ID NO: 512231 - protein, 381 aa, unidentified
MDQKQATTVKEVTTRFPVLYVAFELGNSTWKVACSDGRKVRQVTVTARDLEQLQRALLRTQAHFGMGEAVAVVSCYEAGRDGFWLHRYLQGQGIDNVVVDSASLEVDRRLRRAKTDRIDAGKLLRMLIRYHGGERQLWRVVRVPSREDEDARHLHRELESLKRERTRQRNRIHGILMQQGLCISNPSKKRFIKDLEALRTWDGQKLPAGMKARIVRAYQQLRLVEDQISALTKEKREQLKEVDNAKMRQVAQLLRLPGIGPVSSWSFVMEFFGWRQFRNRREVAALAGLTPTPYDSGGKLREQGISKAGNRRIRTLAIEIAWAWLRYQPRSKLSQWFSERFAGGGTRMRRIGIVAVARRLLIDLWRYLEYGVIPEGALLTT

SEQ ID NO: 512232 - protein, 400 aa, unidentified
MLSIGIDVSKGKSTVCGMKPGGEIVYAPFEIQHTREGMSELVSLLHNSCEEVRAVLESTGSYHCPVVAALLENGIFVSVVNSLRMKRFCSQSIRKVKTDRIDAMQIALYGSAYWQELQPTRLPEDTYRELQLLARQYYQMTSMLIKAKVDFNAICDQVLPGMQELMSDHAGRHKLSDFVLRYHHTTHILEMGETRFRKDYCKWAEKKGYRNCERMAALIFATAQNGIPVLPNAPSTQIVITEAIRVLHTVEASRDAILTQMQALAKTLPEYSLVREMPCIGDTLAPRLIAEIGDVRRFHSKRALIAYAGIDAPPYQSGKFCANNRHISKRGNRYLRKTGYEVMQSYVMHKPANDPIFTFIEKKRGEGKSGKLAMVAGLNKFLRVYYGKVTELYRSLSAIE

SEQ ID NO: 512233 - protein, 392 aa, unidentified
MYIVGIDIGKNHHEASIVSPEGKQIGRSLRFATTHKGADSLMSFIFKNIGNSPCVFGMEATGHYWYPIYSFLKAKGYTIYVINPIQSDSLRKMYIRQTKNDSIDSFLIAEVIRFGQFGTTSMADENILAMRQLCRYRDSVISSRTEIKLRIGTIMEQIFPEYEKLFSSLWVSTSMGILEKYLTPENIENAPIDELFEIIKDKSHNRLTKAKAISIKEAAADTFGIKIAQDAFSFQLKQLIDRMNFLDKQIEALDIEIMKYYEQFDCYLHTIPGIGIIGAATILAEIGDISRFKNSSALVAFAGIDPTVRQSGEFNSTHNHMSKRGSPYLRHAIFLAATTCSFHNSPLNAYYKKKRDQGKHHLTATGAVARKLTTVIYAVLRDSKPYEPKKFC

SEQ ID NO: 512234 - protein, 405 aa, unidentified
MTKASARTTSARTTAAQAEKAEAKPSPAKAPRRRRGPANIFGADPHKHTLTATVLDCRGGVLGTRSFKVSGEGHRAMEEWALSFGPVERWGIEGASGLGRHTAIYLTGRGHDVRDCSPNRTNERRRARGQGKTDASDSLRIAREAQSDPAMPRAFKRAEGDAGPDETAELLGLWHKARRSVLKSRQHILNEAESLLCELPLEMRELLPATKDVKPRLAALARLERASTLDAPTRLRLELLDGYAKEVAELDAQEKLAVRQLARLTKAAGSTLDELCGLSTRSVAELLVEVGDPRRFAGEGGFARFDGTAPIPASSAEGDGEPVRYRLNRGGNRRVNAVLHIMAVTQLAHDPRARRIFDDARHRGHTKKEAMRVLKRHLSDVVYRRMLADLERRLAAQNTDLKRVA

SEQ ID NO: 512235 - protein, 334 aa, unidentified
MEQITTVGIDLAKNVFSLHGVDAAGKTVLRRTVRRDRLVEAVAALSPCLIGMEACSGAHEWGRRFQQQGHTVKLMAPKFVAPYRKSDKNDGNDAEAVCEAVGRPSMRFVPVKSAEQQALLTMHRVRQGFVVERTALINRLRGLLAEFGVVLPLRSVTVRRQAADAAEVLPELARRAIADLLEQLRLLDGRIDAYDTEIEAQARLSEPARRLMKIRGIGPTTALAIVATVGNAREFKNGRQFAAWIGLVPGQYSTGGKARLGHISKRGDAYLRNLLVQGARSVLQTAAAHPDRLSRWALELQERRGYYRTLVAIANKNARIAWALLAKNEQLHKN

SEQ ID NO: 512236 - protein, 409 aa, unidentified
MTQVNDLSRSLVSFEQNSSVTVVVEMSESSWLVAGQVPGLDRQPLKKLEPDPAALLRLVERWRDEAVRAGRTIKRVALAFGAGRDGFWLARWLRARDIEVHVIHSTSVAVSREHRRAKTDRLETAMLTRVFLGWLRGERGHCGMVVIPTLEEEDARRPSRERESLVDERTRIINRIKAILAWLGIRGFNPKLRKAVERLDALRTPDGVPLPPNTIDELRRDMARLTMIREQIKVIEEARLARLEQAPATGPHAMVRLIVSVVGIGVETADMLVQEVLSRNLRDRRAVARYAGLTGAPDESGSKRREKGLAKTGNARVRRGLIQLAWRFLRFQNDSALAQWYRARTEGPSGTRKTKMIVALARKLLIALWRMVKIGEIPVASRCDSRPEQVCEETKQAGRRTVVFLTGRR

SEQ ID NO: 512237 - protein, 400 aa, unidentified
MHYLGIDWANDKHDLCLLADDGRILSQFVITHDLAGFVTLQDHLKTLSDVRINIERSDGLLVDWLVQQGYNLFITPPHILAHRRPTRVKDDKGDAYLLAYLLRLDDRDCRPYSVQSHTVMHLRQLIRAYDHALGEQRRMSNQLIYSLRQYYPAALNLFTKIYTLIGLAFLERYPTPQHAQALSREELEQFLRGHHYAYPGRIDMIYRNLKTPMPLASIQHGHVEYVKLLIPLLRMVFHHKNALIRQIRTLFNAHPEANWWLRFHGTTGPLTPARMLAWIGDDRSRFPTAESLQAVAGTVPVTRRSGKSKSVEFRTACSHTLRSAVDDLARQSMRHSSWARAYFQQQLDNGHSVPRAYRALGNRWLKIIWTLWQSGEMYDELKHIANRSRKGAVLPLAQAV

SEQ ID NO: 512238 - protein, 412 aa, unidentified
METLVERGCGLDVHQATVVACLLIVSKNGKAHKQIRTFGTTTRELLALREWLVSQDCTHVAMESTGVYWKPVYAILEGEGTFKIVVANAQHVKKVPGRKTDVKDAEWIAELLCHGLLRSSFVPPKPIRELRDLTRYRRKLVESQVAERNRLLKLLESANIKLASVAADVFGLSGQLMLRALIEGKASPQEMAELAKGRMRAKIHELEPALEGKLEEHHRFLLRLQLQRLEAGEKDLAVLEQRIQEKLKPYDAQLTLLDEIPGVDWGVAAAIIAELGVDMSVFPNVLQAASWAGVSPGNHESAGKRKSSRIPKGNVYLKTALVEAATAATKAKGTYLRDKFYRLKARRGYKRAIVAVAHKILVAIYHILSHQVCYNELGDLYLDKLNRHTLTRNLVHRLERLGYTVTLEQKAA

SEQ ID NO: 512239 - protein, 328 aa, unidentified
MMLIGVDYHPSFQTIAFLIEETGEYEERELNHSDGQAEKFYRDLKQRGICVRVGMEATGHSRWFERLLAELGFELWIGDPAEIKAKRVKKQKFDREDARLLLRLLRENNFPQIWVADAENRDLRQLLWHRHRLVQMRTRIMNQLHALAMNEGFCWKKKLFSEKGRAQLEKLALAPWAGRRRQGLLELLDRMNPTIEELTAAVEREARKRPEAMRLMTHPGVGPLTALAYVLIIGTPTRFQRGKQIGTYVGMIPSEDSSAHKQRLGHISKQGNSLLRFLLVEAAQAAARIHPDWRRRYLHLAMRRHKSIAKVAMGRRLAVRLYWMWRNG

SEQ ID NO: 512240 - protein, 385 aa, unidentified
MSTIIYVGMDVHKENYTVCCYSFEKDELQYKQTMLPDYKMVLKYLEQTRRRYAEEVEYVCGYEAGCLGYTLYHQLTDHGVKCVILAPSTMAITNKSGIKTDKRDAGNIAKCLAFHTYSEVHIPTVEDEAVKEFIRMRGDQKKALKINKQQILALVLRQGYRYVDGKNNWTVKHLAWLNSLDLGGVLQETLDEYLITYEYLSNKVERLDKRIEELSNDEMYREKVMKLSCLIGVKAHTALSVIVEIGDFNRFPKAEKLAAYIGLVPGEYSSGGKQTRLGITKAGNSHVRRLLIESSQSYTRGTVGHKSLTIKRRQIGNTPQVIEYADRANERLRRKFYRMTLKNKINRNVAATAIARELACFMWGLMTGNMTKSVDDGKVITEGGK

SEQ ID NO: 512241 - protein, 340 aa, unidentified
MNTSTKFFIGIDVSKPHFDVSLMAVINHQKQAIETGHFDNTHAGMKAFDKWLKKNKVSFDVNTLLVMENTGIYHRLLWSFCSNKNLPIHIGNAAHIKWSFGIARGKNDIIDSMRLCQYAFKESDTLKSTPVLNPILMQLKDLMTARAKLVSQVNSIKTYIKELRSVNDKAIQKLLEQAHRQAIEGIEQSIEDIQVQIKKIITETPTLKTNYDLVITVPGIGYFTAVYLICCTNNFAGKISGKQLACYAGVVPFEHTSGISIKGRNRVHPMANKDLKKMLHMCALSAIQYSQEFKTYYNRKKQEGKHSMSVLNAIRNKIVLRVVAVVNSQNPYVNNNKIAA

SEQ ID NO: 512242 - protein, 376 aa, unidentified
MKKNNTCPKSSKRKKTGRKTRSKTRKESFTIGMDLGDKTSHYYVTDCDGEMVRESTVATTKKGMQQRFSCLPRCRIAIEVGTHSPWVSRLLSSLGHEVIVANARQVKLISASTRKSDRLDAQTLARLARLDPELLRPIRHRSEKAQGDLMQVRVRAALVDTRTGLVNTARGMAKAMGERLPACDADQMGVEKTQGLPAMLVEALRPLLETVEVLTKQIKASDQKLEQLAGSDYPETELLRQVSGVGSLISLTFVLTVEDPSRFRKSRDVGSYVGLRPRRSESGESRPQLGISKEGDVYLRKLLVQGAHCILSHKSPDTDLKRWGLKLAGKGNKNAKKRALVAVARKLAILLHHLWVNGEVYEPLRNSKPLEAKAAA

SEQ ID NO: 512243 - protein, 340 aa, unidentified
MIGSTKFFIGIDVSKPYFDVSLMGVISHVKQAIETARFENTAPGIKVFEKWLKSHSVSFDENSLVVIENTGIYHRLIWSFCSKKHLPIHIGNAAHIKWSFGIARGKNDKIDSIRLCNYAFKESDSLKATAPLDPVLLHLKDFISTRTKLLKQITGLRVSIKELGNVNEKPHQKLIEKTLKSAIDGIAKSIRNIETEIKKIIEVNQAFKNNYRLLVSIPGIGHITAIYLIGCTANFAGSPSGKQLACYAGVAPFEHSSGISIKGKTRIHRMANKELKKLLHLCALSAIQYNQELKTYYHRKKDEGKHSMAVLNAVRNKIILRVAAVVKSQMPFKNNYKIVA

SEQ ID NO: 512244 - protein, 419 aa, unidentified
MSKERRKVCGIDVHKSFLVATILNRDGKHETRKYQQDVESLLELRKWIQIEQCDSVAFESTGDYWRTLYLVLENVVPVTVANAHHIKHVPGKKTDITDSRWIAQLELNDLIEPSRIFSGADYDLRSLTRSRELLVQNRTELKNKIHHLLDAAGIRLSSVFTDMFGKSGSIVLKGILNNQPFEEILESLPKKMKGRAEAISAILPATIPQTTLILLQSYVKLVDDLTVEIKLIEGRIREALAVKSRELQILTSVPGIGFIGASTLIAEIGNVRDFENADKLAKWAGLTPAVYQSANVTRMGSITKQGSRHIRWILVEIAHVAIRSPGRIRSFFERLLPKKGFKKAIVAVARKMLRIAWHLLIHDELFVDDYPRSKSVKFPKLPKKIQSFGIGRIVELLSKASEVIIKDSSQDLLRLDLGD

SEQ ID NO: 512245 - protein, 318 aa, unidentified
MTNITYQFNIGVDIAKQKLDVSFSDQRGVSFENNLAGFKLLLKEIENKSQTRVVMEATGGYEKPLAHFLQGQGVAVSIVNAKRVRDYAKALGLLAKNDVIDAKVIRLFADAVNPKLLSAASDTQQALDAQVHRREQLVKQRAMEKQHLETVGNKEAVRSIKRTITFLDKEIERIEKAIKALIKADSTLTEKVDRLSAIKGIGDITAMTLIADLPELGQLSNKEISALVGVAPFCHDSGTQKGKRTTWGGRTQVRSILYMAVLSAVQYNPPLKAFYNRLLMKGKTKKVALVACMRKLLTVANSMLRNNTEWNPNHGKLT

SEQ ID NO: 512246 - protein, 364 aa, unidentified
MNSVITNTELSSLEGTRGQFNGSKADIKLGIDVHQDFYVVVEQVGGSNPKPPQRFQKQAFLHWAAKLKQSGAQVHAVYEACGFGFSLQRQLSELGIHCYVVCPQKLDERNRRVKTDGLDAKALVLKLDRFVEGNRSALALVRVPSEEEEQRRAIHRQREQLVKARKQLEAQGRSLMVNHGIEPVQNWWKRRAFAALPVPHWMKELLGNSQPILLGLQQKIAALTIQLQSAADPKQPRGLGLMSSVIIDREIGDWRRFNNRRQIASYTGLCPGEHSSGNTRLQSCVTKHGNPRLRAALVELAWRLVRFQPNYKPVRKWRETLRKGALATGAARKKAIVAVARQLAVDLWRIKTGRLRAEQLGLTI

SEQ ID NO: 512247 - protein, 385 aa, unidentified
MRGTTRISQEYDVFAGLDVDKRSMAATFTTHAGLIRSVRMPSNVEGLVTHVRKHFPGQKIVFAYEAGPTGYGLYDGLAAHAYRCLIAAPSMIPRAPGQRVKTNRLDSVTLAKNLRGGQLQSIHVPAPLYRELRHLAQLRDTLVSDVVATKQRIKSLLLFEGLPFPPAPPAGQWSRAVQAALRALACAPSVRFKLDQLLDHLAFVAHQVRQTTREIRRFCRTDPELAQEIQYLMTVPGIGWIVASQLLARIGDWRELGPGRELSGFLGVVPRERSTGDTIVRGAITHTGDGRLRSKLVQSAWAAIRQDNELREFYRAVARRHPRDRAARVAIVAVARKLTTRIAAVLRQQRPYVVREEGPSAPLTPAETVPQGTTRRQAEPGASSS

SEQ ID NO: 512248 - protein, 447 aa, unidentified
MQVVYSRSCGLDVHKDQITACVLVLGEEGKRQVRIKEFRTYRKDLQRLKLWLYSCEVAHVAMESTGIYWKPVWHVLEGHFPLLLANPYPMHNIPGRKTDQKDAEWIADWLAHGLLKASFVPSRPIQELRDLTRYRVKLEQELNRVHNRIEKVLEDAGIKLGSVASDLLGVSGRRIIHALIAGEQRPGWLADKALSRLRSKTAELRLVLQGDVREHHRYLLRELMEDLERIENKVLRIEGEILKRTQTYQQQLERLDTIPGVDWITAWTILAELGDDMSAFPDAQHAASWAGLVPGSFESAGKRKSSRTRKGNRWLRRALSQSAWAVSHKKDCYLTASFYRCAARSGTKKAVLATAHQILIIAYHILRDGTVYQERGGDYFDRLNPERARRRLTARLERLGWEVQLKPVQTPVAATPPRATPGTTPKTRKRGRPCKCAERGTACKHST

SEQ ID NO: 512249 - protein, 347 aa, unidentified
MLIIGCDFHPGFQQVAIFDNLTGEIQEKRLQHRAEAEQFYRGLAGQEVRVGMEACGHYPWFERLLAELGFELWFGDAAKVRASVVRKQKTDRRDAEHLLDLLRENRFPRIWVPSLEVRDVRQLLVHRHKQVQARTRTKNQLQAMALSQGVQKKYKLWTKAGREELEQLPLLPYAAQRRKQLLQSLDGLEAEISELDRRVADEARQRPEAVRLMTHPGVGPVTALALVLTLGPADRFESAKQVGSYFGLIPSEDSSGGKQRLGRISKQGSSFLRFLLVEAGQTAARLDPQLKRFYRRLAARKNRSVAKVAVARKLATRLYLMLREDWTYTQLCQAVMQVSPSHSVAGQ

SEQ ID NO: 512250 - protein, 347 aa, unidentified
MTKIIRIGMDTSKQIFQLHGVDEAEQVVVRRKLKRRELLEFFRKQAPTVVGMEACGGSHHWARELQRLGHEVKLMAPQLVKPYVSRGKNDAADAEALCEAMSRPKMRFVPVKSAESQAALMLAGLRDRLVRNRTQLANAIRGYAAEFGLIAAKGKAKLEPLLRRLQADETVPALARELFAEQAKEYAQLEAQLAAIDAKLMAWHRANALSRQLARIPGVGPVIASLLVMKTPDPHAFRSGRHFAAWLGLTPKDHSTAGKLRLGVITRAGDEMLRSLLVVGATAVVWQVRRGTGRRPSPWLVELLKRKPPKLAAVALANKTARIAWKLMTTGEIYDASRALPATPIAA

SEQ ID NO: 512251 - protein, 344 aa, unidentified
MNYKLISIDLAKTVFQVAAFNPDNTIAFNRKINRPALLDMLRQYDPTLVVIEACYSANYWGRAIEKLGHTVKLIPVRMVKAMLVGNKNDANDAVAIGETASRPKVSLLRPKTVEQQDIQSLLRICERLVENRTANCNQLRGFLAEYGLIVAKTRRQLMLAIPLILEDADNELSTVARGFIQQLYEFQLYLNEQIDQVAQDILALAQAMPQYPLLLTIPGVGPIVASTLLASINEVNDFKNGRQLAAWLGLTPSQYSSDTTNRLGKITKRGNQTLRRLLIHGARTVVNWCDKKDDSLSLWLQRLKQRQHVCKVTVALANKMARMVFVVMSRGQAFDMNKACKLAA

SEQ ID NO: 512252 - protein, 438 aa, unidentified
MSNKVIFNLDDLFISVGIDVGADFSWMSIALPNQQFVGKPYKILHSSIDSLTTAVSKIKEAEELYSLESRIFLESTGIYHYPLFCYLRDKGFNCSVINPIITKNSTNINIRKVHNDRFDSKKVALVGLKPDLKVSLMPSDLALNCRNLCRKYYYLMDNRSAYVNKLQGELRMAFPQYLGIFSKVTINTSLTLLETYTSPSAFIEADKQEIIDSIKSTARFGLTYAQNKYNAIIRAANEANEFGYIIDSNIKRIRLYISFIRKYDEEINSILEAMHELVNANEDTNFVKQIHLIETFKGAGFLSAVSLMGEIGDFSAFSKPKQLFAYFGLDPAVKQSGKFEGSKIQMSKRGSAVARRVIHTLTLQSIGTSHTGEAKNPVLRDYYRKKCESKPKLVAMGAVSHKVCNMIFAILRDNKPFEIITPQEHIQQYNAAKYDIAA

SEQ ID NO: 512253 - protein, 403 aa, unidentified
MFYLGIDVAKKSCRYLLLNEEGEKVKSFSLDNNHQAFQNLLERLQALAIPKENLLIGLEASGGFWENLYTHLKENGFSVVLLNPYHTKKFREALAKKAKTDDIDALVIAQLLRTGEYVQSQVAEELIQSLRELTNLRYELIQERKNYQRQVYALLAIIFPEFEKTPLKNPFATASTAILQKFPTAKDLAQAKPKQIEKIVRAIPGNNLHLQEIETLIKTAQTSIYSGRAKEARATSLRILLGHIQNLSASIEKLEEEIKQLLAPQGPKDSFPGENLLTIPGVGDKTMAAVLSYLGTNGASFSTSTKAIGYVGYFPKIHQSGQTYRDNTICKRGPKLLRWALYMAAVASLKHNPEMRTIYHKKISQGKTEKQALICVGKKLLQIMLAMLKSGEPYNPTKVFVNC

SEQ ID NO: 512254 - protein, 391 aa, unidentified
MSQYFVGIDISKYKHDCCIINAADQSIVAKFTINNDRDGFNELLTSLQSLSTPENIKIGFESTAHYALNLELFLEKAHHSFMEVNPVLISEYKKSTSLRRTKTDSVDCESIARWLMTVEYKPHSKGFYHAYSLKSLTRLRDRLIRQRSFYLVKITNVLDHTFPEFKPFFQERFSKTAIYLLENYGSAEKMAHMNSASYDNLRRISRGKFSPQKFIELKALATNTVGVNNSIFDTELNCLLTLYKEAVKQISILEAQITKLIEEVHPHYMSIPGIGPISAAVIYAEYGDISNFSSPAQMLAFAGLEPGINESGTESHKGRMVKRGSSQLRYVLMNCALPLIRFDVTFATYYAKKRSEGKPHRVAISHVTKKLVRVIFALERQNTDFVSTSLR

SEQ ID NO: 512255 - protein, 430 aa, unidentified
MGLIVPTTIHPEREDQPLPYEWFVGIDWGSQQHQVYVLDRDRRRVGERVVDHDGASLARLADWLWTLSAGQPQRVAVAIEVPRGAIVDGLLERGFHLFALHPKQLDRFRDRHSVAGAKDDRRDAFVLADSVRTDQPSFRRLQLDAPQLLLLRELSRAEETLLEEFRRSANRLRDQLHRLYPQMLQLCSAADAPWLWDLLDLAPTPAHAALLSAEQVQRVLKAHRLRRIMAPEVLACLQAPALPVAPGAAEAAQAHCGFLLPCLRVLAEQLRACGQQVDAMLRPMADEPGAGERPSDVAIVLSLPGVGRKMTAWLFAEAAQPLAERDSQVLRTHSGVAPVTKHSGKRRLVVMRRGCNPRLRHALYHMARVAMQRDAHFSSVYTALRAKGQRHGQALRTMSDRLLRILVAMLRNGTCYDASRIRRESAVQMG

SEQ ID NO: 512256 - protein, 369 aa, unidentified
MQNTIFVGLDVHKATISVAIAGEERGGEFRHWGTINNRADDVRRLAEKLGSGGRQLHFCYEAGPCGYGLYRQLTDLGHDCVVVAPSLIPVKTGDRVKTDRRDGIMLAKLHRAGELTAVWVPDAAHEAMRDLVRARATAVRVLGKARQHLQGFLLRHGRVHAGKKGWTVVYRRWLTTIRFEHPAQQIVLQDYIHAVADAEARVERLTKQIAELLPRWSLAPVVEAVQAMRGVAFVVAVTVVAEVGDFSRFDNPRQLMAYLGLTPSEHSSGASVRRGGITKAGSSLARRALVEGAWSYRMQARVSRKLHDRIEALPQAVRDIAWKGQLRMCQRYRRLMAAGKPKVVATTAIAREMVGFIWAIARTVTPAHA

SEQ ID NO: 512257 - protein, 435 aa, unidentified
MQEVSDEPLYRDRVCGIDIGKAGMTATIRVPSDGNPARRAAETRGFGTTRREVLALADWLRSWQVPAVVMEATGDYWKGPFYRLEAEGFDCVLADARQVKHLPGRPKHDPGDSRWLAACFERGAITPCFVADPEFRVIRLHTRYRRDLTQERSREKQRAEKLLESAAIKISSVITDLHGVTGRDIMDHLIAGERNPKTLAQLARRRARRKISELEAALEGAEFFTPAHAALLAAMLGRIDRVNAEIARLTEVIEALLAPYEEQLQQAEGMPGWGRRSAQDALAETGPDMSRFPTGAHLASWAGRTPLDNQSGKHHGKAKAKKGNRYLAAVTGETAIAAGKTQTREGARYRRLARRRGKAKAQVALGNTQMHVYHKLLSNPGMRYHDLGPDYYQRQAGIRRQIAHHVGKLGALGFEVTLCRIPEPDPAGPPATQAA

SEQ ID NO: 512258 - protein, 354 aa, unidentified
MIIIGADYHPAFQQIALVDSETGEWNELRLEHREGAEKFYRDLAAQGMKVGVGMEASGHARWFERLLAELHFELWIGDAAEIRSKRVRKQKTDRQDAQLLLRLLLEDRFPRVWVPSWENRDLRQLLWHRHRMVQTRTRLMNQLQAVALNEGLRRKKGLWREAGRKQLESFRLAPWASRRRQDLLELLDRLNPTIAELSAAIEGEVESCPEAQRLRTHPGVGSLTALAFVLIVGEAERFQCGKQIASYLGLVPSEESSGDRRRLGHITKQGNSLLRFLLVEAAQVTVRSDPEWRSKFFHLALRRGRKIAKVAMARRLAVRLYWMWRKGWDYEEMKKFGSHAGQPGHRHGVQQNTE

SEQ ID NO: 512259 - protein, 400 aa, unidentified
MLSVGIDVSKEKSTVCGMRHLGEIVFGPFEIAHTESDLSELARMIVRLDDDTRVVMEATGIYHLPVATFLREQGLFVTIINPYEMKVYRSQDIRKVKTDKRDSMVIANYGVDKWINLREFTPQEDVYAELRLLGRQYRFYMESRIEQLLNLTHLLDYTMPGLKSCFSGWSEYSGKDKLCDFVEEYWHYDNIIKFSESKFVERYQKWTKKKGYQFSETKAVQIYRLAKEGIPTVPSNAPSTKMLLLEATKALREINSALFAILTRMKELAKTLPEYPVVRAMSGVGDVLAVKLMAEIGDVRKYHSSKSLVAYAGIDPPPYESGKLIGTNRHITKRGSSTLRKIGYEVMRCVKANGRSEDDPAVYDFMLKKESEGKAKKAAKIAALNKFLRIYYARVLEVYA

SEQ ID NO: 512260 - protein, 355 aa, unidentified
MASNSLSSPSITVGLDLGDRSSHCCVVDAAGSVVETGRVRTTPEALRRLFGAHPPGRVVVEVGTHSPWVSRLLAACGHEVLVANPRKLRLIYASGTKTDRLDAEALARVGRLDPQLLAPIQHRGIAAQTDLALLRSRDCLVRARTQLINHVRGTVKAQGSRLPSSSAPAFPQKVAAYLPEPLRLPLQPLLATIDHLTREIRAADARIEQVAAERYPETARLRHVAGIGPITSLCFVLTLEDPTRFPTSRAVGAYLGLRPKQRDSGARAPQLRISKCGDVMVRRLLVSAAQYIVGPLGPDCDLQRWGRTLAARGGKNAKKRAVVAVARKLACLLHCLWLHGTPYEPFRAAGARAAA

SEQ ID NO: 512261 - protein, 415 aa, unidentified
MQTLVERGCGLDVHQATVVACLLIVLKNGQIEKQMRTFGTTTRELLALRAWLLSQGCTHVAMESTGVYWKPVYVVLETEGTLEIVVANAQHVKKVPGRKSDVKDAEWIADLLCHGLLRSSFVPPKPIRELRDLTRYRRKLVESQAAERNRLLKLLETANIKLASVATDVFGVSGRLMLRALIEGKANIQEMAELAKGLLRKKIPQLEMALEGKLEEHHRFLLKLQLERLEAAEKDLAVLEQRIQEKLQPYAAQLALLQEIPGVDWTLAAVIIAELGVDMKVFGNVSQLASWAGICPGSNESAGKRKSSRIPKGNVYLKTALVEAANAATRAKGTYLRDKFFRLKARRGYKRATVAVAHKILVAIYHMFSHNVCYNELGDLYLDNLNKHHLTRNLVHRLERLGYTVTLEPKAASAA

SEQ ID NO: 512262 - protein, 461 aa, unidentified
MKWLAQISKELPERYYVGIDIGYREHVAAGIALSTFMQGEERWKKAKAIHFASSQSGFEQLRKYLDGFSSDPQAFLIVLEPTGGYYGASLYQALLGSHYSALLVDNSTTRLMREKIFGNIPKTDEMDGRTMARIAYLHDIVGEEFALKPLQVLNADQEELLMLCRNSWKLNMTITRARNQFAQLIAVIFPELKFFFGGSVSSIVPVRLMAQYSSPSEIASADPDELYQVLWKARGYQHAKRIQELQNLARNSSGILPDPGRAWRLTWLTQFLLTNFELLAQLDKQIENLCTNHPNYHLLVGIPYAGPNTLGTILAATGEHTRFKNYRQYVAYTGYFAGLERSQTIDHTRMSRRGNRNLKRAYFQIVAPMVWFDPGDNSYKNLYKRKMAEGRAWYEAMPFACAALARHVYHCLKFQEPYQLEKAFGRALSLSALGQTKTAIQADLEEQFETMDAQLSQKDSI

SEQ ID NO: 512263 - protein, 341 aa, unidentified
MKHIGMDLHSTTTDACVRNGKGEIVLRRRQIPTTAVELVKFVVGIPGSKRVVVEECQMADWVTRVLKPHVDEVIRCQPQYNKLISESEDKCDKTDSASVSDLLYLNRLKHVHHPDLAYRTLREAVRAYWIASRELTRAKNRLKGFFLFNGLHETGDKIYSVRNRSEYLKKLSKLGRNVELARLLFDRMDQCRQLKAKHIRLVRESGKPMRKLVRLLKTIPAIGPIYAYTLVAYLEEGQRILNKRKLWRYAGLSLRKHESRDIGIRRASCSGSRLVKHVAMSAAATIACERSSNALSARWVKDIRGKVDPTLALRNLARKIVVIAQYLLRSKQEYSDERVKG

SEQ ID NO: 512264 - protein, 318 aa, unidentified
MNTNTLQNINVGVDTGKTQLDIYIRPLDIYFNVTNDEKGIKQAIRTIAKYHPERIVIEATGRLEMPFILACENANLPYVIANPLHIKKFSGALGNKAKNDRLDAALIAHYAEAIKPKLTQLKSENIRLMSDLVTRRNQLLSIQTMEKNRLQILPRTLASSIKPILTALKNQITKVENRIEKLIETCPDYQAKNEILQSVPGIGKIAAASLISNVPELGYITNKQAASLIGVAPITRESGSFKGKRMINGGRMQVRTVLYMAMMSAMQCNPVFKETYQRLLAAGKPKKVALIACVRKMVVILNSMLRDGCMWNTDSTKN

SEQ ID NO: 512265 - protein, 420 aa, unidentified
MNAETNKVEWVIGFDSHPDSFTAAIARGPTPAAAVIENVFNKLPMSRLETWAQKHTTPQDLLVLEASGNSFHVVRVLAKLNRRAVVVESGHLGKLKEAHANNDKISAIRIAKAYLAGTARLVWLPDLKTQERRDLLHMHRKAVKRTTQLRNRLRSYLSDNGVRLSKGTRLTQAETLDKIRKAHNWLPRQCQLIEGLLMELGHAQQQRQHWRALIAQEVLADPLLLSIVRLCGVREMVAFGLGAVVGDVRRFSHPKKLVKYIGLNPAFDESGKDKWTGGIGGHGRKDLRCLLIEAAQAILRCSKTALAQWGKRLLRRKSSVNLAVAAMARRLAVAAWYLMMGRWTTLEEIDQRLSQKIGKIISQLGTDRLKKLGKTRKAFREQICQSLKSGRQYVLDSNKKFITKSSPDCSLTSAQEYGLR

SEQ ID NO: 512266 - protein, 375 aa, unidentified
MIATTRPEMSVSEPTLYVAFELGKKEWKLAMTSGFGIAPWLRSVASGDWRGVERALAQGRARLGLPAAAPVVSCYEAGRDGFWIHRALQQRGIRNRVVDSASIEVNRRARRAKTDRLDALKLVMMLVRVCWGERRVWSEVRVPSVAAEAARQVSRERTALTQEQARLTNQLKGWLATWGATLPRRRPSGWWTTVRDWAGAPLPVEVQARLARAEARRAVLTGQIAELAGQQQAAVSAAAPASALRQLVQLKGVATTGASVLLDEGLVWRAFRNRREIGGFLGFVPTPYDSGESAREQGISRAGNNRLQSISIQLAWNWVRWQPVSALTLWYQKQFGMGKRARRIGIVAVARKLVIALWRYVTTGVVPAGAILKVA

SEQ ID NO: 512267 - protein, 340 aa, unidentified
MNQSMTIGIDLAKHVFFVAALDGSGKPPRRKKLRRHEVLSFLANHPGAVVGMEACSGAHHWAREIRALGHGVQLLPAQHVKAYLRGQKNDHNDALAIAEAVQHGRIRCVEIKTVDQQLDQSLHRLRQALVTEQTGLINRTRALLAEHGVDLPEGKHRFRQAVIAQLEDAQNGQPWRLRGLLGRQYQLFIALEQELAWYEREIKTKAAENEACQRLMSVPGYGPIVSSAFYGRLGSGQQFRCGRDVAAALGLVPKQYSTGGKTVLGGISKRGDRHLRALLVHGARAVARYAKERDDRPSRWVCSLIERRGYNKAVVALANKLARIGWAVVVRGQPYQAIAA

SEQ ID NO: 512268 - protein, 434 aa, unidentified
MWWNSQWLLYLTLKGVLTMKVVYQTCCGIDVHKSFLVATIIKTTSGVDPSYQKKRFSTFNNSILQFKNWLIENQCRDVCMESTGKYWVPVFNLLEDEMNVTIANPKWVKAVKGNKDDTKDSKWIGDLFRLGLVQGSYIPCKPIRILREFTRYRYKLTSCRTSEKNRYQNALTVCNVALDSVVSDIFGKSATSVIDYLIEQSGNSINHEEIASRLLRSLKKKSDSVIESIEGYQMTDPQKYRMRLVRAHLDYITSTINDIDTMLDSLIAPYENAVQLLCTIPGVDRNSAITVISEIGTDMTPFSNSKRLCCWAGLTPGSNESAGKKKSVRITHAGVYLKPALVQVAHAAVKSDKSPYYKQKYERIMKRRGKKRAIIAIDRMILTAIYQMLSTGEAWNPTDLYKTDMPEPLKEKQKEKAIKQAKKLLIREGILSES

SEQ ID NO: 512269 - protein, 352 aa, unidentified
MSNQDLFPNLTIGVDLGDKISRTCEIDAAGRIVKTSAVATTAGAMERYFGGRARCRVVLEASTHSPWVSRQLEALGHEAVVANSSEVYGRGRRKRRNDRIDAEFLARQGRADVELLHPIRHRSEEAQRDLEQLRARDQLVQVRTKLISHVRGAVKSLGGRISRCSAEAFAKQAARQLPDVLRPSLMPLLETIAELSRRIDAMERQVERIAEAHPEALHLQQVQGVGLMTSVAYVRAVEDPQRFRHSRQAGAFFGLVPKLDESSSSSPQLRITKAGDPLVRRYLVGAARYILGPFAGESDLRRYGEAIAARGGKNAKKRAAIAVARKLAVLLHHLWVTNAVYDPDWMQKSRAA

SEQ ID NO: 512270 - protein, 347 aa, unidentified
MKITRIGLDLAKNVFQVFGVDAHDKRVLSRQLKRKEMQAFFQTLPACLIGMEACASAHYWAWVLTEMGHTVKLIAPQFVKPYVKGNKNDANDAEAICEAVSRPGMRFVPVKTIEQLHIQARHRVRSELIKQRTAKANQIRGLLAEYGIVIGLGVRCLRHRLPEILEDAETRLQADFRLLLMGLRDDLVYLDERIKTEDKAIEALARTHPSAQRLQQLRGVGPLVATALIAALGDGRQFTHGRQASAWAGLVPGQHSSGGKQTLLGISKRGDTYLRTLLIHGARAALRAARDKTDPLSLWLQGLCARRNKNVAAVALANKTMRLAWVLLRREEDYDPLHGHATPPQPA

SEQ ID NO: 512271 - protein, 457 aa, unidentified
MRKKKEKIQKVGFHEQLRPMRTDGAGIDVGASEIWVEVGIENDADPVKRFQTFTADLNRMAKWLQQCGVRSVAMESTGVYWIPVCQILEDHQVDVVLVNAAHAKNVSGRKSDILDCQWLRTLHCYGLLSASFRPARDIGVLRTLMRHRQMLVECAASHVQHMQKAMTQMNLQLHHVISEITGLTGMRIIRAIVAGERNPARLAELRHETTKADHATIAKALEGDYRSEHLFTLKQCLELFDDYQKRIEQCHEQIAEHLRSLESKVDPDSLKPGRQRKRKRRNQPGFDVRGQAHRISGVDLTQVDGIHETAALGLIAEIGVDMSPWKTEKHFASWLTLSPNHKISGGKVLQRSTRKSASRARNILCMSAQALFNSRSALGAFSRRLRTRIGAPKAIVATAHKLALLIYRMLKFGRDYVDIGQQRYEQQFKERTMKSLARKAKELGFQLVPNAHEQAVP

SEQ ID NO: 512272 - protein, 399 aa, unidentified
MIYVGVDIGKFNHAAAAVNEAGECVMPPRFVTQDTGGFASLCGALAELGGAGAVVVGMEATGHYWRVLRHTLAEREFRVDVINPLITAREASADVRGRKSDKRDALAIANVTRKGGYNPAPGEQAETDTLKALARHRRALVARRSDAKHRLVAALDVVFSEAAKTLGDLYGASSLAVVRAFPSARLGAVANIRTLTSLFAKASAGQLGREAAEAFRTAAKHSVSLTMLNEGEEFVVKQIVDEIRAIEAQVDEVERRILTEPQPDAARILGSIKGAGKILPMAVAAELGDLSRFAGADMAKKVFAYAGSEPRVRESGKWQGRRKMSKRGSPSLRHALYLMAGTVRLHSPSFNEIYKRHIAKGKHHNVALSHVVRKIVEVMCGMYKTSTLFVPPQAEATPC

SEQ ID NO: 512273 - protein, 420 aa, unidentified
MTVYLERGYNCKEYQWFYKQYQNIYSKEIFMIYVGIDIAKDKHDCFITNSDCEVLFKSFTISNNRDGFETLFQKIQSVSDDLTKVKVGLEATGHYSYNLLGFLLDKGLPTYVINPLHTNLYRKSLSLRKTKTDKVDAHTIASMIMSDVNLKSYSDTSYHNEELKSLTRYRFDKVKERAKLKSSVSRLVCILFPELEKLVPTLHMSSVYSLLSEFPSAHDVASAHLTRLIHLLSESSKGRYGRDTAICFRDAARSSIGSHMPAKSLELHTIKLILELTSEIDEIEAEIKTIMDEINSPILTIPGIGYKMGAMIIAEIGDFSRFDSPDKILAYAGMSPSIYQSGQLDNCYAHMEKRGSRYLRYALYNATKYVCHWDESFGTYLAKKRAEGKHYNVALSHATKKLVRTIYAMEKSGQAYTNAA

SEQ ID NO: 512274 - protein, 394 aa, unidentified
MYYLGIDIGKNTHVASMIGDDGKPVFRAFSFSNTTDGGESLLAQLPDVAASDIVIGLEATGHYWLAVYSFLHDSGYKLHVINPIQTDGWRKGVEIRRRKTDAIDSLLIAELVRYGNFIEAQLPEESILSLKNLTRFRSYLVDSIGDLKRKVICVLDQVFPEYQSVFSNVFGKTSKEILLQFSSPSDLEDVSADTLAQLLAELSRKKLGIKAAEKLSSTASNSFGITFCRDSFTFQLRMLIEQIKYIESQVKDTEVEISSYMSELNSPIMTIPGIGKTTGAVILGEIGGIERFDAPAKLVAFAGIDATVLQSGEFEGTRNRMSKRGSPYLRRALYQAALVACTGRNPDPVLRDFYLKKMSEGKHHSTSIGAVARKLCYIIFAVLKENRPFEVRVT

SEQ ID NO: 512275 - protein, 414 aa, unidentified
MISPEIRCVVGIDIAKQSHVVCALEAPSGTVRHKASRLEATLAGYQVLRSWLETWGARDALLIGMEATGSLWEPLYDHLTQAGYRVLLLNPRQTSAWSSSMGLRAKTDGIDAQTLARGLLAGLARESTLPSEAVQALRTLTRARRDLIQSRTATRQRLHDELVTLFPEFVRFVSSLPGRADLGDAGVLAFLARYSSAQVVAQTPLEELAPAVTQVSQGRWGAEQAQALHALAAQSLASSRAVVARSLVARTLAQQLQELATHLTEIEQAIADLLKSDADGQRLQTIPGIGPQTAATIRAELGDITRFAGVDEVVAYAGLDPRTRQSGAFLGQKHLSKRGPGALRHALYLAAFVAARCVPEWHVRYQRLLDRGRAKKEAFAILARALLRVVYHLLRTGDAYDVSAFNQPSMSTAG

SEQ ID NO: 512276 - protein, 417 aa, unidentified
MELIHPRCAAIDVHKKTVVVAIRIAVSGNRAKSETRTFGTFTQDLLAASDWLEESGVTHVVMESTGSYWRPVYSVLEGRFELIVANAQHVKNVSGRKTDVKDAEWLSDLLAHGLLKASFVPEPALRALRDLTRGRSTLVTQRATLANRIQKLLEEANIKLGSVASDVLGVSGRDMLAQLASGQEDSTALASLARGILRKKTDDLQKALQGRMQPHQRILLRELLKQVESLDASVRTLEKEIDAYIGQQTTSPFEAAVSLLETTPGVGRTSAVIVVSEIGTDMTRFGSSDRLCAWGGAAPGNCQSAGRRLPGGKRHGNKNLMTCLVECAASAVRMKDTYYYALYRRIAPRRGKKRALVAIAHSMLRSFYYMISNGTAFKDLGADHFERANKQRIVNRLVKRLTDFGYEVTPPQETATA

SEQ ID NO: 512277 - protein, 322 aa, unidentified
MGTLSFCGIDVSKDRLDAMVLPEQQSSCMGNDPAGWAQLVEWLSDFSIPAIGLEASGGYERGVMRALLAAGLSVRQINPFKLRQFANASGVLAKNDRLDARMIASFIAVMPTRAAQRRTPGIEQMSEIVTVRRHLSDQKIAAENATKLLEDAMLQRLSRRRIAQLASDIAQLDNRLAEIVAADSALSRRYQVLTSMPGVGLVLACTLIALLPELGRMSRKQIAALVGVAPYDFDSGKLKGKRCIWGGRAPVRHVLYMAAMSAGNWNPTLKAFRHRLKTAGKVPKVTIVAVMRKMITTLNAMVRDDVAWADHLAGRRSAPTAR

SEQ ID NO: 512278 - protein, 323 aa, unidentified
MAQPVWVGIDVSGKWLDIGTHPQQQTIRFAYTDAGMMDLLAWLAARTVSGVAMEATGGIERTAAYALDAAGYKPRILNPKRVRDFAKGISPAKNDRVDACRIAHFAATVAGEPIERHQARERLDEMVSARQFLQHQLVAARNHARRLLVPAVRAEMALHIKTIRTRRTALERAIEAAIAADAAMCEDCERTARCLASGSVNGAGLVAWLPELGRLSAAKIAALVGAAPFDDDSGSRSGQRHIAGGRKALRNLLYMAAVSASQHNPVMKAFYEGLVGRGKLKKVALVAVMHKMLTRLNAMQRDRQPWNENHVGVRVQPPLTAPV

SEQ ID NO: 512279 - protein, 365 aa, unidentified
MTDGTTRFIGLDVHKETVTAAVAETSGPPALVGTVRNNREEIGRLIHRLAQGAQLVSVYEAGPTGYELHRQLVGLGVSSQVVAPTLTPARPGDRVKTDQRDALALARLLRSGDLTPVWIPDLEHEALRDLVRACEDAKVDLLRARHRLTKFLLRHGISAPGNFRPNTTRYDSWLNTLNFEPLAQQLAFEDYVGSLRAAEDRRRRLHAGLQQCAEQSSLLPLIAAIQCLRGLAFHSAATIVAETGDFTRFPTARQFMGYTGLTPSEHSSGQTRSRGHITRSGNAHLRHILVQAAHNARHRPNTDALRLRLLDAPPDVVQLAHAAQRRLYRRYWHLQRRVGANKAVTAVARELAGFVWAVGRRMASA

SEQ ID NO: 512280 - protein, 428 aa, unidentified
MAKLKIVYPICCGVDVHRDFLVACIASTNSQGVTTYESNRFSTYTGQLREFGQWLLDHDCNDVCMESTGKYWFPVHNILVPLGLNVVVSHPKFVKAIKGKKTDKKDAMWIADLFKHDLVRGSFIPPEDIRQLRDLCRYWAKLTYCTTGEKNRAQNCLTVSNFKLDDVFSNVFGKSATAIIDQLLIHMGEPFDVKPYINKRCKTPIDVIQTAVDGAFSTEQAAKLQIIRRHINGLAELKSMLEERIFNLAKKYQSQIDLILTVPGIRDPMTAIRIIAEIGVDMSVFDSAKHLTSWAGLAPQNNESAGKKKTTRIGKAGAYIKPLLVQIALAASRMKDFPEISGKFQILKKRRGGKKARIAIARRILVAIYHMLSKNEPYNSSLYIKAENIPEFRKVTTEQAFAILRNQGFFIMGVDSNPSVSDFTPASS

SEQ ID NO: 512281 - protein, 449 aa, unidentified
MSDEPRPTPAAATVAITVAAATPDDPGNDAFAQLTHYGGFDWAKAEHQALVVDAQGRIVLSLRFANDADGWAHFRRKVASFPRLGVAIETNCGPAVERLLDMGLALYPLNPKAAERYRDRKAPAGAKDDELDAWSFADALRTDGHGWRPLLAQDPLTTELRLLCRDEITLIEQRTALVNQLKAALHEYYPAALGAFDDWTGEGPWRFVITFPSPEALVKAGRRKHERFLHAHKLYRPQTAPQRLSTFAAAMGFANPNAAVTRAKTLLAVTLARQLCSLESQLREYRARIVELFDDHPDHDCFGSLPAAGEKIAPRLLSELGANREVFATAQALQSYAGTAPVTRQSGRSRFVTVRRACNKTLRATIHLWADLSRKGCVWADAYYQKKKADGMNHAAALRCLGQRWVKILWTMWQTRTPYDEATHTRNQVRHGSWIIGLLPGDPVTTTAQ

SEQ ID NO: 512282 - protein, 418 aa, unidentified
MGKRKNRVCGADVHKDIIVATIQDSDDTEFQEKFGTTSIELGRFRDWLIAHNCEQVAFEATGVYWFPVYDALSPSIDTIVANPWMIKGIPRNKSDTLDSKWIAGNCLDGKIKRSRVLPKDGRDLRTLTRARSAYTKTRTQLRNRIHKYLALCGIKLSSYISDIFGKSGRYILDGLIESKDIDTIMDGIPSGKVKKKREPIKASLGNGLDDVSRMLIKDTLELLDHLDEKVSDTSLEILGRLQERARDLAIVMSVPGIGFVSASIILAEIGDYHDFQKSEQLVKWCGLAPGLNESAGKKSPCGITKQGSKHLRTILVEIAQVVAKMSKNNLSSFFHRLRARKNYNVAITALARKLISIIFHLLINQELYQEDNCATVKTKPIKKDLLCLSKEEQFKDSVAAIVDAFYYFKKKSSLEGGG

SEQ ID NO: 512283 - protein, 341 aa, unidentified
MPVVTVGIDLAKDVFAVHGVDEGGKAVLIKPRVSRNQLLTLIAQLPPCLIGMEACSGAHHWARMFQQYGHTVKLMAPKLVAPYRMSGKRGKNDAADAAAICEAVTRPSMRFVPLKDEHQQATLCLHRTRQGFVEERTAIYNRIRGLLSEFGVVLPQSPERLRRDIPTHLDALPGWARRCISDLLEHAGNIEARLAEYDRAISEIARDDERSRRLMHLRGIGPTTASALLASLGAGHDFRNGRQVAAWIGLTPSQYSSGGKERLGAITKTGDAYLRNLLILGARSVMASLGDKQDRFSRWVRSLVERRGYWRAAVAIAAKNARMAWATLKYGDAFKALPATA

SEQ ID NO: 512284 - protein, 332 aa, unidentified
MSHCIGIDVSKATINVHISKNSQDLVLVNSIKGFKSLFSKLKKIYKKEIENIVFIFEPTGSYSEALRKYCSQQNIKCFIINPKQFSNYAKALGVEVKNDVEDARVLSKAIHLAKDGQVQVPVFNEDVEHIKELMSFYKFTKKQTTQQKNHLESLTSKDGDKFSIKELVSSIKESKKKELRIIDEVQTLIDSNDEYKAAYDNIISIKGIGQIGGIVLFHLFLKYPDANQRQITSLAGLNPVYRQSGTSVQSKSRISKTGSVLYRGVLFMAVFSAVQHDKNFKAFYERLKEKGKHSTVAQIAVMRKMILTAHSLYKNNKKYDENFNSKENLIVK

SEQ ID NO: 512285 - protein, 364 aa, unidentified
MERVYERCAALDVHKAQVTACVHVPDRQGKRAELCAEFSTMTAELLALRDWLKGLGVTHVAMEATGVYWKPVYYLLEDDFELLLVNAQHVKNVPGRKTDVQDAQWLCQLLEHGLVRSSYVPPKPIRELRDLTRYRKSLVWERAREANRLHKVLEDANIKLDCVASRPFGASGKAMLKELCEGNNDPVALADLAKGKLRAKLPALHQALEGRFRDHHALLVGHLLAHIEYLDQTIAELSEEIEERMRPFEHKRELLCTIPGVAERTAEVIIAELGPDMERFPTHRHAASWAAICPGHHESAGKRHSGRTRKGDSWLRTALIEAAQSAAGRTKDTYLNSQYLRVKRRRGHKKAIVAVAHSILVAAY

SEQ ID NO: 512286 - protein, 323 aa, unidentified
MKKHITKCAGIDTGKRKLDVALDGRASQVQVANTKDGHSELTEWLRRHDVGRIGIEASGGYEQAVVGQLRHDGFEVVVFQPAQVRAYAKFHLQRAKNDKLDAALIAACTAAAKKIHAPPDPRLAAMAEQQTLIDQITDQIARFKNYRESSRDPQLRQFWEAEIKRFRGLFRQQFKQLLAAIRRHRDLSDRLDLIASVDGIALRTAAAILVRLPEIGRLSREQVAAIAGLAPYDDDSGDHVGIRHIEGGRERLRRSLYTATLAASFHWNSELIALYGRLRAAGKVHKVAMVACARKLLIFANAVVARGTPWQSGAQHASKLQPV

SEQ ID NO: 512287 - protein, 338 aa, unidentified
MERPYVGIDLHRRRSVIYTMDAAGEKHDCVRIANDPVTLLEEVSRAGSDAEVVIEATYGWYWAVDLLQDAGFRVHLAHPSGNDWGNRRVKNDERDARDLADLLRLGRLAEAWIAPPAVREVREVVRYRAKLVQLRSGLKAQVHAVMGKEGVLPTLTDMFCPAGQRELDRMELGDVYVIRVESLRDLIEVYDREVAMVERKIHQLLRGDRGYEAIQALNGVGRTIAAIFVAEIGDVHRFPSPESLCSWAGLAPRHRESDTKVVRGGITKMGSRLVRWAALEAIVRYHGGSWLQRDFHRIANRRGKNKARVAVARKLLTLVYYGLRDGEIRSLRADRQAA

SEQ ID NO: 512288 - protein, 426 aa, unidentified
MSRYVGLDVHKRTVVVSLLDSEGKLVLRSTIACTRSAIEKFAKEKLEPTDVVALEATTNSWTVAEILEPHVARVVVSNPLKTKAIAESTIKTDKVDSETLARLLRAGFLPEVWHPSAEFQLLRQLTVFYASLINDRTRVKNRLQSLFHRRLIQCPVTELFSRAGLQWMDSLQLSEHDRLILELARQQVVELNDEIQEVGHRVAALAQENHSVKLLMTLPGVSIMTAACLVGSIGDVTRFRDGDHVASYFGLVPRVKQSADHCYLGPITKTGNNQVRKMLVLAARNLRSHPGPLGAYFRRMAKRKHINVAATATARKLVTVAFLILKNGEPYRYAQPGTTSQKFGQLYVLANRRRREAVRIEPEQNEPVPPTGCRIRRQPAIDQVLARDGLPPIQWESLPKGEQLVIRRYHEYIDGIRKPKAIVGKG

SEQ ID NO: 512289 - protein, 343 aa, unidentified
MQTVTTIGLDIAKSVFQVHGIDAAGQVVIRRQLKRRYVLAFFQKLPPCLIGIEACASSHHWSRELQALGHTVRLMPPAYVKPYIKRQKNDATDAEAICEAVTRANMRFVVTKTPEQQSGLVLHRARHLFIRQQTAVINAIRAHLAEFGIIAPVGRHGVEELLNVVADPNDKRVPEIARACLLAFGAQLRRLKEQILEFDRMIRAWHRSSETSRRLDDCPGVGPALATALVATVADPKSFRSGRNFSAWIGLVPKQHSSGGKNRLGSISKQGDRYLRGLFVAGALAVIRYAKIHGTKHRPWLTALLARRPTKVAAIALANKIARMAWAMMAKGERYKEPIALAA

SEQ ID NO: 512290 - protein, 337 aa, unidentified
MEQITKNEIYKHYIALDWSKVNFALASIRDTGTKYKVVEHPADLKLLKQCLKQLPGKKILTIEETTTAQWLYVELKDHVDKILICDPFHNSLLQSGPKNDKIDARKLCTLLRNGSLKEVYHTTDELYKLRKLVSCYDDFVTASVRMKNQRSSMFLSEGKDHKKEKILSGNTINKFITGKQNSAIEHIELVRKEFEQLFGKIQKENQTVKQLVKVSGIGAKLAVTILAVVTDSNRFENKYKYYAYCGIVKHKKDSGKKNYGKRDARHSRILKRCYKTAANAAIGGNNDIREYYEYLLQNNYSLEDARNQIARYIAKVTYAMMKHKTDYRPYQWREGKQ

SEQ ID NO: 512291 - protein, 310 aa, unidentified
MGQTFIGIDVAKDRLDVHVRPSDEAFTVARDSEGLAKLMERLRPLDAYLVVVEATGGFEQTLAAALVSEGLPLAVVNPRQIRDFARATGQLAKTDALDAKAIARFAEAIKPEPRPVPDDQARALGELVARRRQIIDMMTAERNRRRQLSSRRLIKSVDRLLAVLQKELTELEGDIGESIRGTPAWRERDELLRSVPGIGDVVARTLIADLPELGRLDRKQIAALVGVAPLNRDSGRMRGRRTSWGGRAKVRSALYMAALVASQRNPVLKAFYQRLISFGKPKKLALTAVMRKLLTILNAMVRDNKRWQNA
